United States Patent Application Publication US 2007/0277269 A1 - sequence listing, part 3

SEQ ID NO: 5872 - protein, 260 aa, Glycine max
  misc_feature: Ceres CLONE ID no. 1073766
  misc_feature: Ceres CDNA ID no. 29191763
  misc_feature: Useful for making plants with modulated growth and phenotype characteristics
  misc_feature: null
  misc_feature: The sequence is a functional homolog of  SEQ ID NO 1777 in the  11/479,226 US patent application
  misc_feature: The sequence is a functional homolog of  SEQ ID NO 2350 in the  10/374,780 US patent application
  misc_feature: The sequence is a functional homolog of  SEQ ID NO 342 in the  10/412,699 US patent application
  misc_feature: The sequence is a functional homolog of  SEQ ID NO 344 in the  10/412,699 US patent application
  misc_feature: The sequence is a functional homolog of  SEQ ID NO 782 in the  11/479,226 US patent application
  misc_feature: The sequence is a functional homolog of  SEQ ID NO 786 in the  11/479,226 US patent application
  misc_feature: The sequence is a functional homolog of  SEQ ID NO 789 in the  11/479,226 US patent application
  misc_feature: The sequence is a functional homolog of  SEQ ID NO 790 in the  10/225,066 US patent application
  misc_feature: The sequence is a functional homolog of  SEQ ID NO 797 in the  11/479,226 US patent application
  misc_feature: The sequence is a functional homolog of  SEQ ID NO 801 in the  11/479,226 US patent application
  misc_feature: The sequence is a functional homolog of  SEQ ID NO 805 in the  11/479,226 US patent application
  misc_feature: Useful for making plants with modulated drought sensitivity
  misc_feature (6)..(243): Pfam Name: 14 PFAM Desc: 14
  misc_feature: Homolog of GI Number: 13447104 NR Desc: GF14 omega
  misc_feature: Homolog of GI Number: 21618266 NR Desc: 14
  misc_feature: Homolog of GI Number: 487791 NR Desc: GF14omega isoform
  misc_feature: Homolog of GI Number: 21536593 NR Desc: 14
  misc_feature: Homolog of GI Number: 16974511 NR Desc: At1g35160/T32G9_30
  misc_feature: Homolog of GI Number: 47558857 NR Desc: 14
  misc_feature: Homolog of GI Number: 21554273 NR Desc: 14
  misc_feature: Homolog of GI Number: 1256534 NR Desc: GF14 chi chain
  misc_feature: Homolog of GI Number: 1361987 NR Desc: 14
  misc_feature: Homolog of GI Number: 8099063 NR Desc: 14
MAVSAREEFVYMAKLAEQAERYEEMVEFMEKVSAAVDGDELTVEERNLLSVAYKNVIGARRASWRIISSIEQKEESRGNDDHVTAIRDYRSKIETELSGICDGILKLLDSRLVPAAASGDSKVFYLKMKGDYHRYLAEFKTGQERKDAAENTLSAYKAAQDIANAELAPTHPIRLGLALNFSVFYYEILNSPDRACSLAKQAFDDAIAELDTLGEESYKDSTLIMQLLRDNLTLWTSDMQDDAADEIKEASAPKPTEEQQ

SEQ ID NO: 5873 - DNA, 593 bp, Glycine max
  misc_feature: Ceres CLONE ID no. 1073816
  misc_feature: Ceres CDNA ID no. 40351629
  CDS (69)..(407): REFERENCED BY SEQ ID NO: 5874
gttttttttgattattccggtttgttcttgtgccatcgcgtccgtctcaggttagcaggaggcgggccatggcgccgtcgcagcccaagtcagggctcttcgtgggcatcaacaagggccacgtcgtcaccaagcgcgagctgccgccacgcccgtccgaccgcaaggggaaaggtaccaagagggtgctgtttgtcaggaacttgattagggaggttgctggatttgctccctatgagaagcgtatcactgagcttcttaaggttggaaaggacaagcgtgcactcaaggtcgccaagaggaagcttggtactcacaagagagcaaagaagaagagggaggagatgtcaagtgtcctcaggaagatgaggtctggtggtggtggtgccgcggacaagaagaaatagattttgcatgttggtgaaattctatttatctcaacgctttgccccgtatttccatattatgccaagtttgtagcctgtggcaattggatacgaatgtagcacattgcacttcaagttcagagtaaaactatgaatttttgacactatatttgcaattggattgacatggtaaaaaaaaaaaaaaaa

SEQ ID NO: 5874 - protein, 112 aa, Glycine max; identical to SEQ ID NO: 5538
  misc_feature: Ceres CLONE ID no. 1073816
  misc_feature: Ceres CDNA ID no. 40351629
  misc_feature (5)..(103): Pfam Name: Ribosomal_L36e PFAM Desc: Ribosomal protein L36e

SEQ ID NO: 5875 - DNA, 713 bp, Glycine max
  misc_feature: Ceres CLONE ID no. 1073855
  misc_feature: Ceres CDNA ID no. 29191398
  CDS (143)..(484): REFERENCED BY SEQ ID NO: 5876
aaaaacataagttgcatactttatccgaatctagggtttcattcttctcttctcctctcccgataatcagatcctcgaaactctactcctcgaatcaggtctcagtttctgtgtagtttgcccatcagatcaacaaagtttcatgtctgaacttgattcccaggtccctactgccttcgacccgtttgctgatgcgaatgctgaggactcaggtgcgggaacaaaggagtacgtccacatccgtgtgcagcagcgcaatggtaggaaaagcttgacaactgtccaggggctgaagaaagagtatagttacagcaagatacttaaggacctcaagaaggagttttgttgcaacggaaccgtggttcaagactctgaactcggacaggttattcagcttcaaggcgaccagaggaagaacgtctccacgttcctagtccaggctggccttgtgaagaaggataacatcaagatacatggtttctgagctgcttgtggtgcaatttccctaggccgtttactgctctagtgaatcactactgttaccctccccttccaaaacatttcttcaactttcatcatctttgattctcttgttgctgttttctctctattcaccctttggtatgatactaagagactaccatcttatgtactttggctttgccacttctttaatactatgagaatgttaagaatcaaaaaaaaaaaaaaaa

SEQ ID NO: 5876 - protein, 113 aa, Glycine max
  misc_feature: Ceres CLONE ID no. 1073855
  misc_feature: Ceres CDNA ID no. 29191398
  misc_feature: The plant flowers significantly earllier than wild-type.
  misc_feature: The plant is abnormally small.
  misc_feature: null
  misc_feature: Useful for making plants with modulated biomass
  misc_feature: Useful for making plants with modulated flowering time
  misc_feature (25)..(106): Pfam Name: SUI1 PFAM Desc: Translation initiation factor SUI1
  misc_feature: Homolog of GI Number: 21593860 NR Desc: translation initiation factor
  misc_feature: Homolog of GI Number: 29028784 NR Desc: At5g54760
  misc_feature: Homolog of GI Number: 6165638 NR Desc: translation initiation factor nps45
  misc_feature: Homolog of GI Number: 4585973 NR Desc: translation initiation factor
  misc_feature: Homolog of GI Number: 3334346 NR Desc: Protein translation factor SUI1 homolog
  misc_feature: Homolog of GI Number: 20218809 NR Desc: putative translation factor
  misc_feature: Homolog of GI Number: 53791638 NR Desc: putative translation initiation factor
  misc_feature: Homolog of GI Number: 2668740 NR Desc: translation initiation factor
  misc_feature: Homolog of GI Number: 21070377 NR Desc: translation initiation factor
  misc_feature: Homolog of GI Number: 50760847 NR Desc:  similar to Eukaryotic translation initiation factor 1
  misc_feature: Useful for accelerating flowering time
  misc_feature: Useful for increasing chlorophyll and photosynthetic capacity
MSELDSQVPTAFDPFADANAEDSGAGTKEYVHIRVQQRNGRKSLTTVQGLKKEYSYSKILKDLKKEFCCNGTVVQDSELGQVIQLQGDQRKNVSTFLVQAGLVKKDNIKIHGF

SEQ ID NO: 5877 - DNA, 850 bp, Glycine max
  misc_feature: Ceres CLONE ID no. 1073880
  misc_feature: Ceres CDNA ID no. 40351630
  CDS (64)..(606): REFERENCED BY SEQ ID NO: 5878
ttttaaacccctccccccctccccctctcctcccccccgccgccgctccccagatccgctgccatgtcgacggagaagaagcagctgaaccccatgcgggacatcaaggtgcagaagctcgtcctcaacatctccgtcggcgagagcggagatcgcctcacccgcgcctccaaggtgctggagcagctgagcggacagtcacctgtgttctccaaggcgaggtacactgtcaggtcgttcggtatcaggcgtaatgagaagattgcgtgctacgtgactatcaggggtgagaaggcgatgcagctgctggagagtggcctgaaggtgaaggagtacgagctgctcaggaggaacttcagcgacaccggctgctttggcttcggtatccaggagcacatcgatctcggcatgaagtatgatccatctaccggcatctacggtatggacttcttcgtggtgctcgagcgtgctgggtaccgcgtctcccgccgccgcaggtgcaaggcccgtgtcggtatccaccagagggtcaccaaggaggacgccatgaagtggttccaggtcaagtatgagggtgtcatcctcaacaagtcccatgcgagctaagaaggacgtagctctctttagaccttgagttaattaagttcacctggttgctggatatgtatgttacctagaaaccaaaaatgctttgtcagttttgcctgtactcaagctggatgatttctgtttgatgcgcactttcgtctaagaggctctcttctgttttatcctctctgaacaatagagtatatgtttgtcttatgatagactgccttttgtatggccactctcaaaaaaaaaaaaaaaa

SEQ ID NO: 5878 - protein, 180 aa, Glycine max; identical to SEQ ID NO: 4008
  misc_feature: Ceres CLONE ID no. 1073880
  misc_feature: Ceres CDNA ID no. 40351630
  misc_feature (66)..(165): Pfam Name: Ribosomal_L5_C PFAM Desc: ribosomal L5P family C
  misc_feature (9)..(62): Pfam Name: Ribosomal_L5 PFAM Desc: Ribosomal protein L5

SEQ ID NO: 5879 - DNA, 1108 bp, Glycine max
  misc_feature: Ceres CLONE ID no. 1073884
  misc_feature: Ceres CDNA ID no. 29191678
  CDS (69)..(977): REFERENCED BY SEQ ID NO: 5880
ctcttgtcttctcgacactctcatctcacacccaaagcttccgcttagcttccgcttagcttcaaacaatggtgtttgtgaagccatccaagtcgaacgcttacttcaagaggtaccaagtcaagttcaggagaaggagagatgggaagactgattacagagcaaggatccgtctcatcaaccaagacaagaacaagtacaacacaccaaagtaccgttttgttgtcaggttcaccaacaaagacatagtcgcacaaatcgtgtctgcaagcatagccggtgacattgtcaaggcttctgcttacgctcatgagttgcctcagtatggtctcaccgttggacttaccaactacgctgcagcttactgcaccgggcttctattggctcgccgtgttctgaagatgttggaaatggatgaagagtacgagggcaaccttgaggctaccggagaggacttttccgtcgagccaaccgagtccaggagaccattccgtgctctacttgatgttggtcttatcaggaccactacaggaaaccgtgtctttggtgcactcaagggtgccttggacggaggacttgatatcccccacagtgacaagagatttgctggtttcaacaaggagaacaagcaactcgatgctgagatccacaggaactacatctatggtggtcacgtctcaaactacatgaagatgttgaatgaggatgagccagagaagtttcagactcacttcagtcagtacttgaagaaaggagttgatgctgagagcatggaggagttgtacaagaaggttcatgctgccatccgtgcagaccccaaccctaagaagaccgagaaacctgctcctaagacacacaataggtacaacttgaagaagttgacctatgaagagaggaagaacaagttgattgagagagtcaaggcattgaatggagctgctggtggcgacgatgatgacgaggacgacgaagagtaaagcgtggtctcatgatgtctcttttagtttgttactttttttttgccagactttaaacttatgttttcacattttaattgcgtttgaggattttgagtatgagaatgctaagtttaaaaaaaaaaaaaaaa

SEQ ID NO: 5880 - protein, 302 aa, Glycine max
  misc_feature: Ceres CLONE ID no. 1073884
  misc_feature: Ceres CDNA ID no. 29191678
  misc_feature (26)..(172): Pfam Name: Ribosomal_L18p PFAM Desc: Ribosomal L18p/L5e family
  misc_feature: Homolog of GI Number: 30984510 NR Desc: At3g25520
  misc_feature: Homolog of GI Number: 30984512 NR Desc: At5g39740
  misc_feature: Homolog of GI Number: 21592804 NR Desc: ribosomal protein
  misc_feature: Homolog of GI Number: 34484312 NR Desc: 60S ribosomal protein L5
  misc_feature: Homolog of GI Number: 56785265 NR Desc: putative ribosomal protein L5
  misc_feature: Homolog of GI Number: 56785264 NR Desc: putative ribosomal protein L5
  misc_feature: Homolog of GI Number: 34907624 NR Desc: putative 60S ribosomal protein L5
  misc_feature: Homolog of GI Number: 34907622 NR Desc: putative 60S ribosomal protein L5
  misc_feature: Homolog of GI Number: 542157 NR Desc: ribosomal protein L5
  misc_feature: Useful for decreasing plant size
  misc_feature: Useful for delaying flowering time
  misc_feature: Useful for increasing chlorophyll and photosynthetic capacity
  misc_feature: Useful for making bigger plants
  misc_feature: Useful for sterility
MVFVKPSKSNAYFKRYQVKFRRRRDGKTDYRARIRLINQDKNKYNTPKYRFVVRFTNKDIVAQIVSASIAGDIVKASAYAHELPQYGLTVGLTNYAAAYCTGLLLARRVLKMLEMDEEYEGNLEATGEDFSVEPTESRRPFRALLDVGLIRTTTGNRVFGALKGALDGGLDIPHSDKRFAGFNKENKQLDAEIHRNYIYGGHVSNYMKMLNEDEPEKFQTHFSQYLKKGVDAESMEELYKKVHAAIRADPNPKKTEKPAPKTHNRYNLKKLTYEERKNKLIERVKALNGAAGGDDDDEDDEE

SEQ ID NO: 5881 - DNA, 764 bp, Glycine max
  misc_feature: Ceres CLONE ID no. 1073894
  misc_feature: Ceres CDNA ID no. 29191679
  CDS (63)..(635): REFERENCED BY SEQ ID NO: 5882
ctctttttgttcttcagtcttgagctcttttgcagatttctcgctattacgattctgtgaagatgttctcggcgcagaacaagatcaagaaggacaagaatgctgctccaacggaatgcgaggagcaagttgctcaggctctgtttgatttggagaacaccaaccaggagttgaagagcgagttgaaagatctttacatcaaccaagctgttaacatggacatcgctggaaaccgcaaggctattgtgatatacgtcccattcagattgaggaaagccttccgcaagattcatccccgtctcgttagagagcttgagaagaagtttagtggaaaggatgttatctttgttgctacaagaaggatcatgcgtccaccaaagaagggtgctgctgtgcagaggccacgcaacagaactctaacctctgtccatgaagctatgctcgaggatgtcgcttaccctgctgagatcgttgggaaacgtactcgttaccatcttgatggttccaagatcatgaaggtctacttggaggccaaggagaggaacaacacagagtacaagctcgagtctatgatgggtgtgtaccggaaactcaccggaaaggatgtcacctttgagtaccctgttgaagcttgaaggtgatgctgaagaatcatcatcaggatagagaagagagagagagcttttgattctgttttgtggtgtctaggatgaagttttgatttcagttccttattcacaatcttcataaaaaaaaaaaaaaaa

SEQ ID NO: 5882 - protein, 190 aa, Glycine max
  misc_feature: Ceres CLONE ID no. 1073894
  misc_feature: Ceres CDNA ID no. 29191679
  misc_feature: The plant is abnormally large.
  misc_feature: The plant is abnormally small.
  misc_feature: Useful for making plants with modulated biomass
  misc_feature (4)..(189): Pfam Name: Ribosomal_S7e PFAM Desc: Ribosomal protein S7e
  misc_feature: Homolog of GI Number: 9755823 NR Desc: 40S ribosomal protein S7
  misc_feature: Homolog of GI Number: 21592413 NR Desc: 40S ribosomal protein S7
  misc_feature: Homolog of GI Number: 5532505 NR Desc: 40S ribosomal protein S7 homolog
  misc_feature: Homolog of GI Number: 6957719 NR Desc: putative 40S ribosomal protein
  misc_feature: Homolog of GI Number: 77999315 NR Desc: ribosomal protein S7
  misc_feature: Homolog of GI Number: 57471724 NR Desc: ribosomal protein S7
  misc_feature: Homolog of GI Number: 21555683 NR Desc: 40S ribosomal protein S7 homolog
  misc_feature: Homolog of GI Number: 4128206 NR Desc: 40S ribosome protein S7
  misc_feature: Homolog of GI Number: 55167942 NR Desc: putative 40S ribosomal protein S7
  misc_feature: Homolog of GI Number: 22671664 NR Desc: ribosomal protein S7
  misc_feature: Useful for decreasing plant size
  misc_feature: Useful for delaying flowering time
  misc_feature: Useful for increasing chlorophyll and photosynthetic capacity
  misc_feature: Useful for making larger plants
  misc_feature: Useful for making ornamental plants with modified flowers
  misc_feature: Useful for making ornamental plants with modified leaves
  misc_feature: Useful for making plants with altered leaf shape eg curled leaves
  misc_feature: Useful for making plants with increased biomass
  misc_feature: Useful for making plants with increased biomass and foliage
  misc_feature: Useful for making plants with increased biomass and foliage
MFSAQNKIKKDKNAAPTECEEQVAQALFDLENTNQELKSELKDLYINQAVNMDIAGNRKAIVIYVPFRLRKAFRKIHPRLVRELEKKFSGKDVIFVATRRIMRPPKKGAAVQRPRNRTLTSVHEAMLEDVAYPAEIVGKRTRYHLDGSKIMKVYLEAKERNNTEYKLESMMGVYRKLTGKDVTFEYPVEA

SEQ ID NO: 5883 - DNA, 631 bp, Glycine max
  misc_feature: Ceres CLONE ID no. 1073912
  misc_feature: Ceres CDNA ID no. 29191764
  CDS (40)..(480): REFERENCED BY SEQ ID NO: 5884
gcaggagaaaacctcgagaggagtcactgatcggcggaaatgacgacgagattcaagaagaacaggaagaagcgcggccacgtcagcgccggacacggtcgtatcggaaagcatcgcaagcatcccggaggtcgcggtaacgccggaggtatgcaccaccacaggatcctcttcgacaagtaccatcccggttacttcggtaaggtcggtatgcggtacttccacaagctccgcaacaagttctactgcccgatcgtaaacctcgacaggctgtggtcgctcgtccctgaggacgtgaaggcgaagtcgacgaaggataaggtgcctttgatcgacgtgacgcagcacgggttcttcaaggtgttggggaaaggtcatttgcctgagaacaagccttttgttgtgaaggcgaagcttatctcgaagacggcggagaagaagattaaggaagctggtggtgctgttgtgctcactgcttaggttttatcgaaattttatctttccgtttttattttattgttggatgtttttagtaatgaatctttgtcggaattttttaagtggttttatgacattgagatatgcatgttttgaacatgtttgggtgttacctgcaaaaaaaaaaaaaaaa

SEQ ID NO: 5884 - protein, 146 aa, Glycine max
  misc_feature: Ceres CLONE ID no. 1073912
  misc_feature: Ceres CDNA ID no. 29191764
  misc_feature (107)..(140): Pfam Name: L15 PFAM Desc: Ribosomal protein L15
  misc_feature: Homolog of GI Number: 20147177 NR Desc: At1g70600/F5A18_22
  misc_feature: Homolog of GI Number: 21553702 NR Desc: 60S ribosomal protein L27A
  misc_feature: Homolog of GI Number: 23308283 NR Desc: At1g23290/F26F24_23
  misc_feature: Homolog of GI Number: 7959355 NR Desc: 60S ribosomal protein L27a
  misc_feature: Homolog of GI Number: 3608481 NR Desc: ribosomal protein L27a
  misc_feature: Homolog of GI Number: 76160998 NR Desc: ribosomal protein L27a
  misc_feature: Homolog of GI Number: 50916422 NR Desc: putative ribosomal protein L27a
  misc_feature: Homolog of GI Number: 50939233 NR Desc: putative 60S ribosomal protein L27a
  misc_feature: Homolog of GI Number: 50251205 NR Desc: putative 60S ribosomal protein L27a
  misc_feature: Homolog of GI Number: 22758850 NR Desc: ribosomal protein L22
  misc_feature: Useful for making plants with altered leaf shape eg curled leaves
  misc_feature: Useful for making plants with increased biomass
MTTRFKKNRKKRGHVSAGHGRIGKHRKHPGGRGNAGGMHHHRILFDKYHPGYFGKVGMRYFHKLRNKFYCPIVNLDRLWSLVPEDVKAKSTKDKVPLIDVTQHGFFKVLGKGHLPENKPFVVKAKLISKTAEKKIKEAGGAVVLTA

SEQ ID NO: 5885 - DNA, 788 bp, Glycine max
  misc_feature: Ceres CLONE ID no. 1074030
  misc_feature: Ceres CDNA ID no. 29191680
  CDS (2)..(583): REFERENCED BY SEQ ID NO: 5886
gtcccgacccctatccgttcccccactcctggtctctcccgctcctatcctctcctcccccccttgcgccgccgccggcgccctcgccgcggcttccgctcctcccccagccaagatgaatgttgaaaagctcaagaagatggcaggtgccgtgcgcaccggggggaagggtagcatgcgcaggaagaagaaggctgtacacaagaccacaactacagatgacaaaaggctccagagtaccctgaaaagagtaggagtgaacaccattcctggtatcgaagaggtcaacatctttaaggatgatgtggttattcagtttctgaatcctaaagtgcaagcttcaattggtgctaatacatgggtagtcagtggaacaccacagacaaagaaactgcaagatctgctgccatcaattatcaatcaacttggtcctgacaacttggacaacctgcggaggcttgcagagcaattccaaaagcaggtccctggtggtgctgctggcatcgaggctggtgccagtgcaggtgcagctcaggctgacgacgatgatgatgttcctgagcttgtccctggagacatttgaagaggccgctgaagagaaaaaggcagagtcgtgattttgatgcatgtttactgttgtgaagggttataagttaagcggcgccattagagacctcccctttcaagaactctgacctaccttatttgtgccagtggaccggttttgtcatgtacgcgagtttcgtctgatatgttggtggaattttgcaccaaaaaaaaaaaaaaaa

SEQ ID NO: 5886 - protein, 155 aa, Glycine max
  misc_feature: Ceres CLONE ID no. 1074030
  misc_feature: Ceres CDNA ID no. 29191680
  misc_feature: The plant is abnormally large.
  misc_feature: Useful for making plants with modulated growth and phenotype characteristics
  misc_feature: The sequence is a functional homolog of  SEQ ID NO 1614 in the  11/479,226 US patent application
  misc_feature: The sequence is a functional homolog of  SEQ ID NO 1617 in the  11/479,226 US patent application
  misc_feature: The sequence is a functional homolog of  SEQ ID NO 784 in the  10/412,699 US patent application
  misc_feature: The sequence is a functional homolog of  SEQ ID NO 786 in the  10/412,699 US patent application
  misc_feature: Useful for making plants with modulated biomass
  misc_feature (35)..(92): Pfam Name: NAC PFAM Desc: NAC domain
  misc_feature: Homolog of GI Number: 31432723 NR Desc: putative transcription factor
  misc_feature: Homolog of GI Number: 50916214 NR Desc: Putative transcription factor
  misc_feature: Homolog of GI Number: 29367567 NR Desc: putative transcription factor BTF3
  misc_feature: Homolog of GI Number: 82623431 NR Desc: putative transcription factor BTF3
  misc_feature: Homolog of GI Number: 83584406 NR Desc: BTF3
  misc_feature: Homolog of GI Number: 49616929 NR Desc: BTF3b
  misc_feature: Homolog of GI Number: 33945882 NR Desc: transcription factor homolog BTF3
  misc_feature: Homolog of GI Number: 17104709 NR Desc: putative RNA polymerase B transcription factor 3
  misc_feature: Homolog of GI Number: 21537065 NR Desc: putative transcription factor BTF3
  misc_feature: Homolog of GI Number: 50920111 NR Desc: putative transcription factor
MNVEKLKKMAGAVRTGGKGSMRRKKKAVHKTTTTDDKRLQSTLKRVGVNTIPGIEEVNIFKDDVVIQFLNPKVQASIGANTWVVSGTPQTKKLQDLLPSIINQLGPDNLDNLRRLAEQFQKQVPGGAAGIEAGASAGAAQADDDDDVPELVPGDI

SEQ ID NO: 5887 - DNA, 724 bp, Glycine max
  misc_feature: Ceres CLONE ID no. 1074041
  misc_feature: Ceres CDNA ID no. 29191210
  CDS (62)..(580): REFERENCED BY SEQ ID NO: 5888
atcaccaccacttctaacacagcctcctcctcctcttcgatctctctctctctcgatcaaaatggctaacccaagagtcttcttcgacatgaccctcgacggcgcccccgccggccgcatcgtgatggagctttacaaagacacgaccccgaacaccgccgagaacttccgagccctctgcaccggcgagaaaggtgtcggaaagaaggggaagcctctccacttcaagggatcggccttccaccgcgtgatccccgggttcatgtgccagggaggcgatttcaccgccgggaacgggaccggcggggagtcgatctacggcgataagttcaaggacgagaacttcgcgaagaagcacaccggggcggggatcctctccatggcgaactctggtcccaacactaacggatctcagttttttatctgcaccgcggagacgtcgtggctcgatgggaagcacgtggtgtttgggaaggttgttgaaggtatggaggttgtgaaggcgatcgagaaggttggatcgtcttctgggacgacgaagaagaaggttgttgttgctgattgtggtcaggttgcttagatctgagtgatctgatgatgatgaatgttatcttttgcttttttaatgtttttttttctgatcgttcgagtttgtaaaaccctgagggttttttggatttgactgcctttgaataattatgaataactaaaaaaaaaaaaaaaa

SEQ ID NO: 5888 - protein, 172 aa, Glycine max
  misc_feature: Ceres CLONE ID no. 1074041
  misc_feature: Ceres CDNA ID no. 29191210
  misc_feature (5)..(171): Pfam Name: Pro_isomerase PFAM Desc: Cyclophilin type peptidyl
  misc_feature: Homolog of GI Number: 18076088 NR Desc: cyclophilin
  misc_feature: Homolog of GI Number: 1220142 NR Desc: cyclophilin
  misc_feature: Homolog of GI Number: 38708272 NR Desc: cyclophilin
  misc_feature: Homolog of GI Number: 4559302 NR Desc: cyclophilin
  misc_feature: Homolog of GI Number: 1563719 NR Desc: cyclophylin
  misc_feature: Homolog of GI Number: 30102900 NR Desc: At4g34870
  misc_feature: Homolog of GI Number: 62728587 NR Desc: cyclophilin
  misc_feature: Homolog of GI Number: 68406 NR Desc: peptidylprolyl isomerase
  misc_feature: Homolog of GI Number: 52788398 NR Desc: cyclophilin
  misc_feature: Homolog of GI Number: 118103 NR Desc: Peptidyl
MANPRVFFDMTLDGAPAGRIVMELYKDTTPNTAENFRALCTGEKGVGKKGKPLHFKGSAFHRVIPGFMCQGGDFTAGNGTGGESIYGDKFKDENFAKKHTGAGILSMANSGPNTNGSQFFICTAETSWLDGKHVVFGKVVEGMEVVKAIEKVGSSSGTTKKKVVVADCGQVA

SEQ ID NO: 5889 - DNA, 484 bp, Glycine max
  misc_feature: Ceres CLONE ID no. 1074114
  misc_feature: Ceres CDNA ID no. 29191765
  CDS (57)..(431): REFERENCED BY SEQ ID NO: 5890
aagtttaattgaatcccttggcatcgcttctcctctctcccaagaaagaatcatcaatggcgattgaacacgaagacgatctcaaagacgagaagaaccctcgacctctcgacgaggatgacatcgccctcctcaagacctacggtttgggaccttactccacaagcataaaaaaggcggagaaggaaatcaaagatatggccaagaaagtgaatgacttatgtggtataaaggagtctgatactggtttagctgcaccaagccagtgggatcttgattctgataagcaaatgatgcaggaggagcagcctcttcaggtggcaaggtgcacaaagattataaacccaaattctgaagatgccaagtatgttatcaatgtgaagcagattgcgatattattaccctttgtagtatgtgaccatttaccgtaataactagtaatttgtctattattactggacaaatgtttgtggcaaaaaaaaaa

SEQ ID NO: 5890 - protein, 124 aa, Glycine max
  misc_feature: Ceres CLONE ID no. 1074114
  misc_feature: Ceres CDNA ID no. 29191765
  misc_feature: Homolog of GI Number: 2492519 NR Desc: 26S protease regulatory subunit 7
  misc_feature: Homolog of GI Number: 3172331 NR Desc: 26S proteasome subunit 7
  misc_feature: Homolog of GI Number: 50915364 NR Desc: 26S proteasome regulatory particle triple
  misc_feature: Homolog of GI Number: 6652878 NR Desc: 26S proteasome AAA
  misc_feature: Homolog of GI Number: 23197722 NR Desc: 26S proteasome ATPase subunit
  misc_feature: Homolog of GI Number: 38181888 NR Desc: Proteasome
  misc_feature: Homolog of GI Number: 62751409 NR Desc: proteasome
  misc_feature: Homolog of GI Number: 15100181 NR Desc: proteasome
  misc_feature: Homolog of GI Number: 12831496 NR Desc: MSS1 protein
  misc_feature: Useful for making plants with increased biomass and foliage
MAIEHEDDLKDEKNPRPLDEDDIALLKTYGLGPYSTSIKKAEKEIKDMAKKVNDLCGIKESDTGLAAPSQWDLDSDKQMMQEEQPLQVARCTKIINPNSEDAKYVINVKQIAILLPFVVCDHLP

SEQ ID NO: 5891 - DNA, 956 bp, Glycine max
  misc_feature: Ceres CLONE ID no. 1074177
  misc_feature: Ceres CDNA ID no. 36703513
  CDS (124)..(447): REFERENCED BY SEQ ID NO: 5892
attttgctggctctgaaaaagtcgcatagtcgacgttttcgttttagagagagaaagaatcagagtttctgcttctgctttaggaggagagagagagagagagagagagacagcgagcgaaccatgataacacgatcgaatctggttgaacagctgcgagagtatcagattcgatccaagcatgattgggcctctgtctcgttcttctcctccacttcttcaaacatcaccacttccagggtggatgtggtggtttttgtaatatgggaacttgttattttagctttcttggtcttttccgtagtctctttgtacttcaagcacatccggcttgcttttattttagtctgcatcacaatcctattgcttttatgcatgaaaattacaaagcaagtaaggcttgcaaggaaaaagagacgaaggatgcttcttccattgtcaatgtaaagtggcatcaagtcttgacctttggcatatttcctattctcttaccattcatttactggctagggtcttggccatttgtgaccatttcaactggtctcgcttatcattcatcactggattgtgtatcctctgattccacacatagcaagtcgactgaagtatataattgatggttcttacatcaagacaagcttatccaattggttgatctagatcattgttggaggcaatgtggcttagtaatgctaggatcttgtcacaacctatatatttggcatttctttttgctgtttgtttctgtatacatagtgcaactgctgcaagttactattgagtttttgaccccttgacattgaaagctcaaataccatctgatgagttattgtataatgacaacatatgtgcgagataggtttggcaatgtgatattgcgcataaggtgattaaatggtaggtgcaaagtgttgctagctttgctagcctttgaagacaaaaaaaaaaaaaaaaaa

SEQ ID NO: 5892 - protein, 107 aa, Glycine max
  misc_feature: Ceres CLONE ID no. 1074177
  misc_feature: Ceres CDNA ID no. 36703513
  misc_feature: Homolog of GI Number: 8778612 NR Desc: F5M15.20
MITRSNLVEQLREYQIRSKHDWASVSFFSSTSSNITTSRVDVVVFVIWELVILAFLVFSVVSLYFKHIRLAFILVCITILLLLCMKITKQVRLARKKRRRMLLPLSM

SEQ ID NO: 5893 - DNA, 632 bp, Glycine max
  misc_feature: Ceres CLONE ID no. 1074245
  misc_feature: Ceres CDNA ID no. 29191766
  CDS (65)..(430): REFERENCED BY SEQ ID NO: 5894
gattcggcctaaagcccaagagagattgaaatgtacacctgaccctgagaaagtggcgaagagaatgggtgggtctagcagtagcagtagcagtagcagcaaggacgcccaagaccttttccgcgctctttggtctgcttatgcttcaaccccaacaaatctcaagatcattgacctctacgtaatctatgccgtcttcaccgctctcatccaggttgtttacatggctttggtgggatcatttccatttaactccttcctatcaggagtactttcttgtgtaggaactgctgttcttgctgtctgtctcaggatccaagtgaataaagataacaaggaattcaaggatcttgcacctgagcgtgcttttgcggattttgttctctgtaatttggtgcttcatttggtgatcatgaacttccttggttaaattggttcgtgtggctgttgttgttttcgattgaacccttgaataataaaaattagtagtatacctagactttttgtaatagtatttatagacagtaactggcatccaactaattgctttagttttatgttgattccccctccccccgccacttttggttctctgttttgaaagaagagattttgcaaaaaaaaaaaaaaaa

SEQ ID NO: 5894 - protein, 121 aa, Glycine max
  misc_feature: Ceres CLONE ID no. 1074245
  misc_feature: Ceres CDNA ID no. 29191766
  misc_feature: The plant flowers significantly late compared to wild-type.
  misc_feature: Useful for making plants with modulated flowering time
  misc_feature (10)..(121): Pfam Name: DAD PFAM Desc: DAD family
  misc_feature: Homolog of GI Number: 37987844 NR Desc: DAD1 protein
  misc_feature: Homolog of GI Number: 3869255 NR Desc: defender against death homolog Peadad
  misc_feature: Homolog of GI Number: 1184193 NR Desc: DAD
  misc_feature: Homolog of GI Number: 29423681 NR Desc: DAD1
  misc_feature: Homolog of GI Number: 21593539 NR Desc: defender against cell death protein
  misc_feature: Homolog of GI Number: 25313138 NR Desc: defender against cell death protein
  misc_feature: Homolog of GI Number: 6491797 NR Desc: dad
  misc_feature: Homolog of GI Number: 30686440 NR Desc: defender against cell death 2
  misc_feature: Homolog of GI Number: 6723463 NR Desc: defender against apoptotic cell death
  misc_feature: Homolog of GI Number: 4106446 NR Desc: defender against apoptotic death 1 homolog
MGGSSSSSSSSSKDAQDLFRALWSAYASTPTNLKIIDLYVIYAVFTALIQVVYMALVGSFPFNSFLSGVLSCVGTAVLAVCLRIQVNKDNKEFKDLAPERAFADFVLCNLVLHLVIMNFLG

SEQ ID NO: 5895 - DNA, 786 bp, Glycine max
  misc_feature: Ceres CLONE ID no. 1074266
  misc_feature: Ceres CDNA ID no. 25446514
  CDS (102)..(536): REFERENCED BY SEQ ID NO: 5896
actgcatcgccttcgtcgatcgaagtggagcttcgatttcataggcggcgttgaagatagatagttagctgacttggctgcccctgagcaggaggaataagatgcctccttacgattgtatgtttctgtttaagccacatattaggaaggaagccgtgatggatttagttgtaagggtgggaaaacatgtgtgcagaagaaatggggttgtcattgatatcaagagtctcggaagagttcagttgggctatggtgtgaaaaagctagatggaagatattatcagggcctgctgatgcaaatgagcatgatggctacaccggaaatcaacaaagagttgcattacctaaacaaggaagatcggttattgcgttggcttttggttaagcagcgtaatacaaaatttgggcttgactcctatggggatgaaggcagatatgagctaagcaaattctcccagatcggtaaacatggtgatgaggatgaggatgaagatgatgaggaatatgaagtgaacgaagaagaaacagtgaactaaaagatagctgagtattttattagtttccattatgagaggacaaaaccgttttgcgtagtattattggtgccaaacatgtgctcacttacggtactagataacaatcaaacatgaccagtgtgggcttgaacatgtaatttcgtgaactccgagctgtctctagctattctacaaaataacatctttgtagcttgggtgaaataatttattcacaaatgtaatgggttgtctttcccaaaaaaaaaaaaaa

SEQ ID NO: 5896 - protein, 144 aa, Glycine max
  misc_feature: Ceres CLONE ID no. 1074266
  misc_feature: Ceres CDNA ID no. 25446514
  misc_feature (2)..(96): Pfam Name: Ribosomal_S6 PFAM Desc: Ribosomal protein S6
  misc_feature: Useful for delaying flowering time
  misc_feature: Useful for increasing increasing anthocyanin content
  misc_feature: Useful for making lethal plants for genetic confinement systems
  misc_feature: Useful for making ornamental plants with modified leaves
  misc_feature: Useful for making plants with increased biomass and foliage
  misc_feature: Useful for making shorter plants
  misc_feature: Useful for making stronger plants
MPPYDCMFLFKPHIRKEAVMDLVVRVGKHVCRRNGVVIDIKSLGRVQLGYGVKKLDGRYYQGLLMQMSMMATPEINKELHYLNKEDRLLRWLLVKQRNTKFGLDSYGDEGRYELSKFSQIGKHGDEDEDEDDEEYEVNEEETVN

SEQ ID NO: 5897 - DNA, 650 bp, Glycine max
  misc_feature: Ceres CLONE ID no. 1074269
  misc_feature: Ceres CDNA ID no. 29191276
  CDS (16)..(327): REFERENCED BY SEQ ID NO: 5898
aaaaacatttcgagcatgtctgggcgaggaaagggaggaaagggactgggaaagggaggagccaagaggcacaggaaggtcctccgagacaacatccaggggatcactaagccggcgattcgtcgtttagcgaggagaggcggtgtgaagcgtatcagcggtttgatctacgaggagactcgcggcgttctcaagatctttctagagaatgtgattcgtgacgctgttacttacactgagcacgctaggaggaagaccgtgacggcgatggatgttgtgtatgctttgaagaggcagggaaggactctgtacgggttcggcggctgaggggattcaattaggggtttttaaatcgcgtttgtgtttttacggtttggttctatttgggagtttaacaactctctaagttgtctttatctgaatgttttaaaaaagctttatctgaacttgtccgtctcttagaaattattgaggcatttagaaggtgggaaggagtatgagcttctgataatcgaatatcgacaagtaatagttgttgtgagctgggacgggtagagatttcgatactggtcatttaacgatgttgtgaaaaggataatgtccgagactaagatgaacctttacatactatgctaaaaaaaaaaaaaaaa

SEQ ID NO: 5898 - protein, 103 aa, Glycine max; identical to SEQ ID NO: 8
  misc_feature: Ceres CLONE ID no. 1074269
  misc_feature: Ceres CDNA ID no. 29191276
  misc_feature (66)..(92): Pfam Name: TAF PFAM Desc: TATA box binding protein associated factor
  misc_feature: Homolog of GI Number: 61834317 NR Desc:  similar to germinal histone H4 gene
  misc_feature: Homolog of GI Number: 56798269 NR Desc: histone H4
  misc_feature: Homolog of GI Number: 74004228 NR Desc:  similar to germinal histone H4 gene
  misc_feature: Homolog of GI Number: 74004256 NR Desc:  similar to germinal histone H4 gene
  misc_feature: Homolog of GI Number: 61820747 NR Desc:  similar to germinal histone H4 gene
  misc_feature: Homolog of GI Number: 57110415 NR Desc:  similar to germinal histone H4 gene
  misc_feature: Homolog of GI Number: 76651053 NR Desc:  similar to germinal histone H4 gene
  misc_feature: Homolog of GI Number: 83030220 NR Desc:  similar to germinal histone H4 gene
  misc_feature: Homolog of GI Number: 1806283 NR Desc: Histone H4 homologue
  misc_feature: Homolog of GI Number: 57098917 NR Desc:  similar to germinal histone H4 gene

SEQ ID NO: 5899 - DNA, 710 bp, Glycine max
  misc_feature: Ceres CLONE ID no. 1074340
  misc_feature: Ceres CDNA ID no. 29191632
  CDS (47)..(541): REFERENCED BY SEQ ID NO: 5900
ggcgattttaggtttttagtttcgcagtaacccaagaggagaaaaaatgccggcgggacatggagttcgtgctaggacaagagatctgttcgcgagggggttcaggaagaagggtacaattccattgtctacctacctcaggaccttcaaggtcggagattacgtggatgttaaagtgaatggtgcgatccacaagggtatgcctcacaagttctaccacggtcgtaccggtcgtgtctggaacgttaccaaacgtgctgttggtgtcgaagtcaacaaacagattggcaacaggatcataaagaagaggcttcatgtgcgtgtggagcacgtgcagcagtcgaggtgcgctgaggagttcaagctgaggattaagaagaacgatgagctcaaggctgcagccaaggccaaaggcgagacaataagcaccaagaggcagcctaaaggacccaaaccagggtttatggttgaaggtatgaccttggagactgtcaccccaatcccttacgacgtcgtcaacgatctcaagggaggctattagtttttctacttctactttctacccccagtgttttgctcagactttttggcagtttcttttgcgaattctcgagtgttcttcgtgcgttttcgctacagttacattttctttaaggttcaatccagacataatgaaacaaaagttgcaatctccaaaaaaaaaaaaaaaa

SEQ ID NO: 5900 - protein, 164 aa, Glycine max
  misc_feature: Ceres CLONE ID no. 1074340
  misc_feature: Ceres CDNA ID no. 29191632
  misc_feature: null
  misc_feature: Useful for making plants with modulated flowering time
  misc_feature (2)..(100): Pfam Name: Ribosomal_L21e PFAM Desc: Ribosomal protein L21e
  misc_feature: Homolog of GI Number: 3482935 NR Desc: Putative ribosomal protein L21
  misc_feature: Homolog of GI Number: 12321346 NR Desc: 60S ribosomal protein L21
  misc_feature: Homolog of GI Number: 31432571 NR Desc: 60S ribosomal protein L21
  misc_feature: Homolog of GI Number: 3885884 NR Desc: 60S ribosomal protein L21
  misc_feature: Homolog of GI Number: 76161012 NR Desc: 60S ribosomal protein L21
  misc_feature: Homolog of GI Number: 32400808 NR Desc: 60s ribosomal protein L21
  misc_feature: Homolog of GI Number: 45190353 NR Desc: AEL254Wp
  misc_feature: Homolog of GI Number: 54292803 NR Desc: ribosomal protein L21
  misc_feature: Homolog of GI Number: 15213768 NR Desc: ribosomal protein L21
MPAGHGVRARTRDLFARGFRKKGTIPLSTYLRTFKVGDYVDVKVNGAIHKGMPHKFYHGRTGRVWNVTKRAVGVEVNKQIGNRIIKKRLHVRVEHVQQSRCAEEFKLRIKKNDELKAAAKAKGETISTKRQPKGPKPGFMVEGMTLETVTPIPYDVVNDLKGGY

SEQ ID NO: 5901 - DNA, 589 bp, Glycine max
  misc_feature: Ceres CLONE ID no. 1074398
  misc_feature: Ceres CDNA ID no. 25446611
  CDS (185)..(391): REFERENCED BY SEQ ID NO: 5902
gaggatgaaattgataattatgcctatttaaagtgcacgacggtgcttcttgttctgtttctaaaacactatcccttttactgtttattgacaaagagaaacaatcggaggatctgttctgttccataagggtaattgtaattgtgtgaaattgtgctaacccttttttcccccattgatcaagatggctggacttttaggatataggagccttccacctaaggcaaagaatctggtagttgctgggggtttgacagcttttgtctttggtgcatacttctacaccatgagggctgttggaggcactgatgaactgcaggtagcaattgataagtttgaagctgacaagagcaagaatgagggtgatgccaacatgccatcaaaggtctaaagcttgtacaataaagcaatactttgggtgtattcactgttttggtttgggatcaagctttttacttagtatgagaatgttctaaaaggaatgatattgaatctagttgctaataagtttcaaccagctttatgtactatgactgtgtggtagggaatctaaattgagattctgttttggcctgaaaaaaaaaaaaaa

SEQ ID NO: 5902 - protein, 68 aa, Glycine max
  misc_feature: Ceres CLONE ID no. 1074398
  misc_feature: Ceres CDNA ID no. 25446611
MAGLLGYRSLPPKAKNLVVAGGLTAFVFGAYFYTMRAVGGTDELQVAIDKFEADKSKNEGDANMPSKV

SEQ ID NO: 5903 - DNA, 828 bp, Glycine max
  misc_feature: Ceres CLONE ID no. 1074401
  misc_feature: Ceres CDNA ID no. 35383346
  CDS (79)..(561): REFERENCED BY SEQ ID NO: 5904
aaaacacagcagctctgcgccattacaacagtcacagctcacatcatttgcaccggtactagcttgatcatcatagcaatggcctccaccaacagctggacccatgagattgagtcgccggtcgctgcatcacgcctctttcgtgccggcgtcatggactggcacaccctggcccccaagctcgtgccacagatcgtcgccagcgcccaccctgttgagggagaaggcggcatcggcagtgtcaggcagttcaacttcacctcagccatgcccttcaacctcatgaaggagaggctcgagttcattgacgtggacaagtgtgaatgcaagtcagccctcatcgagggtggtggcatcggcacggcaatcgagacgggcacgtcgcacatcaaggtggagccggcagccaacggtgggagcgtggtgaaggtggaatcgacatacaagctgcttccaggcgtagaggtgaacgatgagatcaccaaggccaaggactctgtcacggccatcttcaaggccgccgaggcctaccttattgccaacccggatgcctacaactaaatcagttgagaggaatcatacataattatgttgtccctggtttgattttttgtgctttcttcttgaactaataaagctgctacaacggtccagcctccaagcactgaagcgagagcagtgagcagagtatggacttgagaagtttaaaagttgtgtatttgtaactatcaaagtttgctgttgtttgatgatgttgctgctttttgtactgtaataaaaggaagtatttgaaacacataatgaacttctacaaaaaaaaaaaaaaaa

SEQ ID NO: 5904 - protein, 160 aa, Glycine max
  misc_feature: Ceres CLONE ID no. 1074401
  misc_feature: Ceres CDNA ID no. 35383346
  misc_feature (2)..(155): Pfam Name: Bet_v_I PFAM Desc: Pathogenesis
  misc_feature: Homolog of GI Number: 18539471 NR Desc: JIOsPR10
  misc_feature: Homolog of GI Number: 58978027 NR Desc: pathogenesis
  misc_feature: Homolog of GI Number: 58978057 NR Desc: pathogenesis
  misc_feature: Homolog of GI Number: 58977980 NR Desc: pathogenesis
  misc_feature: Homolog of GI Number: 58978001 NR Desc: pathogenesis
  misc_feature: Homolog of GI Number: 1408222 NR Desc: pathogenesis
  misc_feature: Homolog of GI Number: 1572683 NR Desc: early flowering protein 1
  misc_feature: Homolog of GI Number: 939857 NR Desc: pathogenesis related protein
  misc_feature: Homolog of GI Number: 4210626 NR Desc: intracellular pathogenesis
  misc_feature: Homolog of GI Number: 4325333 NR Desc: intracellular pathogenesis
MASTNSWTHEIESPVAASRLFRAGVMDWHTLAPKLVPQIVASAHPVEGEGGIGSVRQFNFTSAMPFNLMKERLEFIDVDKCECKSALIEGGGIGTAIETGTSHIKVEPAANGGSVVKVESTYKLLPGVEVNDEITKAKDSVTAIFKAAEAYLIANPDAYN

SEQ ID NO: 5905 - DNA, 1290 bp, Glycine max
  misc_feature: Ceres CLONE ID no. 1074552
  misc_feature: Ceres CDNA ID no. 40351631
  CDS (65)..(1081): REFERENCED BY SEQ ID NO: 5906
actaactatattcttcacgctcgaccttgctctctcgttctcatcgtcatctccaatctctgaaatggctgacaagaagattaggatcggaatcaacggtttcggaagaatcgggcgtttggtggcgagagtgatccttcagaggaacgatgttgagctcgtcgctgttaacgatcccttcatcaccaccgagtacatgacgtacatgtttaagtacgacagtgttcacgggcagtggaagcacaatgaactcaagttgaaggatgagaagacccttctcttcggtgagaagccagtcactgtttttggcatcaggaaccctgaggatatcccatggggtgaggctggagctgactttgttgttgagtctactggtgtcttcaccgacaaagacaaagctgctgctcacttgaagggtggtgccaagaaggttgttatctctgcccccagcaaggacgctcccatgtttgttgttggtgtcaacgagcacgagtacaagtccgaccttaatattgtctccaacgctagttgcaccactaactgccttgctccccttgctaaggttatcaacgacaggtttggaattgttgagggactcatgactaccgttcactctattactgctactcagaagacagttgacggtccgtcaatgaaggactggagaggtggaagagccgcttccttcaacatcattcccagcagtaccggagctgccaaagctgtcggaaaagtgcttccacagctcaacggaaagttgacaggaatgtccttccgtgttcccaccgttgatgtctcagttgttgacctcacggttagactcgagaaagccgcaacctacgacgatatcaagaaggctatcaaggaggaatctgagggaaagctaaaaggaatccttggttacacagaggatgatgttgtctcaactgacttcgttggtgacagcaggtcgagcatttttgacgcaaaggctggaattgcattgagtgacaacttcgtgaaacttgtgtcgtggtacgataacgaatggggttacagtacccgtgtggtcgacttgatcatccacatgtccaaagcctaaagagctgtaagagaaaagatgacctggatctcaaatgatataatgattcgaataaagttttatctggccatgatggtggtaagtttgtagaccgtgtgtttttttactgaaagccttttgtttggcctttgatataatgagttactctaaatgttttcaattccatgtgtttgcaaaacgaagagttcttctcaaaaaaaaaaaaaaaa

SEQ ID NO: 5906 - protein, 338 aa, Glycine max
  misc_feature: Ceres CLONE ID no. 1074552
  misc_feature: Ceres CDNA ID no. 40351631
  misc_feature (161)..(318): Pfam Name: Gp_dh_C PFAM Desc: Glyceraldehyde 3
  misc_feature (6)..(38): Pfam Name: GFO_IDH_MocA PFAM Desc: Oxidoreductase family
MADKKIRIGINGFGRIGRLVARVILQRNDVELVAVNDPFITTEYMTYMFKYDSVHGQWKHNELKLKDEKTLLFGEKPVTVFGIRNPEDIPWGEAGADFVVESTGVFTDKDKAAAHLKGGAKKVVISAPSKDAPMFVVGVNEHEYKSDLNIVSNASCTTNCLAPLAKVINDRFGIVEGLMTTVHSITATQKTVDGPSMKDWRGGRAASFNIIPSSTGAAKAVGKVLPQLNGKLTGMSFRVPTVDVSVVDLTVRLEKAATYDDIKKAIKEESEGKLKGILGYTEDDVVSTDFVGDSRSSIFDAKAGIALSDNFVKLVSWYDNEWGYSTRVVDLIIHMSKA

SEQ ID NO: 5907 - DNA, 741 bp, Glycine max
  misc_feature: Ceres CLONE ID no. 1074623
  misc_feature: Ceres CDNA ID no. 35383347
  CDS (121)..(465): REFERENCED BY SEQ ID NO: 5908
aaccagccaggtcagccttcaaactagggttttgccctcccgctccgagaaagcaaacagctcgagctcctccgattccgcccgcctccgttcctccgcatcttcccggccgccgccaagatgaagctcgtcaggttcttgatgaagctgaacaacgagacggtcaccatcgagctcaagaacggcactaccgtccacggcaccatcactggtgttgacataagcatgaatactcatctgaagaccgtaaagctcacaatgaaagggaagaatcctgtaacccttgatcacatcagcgtgagaggaaacaacattcggtactacatcctccctgatagcttaaacctggaaacgttgctggttgaggatacccccagggtcaagtctaagaagccaactacagggaagcctatgggtcggggtcgtggacgcggccgtgggcgtggtcgcggccgggggcgctgagctttattgttccctgctttggaagctcgtgcagtgcaagtccctacagcgtaacctgcttcctctgcgagctatgtcgaagattgtttctgttctgttagaagatgtcaatctaagtacgtgttgatgcggaatcatctcgcctgtttgacctatgttcttatatattgttcgtaatgcattttctcgggaatttcacttgcaggcctccagacttttgaaatgctaagtggcatcctgtgccgttacttgttacccccaaaaaaaaaaaaaaaa

SEQ ID NO: 5908 - protein, 114 aa, Glycine max
  misc_feature: Ceres CLONE ID no. 1074623
  misc_feature: Ceres CDNA ID no. 35383347
  misc_feature (5)..(70): Pfam Name: LSM PFAM Desc: LSM domain
  misc_feature: Homolog of GI Number: 50909887 NR Desc: putative small nuclear ribonucleoprotein D1 polypeptide 16kDa
  misc_feature: Homolog of GI Number: 50924966 NR Desc: OSJNBa0089K21.2
  misc_feature: Homolog of GI Number: 6466942 NR Desc: putative small nuclear ribonucleoprotein
  misc_feature: Homolog of GI Number: 21536940 NR Desc: small nuclear riboprotein Sm
  misc_feature: Homolog of GI Number: 83272157 NR Desc: putative small nuclear ribonucleoprotein D1
  misc_feature: Homolog of GI Number: 34877889 NR Desc: similar to Small nuclear ribonucleoprotein Sm D1
  misc_feature: Homolog of GI Number: 60832252 NR Desc: small nuclear ribonucleoprotein D1 polypeptide
  misc_feature: Homolog of GI Number: 49250837 NR Desc: MGC69276 protein
  misc_feature: Homolog of GI Number: 27545253 NR Desc: small nuclear ribonucleoprotein D1 polypeptide
  misc_feature: Homolog of GI Number: 32959908 NR Desc: small nuclear ribonucleoprotein Sm D1
MKLVRFLMKLNNETVTIELKNGTTVHGTITGVDISMNTHLKTVKLTMKGKNPVTLDHISVRGNNIRYYILPDSLNLETLLVEDTPRVKSKKPTTGKPMGRGRGRGRGRGRGRGR

SEQ ID NO: 5909 - DNA, 669 bp, Glycine max
  misc_feature: Ceres CLONE ID no. 1074662
  misc_feature: Ceres CDNA ID no. 35383348
  CDS (77)..(502): REFERENCED BY SEQ ID NO: 5910
aagcaaacccaaatcaattccacttactagttactactactacatcgatctcagtttagcacctctagaaaaatcaatggcgcccaaggcagcagagaagaagcccgcggagaagaagccggccgagaaagcaccggcggagaagaagccaaaggccgggaagaagctcccgaaggatccctccgccgtcgccggagacaagaagaagaagcggtccaagaagagcgtcgagacatacaagatctacatcttcaaggtgctgaagcaggtccaccccgacatcgggatctcgagcaaagccatggggatcatgaacagtttcatcaacgacatcttcgagaagcttgccggcgagtcttccaagctcgcgaggtacaacaagaagccgaccatcacttccagggagattcagacggcggtgagactcgtcttgcctggagagctggcgaaacacgctgtttccgaagggaccaaggcggtgactaagttcacgagctcctgaactgtctggaatgtctgaattagagtttctttgtagaatgtcctttctcttgtgttttgcaatctcgtgttttgtaaagtactgcgaattggtatgtttggaatctaatgtcttgtctttgtatctttaatgcgttgagattgtgagatctaaaaaaaaaaaaaaaa

SEQ ID NO: 5910 - protein, 141 aa, Glycine max
  misc_feature: Ceres CLONE ID no. 1074662
  misc_feature: Ceres CDNA ID no. 35383348
  misc_feature: No seed is being produced by the plant
  misc_feature: The plant flowers significantly late compared to wild-type.
  misc_feature: Useful for biocontainment applications
  misc_feature: Useful for making plants with modulated flowering time
  misc_feature (48)..(120): Pfam Name: Histone PFAM Desc: Core histone H2A/H2B/H3/H4
  misc_feature: Homolog of GI Number: 2558962 NR Desc: histone H2B1
  misc_feature: Homolog of GI Number: 3021485 NR Desc: histone H2B
  misc_feature: Homolog of GI Number: 10177235 NR Desc: histone H2B like protein
  misc_feature: Homolog of GI Number: 21536602 NR Desc: histone H2B
  misc_feature: Homolog of GI Number: 1617013 NR Desc: histone H2B like protein
  misc_feature: Homolog of GI Number: 82400146 NR Desc: histone H2B
  misc_feature: Homolog of GI Number: 30102580 NR Desc: At3g45980
  misc_feature: Homolog of GI Number: 21592734 NR Desc: putative histone H2B
  misc_feature: Homolog of GI Number: 2746719 NR Desc: histone H2B
  misc_feature: Homolog of GI Number: 21617908 NR Desc: histone H2B
  misc_feature: Useful for delaying flowering time
  misc_feature: Useful for increasing chlorophyll and photosynthetic capacity
  misc_feature: Useful for making plants with altered leaf shape eg curled leaves
  misc_feature: Useful for making plants with altered leaf shape eg curled leaves
  misc_feature: Useful for making plants with increased biomass and foliage
  misc_feature: Useful for making plants with increased biomass and foliage
  misc_feature: Useful for sterility
  misc_feature: Useful for sterility
MAPKAAEKKPAEKKPAEKAPAEKKPKAGKKLPKDPSAVAGDKKKKRSKKSVETYKIYIFKVLKQVHPDIGISSKAMGIMNSFINDIFEKLAGESSKLARYNKKPTITSREIQTAVRLVLPGELAKHAVSEGTKAVTKFTSS

SEQ ID NO: 5911 - DNA, 513 bp, Glycine max
  misc_feature: Ceres CLONE ID no. 1074708
  misc_feature: Ceres CDNA ID no. 25445751
  CDS (66)..(326): REFERENCED BY SEQ ID NO: 5912
atcaaactttgactgtggagagcttgtgtttttctgatcccttatcttaattaatttaatcaccaatggctcgttctatcgctaacgccaagactttctccgctctcgtgcttgacggattctccagacgtggctactctcaaagcgcaacaaggggaggagtggcctccatagcacccaaatcaggggaagacaaaggtgtctcatcatacaaggtttcctgggtgccagatcccgtcaccggttactacaaaccggaaaacatcaaggaggttgacgttgccgatttgcgtgctacccttctccgcaaaaaattcaacaactaatttcaacaattttaattttttaccaaaccttgggtgattgattcgttatggaattaattttgatactcatatgctctgcccaccttcattatacgattgctatagttttaccagtcagtagaataactattagcagctaataagaattgtaatttctttcagaaaaaaaaaaaaaaaaaaaaaaaaa

SEQ ID NO: 5912 - protein, 86 aa, Glycine max
  misc_feature: Ceres CLONE ID no. 1074708
  misc_feature: Ceres CDNA ID no. 25445751
  misc_feature (1)..(81): Pfam Name: LEA_3 PFAM Desc: Late embryogenesis abundant protein
  misc_feature: Homolog of GI Number: 6180055 NR Desc: indole
  misc_feature: Homolog of GI Number: 56900730 NR Desc: putative late
  misc_feature: Homolog of GI Number: 7488882 NR Desc: late
  misc_feature: Homolog of GI Number: 7489029 NR Desc: late
  misc_feature: Homolog of GI Number: 7268998 NR Desc: AT4g02380
  misc_feature: Homolog of GI Number: 1370589 NR Desc: protein induced upon tuberization
  misc_feature: Homolog of GI Number: 21592389 NR Desc: late embryogenis abundant protein
  misc_feature: Homolog of GI Number: 2981167 NR Desc: late embryogenis abundant protein 5
MARSIANAKTFSALVLDGFSRRGYSQSATRGGVASIAPKSGEDKGVSSYKVSWVPDPVTGYYKPENIKEVDVADLRATLLRKKFNN

SEQ ID NO: 5913 - DNA, 577 bp, Glycine max
  misc_feature: Ceres CLONE ID no. 1074720
  misc_feature: Ceres CDNA ID no. 29191767
  CDS (28)..(429): REFERENCED BY SEQ ID NO: 5914
ttcgagatcttcacgcaagaagcagaaatggcggttccgttgctaacgaagaaggtcgtgaagaagaggtctgccaaattcatcagaccccagagtgatcgcagaatcaccgtcaaggaaagctggaggaggccaaagggtattgattccagggtgagaaggaagttcaaaggtgtcaccttgatgcccaatgttggttacggatctgacaagaagacccgccactacctccctaacggattcaagaagtttgttgttcacaactctgctgatctcgagttactcatgatgcacaacaggacttactgtgcggagatagctcacaatgtatcaacaaagaagaggaaagccattgtcgagagagcttcccagcttgacatcgtcgttaccaacaggcttgctaggttgcgtagccaggaagacgagtgatggatgaaagcccctatgtttcttttatctgtctttattggcaatttctcagtttatcataacttctttttgcagattaaagagttgactgaatgttttatggtttctggttttaatatattaccaactcacaaaaaaaaaaaaaaaa

SEQ ID NO: 5914 - protein, 133 aa, Glycine max
  misc_feature: Ceres CLONE ID no. 1074720
  misc_feature: Ceres CDNA ID no. 29191767
  misc_feature (14)..(123): Pfam Name: Ribosomal_L32e PFAM Desc: Ribosomal protein L32
  misc_feature: Homolog of GI Number: 23198054 NR Desc: ribosomal protein L32
  misc_feature: Homolog of GI Number: 21555143 NR Desc: ribosomal protein L32
  misc_feature: Homolog of GI Number: 10177580 NR Desc: ribosomal protein L32
  misc_feature: Homolog of GI Number: 40287540 NR Desc: ly200 protein
  misc_feature: Homolog of GI Number: 71534997 NR Desc: ribosomal protein L32
  misc_feature: Homolog of GI Number: 77745481 NR Desc: ly200
  misc_feature: Homolog of GI Number: 13899057 NR Desc: ribosomal protein L32
  misc_feature: Homolog of GI Number: 50947773 NR Desc: putative ribosomal protein L32
  misc_feature: Homolog of GI Number: 76057835 NR Desc: ribosomal L32
  misc_feature: Homolog of GI Number: 50754636 NR Desc:  similar to 60S ribosomal protein L32
MAVPLLTKKVVKKRSAKFIRPQSDRRITVKESWRRPKGIDSRVRRKFKGVTLMPNVGYGSDKKTRHYLPNGFKKFVVHNSADLELLMMHNRTYCAEIAHNVSTKKRKAIVERASQLDIVVTNRLARLRSQEDE

SEQ ID NO: 5915 - DNA, 838 bp, Glycine max
  misc_feature: Ceres CLONE ID no. 1074722
  misc_feature: Ceres CDNA ID no. 29191726
  CDS (64)..(678): REFERENCED BY SEQ ID NO: 5916
aaaatcggaaaagatcgaagtaactcaaaaacaacttttgtctcgcgaaaaacagatctgaagatggagtgcgtgttcggtcttgtcggaaatggattcgctatcgtggcggcagatacatcggcggttcacagtatccttgtccacaagaacaacgaggacaagatcatgctccttgactcacacaagctcattgccgcaagcggcgagcctggtgaccgggttcagtttactgagtatgtacagaagaatgtgtcactgtatcagttcagaaacgggatccccttgactaccgctgctgctgccaacttcactcgtggtgagctcgccactgctttgagaaagaatccctactctgtgaacatcctgatggctggctacgacaaagaagcaggcgcatctctatactacattgactacattgcaactcttcacaaggttgacaagggagcattcggttacggctcatacttctctctctccacgatggacaggcacttccgcagtgacatgtccgttgaagaagccattgaactggtggacaaatgcataactgagatcaggtcaaggctggtgattgcaccaccaaactttgtgatcaagatcgtggacaaggatggagctcgtacacacgcttggcgtcagtctgttcaagatgtcaccactgcttctgtctaagtctgttatgttgtgttttctactaagctggcattagcttctttttcttttctttctttcaactctagaagcttatatgacttgtgttaaactttgaaatgactttcttatgagagaacaacctaaacatgttcttgttccacgaaaaaaaaaaaaaaaa

SEQ ID NO: 5916 - protein, 204 aa, Glycine max
  misc_feature: Ceres CLONE ID no. 1074722
  misc_feature: Ceres CDNA ID no. 29191726
  misc_feature (1)..(182): Pfam Name: Proteasome PFAM Desc: Proteasome A
  misc_feature: Homolog of GI Number: 23505793 NR Desc: At3g22630/F16J14_20
  misc_feature: Homolog of GI Number: 21592467 NR Desc: proteasome chain protein
  misc_feature: Homolog of GI Number: 52548238 NR Desc: 20S proteasome beta 4 subunit
  misc_feature: Homolog of GI Number: 53771821 NR Desc: putative beta 4 proteasome subunit
  misc_feature: Homolog of GI Number: 50917941 NR Desc: 20S proteasome beta 4 subunit
  misc_feature: Homolog of GI Number: 17380213 NR Desc: Proteasome subunit beta type 2
  misc_feature: Homolog of GI Number: 14594929 NR Desc: putative beta4 proteasome subunit
  misc_feature: Homolog of GI Number: 49119183 NR Desc: MGC80364 protein
  misc_feature: Homolog of GI Number: 47125243 NR Desc: MGC84496 protein
MECVFGLVGNGFAIVAADTSAVHSILVHKNNEDKIMLLDSHKLIAASGEPGDRVQFTEYVQKNVSLYQFRNGIPLTTAAAANFTRGELATALRKNPYSVNILMAGYDKEAGASLYYIDYIATLHKVDKGAFGYGSYFSLSTMDRHFRSDMSVEEAIELVDKCITEIRSRLVIAPPNFVIKIVDKDGARTHAWRQSVQDVTTASV

SEQ ID NO: 5917 - DNA, 710 bp, Glycine max
  misc_feature: Ceres CLONE ID no. 1074832
  misc_feature: Ceres CDNA ID no. 25446515
  CDS (79)..(459): REFERENCED BY SEQ ID NO: 5918
gttcaaatagtcacattttctccaagagcatttttgtatgtatagacccttttaaagaagcagcagaagcagaaagaaatggaggagaaaaaagagctcaaaaagtctaaggttatcaaaatagactctcaaaaatcatgggaacaccacatctctcatgccaccaataaaaagtacccagttgtggttcatttctctgctttctggtgtgtgccttctatagttatgaatcctttctttcaagaattagcctccacctatgaagatgttttgtttctgacgttggatgtggatgaggttaaggaaattgcttccaagatggaaatcaaagccatgcccacctttctgttactgagtggagggactcccatggacaaaattgtgggtgcaaatcctgatgaaataaggaaaaggattgatcattttgttaactcaactcattcctacaaatctgtgtaaaccatgcacatgatgaacaagaagttggccaaatcctagaactgttgttcattgtactaggaaccatttcatatatgttttatattccaaagtaatattaatactggttgaattctgtgcttgtttgtgtatgtttggtgagcaagggaaagtcactggagtgtgaatggtactttgtattgagtttcatcatgatgacattattctcttataatattctttcttgttgtaccaaaaaaaaaaaaaaaaaa

SEQ ID NO: 5918 - protein, 126 aa, Glycine max
  misc_feature: Ceres CLONE ID no. 1074832
  misc_feature: Ceres CDNA ID no. 25446515
  misc_feature (12)..(118): Pfam Name: Thioredoxin PFAM Desc: Thioredoxin
  misc_feature: Homolog of GI Number: 4928460 NR Desc: thioredoxin h
  misc_feature: Homolog of GI Number: 5006623 NR Desc: thioredoxin
  misc_feature: Homolog of GI Number: 21554120 NR Desc: thioredoxin h
  misc_feature: Homolog of GI Number: 4973262 NR Desc: thioredoxin
  misc_feature: Homolog of GI Number: 71533153 NR Desc: thioredoxin h
  misc_feature: Homolog of GI Number: 50928931 NR Desc: OSJNBa0089N06.15
  misc_feature: Homolog of GI Number: 34896158 NR Desc: putative thioredoxin
  misc_feature: Homolog of GI Number: 24637227 NR Desc: thioredoxin h
  misc_feature: Homolog of GI Number: 34897150 NR Desc: putative thioredoxin
  misc_feature: Homolog of GI Number: 27543511 NR Desc: thioredoxin h
MEEKKELKKSKVIKIDSQKSWEHHISHATNKKYPVVVHFSAFWCVPSIVMNPFFQELASTYEDVLFLTLDVDEVKEIASKMEIKAMPTFLLLSGGTPMDKIVGANPDEIRKRIDHFVNSTHSYKSV

SEQ ID NO: 5919 - DNA, 710 bp, Glycine max
  misc_feature: Ceres CLONE ID no. 1074881
  misc_feature: Ceres CDNA ID no. 29191193
  CDS (44)..(451): REFERENCED BY SEQ ID NO: 5920
actgcacgggtgttagatccgatctgaaaccgatcatctagcgatggacttagctgaactttgggcgattttcgggccgggtttctccggcgctgttttcggcaccggctggtggttttgggtcgacgccgtcgtatgcagctccatccaagttcccttcctccactaccttcccggcatattcgcctccctcggagcattgatgttcaattgcgtcagaaaagaagatatcgattactctccttatgacgaaggcgaatggaggttgaagctatggcttttcatagcgtatgtcgtggcgtttgtttccctagctgcttctgttggtttgctgattcaagattcggtcgtcaaaactgggccttccacctggactggtgtcgccggtgtctttcaatgtgtatttgtattgataagtgggctaatgtattggacatcacactccgagtaagtagactcgcaggcaaatacttactccaacgcagatacatgtggtgacaacttaagaatgcctctcgtttcttcttctctgtaaattcttgtgtcttgtctggtcaagctttgtgttgtgtgctagattcctccattgcagtggtgtgtgtttgttttaaactttgtcgttccaagcttggtttaagtcgtagcttcctatgcagaggatggatagaaaaaaatcttcaactttgtgtgaatgttaaaaaaaaaaaaaa

SEQ ID NO: 5920 - protein, 135 aa, Glycine max
  misc_feature: Ceres CLONE ID no. 1074881
  misc_feature: Ceres CDNA ID no. 29191193
  misc_feature (1)..(134): Pfam Name: UPF0220 PFAM Desc: Uncharacterised protein family
  misc_feature: Homolog of GI Number: 8778790 NR Desc: T32E20.29
  misc_feature: Homolog of GI Number: 54641349 NR Desc: GA13431
  misc_feature: Homolog of GI Number: 24657484 NR Desc: CG15012
  misc_feature: Homolog of GI Number: 57043280 NR Desc:  similar to Small membrane protein 1
  misc_feature: Homolog of GI Number: 50759926 NR Desc:  similar to Small membrane protein 1
MDLAELWAIFGPGFSGAVFGTGWWFWVDAVVCSSIQVPFLHYLPGIFASLGALMFNCVRKEDIDYSPYDEGEWRLKLWLFIAYVVAFVSLAASVGLLIQDSVVKTGPSTWTGVAGVFQCVFVLISGLMYWTSHSE

SEQ ID NO: 5921 - DNA, 542 bp, Glycine max
  misc_feature: Ceres CLONE ID no. 1074893
  misc_feature: Ceres CDNA ID no. 36706268
  CDS (71)..(403): REFERENCED BY SEQ ID NO: 5922
ctagtttctgttctccctctttcaccgcagtgttagggtttctgaagcctccaaccagaaagagagggaaatggctcccaaacatcctagtacgggtttgtttgttggattgaacaagggtcacgttgtcaccaagaaggagttgcctccacgcccttcagatcgtaaggggaaaacaagcaagcgagtgcactttgtgaggaacctcattcgagaggttgccggctttgcaccttatgaaaagcgaataactgagttgctcaaggttggaaaagataagagggcactgaaagttgccaagagaaagcttggaacccataagcgcgcaaagaagaagagagaggagatgtccaatgttctccggaagatgagggctggtggagctggagacaagaagaaataagtcttgtttactttttctagtttcactagactgtttcgatgtacgagttgtcttatttttgttttagttcaagattttgctttgagaaatatgttttacctaatcgagacatgatttactcaaaaaaaaaaaaaaaaaa

SEQ ID NO: 5922 - protein, 110 aa, Glycine max
  misc_feature: Ceres CLONE ID no. 1074893
  misc_feature: Ceres CDNA ID no. 36706268
  misc_feature (5)..(103): Pfam Name: Ribosomal_L36e PFAM Desc: Ribosomal protein L36e
  misc_feature: Homolog of GI Number: 57471698 NR Desc: ribosomal protein L36
  misc_feature: Homolog of GI Number: 34908154 NR Desc: putative 60S RIBOSOMAL PROTEIN L36
  misc_feature: Homolog of GI Number: 50931673 NR Desc: putative 60S ribosomal protein L36
  misc_feature: Homolog of GI Number: 56182368 NR Desc: putative 60S ribosomal protein L36
  misc_feature: Homolog of GI Number: 12642884 NR Desc: putative 60S ribosomal protein
  misc_feature: Homolog of GI Number: 20148501 NR Desc: 60S ribosomal protein L36
  misc_feature: Homolog of GI Number: 21592383 NR Desc: 60S ribosomal protein L36
  misc_feature: Homolog of GI Number: 1276967 NR Desc: putative ribosomal protein
  misc_feature: Homolog of GI Number: 17865758 NR Desc: 60S ribosomal protein L36
  misc_feature: Homolog of GI Number: 21554932 NR Desc: 60S RIBOSOMAL PROTEIN L36 homolog
MAPKHPSTGLFVGLNKGHVVTKKELPPRPSDRKGKTSKRVHFVRNLIREVAGFAPYEKRITELLKVGKDKRALKVAKRKLGTHKRAKKKREEMSNVLRKMRAGGAGDKKK

SEQ ID NO: 5923 - DNA, 970 bp, Glycine max
  misc_feature: Ceres CLONE ID no. 1074954
  misc_feature: Ceres CDNA ID no. 25893157
  CDS (2)..(730): REFERENCED BY SEQ ID NO: 5924
aaattcgaatccgaaaactcaatcggagctctttggtttttgtcctgtcgccggagctgatatcgatttcaatctcgtgttggctcagtttcagagggatatggattgggacaacgtagcagctgaggatgtgatcgaggccctgagagaagtcgaatggtcgacgcctcctcgttccttcggagagttcttctctagattcgcgttccctcgctctttctctaagtggaagagccgtctcaaatgcaacctctactactaccggacgaattactttatcctggtgatattcgttctgggacttgctttgattacaagaccattggctattgtgggtgctgcttttacggccttgagcatagctttccttaacgacagttttgcggctacttttaacgagaagtttataaggactattaggcttttctctccacacttggccgcaaaaatgaggcctccccacatgcctgtcatccgtgggagatcagcagcaagaaagacagtatacgtttgtgggaaaccacgatgggtctttgttgtcatattcctaacagccagtcttgtcatgtggttctcttcctgcggcttgttgtgggtcctctatgcacttctcacttccctcacattggttattgttcatgcaagcgtgagaacaccaaatctcaaggcacgcttaaacacattccgtgaagagtttcgagctgtctggcgaaactacagtgaactttaagtcacaggttactacagaatctagaagcaaaccgagcagccatcaagttgtcaagtaaccagcagccatcatgttgtcaagtaaccatggtcagatgatgcagacatacttgaccaagttactttatttgctgtagttatgctcatacatttcaagactgtgttagtgattttactttacaatactcactttttttattatacaagtagcataatctttacctgaaaaaaaaaaaaaaaa

SEQ ID NO: 5924 - protein, 209 aa, Glycine max
  misc_feature: Ceres CLONE ID no. 1074954
  misc_feature: Ceres CDNA ID no. 25893157
  misc_feature (16)..(178): Pfam Name: PRA1 PFAM Desc: PRA1 family protein
  misc_feature: Homolog of GI Number: 21360427 NR Desc: At3g11395/At3g11395
  misc_feature: Homolog of GI Number: 53749355 NR Desc: unknow protein
  misc_feature: Homolog of GI Number: 34908286 NR Desc: P0005H10.15
  misc_feature: Homolog of GI Number: 15810043 NR Desc: AT5g02040/T7H20_90
MDWDNVAAEDVIEALREVEWSTPPRSFGEFFSRFAFPRSFSKWKSRLKCNLYYYRTNYFILVIFVLGLALITRPLAIVGAAFTALSIAFLNDSFAATFNEKFIRTIRLFSPHLAAKMRPPHMPVIRGRSAARKTVYVCGKPRWVFVVIFLTASLVMWFSSCGLLWVLYALLTSLTLVIVHASVRTPNLKARLNTFREEFRAVWRNYSEL

SEQ ID NO: 5925 - DNA, 808 bp, Glycine max
  misc_feature: Ceres CLONE ID no. 1075173
  misc_feature: Ceres CDNA ID no. 29191194
  CDS (108)..(536): REFERENCED BY SEQ ID NO: 5926
aaccccgatcattcgcaccgaccacatcctcatcgtctccaacctcggcgaaaccctagcctagccccgccgaatcgcgagtccccccgaagccggagcaagccgagatgtcccgcaccggaccgatcgcccaggactgggagccggtggtcgtgcgcaagaagctgcccaacgccgccgccaagaaggacgagaaggccgtcaacgccgcccgccgcgccggcgtcgacatcgacatcgccaagaagcataatgctgggacaaacaaagctgctcataccaccacatcgctcaatacaaagaggcttgatgatgatacagagaatcttgctcatgagcgtgtgccgtcagacctgaagaagagcattatgcaggctagaacggacaagaagctcacacaggcacagcttgcacagctgatcaatgagaagccacaagtcatccaggagtacgagtcaggcaaggctatcccaaaccaacagatcatcggcaagctggaaagggctcttggcacaaagctgcgaggcaagaagtgaagctgcgtgtgcatctgacaggagtcgaggctttcaagagagcttggctgggcaagtttaccgctaaataaagcttgtctactaaatcatgcgacttaagaaaaccccggagtttggtatttcgctcaggtttgggtgaatgtaattattagcttctgtgaacaactctgtatctgggtttcgtttcgtcagcgtgtcttcgtgaatgtgaactgttctgaatgcctgaacctttatataacttgtctctgttgccaaaaaaaaaaaaaaaa

SEQ ID NO: 5926 - protein, 142 aa, Glycine max
  misc_feature: Ceres CLONE ID no. 1075173
  misc_feature: Ceres CDNA ID no. 29191194
  misc_feature: null
  misc_feature: Useful for making plants with altered Lignin content
  misc_feature: Useful for making plants with modulated heat sensitivity
  misc_feature (87)..(141): Pfam Name: HTH_3 PFAM Desc: Helix
  misc_feature: Homolog of GI Number: 50944921 NR Desc: putative ethylene
  misc_feature: Homolog of GI Number: 12642936 NR Desc: putative transcriptional coactivator protein
  misc_feature: Homolog of GI Number: 20086364 NR Desc: putative multiprotein bridging factor 1
  misc_feature: Homolog of GI Number: 8895787 NR Desc: multiprotein bridging factor 1
  misc_feature: Homolog of GI Number: 2285788 NR Desc: Multiprotein bridging factor 1
  misc_feature: Homolog of GI Number: 28466837 NR Desc: At3g24500
  misc_feature: Homolog of GI Number: 62859835 NR Desc: LOC549440
  misc_feature: Homolog of GI Number: 5669634 NR Desc: ethylene
  misc_feature: Homolog of GI Number: 57091993 NR Desc:  similar to endothelial differentiation
MSRTGPIAQDWEPVVVRKKLPNAAAKKDEKAVNAARRAGVDIDIAKKHNAGTNKAAHTTTSLNTKRLDDDTENLAHERVPSDLKKSIMQARTDKKLTQAQLAQLINEKPQVIQEYESGKAIPNQQIIGKLERALGTKLRGKK

SEQ ID NO: 5927 - DNA, 685 bp, Glycine max
  misc_feature: Ceres CLONE ID no. 1075225
  misc_feature: Ceres CDNA ID no. 29191768
  CDS (2)..(472): REFERENCED BY SEQ ID NO: 5928
cccaacccacgccctcccgtcccgtctccccgccgcctcctcctcctcctccgcgtcgcaaaccctcgtcctaatccgccgaatcccgcgacccacgaaccaaggcagatcgatggcgaagagctcgttcaagctggagcacccgctcgagaggaggcaggcggaggctaaccgcataagggagaagtactctgacagaattcctgtgatcgttgagaaggctgggaagagtgatattcctgacattgacaagaaaaagtacctcgtccccgcggaccttacagttggacagttcgtgtacgttgtccggaagcggatcaagctcagtgctgagaaggcgatattcatctttgtgaagaacactcttccaccgacagctgccctgatgtctgccatttacgaggagaacaaggacgaggacggcttcctctacatgacctacagcggcgagaacaccttcggattgctctagatggcgctggctgccacggcaatcgctctgaatgcctcctgtaaataaggcgtgccaatcaactgtgtatatattccggtttgcctcgtcgtaggatctttaaattgcacaaccaagaaaaacctattcgtatcctgacttatcctatttgaatgttctgacttatatatatatcaagtaagactctgaaattccgcaaaaaaaaaaaaaaaa

SEQ ID NO: 5928 - protein, 119 aa, Glycine max
  misc_feature: Ceres CLONE ID no. 1075225
  misc_feature: Ceres CDNA ID no. 29191768
  misc_feature (14)..(117): Pfam Name: MAP1_LC3 PFAM Desc: Microtubule associated protein 1A/1B
  misc_feature: Homolog of GI Number: 50941899 NR Desc: putative microtubial binding protein
  misc_feature: Homolog of GI Number: 50928837 NR Desc: OSJNBa0053K19.12
  misc_feature: Homolog of GI Number: 34595981 NR Desc: microtubule
  misc_feature: Homolog of GI Number: 50937683 NR Desc: putative microtubule associated protein
  misc_feature: Homolog of GI Number: 30102824 NR Desc: At4g21980
  misc_feature: Homolog of GI Number: 21553487 NR Desc: symbiosis
  misc_feature: Homolog of GI Number: 32401365 NR Desc: autophagy
  misc_feature: Homolog of GI Number: 21592920 NR Desc: putative microtubule
  misc_feature: Homolog of GI Number: 37776903 NR Desc: putative microtubule
  misc_feature: Homolog of GI Number: 2072023 NR Desc: symbiosis
  misc_feature: Useful for accelerating flowering time
  misc_feature: Useful for making ornamental plants with modified flowers
  misc_feature: Useful for making plants with increased biomass and foliage
  misc_feature: Useful for making shorter plants
  misc_feature: Useful for making shorter plants and plants with modified flowers
  misc_feature: Useful for making smaller plants
  misc_feature: Useful for modifying plant structure
  misc_feature: Useful for sterility
MAKSSFKLEHPLERRQAEANRIREKYSDRIPVIVEKAGKSDIPDIDKKKYLVPADLTVGQFVYVVRKRIKLSAEKAIFIFVKNTLPPTAALMSAIYEENKDEDGFLYMTYSGENTFGLL

SEQ ID NO: 5929 - DNA, 1040 bp, Glycine max
  misc_feature: Ceres CLONE ID no. 1075266
  misc_feature: Ceres CDNA ID no. 25446801
  CDS (33)..(845): REFERENCED BY SEQ ID NO: 5930
ctgagtctcagtttcaacaattgaagaagaaaatggttgacaatgaatcgctctcagaattcctcgcatctgcggtcgacgcggctcagaaagctggcgagattattcgaaaaggcttctaccagaccaaaaacgtcgaacacaaaggacaggttgatttggtcacagaaactgataaagcatgtgaagaactcatatttaataatctcaaacagctttatcccactcacaagttcatcggggaagaaaccacggctgcctatggcaccacagaacttacagatgaacccacgtggatagttgatcccctggatggaactactaactttgtgcatgggttcccctttgtttgtgtctccattggtctcacaattggaaaaactcctacgattggtgttgtatacaatccaataattaatgagctttttactggaatccgtggaaaaggtgcctttttgaatgggaatcccataaaagtatcgtctcaaactgaactaatcagctcccttcttgcaactgaggccggaacaaaacgtgaccaagaaacagtagatgcctctaccaataggattaaaagcttgcttttcaaggtgagatctcttcgaatgagtggctcctgcgctctgaatctttgtggaattgcatgtggaaggctggatgtattctttgaacttggctttggtggtccttgggatgtagcaggtggtgctgtcattgttagagaagctggaggtgttgtatttgatccgtccggtgcagattttgacataacatctcagcgagtagcagcttcaaactctttcttaaaagatgcacttgttgatactctgcgccaaatggtttgagaaatttactattaatcaatggcaagaacttatcatataagccatctttgttagttcgtttagcttttgcccaaataatttttaagattctcagtttttggtaaaagttgcctgataaaaatgttttagaatttttaacttctgtgaatccaaagtattcaatagtaaatcactttaaatccttccaaaaaaaaa

SEQ ID NO: 5930 - protein, 270 aa, Glycine max
  misc_feature: Ceres CLONE ID no. 1075266
  misc_feature: Ceres CDNA ID no. 25446801
  misc_feature (6)..(267): Pfam Name: Inositol_P PFAM Desc: Inositol monophosphatase family
  misc_feature: Homolog of GI Number: 55275406 NR Desc: L
  misc_feature: Homolog of GI Number: 55275408 NR Desc: L
  misc_feature: Homolog of GI Number: 6728975 NR Desc: putative myo
  misc_feature: Homolog of GI Number: 21553679 NR Desc: putative myo
  misc_feature: Homolog of GI Number: 79312679 NR Desc: 3'
  misc_feature: Homolog of GI Number: 1709205 NR Desc: Inositol
  misc_feature: Homolog of GI Number: 3914097 NR Desc: Inositol
  misc_feature: Homolog of GI Number: 1709203 NR Desc: Inositol
  misc_feature: Homolog of GI Number: 50399931 NR Desc: putative myo
  misc_feature: Homolog of GI Number: 30143275 NR Desc: myo inositol monophosphatase isoform 1
MVDNESLSEFLASAVDAAQKAGEIIRKGFYQTKNVEHKGQVDLVTETDKACEELIFNNLKQLYPTHKFIGEETTAAYGTTELTDEPTWIVDPLDGTTNFVHGFPFVCVSIGLTIGKTPTIGVVYNPIINELFTGIRGKGAFLNGNPIKVSSQTELISSLLATEAGTKRDQETVDASTNRIKSLLFKVRSLRMSGSCALNLCGIACGRLDVFFELGFGGPWDVAGGAVIVREAGGVVFDPSGADFDITSQRVAASNSFLKDALVDTLRQMV

SEQ ID NO: 5931 - DNA, 1163 bp, Glycine max
  misc_feature: Ceres CLONE ID no. 1075340
  misc_feature: Ceres CDNA ID no. 29191188
  CDS (100)..(975): REFERENCED BY SEQ ID NO: 5932
aatttcctttagcgtctctttaaaagttgtaatctttaggggcctttgtgaagagaaagagagagatctcagatcatcaaaagtgcgtttggtaaagggatggcaggtcgctacgatcggaaccccttcgacgaaggagacgaagtcaatccttttgcgaatcccggaagtgtacccgctgcttcgagttccagactatcgcctttgcctccggaacctgctggttttggttttggtcgcactgttgacgttcctcttgacagaccagggtctggtgcccaggatctgaagaagaaagagaaggagctccaagccaaagaagctgagcttaaacgacgggagcaggatctcaaacggaaagaggatgctgctgcacgagctggaattgttatcgaggtgaaaaactggccgcccttgttccctcttatccaccatgacattgcaaatgaaattcccattcgtctccaaaggctacagtatattgctttctcaacatacttggggttggttcttgcacttttctggaacgtcatcgccgttactacagcttggatcaaaggagaaggagtaacgatttggcttcttgctcttatttacttcatctcgggtgtcccaggaggctatgtgttatggtatcgtcctctctaccgtgccttcagaaatgatagcgcattgagctttggatggtttttcttgttctacatgctccacatagctttctgcgtctttgctgcagttgctcctcctgttgtcttcaaaggaaagtcacttgcgggcatattacctgcgctagatatgttgagcagtcaggcactggtcggaatcttctacttcatcgggtttgcgtttttctgccttgaatcagtggtcagcatctgggttattcagcaagtatacatgtacttccgagggagcgggaaagcagatgagatgaaaagggatgctgcaagaggagccatgagagctgcggtttgatacaaatgatttgaactcatgatcgctcctgaagctattggttgtgatgtgtaactttttacattcttcagctctttgacctttttgttttgttttgtttttacagcagcaaagtaaaaaaaaaaatttgtgtatttgtttttattcaatttgagttcagatttcatacaccaaaaaaaaaaaaaaaa

SEQ ID NO: 5932 - protein, 291 aa, Glycine max
  misc_feature: Ceres CLONE ID no. 1075340
  misc_feature: Ceres CDNA ID no. 29191188
  misc_feature: The plant produces a reduced number of seeds.
  misc_feature: Useful for biocontainment applications
  misc_feature (99)..(273): Pfam Name: SCAMP PFAM Desc: SCAMP family
  misc_feature: Homolog of GI Number: 19310673 NR Desc: putative secretory carrier membrane protein
  misc_feature: Homolog of GI Number: 15220305 NR Desc: secretory carrier membrane protein
  misc_feature: Homolog of GI Number: 62320793 NR Desc: putative secretory carrier
  misc_feature: Homolog of GI Number: 50902072 NR Desc: secretory carrier membrane protein
  misc_feature: Homolog of GI Number: 34899754 NR Desc: putative secretory carrier membrane protein
  misc_feature: Homolog of GI Number: 3941289 NR Desc: similarity to SCAMP37
  misc_feature: Homolog of GI Number: 53749380 NR Desc: putative secretory carrier membrane protein
  misc_feature: Homolog of GI Number: 21592580 NR Desc: putative secretory carrier
  misc_feature: Homolog of GI Number: 50901240 NR Desc: putative secretory carrier membrane protein
  misc_feature: Homolog of GI Number: 50900486 NR Desc: OSJNBa0093F12.6
  misc_feature: Useful for sterility
MAGRYDRNPFDEGDEVNPFANPGSVPAASSSRLSPLPPEPAGFGFGRTVDVPLDRPGSGAQDLKKKEKELQAKEAELKRREQDLKRKEDAAARAGIVIEVKNWPPLFPLIHHDIANEIPIRLQRLQYIAFSTYLGLVLALFWNVIAVTTAWIKGEGVTIWLLALIYFISGVPGGYVLWYRPLYRAFRNDSALSFGWFFLFYMLHIAFCVFAAVAPPVVFKGKSLAGILPALDMLSSQALVGIFYFIGFAFFCLESVVSIWVIQQVYMYFRGSGKADEMKRDAARGAMRAAV

SEQ ID NO: 5933 - DNA, 625 bp, Glycine max
  misc_feature: Ceres CLONE ID no. 1075364
  misc_feature: Ceres CDNA ID no. 29191769
  CDS (42)..(404): REFERENCED BY SEQ ID NO: 5934
ctcgctccgtcaagccaaaaaccctaagagaagcggagaaaatggtgcagcgtcttgtatatcgttcgcgtcacagctacgccaccaaatccaaccagcacaggatcgtcaagaccccaggtggtaaattgacataccagaccaccaagaagcgtgcaagtggacccaagtgccccgttaccggcaagcgtattcagggtatccctcacttgaggcctgctgagtacaagagatcccgattgtccagaaacagaaggaccgtgaaccgtgcctatggtggtgtgttgtccgctcttgctgttagagaaagaatcgttcgtgctttccttgttgaggagcaaaagatagtgaagaaggtgttgaagcttcaaaaggccaaggaaaagcttgctcccaggagctagatcctcttagcttttttaaaacattgtctacttgccaaattttaaaactttttgtattcgtttgcttgactttgtcgacatttctcaaaatgtttggttatggtttctctttcaaatgctgcgtttaacaattcacgttttctacttatttggtgtttacaatgtgatttacattactcggttaataaattgtgcaatttaaagcaaaaaaaaaaaaaaaa

SEQ ID NO: 5934 - protein, 120 aa, Glycine max
  misc_feature: Ceres CLONE ID no. 1075364
  misc_feature: Ceres CDNA ID no. 29191769
  misc_feature (5)..(103): Pfam Name: Ribosomal_L34e PFAM Desc: Ribosomal protein L34e
  misc_feature: Homolog of GI Number: 13194822 NR Desc: putative 60S ribosomal protein L34
  misc_feature: Homolog of GI Number: 20259165 NR Desc: putative 60S ribosomal protein L34
  misc_feature: Homolog of GI Number: 21436403 NR Desc: putative 60S ribosomal protein L34
  misc_feature: Homolog of GI Number: 21594659 NR Desc: 60s ribosomal protein L34
  misc_feature: Homolog of GI Number: 1076636 NR Desc: ribosomal protein L34
  misc_feature: Homolog of GI Number: 47824936 NR Desc: Ribosomal protein L34e
  misc_feature: Homolog of GI Number: 2119150 NR Desc: ribosomal protein L34
  misc_feature: Homolog of GI Number: 50946109 NR Desc: putative ribosomal protein
  misc_feature: Homolog of GI Number: 50941301 NR Desc: putative ribosomal protein L34
  misc_feature: Homolog of GI Number: 57471712 NR Desc: ribosomal protein l34
MVQRLVYRSRHSYATKSNQHRIVKTPGGKLTYQTTKKRASGPKCPVTGKRIQGIPHLRPAEYKRSRLSRNRRTVNRAYGGVLSALAVRERIVRAFLVEEQKIVKKVLKLQKAKEKLAPRS

SEQ ID NO: 5935 - DNA, 999 bp, Glycine max
  misc_feature: Ceres CLONE ID no. 1075478
  misc_feature: Ceres CDNA ID no. 29191770
  CDS (3)..(713): REFERENCED BY SEQ ID NO: 5936
accgtcccttgcatttcttcgccgattcctcctcgtcgccctcccccctcccctggcgacctaccaccgccgcccagccaccgccgtgccctagcccggcctcgccgccgccggcctcgctccccatacccctccccgcctccgcctcccacgcgtctccgtcgcctcctccgcctcccacgcgcggccgcgtcccgcatcgccgcgaccccgtccgatcccgagcttgtttgagcatccgttcgtacagtatgtcggagaagccatctgatgatactactggccaggtgaggcctgaaggagatgtttctgatgtgaaagtggaaactgccaaccaggataaaggaaatgagatgccatcagcacagcaagaggaagcagtaatcaagaaaaagtatggaggagtactgcccaaaaagtcaccactcatatccaaggaccatgagcgagcttactttgattctgctgattgggctctgggaaagcaaggaggacatcctcaaaagcctaaagggccccttgaagcacttcggccgaaattacagcctacccagcagcaagcccgttcacgacggttccttcatgcatctactgacagcgacgagggtgccaactcgcctacggaggctacgaccccgaaccaggagtccaccctgagccaggagtccaccgaggaggccaaggccgccgagaacaaggaatccaccgagtagctcccatgccttttttgaacggaactctgccatttgctgcgcccatgccgtctcgttgctctagtaataagtattccggacgtcgtgtaacgcctgctgaattttgaactgaagtgtcgcagacatgctgttatccaccgcgctatgccattccatggctgttgatgcctgtaacagttcggtatgggatcgggaacattatgatgatgtcgcaccgagtgtcgtccgagtcggactcggacagaataaaagcgtgagagcctgaaatttaaaaaaaaaaaaaaaa

SEQ ID NO: 5936 - protein, 153 aa, Glycine max
  misc_feature: Ceres CLONE ID no. 1075478
  misc_feature: Ceres CDNA ID no. 29191770
  misc_feature (46)..(142): Pfam Name: Lg106 PFAM Desc: Lg106
  misc_feature: Homolog of GI Number: 4164473 NR Desc: negatively light
  misc_feature: Homolog of GI Number: 56744291 NR Desc: putative negatively light
  misc_feature: Homolog of GI Number: 34910886 NR Desc: P0003E08.9
  misc_feature: Homolog of GI Number: 5042462 NR Desc: putative negatively light
  misc_feature: Homolog of GI Number: 34905678 NR Desc: P0475H04.24
MSEKPSDDTTGQVRPEGDVSDVKVETANQDKGNEMPSAQQEEAVIKKKYGGVLPKKSPLISKDHERAYFDSADWALGKQGGHPQKPKGPLEALRPKLQPTQQQARSRRFLHASTDSDEGANSPTEATTPNQESTLSQESTEEAKAAENKESTE

SEQ ID NO: 5937 - DNA, 894 bp, Glycine max
  misc_feature: Ceres CLONE ID no. 1075509
  misc_feature: Ceres CDNA ID no. 24766049
  CDS (39)..(800): REFERENCED BY SEQ ID NO: 5938
agtaatcggaaaattctagagcatcgagagtttcttcaatggcgaatctccccaccgttctcgttaccggcgctagtggcaaaacaggtcagattgtgtacaagaagctgaaggagaggtcagacaagtttgtggcgaaggggttagtgagaactcctcaagggaaagaggagattggaggagaagatgatgtgttcattggtgatataagggatgctgatagcattacccctgcgattcaagggatcgatgcgcttgtgattctcactagcgctgtgcccaagatgaaacctgggtttgatcccactaaaggtggaagacctgagttcattttcgatgatggacaataccctgaacaggttgattggattggccagaagaaccaaatagatgctgccaaggctgctggtgttaagcatattgtcttggttgggtccatgggtggaacaaatcctgatcatcctctcaacaaactgggaaatgggaacatactgatttggaagaggaaagctgaacagtaccttgctgattctggtactccttacacaataatcagagctggaggacttctagacaaagaaggaggtgcacgagagctcctagttggcaaagacgatgagcttcttcaaacagacaccaaaaccgtccccagggctgatgttgctgaagtctgcattcaggcattgctgttcgaggaagctaagaataaagcatttgatctcggttcaaaaccagagggaaccagttctcccaccaatgacttcaaggctctcttctctcaagtcatcgctcgtttttagatcttctatctctattgcaactgaataatttgtgttgtaatgtaccaaaccttttaaaataaaatctccgggttcaataaaaaaaaaaaaaaaa

SEQ ID NO: 5938 - protein, 253 aa, Glycine max
  misc_feature: Ceres CLONE ID no. 1075509
  misc_feature: Ceres CDNA ID no. 24766049
  misc_feature (7)..(229): Pfam Name: Epimerase PFAM Desc: NAD dependent epimerase/dehydratase family
  misc_feature: Homolog of GI Number: 56554665 NR Desc: Chain B
  misc_feature: Homolog of GI Number: 45525631 NR Desc: COG0702: Predicted nucleoside
  misc_feature: Homolog of GI Number: 67923061 NR Desc: similar to Nucleoside
  misc_feature: Homolog of GI Number: 45506211 NR Desc: COG0702: Predicted nucleoside
  misc_feature: Homolog of GI Number: 23130188 NR Desc: COG0702: Predicted nucleoside
  misc_feature: Homolog of GI Number: 45508602 NR Desc: COG0702: Predicted nucleoside
  misc_feature: Homolog of GI Number: 48894355 NR Desc: COG0702: Predicted nucleoside
  misc_feature: Homolog of GI Number: 45525136 NR Desc: COG0702: Predicted nucleoside
  misc_feature: Homolog of GI Number: 23126852 NR Desc: COG0702: Predicted nucleoside
  misc_feature: Homolog of GI Number: 21616072 NR Desc: Tic62 protein
MANLPTVLVTGASGKTGQIVYKKLKERSDKFVAKGLVRTPQGKEEIGGEDDVFIGDIRDADSITPAIQGIDALVILTSAVPKMKPGFDPTKGGRPEFIFDDGQYPEQVDWIGQKNQIDAAKAAGVKHIVLVGSMGGTNPDHPLNKLGNGNILIWKRKAEQYLADSGTPYTIIRAGGLLDKEGGARELLVGKDDELLQTDTKTVPRADVAEVCIQALLFEEAKNKAFDLGSKPEGTSSPTNDFKALFSQVIARF

SEQ ID NO: 5939 - DNA, 500 bp, Glycine max
  misc_feature: Ceres CLONE ID no. 1075559
  misc_feature: Ceres CDNA ID no. 25446992
  CDS (74)..(454): REFERENCED BY SEQ ID NO: 5940
acagattagggtgcttgtgttgtgttcggtgaagtgagtagtgaaggtgctgaatcgaatcgaatctcctaagatggccgcgagcgatcgcacagtgttgcaattctcttcatcatcttcttcttcgcagagcttgtccgcgaaggtccaccctctggtcatcttcaacatctgcgattgctacgttcgacgccctgaccaagccgatcgcgtcatcggaaccctactcggctccgtccttcccgatggaaccgtcgatatccgcaattcctatgctgttcctcacaacgaatctatcgaacaggttgcgttggatatagagtaccaccacaatatgttaatatcccaccaaaaagtgaatccaaaggaaatcatagtaggattttacaaggttgtgtttttctttctttattgtcttagtgttagtcaaacaataacaatattagtcatgtgagacttgccaataaaacattattcttgccaaaaaaaaaaaaaaaaaa

SEQ ID NO: 5940 - protein, 126 aa, Glycine max
  misc_feature: Ceres CLONE ID no. 1075559
  misc_feature: Ceres CDNA ID no. 25446992
  misc_feature (18)..(105): Pfam Name: Mov34 PFAM Desc: Mov34/MPN/PAD
  misc_feature: Homolog of GI Number: 20260040 NR Desc: 26S proteasome regulatory subunit
  misc_feature: Homolog of GI Number: 20259173 NR Desc: putative 26S proteasome regulatory subunit
  misc_feature: Homolog of GI Number: 50931081 NR Desc: putative 26S proteasome regulatory subunit
  misc_feature: Homolog of GI Number: 19113090 NR Desc: putative 26s proteasome regulatory subunit
  misc_feature: Homolog of GI Number: 67083805 NR Desc: eukaryotic translation initiation factor 3 subunit 5 epsilon
  misc_feature: Homolog of GI Number: 68382896 NR Desc:  similar to eukaryotic translation initiation factor 3
  misc_feature: Homolog of GI Number: 66849935 NR Desc: eukaryotic translation initiation factor 3 subunit EifCf
  misc_feature: Homolog of GI Number: 34858904 NR Desc: similar to eukaryotic translation initiation factor 3
  misc_feature: Homolog of GI Number: 50749406 NR Desc:  similar to eukaryotic translation initiation factor 3
  misc_feature: Homolog of GI Number: 30582627 NR Desc: eukaryotic translation initiation factor 3
MAASDRTVLQFSSSSSSSQSLSAKVHPLVIFNICDCYVRRPDQADRVIGTLLGSVLPDGTVDIRNSYAVPHNESIEQVALDIEYHHNMLISHQKVNPKEIIVGFYKVVFFFLYCLSVSQTITILVM

SEQ ID NO: 5941 - DNA, 868 bp, Glycine max
  misc_feature: Ceres CLONE ID no. 1075575
  misc_feature: Ceres CDNA ID no. 29191277
  CDS (106)..(624): REFERENCED BY SEQ ID NO: 5942
acaccacccggagaactgagctgagatactacttctgttctcttctccccccttttccgagccccccacccgtcatctctccagcctccagtctccgccgacgccatggggcaggtctgggcgtctctgcaagagaagctccaagggcggcactggaaggagaggcaggtgcggaagatcaccgacagggtgttcgaccggctcaccgaggatacccggaagcccgagaaggacgccctcaagttcgaggaggtctacatcgccgtcctctgcgtctacaatgacatcaacaagtacttgccggggccgcactacgaccctccgtccaaggagaggctcaaggaactcatgaaagagtttgacatcgacatgaacggtctcctggatcgcgaggagttcgcggagttcatccggaagctgaccgccgagtcactctgcgcgatcagcctcaagctgatcatcacgctggtcgccgcccctgcgctggcgctggcgaccaagagggcaaccgagggcgtccccggcgtcggcaaggtagtgcacaaggtgcccaatgccatctatgccgccgccatcaccatggctgccgtgctcatccagagatccgccgagggcgtcgagtagaagcggcatcgcgccgtgaactgtagatgcaccaggcaaccagggagggtgtaaatgtgctgtgatttgccgtgtgaagggtgatgccctgtgggacttatagttttttctgtaataccttcctgtctgtgcttcttggtgttgctagcctggtgtgattcaaaaagacagtattcgctgcttgttgacatgataaattcttggactaaataaagccgtggtcctgctaaaaaaaaaaaaaaaa

SEQ ID NO: 5942 - protein, 172 aa, Glycine max
  misc_feature: Ceres CLONE ID no. 1075575
  misc_feature: Ceres CDNA ID no. 29191277
  misc_feature (77)..(105): Pfam Name: efhand PFAM Desc: EF hand
  misc_feature: Homolog of GI Number: 50928477 NR Desc: OSJNBa0083N12.20
  misc_feature: Homolog of GI Number: 50928479 NR Desc: OSJNBa0083N12.21
MGQVWASLQEKLQGRHWKERQVRKITDRVFDRLTEDTRKPEKDALKFEEVYIAVLCVYNDINKYLPGPHYDPPSKERLKELMKEFDIDMNGLLDREEFAEFIRKLTAESLCAISLKLIITLVAAPALALATKRATEGVPGVGKVVHKVPNAIYAAAITMAAVLIQRSAEGVE

SEQ ID NO: 5943 - DNA, 733 bp, Glycine max
  misc_feature: Ceres CLONE ID no. 1075592
  misc_feature: Ceres CDNA ID no. 29191681
  CDS (3)..(512): REFERENCED BY SEQ ID NO: 5944
gcacgccgctgattcacctcggcagttcgtctccacattattctctccggcggcggcgactcgactctcggcgaggggcggagatgtcctacctactcccgcacctgcactccggctgggcggtggaccaggccatcctcgccgaggaggagcggctggtcatgatacgcttcggccacgactgggacgagacatgcatgcagatggacgaggtgctgtcaggggtggctgagaccataaagaactttgcggtgatctacctcgtcgacatcacggaggttccggacttcaacaccatgtacgagctgtacgacccgtcgacggtgatgttcttcttccgcaacaagcacatcatgattgatctcgggacaggaaacaacaacaagatcaactgggcaatgaaagacaagcaagagtttgttgacattgtggagaccgtctacagaggagctcgtaagggccgtggtctggtgattgctcccaaggattactccaccaagtaccgttactgaggtatctgtgcctggctattcatgtgcagtgtgtggcctgctctgttctgtgaaatgagctgtgtgacccttgatgtaatgtctgtcaactttgaaagtgtcgcgtaactatgtatttgtatcttaaatacatgtcataaacctgtaaccctttgaaacaggacctgctgtctattggtattactgattaaagtgatatttggttcgaaaaaaaaaaaaaa

SEQ ID NO: 5944 - protein, 142 aa, Glycine max
  misc_feature: Ceres CLONE ID no. 1075592
  misc_feature: Ceres CDNA ID no. 29191681
  misc_feature (4)..(136): Pfam Name: DIM1 PFAM Desc: Mitosis protein DIM1
  misc_feature: Homolog of GI Number: 31432762 NR Desc: putative thioredoxin
  misc_feature: Homolog of GI Number: 21537271 NR Desc: putative thioredoxin
  misc_feature: Homolog of GI Number: 32493106 NR Desc: putative DIM
  misc_feature: Homolog of GI Number: 51474526 NR Desc:  thioredoxin
  misc_feature: Homolog of GI Number: 5729802 NR Desc: thioredoxin
  misc_feature: Homolog of GI Number: 50733538 NR Desc:  similar to dim1
  misc_feature: Homolog of GI Number: 62860202 NR Desc: TXNL4A
  misc_feature: Homolog of GI Number: 72087301 NR Desc:  similar to CG3058
  misc_feature: Homolog of GI Number: 71033043 NR Desc: mitosis protein dim1
MSYLLPHLHSGWAVDQAILAEEERLVMIRFGHDWDETCMQMDEVLSGVAETIKNFAVIYLVDITEVPDFNTMYELYDPSTVMFFFRNKHIMIDLGTGNNNKINWAMKDKQEFVDIVETVYRGARKGRGLVIAPKDYSTKYRY

SEQ ID NO: 5945 - DNA, 1266 bp, Glycine max
  misc_feature: Ceres CLONE ID no. 1075650
  misc_feature: Ceres CDNA ID no. 36703514
  CDS (502)..(954): REFERENCED BY SEQ ID NO: 5946
cttccccatcatctctacctgcttatgcattagagcccccggtgttgacttcgatttgcagctaagtcctgctctcctttcctttcagtccttgtagcttcttttttccttgcagtctactccctgttccgttgcaaataagcccctgagctctgtcacattctagcctcgactccttggtcttgggaggagttcgtcgcagatccgatctagagagcctccccgcaccacccatgtttaccttccccttcctctgacggccgccgccccccgatgaagctgcgcgttcgctgccgctcccactccttctccgtcgccttcctctactggttctacgacttctcatgaactcctcgcccctcgagaacgccgcatccatccagcctctagttgattagtagatccagcctcgtttcttccacgttcttgccttactccttcccgccatccaagaaaagagaatttccttttctggttcttggatcaagaacccgaccggccatgtcgtcgccgtcgcgccggagctccagccccgagagcaacatcgacggcggcagcggcagcggctccgccggtgacgagcgcaagcgcaagaggatgctgtccaacagggagtcggcgaggcggtcccgcgcgcgcaagcagcagcggatggaggagctcatcgccgaggccagccgcctccaggccgagaacgcgcgcgtggaggcccagatcggcgcctacacgaccgagctgaccaaggttgacggcgagaacgccgtgctccgcgcgcgccacggcgagctcgccgggcggctgcaggcgctcggcggcgtcctggagatcttccatgtggccggtgcgcccgttgacatcccagagatcccggacccgctgctccgcccatggcagtccccgtttgcgccccagctggccgccgccggtggcatgccggacgcgttccagttctgagccaagacaagtcatgccactgcgacattgcgccaccatggataagaagttgctgattactgctgcactactgctgctgaatagtattagtgctactagtttgtttggttcatgtttaattatggtttgattcgtgtcgcttatggtaatcctagaccattattagtacttattttgtgattgtaatcttgcctatcgtgtcctgtgctcctacccagtggatatggataagaacaatgtaattgatgtggtggagcacagcggattgtgcctatctttgtgttgatttgtaatacaaaaaaaaaaaaaaaa

SEQ ID NO: 5946 - protein, 150 aa, Glycine max
  misc_feature: Ceres CLONE ID no. 1075650
  misc_feature: Ceres CDNA ID no. 36703514
  misc_feature (24)..(88): Pfam Name: bZIP_1 PFAM Desc: bZIP transcription factor
  misc_feature: Homolog of GI Number: 62898531 NR Desc: bZIP transcription factor
  misc_feature: Homolog of GI Number: 14289165 NR Desc: glip19
  misc_feature: Homolog of GI Number: 51854369 NR Desc: putative bZIP protein
  misc_feature: Homolog of GI Number: 2130123 NR Desc: DNA
  misc_feature: Homolog of GI Number: 444047 NR Desc: ocs
  misc_feature: Homolog of GI Number: 40019253 NR Desc: ocs
  misc_feature: Homolog of GI Number: 71061098 NR Desc: bZIP protein
  misc_feature: Homolog of GI Number: 72398495 NR Desc: bZIP2 protein
  misc_feature: Homolog of GI Number: 2244744 NR Desc: bZIP DNA
  misc_feature: Homolog of GI Number: 20259249 NR Desc: putative bZIP transcription factor
MSSPSRRSSSPESNIDGGSGSGSAGDERKRKRMLSNRESARRSRARKQQRMEELIAEASRLQAENARVEAQIGAYTTELTKVDGENAVLRARHGELAGRLQALGGVLEIFHVAGAPVDIPEIPDPLLRPWQSPFAPQLAAAGGMPDAFQF

SEQ ID NO: 5947 - DNA, 1070 bp, Glycine max
  misc_feature: Ceres CLONE ID no. 1075730
  misc_feature: Ceres CDNA ID no. 29191878
  CDS (96)..(854): REFERENCED BY SEQ ID NO: 5948
aagaacgaagaccagaaaagaaaacagagtgattgaagaagagaatgatggggaattgaggttgtggtgaatgttggagttggagtaacccaacaatggcattgagactgagactcaaagtgtcttcaattgggtcaccttttctgcagttaggttcttctgcaactgctgccttctcattctcccaaccatgctctcttcccaaacttgcttttcatccaccacgcttgcaactcaacaaaaattcacacccaataaggttccttgttcgggctggtagaactgagtccaaaggtgttaccttgggcttcagggccccacaatttcagcttccagagcctcttactgggaaggtttggacattggaagattttgaagcatatcctgctctattggttatgtttatatgtaaccactgtccattcgttaagcacctgaaaaaagacattgtaaggcttacaaaattctatgtggagaaaggacttgcggtgattgccatatcttcaaattccgtagccacacacccccaggatggtccagaattcatggcagaagatgctaaactgtttgactatccttttccatacctatatgatgagtcacaggatgttgcacgagattttggagcagtttgtactccagaattttaccttttcaaaaaggatggtcgaaggccctttgagctggtttatcatggtcaatttgatgattcacgtccaagtaataatgtacccctcactggaagagacttgagcttggcaatagatcgtgttcttagtggccaacctgtaccatcagagcaaaaacctagtgttggatgcagcataaagtggcacccaaggaagaagttttgattgataaactgtaattatctttttcatcaaaagacattaatcagtgagttaaagtttctttttcaggttgctatgctttatgtaatgtcactaaccatattaggatgttacaccttattttctattcattcagtgttcctgttcacctacaatttccgtaagtgtgacttgcaaggaaatgatgtcatttgtggttctcaaaaaaaaaaaaaaaaa

SEQ ID NO: 5948 - protein, 252 aa, Glycine max
  misc_feature: Ceres CLONE ID no. 1075730
  misc_feature: Ceres CDNA ID no. 29191878
  misc_feature: Homolog of GI Number: 56420170 NR Desc: hypothetical conserved protein
  misc_feature: Homolog of GI Number: 48890864 NR Desc: COG0526: Thiol
  misc_feature: Homolog of GI Number: 67927425 NR Desc: similar to Peroxiredoxin
MALRLRLKVSSIGSPFLQLGSSATAAFSFSQPCSLPKLAFHPPRLQLNKNSHPIRFLVRAGRTESKGVTLGFRAPQFQLPEPLTGKVWTLEDFEAYPALLVMFICNHCPFVKHLKKDIVRLTKFYVEKGLAVIAISSNSVATHPQDGPEFMAEDAKLFDYPFPYLYDESQDVARDFGAVCTPEFYLFKKDGRRPFELVYHGQFDDSRPSNNVPLTGRDLSLAIDRVLSGQPVPSEQKPSVGCSIKWHPRKKF

SEQ ID NO: 5949 - DNA, 1080 bp, Glycine max
  misc_feature: Ceres CLONE ID no. 1075749
  misc_feature: Ceres CDNA ID no. 35383349
  CDS (56)..(811): REFERENCED BY SEQ ID NO: 5950
aaaaaaatatcaatcctcttggagtagcagtggcggggttagctacagtgaatccatggccatggcggctgcatttgcaactacaactgcaacactgagactgccaaatgttggagaaagcaaaagtttgcagctccgtaagtgtaaccctaatcccaataagcttaaggttatgcgggggtttggcggttgttctggagtggcagtgagtgtgagaattggaattggaagggttcgggcgagttcgagttcttcttcttctgaggaggaggaggaggcagtgagtgtgcagtcaaaagtgactcagaaagtatacttcgacgtgagtattggaaatccagttgggaagtttgtgggacggattgtgattggactgtacggcgacgatgtcccccaaacggctgagaacttccgtgccctttgtactggcgagaagggctttggatataagggttctaccgtccatcgtgtcatcaaggatttcatgattcaaggaggagactttgacaaaggaaatggaactggaggcaaaagtatatatggtcgtactttcaaagatgagaattttaatttgtctcacactggaccgggagttgtcagcatggcaaatgcaggtcccaacacaaatgggagtcagttttttatatgcactgtcaagacaccttggctggatcagaggcatgtggtatttggccaagttttggaaggcatggccattgttaggttgatcgaatcacaggagacagataggggtgaccgtcctagaaagaaggtgaccattagtgactgtggtgagcttccaattgcttgaggtggttcttgtgtaattttgttggttattctttctattaacttgttgagattgagaatggaaagaggggtggggaagaagaaactctagctttcttgaaatttttgtttgactattcttaagatatgttcagtaactccttattttcatactgaaccaacaaacttttagcagccacatgtattctgatttgagttgttgtcgggttagaaaatttaatgggccatttgaatggtatctccttaagcggaaaaaaaaaaaaaaaaaaa

SEQ ID NO: 5950 - protein, 251 aa, Glycine max
  misc_feature: Ceres CLONE ID no. 1075749
  misc_feature: Ceres CDNA ID no. 35383349
  misc_feature (85)..(248): Pfam Name: Pro_isomerase PFAM Desc: Cyclophilin type peptidyl
  misc_feature: Homolog of GI Number: 50931055 NR Desc: putative peptidylprolyl isomerase
  misc_feature: Homolog of GI Number: 37788308 NR Desc: cyclophilin
  misc_feature: Homolog of GI Number: 37788312 NR Desc: cyclophilin
  misc_feature: Homolog of GI Number: 13605817 NR Desc: AT5g13120/T19L5_80
  misc_feature: Homolog of GI Number: 21593963 NR Desc: peptidylprolyl isomerase
  misc_feature: Homolog of GI Number: 9955556 NR Desc: peptidylprolyl isomerase
  misc_feature: Homolog of GI Number: 83700338 NR Desc: chloroplast
  misc_feature: Homolog of GI Number: 83700342 NR Desc: chloroplast
  misc_feature: Homolog of GI Number: 83700344 NR Desc: chloroplast
  misc_feature: Homolog of GI Number: 20259872 NR Desc: peptidylprolyl isomerase ROC4
MAMAAAFATTTATLRLPNVGESKSLQLRKCNPNPNKLKVMRGFGGCSGVAVSVRIGIGRVRASSSSSSSEEEEEAVSVQSKVTQKVYFDVSIGNPVGKFVGRIVIGLYGDDVPQTAENFRALCTGEKGFGYKGSTVHRVIKDFMIQGGDFDKGNGTGGKSIYGRTFKDENFNLSHTGPGVVSMANAGPNTNGSQFFICTVKTPWLDQRHVVFGQVLEGMAIVRLIESQETDRGDRPRKKVTISDCGELPIA

SEQ ID NO: 5951 - DNA, 732 bp, Glycine max
  misc_feature: Ceres CLONE ID no. 1075763
  misc_feature: Ceres CDNA ID no. 29191682
  CDS (12)..(533): REFERENCED BY SEQ ID NO: 5952
aaggtaaactcatggcgtccaagattgtctcagccatagtctttgtattcaacctcgtcgcctttggtctagccgttgctgctgaacaaagacgaagcactgcaacggttgtgcaggacactgaggtgcaatacaactattgtgtgtatgattcggacagagccacagggtatggaattggagcctttttcttctcagttgctagtcaactccttatcatgctcgttagccgttgcttctgttgtggaaagcctctcaagcctggtggttcacgcgctcttgccctcgttctctttattgtcagctggatgttcttcttgatagctgagacatgcctattagctggatcagtagagaatgcataccacacaaagtataggacaatgttcatggacaatcctccagactgtcaaactcttcgcaagggagtattcgctgcgggtgcttctttcgtcttcttcaacgccattgtctctcaattctattatttcttttactcctctgctgctgaggcctcccccttgccgtactagaggactttaaattttacaaaaatatgtttttattttctatatgctatgtgatgtacactattgtcatactctggggtgttatctttttattgtgtgacagcaaaattatatgaagctgagggtaaaactatgagttttgtagattgatttgtatggatattgaattaaaatgttgtttttaccaaaaaaaaaaaaaaaa

SEQ ID NO: 5952 - protein, 173 aa, Glycine max
  misc_feature: Ceres CLONE ID no. 1075763
  misc_feature: Ceres CDNA ID no. 29191682
  misc_feature: Homolog of GI Number: 38016521 NR Desc: fiber protein Fb34
  misc_feature: Homolog of GI Number: 50929659 NR Desc: OSJNBa0064G10.22
  misc_feature: Homolog of GI Number: 50899430 NR Desc: putative fiber protein Fb34
MASKIVSAIVFVFNLVAFGLAVAAEQRRSTATVVQDTEVQYNYCVYDSDRATGYGIGAFFFSVASQLLIMLVSRCFCCGKPLKPGGSRALALVLFIVSWMFFLIAETCLLAGSVENAYHTKYRTMFMDNPPDCQTLRKGVFAAGASFVFFNAIVSQFYYFFYSSAAEASPLPY

SEQ ID NO: 5953 - DNA, 1180 bp, Glycine max
  misc_feature: Ceres CLONE ID no. 1075830
  misc_feature: Ceres CDNA ID no. 40351632
  CDS (393)..(845): REFERENCED BY SEQ ID NO: 5954
aagaaaaaatcctctcaccacggttctaaagatgataaacaggcaccaaaaagcaaagagaaggaagccagtttggtcttgggaggagttcgtcgcagatccgatctagagagcctccccgcaccacccatgtttaccttccccttcctctgacggccgccgtcccccgatgaagctgcgcgtccgctgccgctcccactccttctccgtcgccttcctctactggttctacgacttctcatgaactcctcgcccctcgacaacgccgcatccatcctgcctctagttgattagatccagctccgtttcttcccctttcctgtcttcttccttcccgccatcaaagaaaagagatctttttcctggttcttggatcgagaacccgaccgatcatgtcgtcgccatcgcgccggagctccagccccgagagcaacatcgccggcggcagcggcagcggctccgccggtgacgagcgcaagcgcaagaggatgctgtccaacagggagtcggcgaggcggtcccgcgcgcgcaagcagcagcggatggaggagctcatcaccgaggccagccgcctccaggccgagaacgcgcgcgtggaggcccagatcggcgcctacacgaccgagctgaccaaggtggacggcgagaacgccgtgctccgcgcgcgccacggcgagctcgccgggcggctgcaggcgctcggcggcgtcctggagatcttccaggtggccggcgctaccgtggacatcccggagatccccgacccgctgctccgcccgtggcagtcccccttcgcgccccagctggccgccgccggtggcatgcccgacgcgttccagttctgagccaagagccgccaagacatgtcatgccactgcattggaccaccatggatgtggttgctgctcatctactgctgctgaagaatactagtactaccagtttgtttggttcatgtttaattatggtttgattcgtgttgcttatgtaatcctagaccattattagtacttattttgtgattgtaatcttcctatgctcctagccagtggatatggataagaacaatgtcattgatgtgtgggggagcgcaaatggattgtgcgtatctttgggtgatttgtaataacatcttgacatggaacctatatatatgtttgcaccaaaaaaaaaaaaaaaa

SEQ ID NO: 5954 - protein, 150 aa, Glycine max
  misc_feature: Ceres CLONE ID no. 1075830
  misc_feature: Ceres CDNA ID no. 40351632
  misc_feature (24)..(78): Pfam Name: bZIP_2 PFAM Desc: Basic region leucine zipper
MSSPSRRSSSPESNIAGGSGSGSAGDERKRKRMLSNRESARRSRARKQQRMEELITEASRLQAENARVEAQIGAYTTELTKVDGENAVLRARHGELAGRLQALGGVLEIFQVAGATVDIPEIPDPLLRPWQSPFAPQLAAAGGMPDAFQF

SEQ ID NO: 5955 - DNA, 674 bp, Glycine max
  misc_feature: Ceres CLONE ID no. 1075841
  misc_feature: Ceres CDNA ID no. 29191683
  CDS (70)..(477): REFERENCED BY SEQ ID NO: 5956
acttagcttttttttcagcggcgatacgaagacgaaggagagggatctatctacacaagtgaagcaacaatggtgaagttcttgaagcagaacaaggcagtgatcctcctccaaggccgatacgccgggaagaaggcggtgatcatccgatccttcgacgacggaaaccgtgagcgtccttacggacactgcctcgtcgccggactcaagaagtacccgagcaaggtcatccgcaaggactcggcgaagaagacggccaagaaatctagggttaagtgtttcatcaaggtcgtcaactaccagcatttgatgcctacgcgttacaccctcgacgtggatctcaaggaagtcgcgaccctcgaggctctggcttcaaaggacaagaaggtcgctgctctcaaggaggcgaaggctaagctcgaggaacgtttcaagaccgggaagaacagatggttctttaccaaactcaggttctgaaggaatcactgtcggaagaaacattttgagagtttttgttgttgcattttcttatccaatatttaaaacagcgtattattgttagtttctatggttcgtatggagaacaatgtggatcctgttttggattgtgaaagacttctgttggaaatttctgttctggagtttgattctctattgcaaaaaaaaaaaaaaaa

SEQ ID NO: 5956 - protein, 135 aa, Glycine max
  misc_feature: Ceres CLONE ID no. 1075841
  misc_feature: Ceres CDNA ID no. 29191683
  misc_feature (5)..(40): Pfam Name: KOW PFAM Desc: KOW motif
  misc_feature (52)..(135): Pfam Name: Ribosomal_L27e PFAM Desc: Ribosomal L27e protein family
  misc_feature: Homolog of GI Number: 20466061 NR Desc: putative ribosomal protein
  misc_feature: Homolog of GI Number: 23198420 NR Desc: putative ribosomal protein L27
  misc_feature: Homolog of GI Number: 21554529 NR Desc: ribosomal protein L27
  misc_feature: Homolog of GI Number: 7441033 NR Desc: ribosomal protein L27
  misc_feature: Homolog of GI Number: 7441035 NR Desc: ribosomal protein L27
  misc_feature: Homolog of GI Number: 20768 NR Desc: ribosomal protein L27
  misc_feature: Homolog of GI Number: 62867611 NR Desc: At2g32220
  misc_feature: Homolog of GI Number: 7441034 NR Desc: ribosomal protein L27
  misc_feature: Homolog of GI Number: 37536910 NR Desc: putative ribosomal protein L27
  misc_feature: Homolog of GI Number: 50906961 NR Desc: putative 60S ribosomal protein L27
  misc_feature: Useful for making bigger plants
  misc_feature: Useful for making taller plants and plants with longer inflorescences
  misc_feature: Useful for sterility
MVKFLKQNKAVILLQGRYAGKKAVIIRSFDDGNRERPYGHCLVAGLKKYPSKVIRKDSAKKTAKKSRVKCFIKVVNYQHLMPTRYTLDVDLKEVATLEALASKDKKVAALKEAKAKLEERFKTGKNRWFFTKLRF

SEQ ID NO: 5957 - DNA, 784 bp, Glycine max
  misc_feature: Ceres CLONE ID no. 1075871
  misc_feature: Ceres CDNA ID no. 29191278
  CDS (150)..(602): REFERENCED BY SEQ ID NO: 5958
cccgtagcacggtacgacaccaccgagagacacgtgcgcggtggtcgggccggccgctatatattcgcccgagcccctcgctagggtttcccctcatcctccctcgccgtcaaaaccgaatcagaaatctcaagctcagcacagcaacaatggccgagcagaccttcatcatgatcaagcctgacggcgtccagaggggcctcatcggcgaggtcatcagccgcttcgagaagaagggcttctacctcaaaggtctgaagctccagaacgtggagaagtcgttcgccgagcagcactactccgatctgtcctccaagcccttcttcgctgggctcgtggagtacatcgtctccggcccggtcgtcgctatggtctgggagggcaagagcgtcgtcgccactggacgcaagatcattggcgccaccaaccccctggcctctgagcccggcaccatccgtggtgactttgccgtcgacatcggcaggaacgtcatccatggaagcgactcagttgagagtgccaggaaggagatcgccctgtggttccctgagggcattgcagagtggaggagcagccagcacaactggatctatgaggcctaagatgtgtcatgagtggtttgagtgcaggtttcattaagcatctaccaaactagtctttggttgtttacagttttgagatttgtatcttgggaaccttgtttgtgtgaactgaagttatctccttgtgcttgagcatgcaagcgttatctgctgctctatatttggtaaaaaaaaaaaaaaaa

SEQ ID NO: 5958 - protein, 150 aa, Glycine max
  misc_feature: Ceres CLONE ID no. 1075871
  misc_feature: Ceres CDNA ID no. 29191278
  misc_feature (3)..(136): Pfam Name: NDK PFAM Desc: Nucleoside diphosphate kinase
  misc_feature: Homolog of GI Number: 9652119 NR Desc: nucleoside diphosphate kinase
  misc_feature: Homolog of GI Number: 37536898 NR Desc: putative nucleoside diphosphate kinase
  misc_feature: Homolog of GI Number: 1777930 NR Desc: nucleoside diphosphate kinase
  misc_feature: Homolog of GI Number: 71040669 NR Desc: nucleoside diphosphate kinase I
  misc_feature: Homolog of GI Number: 1389640 NR Desc: PNDKN1
  misc_feature: Homolog of GI Number: 296174 NR Desc: nucleoside
  misc_feature: Homolog of GI Number: 47155384 NR Desc: nucloeside diphosphate kinase 1
  misc_feature: Homolog of GI Number: 73808794 NR Desc: cytosolic nucleoside diphosphate kinase
  misc_feature: Homolog of GI Number: 62114996 NR Desc: nucleoside diphosphate kinase
  misc_feature: Homolog of GI Number: 1236951 NR Desc: nucleoside diphosphate kinase
MAEQTFIMIKPDGVQRGLIGEVISRFEKKGFYLKGLKLQNVEKSFAEQHYSDLSSKPFFAGLVEYIVSGPVVAMVWEGKSVVATGRKIIGATNPLASEPGTIRGDFAVDIGRNVIHGSDSVESARKEIALWFPEGIAEWRSSQHNWIYEA

SEQ ID NO: 5959 - DNA, 705 bp, Glycine max
  misc_feature: Ceres CLONE ID no. 1075975
  misc_feature: Ceres CDNA ID no. 29191684
  CDS (28)..(507): REFERENCED BY SEQ ID NO: 5960
atcgatccagatagagagaggacagcgatggcattgacggtggcgaagagtgcgttggaggcgatcagagagaaaggtctcggaggtttcctcaggatgatccgagaagaaggctttctgagatgtctgccagatgggaacctcttgcaaaccaaaatacacaacataggagcaacgcttattggtgtggacaagttcggtaacaaatactaccagaagctcggcgatactcagtgtggtcgacacaggtgggtagaatatgcatccaaggatcgttacaacgcatctcaagtgccagcagaatggcacggatggcttcatttcatcaccgatcacactggagatgagctgttgagtcagaaaccaaaaaggtatgggattgagcatagagagaacttctctggacatggtgatgcgtacatttaccattctaaaggacataccttgaacccggggcaaaagaactggactcggtaccaaccatgggttcccaccaagaccaagtaagaatgtgagagctctggtttatgctctgagtgagtgatttgttgttttgtctcagtctcttttgagtaaaaataaaagctgatttggatcttaagctgaacaatttgggtttatggaattgtgtaattgatgctgttttgcttaatcaagcttccttcacctctggagaggagattattactaaaaaaaaaaaaaaaa

SEQ ID NO: 5960 - protein, 159 aa, Glycine max
  misc_feature: Ceres CLONE ID no. 1075975
  misc_feature: Ceres CDNA ID no. 29191684
  misc_feature (49)..(155): Pfam Name: Complex1_17_2kD PFAM Desc: NADH:ubiquinone oxidoreductase 17.2 kD subunit
  misc_feature: Homolog of GI Number: 79312708 NR Desc: NADH dehydrogenase
  misc_feature: Homolog of GI Number: 37537176 NR Desc: putative ubiquinone oxidoreductase subunit
  misc_feature: Homolog of GI Number: 78709064 NR Desc: ubiquinone oxidoreductase subunit
  misc_feature: Homolog of GI Number: 34334022 NR Desc: NADH:ubiquinone oxidoreductase B17.2
  misc_feature: Homolog of GI Number: 72171320 NR Desc:  similar to 13kDa differentiation
  misc_feature: Homolog of GI Number: 12229865 NR Desc: Putative NADH
  misc_feature: Homolog of GI Number: 58386434 NR Desc: ENSANGP00000013247
  misc_feature: Homolog of GI Number: 24581165 NR Desc: CG3214
  misc_feature: Homolog of GI Number: 78489538 NR Desc: similar to NADH:ubiquinone oxidoreductase 17.2 kD subunit
MALTVAKSALEAIREKGLGGFLRMIREEGFLRCLPDGNLLQTKIHNIGATLIGVDKFGNKYYQKLGDTQCGRHRWVEYASKDRYNASQVPAEWHGWLHFITDHTGDELLSQKPKRYGIEHRENFSGHGDAYIYHSKGHTLNPGQKNWTRYQPWVPTKTK

SEQ ID NO: 5961 - DNA, 934 bp, Glycine max
  misc_feature: Ceres CLONE ID no. 1076022
  misc_feature: Ceres CDNA ID no. 29191771
  CDS (183)..(551): REFERENCED BY SEQ ID NO: 5962
ccacagaaaacgcagcgctaggtttctcctctcacgcgcccgagctctcactccgccgcccgccgcccgccgccgacgccggtctccgtcgcctccctctactccgagctgctcccgactctgcaccggctcttcttccctgcttctcgggaggaaatactgtgtgagccaagacctcaaagatgaacaaggggaagatttttaagttagccaagggattccgaggaagggctaaaaactgcataagaatcgccagggagcgtgtagaaaaagcattgcaatattcttacagggatcggcgcaacaagaaaagggacatgcggtctctctggatcgagcgcatcaatgctggtacacgactccatggggtgaactatggcaacttcatgcatggactgatgaaggagaatgtccaactcaacaggaaggtactttcggagctgtcgatgcatgagccatacagcttcaaggccctcgttgatgtatcccgcactgcattccctgggaacaggccggctgccaagaaggaaggactagcaagcattctataaacaattcattcctcgacaattcagtctactgtgatgaactcatgtgatgggggtatgtatcacatcacgttttagtccatgtcattcggtctgttggcctgctgaacagagggtacatgtactgtacttttgcacttctttcttcagataatgtgctctgtttaccgtcaataaatccagtagagcagaaaggttttaataaaccatgtaaaaaaaagatgtggttattttgggcagaaagtttttctagctttcatctgaagtcatgtagtagtccttatgaagacatgctgaataggctgcaccatcttgttatcgagaacaggccatccttaatacccactgcgtgttgatttgtgttgcaaagaaaaaaaaaaaaaaaa

SEQ ID NO: 5962 - protein, 122 aa, Glycine max; identical to SEQ ID NO: 3696
  misc_feature: Ceres CLONE ID no. 1076022
  misc_feature: Ceres CDNA ID no. 29191771
  misc_feature (5)..(98): Pfam Name: Ribosomal_L20 PFAM Desc: Ribosomal protein L20
  misc_feature: Homolog of GI Number: 52353395 NR Desc: putative 50S ribosomal protein L20
  misc_feature: Homolog of GI Number: 34910194 NR Desc: OSJNBb0036G09.15
  misc_feature: Homolog of GI Number: 21554397 NR Desc: ribosomal protein L20
  misc_feature: Homolog of GI Number: 46308931 NR Desc: COG0292: Ribosomal protein L20
  misc_feature: Homolog of GI Number: 68171433 NR Desc: Ribosomal protein L20
  misc_feature: Homolog of GI Number: 48833996 NR Desc: COG0292: Ribosomal protein L20
  misc_feature: Homolog of GI Number: 68247828 NR Desc: Ribosomal protein L20
  misc_feature: Homolog of GI Number: 57238868 NR Desc: 50S ribosomal protein L20
  misc_feature: Homolog of GI Number: 45682620 NR Desc: COG0292: Ribosomal protein L20
  misc_feature: Homolog of GI Number: 68191162 NR Desc: Ribosomal protein L20

SEQ ID NO: 5963 - DNA, 773 bp, Glycine max
  misc_feature: Ceres CLONE ID no. 1076029
  misc_feature: Ceres CDNA ID no. 25893158
  CDS (189)..(575): REFERENCED BY SEQ ID NO: 5964
acacatttagggttgaaaattcatttccaattcaccgagagagagagagaatggaaggatgggatccgagcacgaagtcgacgttgacgcgaatccctcttctgacgacaaaagcagggccaagagacggcgatgcatggaaacagaggctcaaagaggagtacaagtctctgatcgcgtatacccagatgaacaagtccaacgacaacgactggttccgcatctccgcttccaaccccgaaggtacgcgttggactggcaagtgttggtacgttcacaacctcctcaaatacgagttcgatctccaattcgacatccctgtcacctaccccgccactgcccccgagcttgagttgcctgagatcgacggcaaaacccaaaagatgtatcgaggtgggaagatttgcctgactgtgcatttcaagccgctctgggctaaaaactgtcctaggtttggtatagcacatgcgctttgtttggggctcgctccatggcttgctgcagagattccaattcttgtggactcgggcatgattaagcacaaagatgacgcagcctcctctgctgaatcttagtctatgtaatctcagagttgaggtggttgtcagtaatagctgaagtaaaaaatgaccgaggcggatgcgtctaccctataaaaagcttacatgaaacccaataaagatttaagctattgcaatgtttttcttttcttgaaatacttgtacaacttgagaatatatgatgctcgttttgcactaaaaaaaaaaaaaaaa

SEQ ID NO: 5964 - protein, 174 aa, Glycine max
  misc_feature: Ceres CLONE ID no. 1076029
  misc_feature: Ceres CDNA ID no. 25893158
  misc_feature: Homolog of GI Number: 24899705 NR Desc: Similar to CGI
  misc_feature: Homolog of GI Number: 66561255 NR Desc:  similar to CG8386
  misc_feature: Homolog of GI Number: 19922352 NR Desc: CG8386
  misc_feature: Homolog of GI Number: 57111435 NR Desc:  similar to Protein CGI
  misc_feature: Homolog of GI Number: 54637042 NR Desc: GA21037
  misc_feature: Homolog of GI Number: 62738810 NR Desc: Chain A
  misc_feature: Homolog of GI Number: 55665934 NR Desc: OTTHUMP00000060266
MEGWDPSTKSTLTRIPLLTTKAGPRDGDAWKQRLKEEYKSLIAYTQMNKSNDNDWFRISASNPEGTRWTGKCWYVHNLLKYEFDLQFDIPVTYPATAPELELPEIDGKTQKMYRGGKICLTVHFKPLWAKNCPRFGIAHALCLGLAPWLAAEIPILVDSGMIKHKDDAASSAES

SEQ ID NO: 5965 - DNA, 431 bp, Glycine max; identical to SEQ ID NO: 4131
  misc_feature: Ceres CLONE ID no. 1076038
  misc_feature: Ceres CDNA ID no. 35383350
  CDS (77)..(229): REFERENCED BY SEQ ID NO: 5966

SEQ ID NO: 5966 - protein, 50 aa, Glycine max
  misc_feature: Ceres CLONE ID no. 1076038
  misc_feature: Ceres CDNA ID no. 35383350
MVVFLCKEEYGVLLGNDWAATHEFGHNFCISNEGDDDDDDNGVIDVAPAA

SEQ ID NO: 5967 - DNA, 565 bp, Glycine max
  misc_feature: Ceres CLONE ID no. 1076041
  misc_feature: Ceres CDNA ID no. 25446516
  CDS (78)..(395): REFERENCED BY SEQ ID NO: 5968
ctttttgttcgcttcggctccgttaggttttccttccgcgtgtttgctcggaactactcctccactcatcgtttaaaatgtctgacgtggaagagtttcgttgcttcattggtggccttgcatggtcaacgtctgatagaaagttaaaggatacatttgaaaagtttggcaagcttattgaggcaaaggtggttgttgacaagttctctgggcgttctcgtggttttggatttgtcacatttgatgacaagaaagcaatggacgaggctattgatgctatgaatgggatagatttagacgggcgaactattactgttgatagagctcagcctcaacaaggatcaactagagatgatggtgatcgttatcgggaggctttcgttgatataatatagtctttcaatgagatatgaaattgaagaggtcgctgttaatgtttcaactttccttttcatttgcacttgacaatgctctttggacttctgggattgttgtttggatggatcattgataccagtattttgatatgcaatactcaacacattatgcaaaaaaaaaaaaaaaa

SEQ ID NO: 5968 - protein, 105 aa, Glycine max
  misc_feature: Ceres CLONE ID no. 1076041
  misc_feature: Ceres CDNA ID no. 25446516
  misc_feature (9)..(80): Pfam Name: RRM_1 PFAM Desc: RNA recognition motif.
  misc_feature: Homolog of GI Number: 19699180 NR Desc: AT3g26420/F20C19_14
  misc_feature: Homolog of GI Number: 2129944 NR Desc: RNA
  misc_feature: Homolog of GI Number: 12659074 NR Desc: RNA
  misc_feature: Homolog of GI Number: 50919955 NR Desc: putative RNA binding protein
  misc_feature: Homolog of GI Number: 17819 NR Desc: glycine
  misc_feature: Homolog of GI Number: 30692254 NR Desc: glycine
  misc_feature: Homolog of GI Number: 4914438 NR Desc: glycine
  misc_feature: Homolog of GI Number: 1346181 NR Desc: Glycine
  misc_feature: Homolog of GI Number: 2119042 NR Desc: glycine
  misc_feature: Homolog of GI Number: 21553354 NR Desc: glycine
MSDVEEFRCFIGGLAWSTSDRKLKDTFEKFGKLIEAKVVVDKFSGRSRGFGFVTFDDKKAMDEAIDAMNGIDLDGRTITVDRAQPQQGSTRDDGDRYREAFVDII

SEQ ID NO: 5969 - DNA, 960 bp, Glycine max
  misc_feature: Ceres CLONE ID no. 1076093
  misc_feature: Ceres CDNA ID no. 29191772
  CDS (77)..(826): REFERENCED BY SEQ ID NO: 5970
acagcgcttcacccatcttctcgagattacttcagcaatttagggtttcagtgatccgcagctgcacacatcaaacatggcgactcagattagcaagaagagaaagtttgtagctgacggtgtgttctacgctgagctgaacgaggttctaaccagagagctagcggaagatggttactctggtgtggaggttagggttactccgatgaggactgagattatcatcagagccacacgtactcaaaatgttctcggtgagaagggaaggaggatcagagagttgacatctcttgtgcagaagagattcaggtttcctcaagacagtgttgagctttacgctgagaaggttgccaacagaggtctctgcgccattgctcaggctgagtctcttcgttacaagctcctcggtgggcttgctgttcgcagggcttgctatggtgtcttgagattcgtcatggagagtggtgctaagggttgtgaggttattgtgagtggaaagcttcgtgcagcacgtgccaagtccatgaaattcaaggacggttacatggtttcctctggtcaaccaaccaaggattacatcgactctgcagtgagacatgttctgcttagacagggtgtgctcggaatcaaggtgaaggtcatgcttgactgggaccctaagggaataaatggacccaagacaccattgcctgatgttgtcatcatccatactcccaaggaggaagacgtcaactctgcacctgctcaggttgctgctccggctgctcttgcaccagaagctcccctcactgccgtagactaccctgagatgatcccagtcgcctagaagaaaccctttggttacccctaccaggggatacttctctttttgttataactttctgtatctctggatactcactagttgtttttcctatgtcctcgaagtagacaagttttttctcaaaaaaaaaaaaaaaa

SEQ ID NO: 5970 - protein, 249 aa, Glycine max
  misc_feature: Ceres CLONE ID no. 1076093
  misc_feature: Ceres CDNA ID no. 29191772
  misc_feature: There is no branching.
  misc_feature: Useful for making plants with modulated biomass
  misc_feature (104)..(188): Pfam Name: Ribosomal_S3_C PFAM Desc: Ribosomal protein S3
  misc_feature (45)..(102): Pfam Name: KH_2 PFAM Desc: KH domain
  misc_feature: Homolog of GI Number: 16323404 NR Desc: putative ribosomal protein S3a homolog
  misc_feature: Homolog of GI Number: 20466075 NR Desc: AT5g35530/MOK9_14
  misc_feature: Homolog of GI Number: 20258907 NR Desc: putative 40S ribosomal protein
  misc_feature: Homolog of GI Number: 38093738 NR Desc: putative ribosomal protein
  misc_feature: Homolog of GI Number: 50939157 NR Desc: putative 40S ribosomal protein
  misc_feature: Homolog of GI Number: 22204124 NR Desc: putative 40S ribosomal protein S3
  misc_feature: Homolog of GI Number: 83283961 NR Desc: 40S ribosomal protein
  misc_feature: Homolog of GI Number: 70909551 NR Desc: ribosomal protein S3e
  misc_feature: Homolog of GI Number: 46811251 NR Desc: 40S ribosomal protein S3
  misc_feature: Useful for delaying flowering time
  misc_feature: Useful for making lethal plants for genetic confinement systems
  misc_feature: Useful for making ornamental plants with modified flowers
  misc_feature: Useful for making ornamental plants with modified leaves
  misc_feature: Useful for making plants with altered leaf shape eg curled leaves
  misc_feature: Useful for making plants with altered leaf shape eg curled leaves
  misc_feature: Useful for making plants with increased biomass
  misc_feature: Useful for making plants with increased biomass and foliage
  misc_feature: Useful for making plants with modified flowers
  misc_feature: Useful for making shorter plants
MATQISKKRKFVADGVFYAELNEVLTRELAEDGYSGVEVRVTPMRTEIIIRATRTQNVLGEKGRRIRELTSLVQKRFRFPQDSVELYAEKVANRGLCAIAQAESLRYKLLGGLAVRRACYGVLRFVMESGAKGCEVIVSGKLRAARAKSMKFKDGYMVSSGQPTKDYIDSAVRHVLLRQGVLGIKVKVMLDWDPKGINGPKTPLPDVVIIHTPKEEDVNSAPAQVAAPAALAPEAPLTAVDYPEMIPVA

SEQ ID NO: 5971 - DNA, 1127 bp, Glycine max
  misc_feature: Ceres CLONE ID no. 1076158
  misc_feature: Ceres CDNA ID no. 29191773
  CDS (204)..(848): REFERENCED BY SEQ ID NO: 5972
aaaaaaacacaagcctgttctccccagatcccctcctcgtccccgattcgattcgattccccgcatcggccggtaccaatccggcgcccgccaccccacactccgccgatgttcctccgatcgcgccgcctgtgatcaccccgctctcttctctctcgccagctcagccagccgccggttaggatcggggccgggggagcgcgatggccgcgccgccggctagggcccgcgccgactacgactacctcatcaagctcctcctcatcggcgacagcggtgttggcaagagttgcctcctcctacggttctctgatggctccttcactactagttttattactacaataggtattgacttcaagataagaacaattgaactggatggcaagcgcattaagttgcaaatttgggatacagccggtcaagagcgattcaggactatcacgacagcatactaccggggagccatgggaatcttgcttgtttatgatgtcacggatgagtcatctttcaacaacatacggaactggatacgcaacattgagcaacatgcctctgataatgtgaacaaaattttgataggcaacaaggctgatatggatgagagtaaaagggctgtttctactgcaaagggacaagcactagcggatgaatatggcatccagttctttgaaactagtgccaagacaaacctcaatgttgagcaagttttcttttccattgcccgagatattaagcagaggcttgctgagactgattccaagcccgaggaccagacgatcaagattaacaagacagaaggttctgagaatccagaatctcagaaatctgcttgctgtggctcatgaggaatacgtggacttctaccatgggctgttttaactttatctgtttattactgtcagcttgttattataggaactgtaagacttaaggagatgactatgttgtggttgttgtgttaccttctatattctttgcagcagcaactattacttttaatgtagtttttgtgatttctaggggtgattgcatgttgtattgccatcgtgagaaccatccacttgctgctgatgtaactgcatttcagtttttcaatcggttggttgctaaaaaaaaaaaaaaaa

SEQ ID NO: 5972 - protein, 214 aa, Glycine max
  misc_feature: Ceres CLONE ID no. 1076158
  misc_feature: Ceres CDNA ID no. 29191773
  misc_feature: null
  misc_feature: Useful for making plants with altered Lignin content
  misc_feature (17)..(179): Pfam Name: Ras PFAM Desc: Ras family
  misc_feature: Homolog of GI Number: 50931689 NR Desc: putative GTP
  misc_feature: Homolog of GI Number: 50935375 NR Desc: putative ethylene
  misc_feature: Homolog of GI Number: 50919469 NR Desc: ethylene
  misc_feature: Homolog of GI Number: 5669640 NR Desc: ethylene
  misc_feature: Homolog of GI Number: 46326983 NR Desc: ethylene
  misc_feature: Homolog of GI Number: 18447917 NR Desc: ras
  misc_feature: Homolog of GI Number: 18447919 NR Desc: ras
  misc_feature: Homolog of GI Number: 2808638 NR Desc: small GTP
  misc_feature: Homolog of GI Number: 871510 NR Desc: small GTP
  misc_feature: Homolog of GI Number: 18447913 NR Desc: ras
MAAPPARARADYDYLIKLLLIGDSGVGKSCLLLRFSDGSFTTSFITTIGIDFKIRTIELDGKRIKLQIWDTAGQERFRTITTAYYRGAMGILLVYDVTDESSFNNIRNWIRNIEQHASDNVNKILIGNKADMDESKRAVSTAKGQALADEYGIQFFETSAKTNLNVEQVFFSIARDIKQRLAETDSKPEDQTIKINKTEGSENPESQKSACCGS

SEQ ID NO: 5973 - DNA, 866 bp, Glycine max
  misc_feature: Ceres CLONE ID no. 1076209
  misc_feature: Ceres CDNA ID no. 29191189
  CDS (90)..(605): REFERENCED BY SEQ ID NO: 5974
acagagcccgaagccaaaggaaatccactccaatccaatccccacagaaatccccatctcaaaaccctagcccgtccgatcccggcgagatggccaacccgagggtgttcttcgacatgaccgtcggcggcgcgccggccgggcgcatcgtgatggagctgtacaaggacgcggtgccgcggacggtggagaacttccgcgcgctctgcaccggcgagaagggcgtcggcaagagcggcaagccactgcactacaagggcagctcgttccaccgcgtgatccccgacttcatgtgccagggcggcgacttcaccaagggcaacggcaccggcggcgagtccatctacggcgagaagttcgccgacgagaagttcgtccacaagcacaccaagcccgggatcctctccatggccaacgcgggccccaacaccaacggctcccagttcttcatctgcaccgtcccctgcaattggctcgacggcaagcacgtggtcttcggcgaggtcgtcgagggcatggacgtcgtcaagaacatcgagaaggtgggctcccgcagcggcacctgctccaagcaagtcgtcatcgccgactgcggccagctctagatccgtccgcccgccggtcgcctgtcgtcgtcgccccgtgtcccgtgtcgtcgatctaaataagagagtcgtgtgtcgtgtcgtgtcttccccttgtccgtccgatgagatctccgtggttggtttaggagggttttaggtggactcttttggccgctggatctgtgtccggcggccatggttatcttcctgtgtctgctgctatcttactgtttgaatgagatgaactccgctatgaattatccaaaaaaaaaaaaaaaa

SEQ ID NO: 5974 - protein, 171 aa, Glycine max
  misc_feature: Ceres CLONE ID no. 1076209
  misc_feature: Ceres CDNA ID no. 29191189
  misc_feature (5)..(171): Pfam Name: Pro_isomerase PFAM Desc: Cyclophilin type peptidyl
  misc_feature: Homolog of GI Number: 13925734 NR Desc: cyclophilin A
  misc_feature: Homolog of GI Number: 13925737 NR Desc: cyclophilin A
  misc_feature: Homolog of GI Number: 50904851 NR Desc: peptidylprolyl isomerase Cyp2
  misc_feature: Homolog of GI Number: 600769 NR Desc: cyclophilin 2
  misc_feature: Homolog of GI Number: 829148 NR Desc: cyclophilin
  misc_feature: Homolog of GI Number: 62728587 NR Desc: cyclophilin
  misc_feature: Homolog of GI Number: 18076088 NR Desc: cyclophilin
  misc_feature: Homolog of GI Number: 52788398 NR Desc: cyclophilin
  misc_feature: Homolog of GI Number: 1563719 NR Desc: cyclophylin
  misc_feature: Homolog of GI Number: 68406 NR Desc: peptidylprolyl isomerase
MANPRVFFDMTVGGAPAGRIVMELYKDAVPRTVENFRALCTGEKGVGKSGKPLHYKGSSFHRVIPDFMCQGGDFTKGNGTGGESIYGEKFADEKFVHKHTKPGILSMANAGPNTNGSQFFICTVPCNWLDGKHVVFGEVVEGMDVVKNIEKVGSRSGTCSKQVVIADCGQL

SEQ ID NO: 5975 - DNA, 859 bp, Glycine max
  misc_feature: Ceres CLONE ID no. 1076269
  misc_feature: Ceres CDNA ID no. 24766050
  CDS (186)..(680): REFERENCED BY SEQ ID NO: 5976
agaggaacaaatcgcagttacacactgaaaacgaacacagaatcccccaaaagaagccacctttagggttttcgtctccaaatcaattcgtgattcgctttcgaatcgattcgtcacgaatccaatcctctggtttcctttattttctccagttttcgatttcaatctctttgccgtgagaaacgatgggaagaggcaagttcaaggggaaacctactggccagcgccgattctcaagtgcagctgatattcttgctggaacttctgctgcgcgtcctcggtcattcaagcagaaggaagctgagtacgaagaagatgttgaagaggagtctgaagaggaatctgaagaggaatccgaagatgaatctgacgtgaagaagaaaggacatgaagctcttattgaagttgataaccctaacagagccaaaccaacgactttaaaagctagagaccttgatgctagtaaaaccactgaactctcaaggcgtgaaagggaggagctagagaagcagcgagctcatgagcgatacatgaggttgcaggagcaaggcaaaaccgaacaagcaagaaaggatttggatcgtctggctctgattcgccaacagagagaagaagcggccaagaagcgagaagaggaaaaagcagcgaaagacgccaagaaagtagatgctcgcaaatgagacaagtgttcaccctaaaaaaaataaactacataaaagaagaagaatactcatcgagttttactttgttcttttttcgattggtaaacagatcataaaacattttccgaatacttagtgcccaggggatttctccatcttaatacattggaagttaataatcaaaaaaaaaaaaaaaa

SEQ ID NO: 5976 - protein, 164 aa, Glycine max
  misc_feature: Ceres CLONE ID no. 1076269
  misc_feature: Ceres CDNA ID no. 24766050
  misc_feature: Homolog of GI Number: 57899606 NR Desc: putative 28 kDa heat
  misc_feature: Homolog of GI Number: 34909600 NR Desc: P0435B05.20
  misc_feature: Homolog of GI Number: 12018258 NR Desc: PDGFA associated protein 1
  misc_feature: Homolog of GI Number: 73958089 NR Desc:  similar to PDGFA associated protein 1
  misc_feature: Homolog of GI Number: 1136586 NR Desc: PDGF associated protein
  misc_feature: Homolog of GI Number: 50755563 NR Desc:  similar to kinase substrate HASPP28
  misc_feature: Homolog of GI Number: 82899800 NR Desc:  PDGFA associated protein 1
  misc_feature: Homolog of GI Number: 30584165 NR Desc: Homo sapiens PDGFA associated protein 1
  misc_feature: Homolog of GI Number: 7657441 NR Desc: PDGFA associated protein 1
MGRGKFKGKPTGQRRFSSAADILAGTSAARPRSFKQKEAEYEEDVEEESEEESEEESEDESDVKKKGHEALIEVDNPNRAKPTTLKARDLDASKTTELSRREREELEKQRAHERYMRLQEQGKTEQARKDLDRLALIRQQREEAAKKREEEKAAKDAKKVDARK

SEQ ID NO: 5977 - DNA, 801 bp, Glycine max
  misc_feature: Ceres CLONE ID no. 1076355
  misc_feature: Ceres CDNA ID no. 25892490
  CDS (2)..(523): REFERENCED BY SEQ ID NO: 5978
tttagtgggtactgatatatctcaggaaaatgttagcatgttttggtattttcttttccctatcaatgagcattcagccaacaggttcaaccttcttcttctaaggtatctctctgtatattcaaatacacagtatactatcacattcgcttcggtacttctctcttcattgtcgcagacacaaagcagcactaaaggaagcccttcactacgccgattaagcatgtcaggcagaaaagaaacggttttggaccttgcaaagtttgtagacaaaggcgttcaagttaagcttactggtggaagacaagtgacagggactctgaaagggtatgatcaattgcttaaccttgtcctagatgaagctgtagagtttttaagagatcctgatgatcctctcaaaactactgaccagaccagaaatcttggcttaattgtttgtagaggaactgctgtgatgcttgtgtccccaactgatggtacagatgagatcgccaacccctttatgcagccagatgggtcctaagtgtgaagtatttgtatcttaaagtctgtatgctagctgatcaatacgtcatcgcttagctactgagacattaatgcggggatactgattaacgttttgtctattttgtaggcttggatatttattatatgctttggattaatagaatatcacccattttatgttattgttccgatgaagtttatttctctgtgatgtgtcgtcagctaatttgaggacttaatattcatcataatgaaagaagctaattcatacttgaccaaaaaaaaaaaaaaaaa

SEQ ID NO: 5978 - protein, 99 aa, Glycine max
  misc_feature: Ceres CLONE ID no. 1076355
  misc_feature: Ceres CDNA ID no. 25892490
  misc_feature: The plant flowers significantly late compared to wild-type.
  misc_feature: The plant senesces significantly late copared to wild-type.
  misc_feature: Useful for making plants with modulated flowering time
  misc_feature: Useful for making plants with modulated time to senescence
  misc_feature (9)..(82): Pfam Name: LSM PFAM Desc: LSM domain
  misc_feature: Homolog of GI Number: 4582434 NR Desc: putative snRNP splicing factor
  misc_feature: Homolog of GI Number: 50941651 NR Desc: putative snRNP splicing factor
  misc_feature: Homolog of GI Number: 72131952 NR Desc:  similar to LSM7 homolog
  misc_feature: Homolog of GI Number: 55647895 NR Desc:  similar to U6 snRNA
  misc_feature: Homolog of GI Number: 58389878 NR Desc: ENSANGP00000010565
  misc_feature: Homolog of GI Number: 20129565 NR Desc: CG13277
  misc_feature: Homolog of GI Number: 54644863 NR Desc: GA12164
  misc_feature: Homolog of GI Number: 49522817 NR Desc: MGC83430 protein
  misc_feature: Homolog of GI Number: 73987505 NR Desc:  similar to U6 snRNA
  misc_feature: Homolog of GI Number: 7706423 NR Desc: U6 snRNA
  misc_feature: Useful for delaying flowering time
  misc_feature: Useful for delaying senescence
MSGRKETVLDLAKFVDKGVQVKLTGGRQVTGTLKGYDQLLNLVLDEAVEFLRDPDDPLKTTDQTRNLGLIVCRGTAVMLVSPTDGTDEIANPFMQPDGS

SEQ ID NO: 5979 - DNA, 773 bp, Glycine max
  misc_feature: Ceres CLONE ID no. 1076400
  misc_feature: Ceres CDNA ID no. 25891006
  CDS (1)..(414): REFERENCED BY SEQ ID NO: 5980
agaaaggcgagcaaaagtttcacttggcctccccaacctcgtgtcctccggcgagtctctgcggcggcggcgatggcttccttctccgaggctccctccggcaaccccgacgccggcgccaagatcttcaagaccaagtgcgcgcagtgccacaccgtcgacgcgggcgccggccacaagcaaggtccaaacttgcatggtctgtttgggaggcagtcgggtaccaccgctggttactcctactctgcggcaaacaagaacaaggctgtggagtgggaggagaacactctgtatgactacttgcttaatcctaagaagtacatccctggaaccaagatggtcttccctgggctgaagaagccacaggaccgtgctgatctcattgcgtacctgaagaaagccacctcctcttgaaagggcatgatgatgctgtgatcttgtcatggcgagtgaattcattttgcagtaaaataagaagattagacattaatagtcacttgtttgatggggtgtgatccacgagacaattatcttgcgaatttcgttttcatgatatgggtttcatatcactaggtttagttggaaatcttcgtcaatcttttgattcagttgctggaaaaccccagtacgcatgttttgaccaccaggtggcggtgggactagaatgcacacccatgttgatgaacatgagatctttaaaattgatataaagctttctgcctgtgttatggagtcgtcaaatctgacttcattctgcaaaaaaaaaaaaaaaa

SEQ ID NO: 5980 - protein, 113 aa, Glycine max
  misc_feature: Ceres CLONE ID no. 1076400
  misc_feature: Ceres CDNA ID no. 25891006
  misc_feature (13)..(111): Pfam Name: Cytochrom_C PFAM Desc: Cytochrome c
  misc_feature: Homolog of GI Number: 118040 NR Desc: Cytochrome c
  misc_feature: Homolog of GI Number: 20137614 NR Desc: Cytochrome c
  misc_feature: Homolog of GI Number: 476418 NR Desc: cytochrome c
  misc_feature: Homolog of GI Number: 51317000 NR Desc: Cytochrome c
  misc_feature: Homolog of GI Number: 53982673 NR Desc: putative cytochrome c
  misc_feature: Homolog of GI Number: 21592717 NR Desc: putative cytochrome C
  misc_feature: Homolog of GI Number: 2506328 NR Desc: Cytochrome c
  misc_feature: Homolog of GI Number: 118004 NR Desc: Cytochrome c
  misc_feature: Homolog of GI Number: 3986693 NR Desc: cytochrome
  misc_feature: Homolog of GI Number: 118018 NR Desc: Cytochrome c
MASFSEAPSGNPDAGAKIFKTKCAQCHTVDAGAGHKQGPNLHGLFGRQSGTTAGYSYSAANKNKAVEWEENTLYDYLLNPKKYIPGTKMVFPGLKKPQDRADLIAYLKKATSS

SEQ ID NO: 5981 - DNA, 1161 bp, Glycine max
  misc_feature: Ceres CLONE ID no. 1076414
  misc_feature: Ceres CDNA ID no. 40351633
  CDS (3)..(824): REFERENCED BY SEQ ID NO: 5982
gttctccccacctctcttcgcccctgccccccccaccgcgcgccccccgctccgctcctcctctcccttcccttcccttccttgacgaccgccccaggaagcgctgccgcggcctccccacccgcctccgccagggaggaagggggccgtcgtcgggtcgggtcgggtcggccatggcctacagggcggaggacgactacgactacctcttcaaggtcgtgctcatcggcgactccggggtcggcaagtccaacctcctctcccgcttcacccgcaacgagttcagcctcgagtccaagtccaccatcggcgtcgagttcgccaccaggagcatccgggtcgacgacaaggtcgtcaaggcccagatctgggacacggcaggacaggagaggtatcgggcaattacaagtgcatactatcgaggggctgttggtgcgcttgtcgtgtacgatgtgacacgccatgtgacctttgagaatgtggagaggtggttgaaggagctccgggatcacacagatgcaaacattgtcatcatgcttgtcggcaacaaagctgatctacgccaccttagggctgtatcagtggacgatgccaaggccttcgctgagagggaaatcaccttctttatggaaacatctgcactggaggccatgaacgtcgagaccgccttcactgaggttctgactcagatctatcgtgtggtcagcaagaaggccctcgacataggcgatgaccctgctgctccaccgagaggacaaaccatcaacgttggtggcaaggatgatgtctctgctgtgaaaaaggcagggtgctgttcatcctaaattcgttttgcttgtgaagagggaccatatgctcacctgattatatgggtgactgcaaatatgacatcatttttgtctcctaacctggttgtttgcgagattataccggtgcaccaagaatttcgtttagatatcaagatttaaccccaggttgataaggggggccatgctaactttggaatgtcagtgattttgtggttgccttttatggtttctttgctgctgtattgtcccacctcaattgacacaagaatcctctcaacatttcactgcgcagcctagcctgataaaggttgtaatcggagggagctatggttcattacttcaaaaaaaaaaa

SEQ ID NO: 5982 - protein, 216 aa, Glycine max
  misc_feature: Ceres CLONE ID no. 1076414
  misc_feature: Ceres CDNA ID no. 40351633
  misc_feature (8)..(173): Pfam Name: Arf PFAM Desc: ADP
MAYRAEDDYDYLFKVVLIGDSGVGKSNLLSRFTRNEFSLESKSTIGVEFATRSIRVDDKVVKAQIWDTAGQERYRAITSAYYRGAVGALVVYDVTRHVTFENVERWLKELRDHTDANIVIMLVGNKADLRHLRAVSVDDAKAFAEREITFFMETSALEAMNVETAFTEVLTQIYRVVSKKALDIGDDPAAPPRGQTINVGGKDDVSAVKKAGCCSS

SEQ ID NO: 5983 - DNA, 644 bp, Glycine max
  misc_feature: Ceres CLONE ID no. 1076472
  misc_feature: Ceres CDNA ID no. 35383351
  CDS (54)..(530): REFERENCED BY SEQ ID NO: 5984
agttttcgtccgacggagatcgattaacggagaagtaaacaaaccccctagatatggcggagaagctcgcgccggagaagcgacatgatttcgttcataacgggcaaaaggtgtttgagtgggatcaaaccctcgaagaagtgaacttgtacataactttgccgcccaatgttcattcaaaggcattccactgcaaaatccagtcgaaacatctcgaagttggcatcaaaggcaaccctccttatctcaatcacgatcttagtgctcctgtgaagacggattgctcgttctggacactagaggatgatataatgcacattaccctgcagaagagggagaaagggcagacatgggcatcgccgattcttggacagggtcagttggatccttacgccactgatctagagcagaagcggctcatgctgcagaggtttcaagaagagaacccaggattcgacttttcacaagctcagttcacgggtaactgtccagatccgagtagcttcatgggtggtattcgttctgactagtcctccctccctactcttgggatttcatggctgataaataaacggcctgactttgacccgcttctgtaatcatctctaaactatattttcattcactcaaaaaaaaaaaaaaaa

SEQ ID NO: 5984 - protein, 158 aa, Glycine max
  misc_feature: Ceres CLONE ID no. 1076472
  misc_feature: Ceres CDNA ID no. 35383351
  misc_feature (14)..(140): Pfam Name: Nuclear_move PFAM Desc: Nuclear movement protein
  misc_feature: Homolog of GI Number: 34910948 NR Desc: OSJNBb0063G05.19
  misc_feature: Homolog of GI Number: 50417076 NR Desc: Zgc:100842 protein
  misc_feature: Homolog of GI Number: 73954084 NR Desc:  similar to NudC domain containing protein 2
  misc_feature: Homolog of GI Number: 61822779 NR Desc:  similar to NudC domain containing 2
  misc_feature: Homolog of GI Number: 76670465 NR Desc:  similar to NudC domain containing protein 2
  misc_feature: Homolog of GI Number: 30524691 NR Desc: salt tolerance protein 5
  misc_feature: Homolog of GI Number: 51535412 NR Desc: putative salt tolerance protein 5
  misc_feature: Homolog of GI Number: 65302936 NR Desc: spliceosome
MAEKLAPEKRHDFVHNGQKVFEWDQTLEEVNLYITLPPNVHSKAFHCKIQSKHLEVGIKGNPPYLNHDLSAPVKTDCSFWTLEDDIMHITLQKREKGQTWASPILGQGQLDPYATDLEQKRLMLQRFQEENPGFDFSQAQFTGNCPDPSSFMGGIRSD

SEQ ID NO: 5985 - DNA, 462 bp, Glycine max
  misc_feature: Ceres CLONE ID no. 1076514
  misc_feature: Ceres CDNA ID no. 40351634
  CDS (44)..(310): REFERENCED BY SEQ ID NO: 5986
agtgatagtagcggcgggcgaaggtttgatactgagaagaagaatggcaatggcatcattgaaggtaatgtgtaggttacagagtgttattgctcataaccataacaggttcaccaaaccctctctctctcctctttctctctctgcgccacgcctttctcgcacttcccggttaccagtggaattgggatgcttggaatcaatgatgccgtttcatagcgttgtagcttcagctcgattagtgtcaagcttgtctattgagtctctcggttggggattagttcctcaaggtatttccatgcctttatgacagcatttgtctgcagttagttgctgcaaggtagcattttcatctgatggcaggctcatgttgatgttttcatcaattgtaatcttgagaccactgacataggatccttcatctgacatatttgaggaacattcagtgcaaaaaaaaaaaaa

SEQ ID NO: 5986 - protein, 88 aa, Glycine max
  misc_feature: Ceres CLONE ID no. 1076514
  misc_feature: Ceres CDNA ID no. 40351634
MAMASLKVMCRLQSVIAHNHNRFTKPSLSPLSLSAPRLSRTSRLPVELGCLESMMPFHSVVASARLVSSLSIESLGWGLVPQGISMPL

SEQ ID NO: 5987 - DNA, 703 bp, Glycine max
  misc_feature: Ceres CLONE ID no. 1076522
  misc_feature: Ceres CDNA ID no. 25445764
  CDS (82)..(579): REFERENCED BY SEQ ID NO: 5988
acacgacagacacgaacacgatggttgaaatttgaagcaaagcacgtgtttgtgtgtgaccttctctctctctaaactccgatggctttctctgcaatcactaccttgccctctcctcaatttctccgccttcctcaatcttcaccctctcttcgattttcaccgccaattctcaaacgccccaaacccctctccattcgatcagtttcaatccccgctgcaccagcatctggttctctggcccctgcagtttcacttatggataatgcgctgaagcacttgaataagatgaggtctgaacgaaatcaagatttatgtttaagaataggtgtcaaacagggagggtgctctggtatgtcatacacaatggattttgaagacagggctaataaaaggccagatgattcaattattgagtatgaaggttttgaaattgtttgtgatcttaagagcctactcttcatatttggcatgcaattagattacagtgatgctctgattgggggaggcttctctttcaagaatcctaacgcgacacagacttgtggatgtggtaaatcctttgccgctgaaatgtagaaccatgttatagacaatagtttgtttctactttctagcaacactctggactaaatatagatatacttttaatactaacataaatatattcatgtgcattgtaagaaaaaaaaaaaaaaaaaaa

SEQ ID NO: 5988 - protein, 165 aa, Glycine max
  misc_feature: Ceres CLONE ID no. 1076522
  misc_feature: Ceres CDNA ID no. 25445764
  misc_feature (56)..(162): Pfam Name: HesB PFAM Desc: HesB
  misc_feature: Homolog of GI Number: 38603854 NR Desc: At1g10500
  misc_feature: Homolog of GI Number: 55297134 NR Desc: hesB
  misc_feature: Homolog of GI Number: 45509112 NR Desc: COG0316: Uncharacterized conserved protein
  misc_feature: Homolog of GI Number: 48893654 NR Desc: COG0316: Uncharacterized conserved protein
  misc_feature: Homolog of GI Number: 71673782 NR Desc: HesB/YadR/YfhF
  misc_feature: Homolog of GI Number: 53735507 NR Desc: COG0316: Uncharacterized conserved protein
  misc_feature: Homolog of GI Number: 67921859 NR Desc: HesB/YadR/YfhF
  misc_feature: Homolog of GI Number: 23130099 NR Desc: COG0316: Uncharacterized conserved protein
  misc_feature: Homolog of GI Number: 57227292 NR Desc: iron ion transport
  misc_feature: Homolog of GI Number: 66778399 NR Desc: HesB/YadR/YfhF
MAFSAITTLPSPQFLRLPQSSPSLRFSPPILKRPKPLSIRSVSIPAAPASGSLAPAVSLMDNALKHLNKMRSERNQDLCLRIGVKQGGCSGMSYTMDFEDRANKRPDDSIIEYEGFEIVCDLKSLLFIFGMQLDYSDALIGGGFSFKNPNATQTCGCGKSFAAEM

SEQ ID NO: 5989 - DNA, 860 bp, Glycine max
  misc_feature: Ceres CLONE ID no. 1076635
  misc_feature: Ceres CDNA ID no. 29191727
  CDS (89)..(541): REFERENCED BY SEQ ID NO: 5990
actccagatctgtataaaaacaaaaacgctggctttgaaaccctaataagcttcatcaatctccgaactccgaagcccttcagcaaccatgtcgaggagaaaggttagggagccaaaggaggaaaatgtcactcttggtccagccgttagagacggtgaacatgttttcggcgtggctcgcatctttgcctccttcaacgacaccttcatccatgtcactgatttgtctgggagggaaacccttgttcgcatcactggtgggatgaaagttaaagctgacagagatgaatcatctccatatgctgctatgcttgcagcacaggatgttgctgccagatgtaaggaactgggcataactgctcttcatatcaggctccgtgccactggtggaaacaagaccaaaacacctggtcctggtgctcaatcagctcttcgagcccttgcacgttcaggaatgaaaattggtcgtatagaggatgttactcccattccttcggatagtacacgtagaaagagtggtagaaggggtagaagactttaaacttcgtatggtatacgactggagttgctatattttactttcgatgccaaagagaatggtggccttttgatgctcttcaagttaatatcagaactcttgcatttcttgaggtgttagaacagaattttagttgttgtcagatttttgaaagttgagtatgttgcttcgtggcttgcaaatgtgttaatcactactttgataaattgcgccctaggtttggttgattattgttttttataattcgcttctctctctcggctacttttaagcaatgaatgaattggaaatctaatcattgttcgcaaaaaaaaaaaaaaaa

SEQ ID NO: 5990 - protein, 150 aa, Glycine max
  misc_feature: Ceres CLONE ID no. 1076635
  misc_feature: Ceres CDNA ID no. 29191727
  misc_feature: The plant is abnormally large.
  misc_feature: Useful for making plants with modulated biomass
  misc_feature (28)..(146): Pfam Name: Ribosomal_S11 PFAM Desc: Ribosomal protein S11
  misc_feature: Homolog of GI Number: 2565340 NR Desc: ribosomal protein S14
  misc_feature: Homolog of GI Number: 50905421 NR Desc: putative ribosomal protein S14
  misc_feature: Homolog of GI Number: 28436071 NR Desc: cytoplasmic ribosomal protein S14
  misc_feature: Homolog of GI Number: 50924099 NR Desc: OJ000126_13.9
  misc_feature: Homolog of GI Number: 131772 NR Desc: 40S ribosomal protein S14
  misc_feature: Homolog of GI Number: 21618105 NR Desc: putative ribosomal protein S14
  misc_feature: Homolog of GI Number: 131773 NR Desc: 40S ribosomal protein S14
  misc_feature: Homolog of GI Number: 77745450 NR Desc: ribosomal protein S14
  misc_feature: Homolog of GI Number: 21595448 NR Desc: putative 40S ribosomal protein S14
  misc_feature: Homolog of GI Number: 21593698 NR Desc: 40S ribosomal protein S14
  misc_feature: Useful for decreasing plant size
  misc_feature: Useful for making larger plants
  misc_feature: Useful for making ornamental plants with modified flowers
  misc_feature: Useful for making plants with altered leaf shape eg curled leaves
  misc_feature: Useful for sterility
MSRRKVREPKEENVTLGPAVRDGEHVFGVARIFASFNDTFIHVTDLSGRETLVRITGGMKVKADRDESSPYAAMLAAQDVAARCKELGITALHIRLRATGGNKTKTPGPGAQSALRALARSGMKIGRIEDVTPIPSDSTRRKSGRRGRRL

SEQ ID NO: 5991 - DNA, 889 bp, Glycine max
  misc_feature: Ceres CLONE ID no. 1076653
  misc_feature: Ceres CDNA ID no. 40351635
  CDS (329)..(661): REFERENCED BY SEQ ID NO: 5992
atatatttacttggggtttatgagattggttatctggattcttagtgtttgtggtatcgaacacacgctccattgcttaagattttaacataaatcgatttatgtgttcggttcagcgaattgttgttttacttgtggcttgcttcgcctttgttctctcggcaatggatttcaattcttttttttttacgaatagaactgctgactgccaagtgttcgttgaaattcctctgagaggtggaattgttatgtcttttaacagttacttgactatgttcatctgttttcttttttctagcaggtccgaaagagccttgtttcagcagccatggccaagcatcatcctgatttgatcatgtgccggaaacaacctggcattgccatcgggcgattgtgcgagaaatgtgacggcaaatgcgtggtctgcgattcctacgtgcgcccgtgtacgctggttaggatttgcgatgaatgcaactatggttcgttccaaggacggtgcgtcatatgcggaggtgttgggatctcagatgcttactactgcaaagagtgtacacagcaggagaaagatagagacggttgtcccaagattgtcaatctcgggagtgcgaagactgacctgttctatgaacgtaagaagtatggattcaagaaacgatgacaagtgtctctgtactcgtctttgttttggcatgaactcaaagaaaagacaaatgtttgtttgttgttactcttgtgtcttattgattagctggacgtgctatctttgttatggttggttaatgtcttagaatgtgattgtttctctgcaacactaaaacatcctcttgtttgagtaattcgaatctctgacagaacatgtattcaagaaccaaaaaaaaaaaaaaaa

SEQ ID NO: 5992 - protein, 110 aa, Glycine max
  misc_feature: Ceres CLONE ID no. 1076653
  misc_feature: Ceres CDNA ID no. 40351635
  misc_feature (1)..(106): Pfam Name: PHF5 PFAM Desc: PHF5
MAKHHPDLIMCRKQPGIAIGRLCEKCDGKCVVCDSYVRPCTLVRICDECNYGSFQGRCVICGGVGISDAYYCKECTQQEKDRDGCPKIVNLGSAKTDLFYERKKYGFKKR

SEQ ID NO: 5993 - DNA, 678 bp, Glycine max
  misc_feature: Ceres CLONE ID no. 1076821
  misc_feature: Ceres CDNA ID no. 40351636
  CDS (64)..(450): REFERENCED BY SEQ ID NO: 5994
aaaaactaaaaccctagcttcttccttctcatagcttctctctcagaactcgtcggcgcgaagatgaccgtagaagcagtgaaccctaaggcgtacccgttagccgattctcagctagcgattactatcctcgaccttgtccagcaagctacgaactacaaacagctcaagaaaggagctaatgaagctaccaagactctgaaccgtggtatctctgagttcgtggtcatggctgccgatgctgagcctctcgagattcttctccacctccctcttctcgccgaagacaagaatgtgccgtatgtgtttgtgccatccaaacaagcccttggaagagcatgtggtgttacaagacccgtgattgcttgttccgttacatcaaacgaggctagccagttgaaatctcaaattcagcagcttaaggatgctattgagaagcttctcatctaaggtttttgggtggtgatatgaatgaatgatgggtcttcctccatttaatggagaaggctttgaagttttagcttatgaagaaacgatgattctactatgagtttttgaagtttgtaatgttttatttaaaaaaaaaaaaaattcgtattgtgttgctgctactgtagttttgaacaagaacaatcatttataattgagttttttagatttacaaaaaaaaaaaaaaaa

SEQ ID NO: 5994 - protein, 128 aa, Glycine max
  misc_feature: Ceres CLONE ID no. 1076821
  misc_feature: Ceres CDNA ID no. 40351636
  misc_feature (20)..(114): Pfam Name: Ribosomal_L7Ae PFAM Desc: Ribosomal protein L7Ae/L30e/S12e/Gadd45 family
MTVEAVNPKAYPLADSQLAITILDLVQQATNYKQLKKGANEATKTLNRGISEFVVMAADAEPLEILLHLPLLAEDKNVPYVFVPSKQALGRACGVTRPVIACSVTSNEASQLKSQIQQLKDAIEKLLI

SEQ ID NO: 5995 - DNA, 889 bp, Glycine max
  misc_feature: Ceres CLONE ID no. 1076914
  misc_feature: Ceres CDNA ID no. 29191685
  CDS (49)..(753): REFERENCED BY SEQ ID NO: 5996
acgcacgccactgaggagaggagagttcatcgcagagaagagagaaaaatgccggcggctaagcagaggaccccgaaagtaagccgaaaccccgatctgatcaggggtgtcggcaaatactctcgctcgcaaatgtaccacaagagaggtttgtgggcaatcaaggccaaaaacggcggcgttttcccccgtcacgacgctaagtccaaggtcgaagctcccgttgagaaggccgccaagttctatccagctgaagacgttaagaagcctctcgccaacagacgcaagcctaagcccaccaaactcaaagccagcattactccaggaactgtgttgatcatccttgctggtagattcaagggcaagagagttgtctttctcaagcaactcacttctggtttgcttttggttactggaccattcaagatcaacggtgtccctttgagacgtgttaaccagtcgtacgtgattggcacctccacaaaggttgacatttctggagtcagcattgagaaattcgatgacaagtacttcggaaaggttgctgagaagaagaccaagaaaggagaaggcgagttctttgaagctgacaaaaaggagaagaaagagatcccacaagagaagaaagaagaccagaaaaccgttgacgcagctctgatcaaatccattgaagcagtcccagagctcaagatctacctcggcgccaggttctctttgtcacaaggaatgaaaccccatgagctcgtcttctagatttcatcttatcgttttgtttcccttcatgtttcaagaacacctgttttcccctgagtttttatccctggatcttagaaaatacactatcttctctgatttatatatcgacgttctaccaaaaaaaaaaaaaaaa

SEQ ID NO: 5996 - protein, 234 aa, Glycine max
  misc_feature: Ceres CLONE ID no. 1076914
  misc_feature: Ceres CDNA ID no. 29191685
  misc_feature (127)..(234): Pfam Name: Ribosomal_L6e PFAM Desc: Ribosomal protein L6e
  misc_feature (2)..(59): Pfam Name: Ribosomal_L6e_N PFAM Desc: Ribosomal protein L6
  misc_feature: Homolog of GI Number: 9795602 NR Desc: Putative  60S ribosomal protein L6
  misc_feature: Homolog of GI Number: 21593910 NR Desc: 60S ribosomal protein L6
  misc_feature: Homolog of GI Number: 21592925 NR Desc: putative 60S ribosomal protein L6
  misc_feature: Homolog of GI Number: 27311965 NR Desc: putative 60S ribosomal protein L6
  misc_feature: Homolog of GI Number: 19539 NR Desc: ribosomal protein YL16
  misc_feature: Homolog of GI Number: 7208784 NR Desc: 60S ribosomal protein L6
  misc_feature: Homolog of GI Number: 50925014 NR Desc: OSJNBb0022F23.11
  misc_feature: Homolog of GI Number: 50909993 NR Desc: putative 60S ribosomal protein L6
  misc_feature: Homolog of GI Number: 57471700 NR Desc: ribosomal protein L6
  misc_feature: Homolog of GI Number: 57999636 NR Desc: 60S ribosomal protein L6 CgRPL6
MPAAKQRTPKVSRNPDLIRGVGKYSRSQMYHKRGLWAIKAKNGGVFPRHDAKSKVEAPVEKAAKFYPAEDVKKPLANRRKPKPTKLKASITPGTVLIILAGRFKGKRVVFLKQLTSGLLLVTGPFKINGVPLRRVNQSYVIGTSTKVDISGVSIEKFDDKYFGKVAEKKTKKGEGEFFEADKKEKKEIPQEKKEDQKTVDAALIKSIEAVPELKIYLGARFSLSQGMKPHELVF

SEQ ID NO: 5997 - DNA, 910 bp, Glycine max
  misc_feature: Ceres CLONE ID no. 1076926
  misc_feature: Ceres CDNA ID no. 29191279
  CDS (239)..(784): REFERENCED BY SEQ ID NO: 5998
atcaattttcagtgcgttaaagatattgaaacagagacgattcttgtttgtcaattatctctgtgtttctgtgattcttctgttccattcgattcaaccctgaagccaaagaacaacaaggataagccttttaactagttttgtgcgttggatcatctgtttaagctcggcttaatcttaccttcaacacttcacaaggctgctcttgcgttagactgtgtttgaagaagaaccaaagatgtcatcggatgagaagaaccttatagagatcttggaggaaggccacaaagtcgatatagtcaagtacatcgattacgtcagtgcccctcaagccggcgccatagccacattctctggcactacgagagacatgttcgaaggcaaagcagtcttggagctaaggtacgaagcgtacgtaccaatggccacgcgaaccctcacctccatctgcacatccgctagatcaaactgggacatccacaagatcgctgtcgctcaccgtctagggccagttcccgttggagaaaccagcgtgttcattgcggtttcatctgttcaccgtggggatggtttagacgcttgtaagttcttgatcgatgagctaaaggcaacggttccgatttggaagaaggaggtgtacactaatggagagatctggaaggagaatagtgagtttctggagaagagagacggtctagtgaagaaagaacataaaagaagttgctgtggaagtaaagttagagtacaagaagatgaagaagagcataaagataacagttcttgattacttatagcaaagagcaatgtttttttttttttttctactctcgataagcaaattgtcttaaaacacacattgttgaatctaaagacttcaaattccaattcagttgcaaaaaaaaaaaaaaaa

SEQ ID NO: 5998 - protein, 181 aa, Glycine max
  misc_feature: Ceres CLONE ID no. 1076926
  misc_feature: Ceres CDNA ID no. 29191279
  misc_feature (10)..(126): Pfam Name: MoaE PFAM Desc: MoaE protein
  misc_feature: Homolog of GI Number: 2281094 NR Desc: putative molybdopterin synthase large subunit
  misc_feature: Homolog of GI Number: 50905205 NR Desc: putative molybdopterin synthase large subunit MOCS2B
  misc_feature: Homolog of GI Number: 29243132 NR Desc: putative molybdopterin synthase large subunit
  misc_feature: Homolog of GI Number: 66564230 NR Desc:  similar to CG10238
  misc_feature: Homolog of GI Number: 35493754 NR Desc: molybdopterin synthase large subunit MOCS2B
  misc_feature: Homolog of GI Number: 57085285 NR Desc:  similar to Molybdenum cofactor synthesis protein 2 large subunit
  misc_feature: Homolog of GI Number: 19353410 NR Desc: Mocs2 protein
  misc_feature: Homolog of GI Number: 50927005 NR Desc: Molybdopterin synthase
  misc_feature: Homolog of GI Number: 21356259 NR Desc: CG10238
  misc_feature: Homolog of GI Number: 54638840 NR Desc: GA10181
MSSDEKNLIEILEEGHKVDIVKYIDYVSAPQAGAIATFSGTTRDMFEGKAVLELRYEAYVPMATRTLTSICTSARSNWDIHKIAVAHRLGPVPVGETSVFIAVSSVHRGDGLDACKFLIDELKATVPIWKKEVYTNGEIWKENSEFLEKRDGLVKKEHKRSCCGSKVRVQEDEEEHKDNSS

SEQ ID NO: 5999 - DNA, 662 bp, Glycine max
  misc_feature: Ceres CLONE ID no. 1077184
  misc_feature: Ceres CDNA ID no. 36703443
  CDS (91)..(513): REFERENCED BY SEQ ID NO: 6000
ctagcaattcggcgcaatcgtcttctgcttcaagcttgctactgttggagatttggaaggagagcttgttattctctatcaacaaggaaaatgtcaggtgaagaggttgttgttgcagctgagccagctgctgccatcccaggcgagcctatggatatcatgactgccttgcaacttgtgctcagaaaatctctggcttatggtggtcttgcacgaggccttcacgaaggggcaaaagtgattgagaagcatgctgcacaactctgtgttctagcagaagactgtgaccagcctgactatgttaaactggttaaggccctttgtgcagagcacaatgttagcctgctgacagttccgagtgcaaagacccttggagaatgggctggtttgtgcaagattgattccgaaggaaaagctaggaaggttactggttgctcctgtgtggttgtgaaggattttggtgaggagcatgaagcctataacgtcgttctgcagcatgtgaaatctcaatgagttgcaagattcatagattttatgcatttcattttgggttattccatgagaatgaattttgccttgtagctggattatatctaccttgggttttgattgtttaatatgactgccacattctaaaaaaaaaaacaaaaaaaaaaaaaaaa

SEQ ID NO: 6000 - protein, 140 aa, Glycine max; identical to SEQ ID NO: 1964
  misc_feature: Ceres CLONE ID no. 1077184
  misc_feature: Ceres CDNA ID no. 36703443
  misc_feature (25)..(120): Pfam Name: Ribosomal_L7Ae PFAM Desc: Ribosomal protein L7Ae/L30e/S12e/Gadd45 family
  misc_feature: Homolog of GI Number: 50935291 NR Desc: putative 40S ribosomal protein S12
  misc_feature: Homolog of GI Number: 50934241 NR Desc: putative ribosomal protein S12
  misc_feature: Homolog of GI Number: 5106775 NR Desc: ribosomal protein S12
  misc_feature: Homolog of GI Number: 21537373 NR Desc: 40S ribosomal protein S12
  misc_feature: Homolog of GI Number: 21536844 NR Desc: 40S ribosomal protein S12
  misc_feature: Homolog of GI Number: 30025643 NR Desc: 40S ribosomal protein S12
  misc_feature: Homolog of GI Number: 67083929 NR Desc: ribosomal protein S12
  misc_feature: Homolog of GI Number: 18845074 NR Desc: 40S ribosomal protein S12
  misc_feature: Homolog of GI Number: 24266978 NR Desc: ribosomal protein S12
  misc_feature: Homolog of GI Number: 66548338 NR Desc:  similar to ribosomal protein S12

SEQ ID NO: 6001 - DNA, 1229 bp, Glycine max
  misc_feature: Ceres CLONE ID no. 1077248
  misc_feature: Ceres CDNA ID no. 24766051
  CDS (120)..(1034): REFERENCED BY SEQ ID NO: 6002
acatcgccacaaagcctgcgcctccatccacctccctcccacacgctccccaccccccgcgccgccgctcgtcggagccccgcctcgccgtgtcaagcccgctaccaatcgagccctgaatggctgccggcaggggcattaaccagcttctgaggaaaactcttcagagccagtcttctggctcatctctgctttcttcatttcggggaaagcatgaagagtcctctgctggactgagagcattggctcttcttggagttggtgcttctggtcttttaagttttggtacgatagcatctgcagatgaagctgagcacggtttggcggctgcagagtacccctggccgcatgctggcatccttagctcatatgatcatgcatcaatccgccgtggacatcaagtttaccagcaagtgtgtgcatcttgtcactccatgtcattgatttcataccgtgatttggttggggtggcctatactgaggaggaaactaaggcaatggctgctgaaattgaagtggttgatggtcctaatgatgagggtgaaatgttcacacgtcctggcaagctgagtgatcgcttcccgcagccttatccaaatgaacaagcagcccgatttgcaaatggtggggcatatcccccagatctcagccttatcacgaaggcaaggcacgatggccagaactacgtgtttgctcttcttactggttaccatgacccacctgctggtgttcagattcgtgagggtctgcattacaatccctacttccctggtggtgccatagccatgcctaagatgcttatggatggagctattgagtatgaagatggtactcctgcaactgaagctcagatgggcaaggatgttgtgtcattcttgtcgtgggctgctgagcctgaaatggaagagaggaaactgatgggtgtcaaatggatcttcctactgtcacttgctcttctccaagccgcatactaccgtcgcatgaggtggtccgtcctcaagtcccgcaagctggtcctggacgtcgtcaactgatgaccattgtttcttctttttattgcaacgttgaggctttaagcagaagcgatcgaaataatgacttccgttgtatatttttgctactggggttgtctcccatcataccttgggtacaatctcttttgttttcttcctctgctgcaaaagcatttctccaaggagcagttattttcaataaaaaaaaaaaaaaaa

SEQ ID NO: 6002 - protein, 304 aa, Glycine max
  misc_feature: Ceres CLONE ID no. 1077248
  misc_feature: Ceres CDNA ID no. 24766051
  misc_feature: The plant is abnormally small.
  misc_feature: The plant produces a reduced number of seeds.
  misc_feature: Useful for biocontainment applications
  misc_feature: Useful for making plants with modulated biomass
  misc_feature (69)..(294): Pfam Name: Cytochrom_C1 PFAM Desc: Cytochrome C1 family
  misc_feature: Homolog of GI Number: 17981653 NR Desc: AT3g27240/K17E12_6
  misc_feature: Homolog of GI Number: 21435987 NR Desc: AT5g40810/MHK7_4
  misc_feature: Homolog of GI Number: 21593678 NR Desc: cytochrome c
  misc_feature: Homolog of GI Number: 10177960 NR Desc: cytochrome c1 precursor
  misc_feature: Homolog of GI Number: 34907202 NR Desc: putative cytochrome c1 precursor
  misc_feature: Homolog of GI Number: 9294217 NR Desc: ubiquinol
  misc_feature: Homolog of GI Number: 7547401 NR Desc: cytochrome c1 precursor
  misc_feature: Homolog of GI Number: 82263 NR Desc: ubiquinol cytochrome c1 precursor
  misc_feature: Homolog of GI Number: 21439 NR Desc: cytochrome c1
  misc_feature: Homolog of GI Number: 498789 NR Desc: cytochrome c1
  misc_feature: Useful for increasing chlorophyll and photosynthetic capacity
  misc_feature: Useful for sterility
MAAGRGINQLLRKTLQSQSSGSSLLSSFRGKHEESSAGLRALALLGVGASGLLSFGTIASADEAEHGLAAAEYPWPHAGILSSYDHASIRRGHQVYQQVCASCHSMSLISYRDLVGVAYTEEETKAMAAEIEVVDGPNDEGEMFTRPGKLSDRFPQPYPNEQAARFANGGAYPPDLSLITKARHDGQNYVFALLTGYHDPPAGVQIREGLHYNPYFPGGAIAMPKMLMDGAIEYEDGTPATEAQMGKDVVSFLSWAAEPEMEERKLMGVKWIFLLSLALLQAAYYRRMRWSVLKSRKLVLDVVN

SEQ ID NO: 6003 - DNA, 761 bp, Glycine max
  misc_feature: Ceres CLONE ID no. 1077377
  misc_feature: Ceres CDNA ID no. 40351637
  CDS (27)..(563): REFERENCED BY SEQ ID NO: 6004
atttgtttagctttctaccgacgaaaatgggcgctttcaggtttcaccagtaccaggttgtcggaagagctctcccgacagagaaagatgtgcagcctaagatctacaggatgaagctttgggccacgaacgaggttcgtgccaagtccaagttctggtatttcttgaggaagctgaagaaggttaagaagagtaacggtcagatgctcgccatcaacgagatctttgagaagaacccaacaaccatcaagaactttggaatctggttgaggtaccagagcaggactggataccacaacatgtacaaggagtaccgtgacaccaccttgaacggagccgtggagcagatgtacaccgagatggcgtcacgacaccgcgtcaggttcccttgcatccagatcatcaagacagcaactgtcccggccaagctttgcaagagggagagcaccaagcagttccacaacagcaaaatcaagttcccattggtgttccgcaaggtcagaccaccaaccaggaagctcaagaccacctacaaggcctccaaacccaacttgttcatgtgataagagtctctggttgactcttcaatcttttttgtttggggatagaatcgtgatgaagttgtgctttctgctgttttgtctttttaatttcaaggatatttttgtttatcaacgttttagccttattcatggaactaaactcgactttgtctggattgtgttgttcttgtttcttgattttgaaaaaaaaaaaaaaaa

SEQ ID NO: 6004 - protein, 178 aa, Glycine max
  misc_feature: Ceres CLONE ID no. 1077377
  misc_feature: Ceres CDNA ID no. 40351637
  misc_feature (5)..(178): Pfam Name: Ribosomal_L18ae PFAM Desc: Ribosomal L18ae protein family
MGAFRFHQYQVVGRALPTEKDVQPKIYRMKLWATNEVRAKSKFWYFLRKLKKVKKSNGQMLAINEIFEKNPTTIKNFGIWLRYQSRTGYHNMYKEYRDTTLNGAVEQMYTEMASRHRVRFPCIQIIKTATVPAKLCKRESTKQFHNSKIKFPLVFRKVRPPTRKLKTTYKASKPNLFM

SEQ ID NO: 6005 - DNA, 701 bp, Glycine max
  misc_feature: Ceres CLONE ID no. 1077404
  misc_feature: Ceres CDNA ID no. 29191633
  CDS (2)..(463): REFERENCED BY SEQ ID NO: 6006
gacggtctcgcgactcgcaaaccctagctcgcgagcagagggccacaaaaccacacccctctccctccccgccgccacttgccgcaactcctccaccagaaagggaagggaagcacgccggagccccatctccccggccgtcaaaatggtgaacgttccgaagaccaagaagacctactgcaaaaacaaggagtgcaagaagcacacacttcacaaggtcactcagtacaagaagggcaaggacagtctatctgcccagggaaagcgtcgttatgacaggaagcagtcgggatatggtggtcagaccaagcctgttttccacaagaaggcaaaaaccaccaagaagattgtgctgaagctgcaatgccagagctgcaagcactactcccagcgtgccatcaagaggtgcaagcattttgagatcggcggagacaagaagggcaaggggacatctcttttctagactgctttcacctatctggagtggtggtggtcacgaagtattactacttgtgttaagggttcgttgttaggagttaaattaatcagaccttgtcatgtatccaaactcctgtgtcttgcatttaagcaagaggcgagttttggctaagtgaagttttgtagcttgaatcctctttcattccgtataatgtcaatcaactccatggtgttaaaatgtttctaaaaaaaaaaaaaaaaaa

SEQ ID NO: 6006 - protein, 105 aa, Glycine max; identical to SEQ ID NO: 1996
  misc_feature: Ceres CLONE ID no. 1077404
  misc_feature: Ceres CDNA ID no. 29191633
  misc_feature (19)..(95): Pfam Name: Ribosomal_L44 PFAM Desc: Ribosomal protein L44
  misc_feature: Homolog of GI Number: 34901296 NR Desc: putative 60S ribosomal protein L44
  misc_feature: Homolog of GI Number: 41152660 NR Desc: 60S ribosomal protein L44
  misc_feature: Homolog of GI Number: 15281775 NR Desc: 60S ribosomal protein L144
  misc_feature: Homolog of GI Number: 21553918 NR Desc: ribosomal protein
  misc_feature: Homolog of GI Number: 170920 NR Desc: ribosomal protein L41
  misc_feature: Homolog of GI Number: 1553131 NR Desc: ribosomal protein L44 isoform b
  misc_feature: Homolog of GI Number: 82621114 NR Desc: ribosomal protein L41
  misc_feature: Homolog of GI Number: 3128243 NR Desc: ribosomal protein L41
  misc_feature: Homolog of GI Number: 12083868 NR Desc: ribosomal protein L41
  misc_feature: Homolog of GI Number: 66852786 NR Desc: ribosomal protein L41

SEQ ID NO: 6007 - DNA, 1154 bp, Glycine max
  misc_feature: Ceres CLONE ID no. 1077406
  misc_feature: Ceres CDNA ID no. 36703444
  CDS (137)..(925): REFERENCED BY SEQ ID NO: 6008
accagccaccgaggcggccgatctcccctccccacccgcgccgcgccaccgccaccgccgccgccgccgccgccgccggcagccgttcgtctcgagattgacctttggtgactgttagaaaccacaggcggtgaagatggcgcagcctgctgagctttcccgtgaggagaatgtgtacatggctaagcttgcagagcaggctgagaggtacgaagagatggtcgagttcatggagaaggtggccaagacaattgactctgaggagctcaccgtcgaggagcgcaaccttctatcagttgcttacaagaatgttattggtgcccgccgtgcctcgtggcgcatcatttcctccatcgagcagaaggaagagagccgtggcaatgaggaccgtgtcacactcatcaaggactaccgtggaaagattgaggttgagctcactaagatctgtgatggtatcctcaagcttcttgattcccaccttgtcccctcatccaccgctccggagtccaaggtcttctacctgaagatgaagggtgattactataggtaccttgcagagttcaagagtggaactgagaggaaggatgctgctgagaacaccatggtggcatacaaagctgctcaggagattgcactgaaagagctgcccccgactcatcctattaggcttgggctggcactcaacttctcggtgttctattatgagatcctcaactctccagaccgtgcttgtgacctcgccaagcaggcttttgatgaggccatctcggaactggactctctgagcgaggagtcctacaaggacagcactttgatcatgcagcttctgcgtgataacctgacgctgtggacttctgacatctcggaggacgctgctgaagaaatgaaggatgctcccaagggtgaatctggagatggacagtaaacactgtctatgtgcccagaaacttgtctttctcgcttgttcagtgtagattgtaatgtcgccgtggttgctggtaattggaggctccaatttgtgttgtgatagggaagcttgtagctgccttgcttgctcggtggcctgattatcgggctgcactggttattgcctcttgttgaacctttgtgttactttggtgattctagaaattttctgctgctctaaaaaaaaa

SEQ ID NO: 6008 - protein, 262 aa, Glycine max; identical to SEQ ID NO: 5460
  misc_feature: Ceres CLONE ID no. 1077406
  misc_feature: Ceres CDNA ID no. 36703444
  misc_feature: Useful for making plants with modulated growth and phenotype characteristics
  misc_feature: null
  misc_feature: The sequence is a functional homolog of  SEQ ID NO 2350 in the  10/374,780 US patent application
  misc_feature: The sequence is a functional homolog of  SEQ ID NO 342 in the  10/412,699 US patent application
  misc_feature: The sequence is a functional homolog of  SEQ ID NO 344 in the  10/412,699 US patent application
  misc_feature: The sequence is a functional homolog of  SEQ ID NO 782 in the  11/479,226 US patent application
  misc_feature: The sequence is a functional homolog of  SEQ ID NO 786 in the  11/479,226 US patent application
  misc_feature: The sequence is a functional homolog of  SEQ ID NO 789 in the  11/479,226 US patent application
  misc_feature: The sequence is a functional homolog of  SEQ ID NO 790 in the  10/225,066 US patent application
  misc_feature: The sequence is a functional homolog of  SEQ ID NO 797 in the  11/479,226 US patent application
  misc_feature: The sequence is a functional homolog of  SEQ ID NO 801 in the  11/479,226 US patent application
  misc_feature: The sequence is a functional homolog of  SEQ ID NO 805 in the  11/479,226 US patent application
  misc_feature: Useful for making plants with modulated drought sensitivity
  misc_feature (9)..(246): Pfam Name: 14 PFAM Desc: 14
  misc_feature: Homolog of GI Number: 1070354 NR Desc: Hv14
  misc_feature: Homolog of GI Number: 7271253 NR Desc: 14
  misc_feature: Homolog of GI Number: 50924834 NR Desc: OSJNBa0072F16.20
  misc_feature: Homolog of GI Number: 998430 NR Desc: GF14
  misc_feature: Homolog of GI Number: 2266662 NR Desc: 14
  misc_feature: Homolog of GI Number: 998432 NR Desc: GF14
  misc_feature: Homolog of GI Number: 52548256 NR Desc: 14
  misc_feature: Homolog of GI Number: 322869 NR Desc: 14
  misc_feature: Homolog of GI Number: 6179981 NR Desc: 14
  misc_feature: Homolog of GI Number: 32401388 NR Desc: 14

SEQ ID NO: 6009 - DNA, 774 bp, Glycine max
  misc_feature: Ceres CLONE ID no. 1077444
  misc_feature: Ceres CDNA ID no. 40351638
  CDS (3)..(605): REFERENCED BY SEQ ID NO: 6010
accgcgatgctaacgctcggcatttcttgcgtgtcccgatgttcttacgcgcttgtctctcgcagtcgacggagaagaagcagttgaacccgatgcgggagatcaaggtgcagaagcttgtcctcaacatctccgtcggggagagcggcgatcgcctcactcgcgctgccaaggtgttggagcagctgagcgggcagtcgccagttttctccaaggcgaggtacactgtcaggtcttttggcattcgtcgtaatgagaagattgcctgctatgtgacgatcaggggtgagaaggcaatgcagcttctcgagagtgggctgaaggtgaaggagtacgagctcctgaggaggaacttcagtgacactggttgctttgggtttggtattcaggagcacattgatcttggcatgaagtatgacccatcaaccggcatctacggcatggacttctttgttgttctggagcgagctggataccgtgtctcccgccggcgccgatgcaaggcccgtgttgggatccaccaaagggtgaccaaggaagacgccatgaagtggttccaggtcaagtatgagggtgtcatcctgaacaagtcccacgctagctagaaaggcttttgagtggaatcttatgtttattgatacaaagtttgcactatcaattttgcctgttccgttgggctgacctgcatctataattccaccaaatcttttcatggtttcatatttgaagttgaacatttcatcaacttttttcctaccaaaaaaaaaaaaaaaa

SEQ ID NO: 6010 - protein, 188 aa, Glycine max
  misc_feature: Ceres CLONE ID no. 1077444
  misc_feature: Ceres CDNA ID no. 40351638
  misc_feature (17)..(70): Pfam Name: Ribosomal_L5 PFAM Desc: Ribosomal protein L5
  misc_feature (74)..(173): Pfam Name: Ribosomal_L5_C PFAM Desc: ribosomal L5P family C
MFLRACLSQSTEKKQLNPMREIKVQKLVLNISVGESGDRLTRAAKVLEQLSGQSPVFSKARYTVRSFGIRRNEKIACYVTIRGEKAMQLLESGLKVKEYELLRRNFSDTGCFGFGIQEHIDLGMKYDPSTGIYGMDFFVVLERAGYRVSRRRRCKARVGIHQRVTKEDAMKWFQVKYEGVILNKSHAS

SEQ ID NO: 6011 - DNA, 616 bp, Glycine max
  misc_feature: Ceres CLONE ID no. 1077446
  misc_feature: Ceres CDNA ID no. 35383352
  CDS (40)..(402): REFERENCED BY SEQ ID NO: 6012
attgtctgttctgttactcctcatcagagctttgcgaaaatggttcaacggcttgtgtaccggtcacgccactcttacgccaccaaatccaaccaacaccgcatcgtcaaaactcctggtgggaagttgacttaccagacgacgaagaagagagctagtggacctaagtgccctgtgactggcaagcgaatccaagggattccgcatctgagacctgctgagtacaagaggtcgaggttgtcaaggaacaggaggacagtgaaccgtgcatacggtggtgttctctctggactagctgttaaagacaggatcgttagggcattcttggtggaagagcagaagattgtgaagaaggttttgaagcttcagaaggctaaggagaagactgcaccaaagagttagatgacttctttttggagagttttgcagtaacattacgagaagtgatgtgggagagaaggttatgtcttgtaagagagatcgatagacttgagtttggttcaccagatttttgtttttgttttaatgagttttgacttcagttgagattttactttctatgtttgtgttttttggtttacaattataattcgtcttgccaaaaaaaaaaaaaaaa

SEQ ID NO: 6012 - protein, 120 aa, Glycine max
  misc_feature: Ceres CLONE ID no. 1077446
  misc_feature: Ceres CDNA ID no. 35383352
  misc_feature (5)..(103): Pfam Name: Ribosomal_L34e PFAM Desc: Ribosomal protein L34e
  misc_feature: Homolog of GI Number: 20259165 NR Desc: putative 60S ribosomal protein L34
  misc_feature: Homolog of GI Number: 13194822 NR Desc: putative 60S ribosomal protein L34
  misc_feature: Homolog of GI Number: 21436403 NR Desc: putative 60S ribosomal protein L34
  misc_feature: Homolog of GI Number: 21594659 NR Desc: 60s ribosomal protein L34
  misc_feature: Homolog of GI Number: 1076636 NR Desc: ribosomal protein L34
  misc_feature: Homolog of GI Number: 47824936 NR Desc: Ribosomal protein L34e
  misc_feature: Homolog of GI Number: 2119150 NR Desc: ribosomal protein L34
  misc_feature: Homolog of GI Number: 50946109 NR Desc: putative ribosomal protein
  misc_feature: Homolog of GI Number: 50941301 NR Desc: putative ribosomal protein L34
  misc_feature: Homolog of GI Number: 57471712 NR Desc: ribosomal protein l34
MVQRLVYRSRHSYATKSNQHRIVKTPGGKLTYQTTKKRASGPKCPVTGKRIQGIPHLRPAEYKRSRLSRNRRTVNRAYGGVLSGLAVKDRIVRAFLVEEQKIVKKVLKLQKAKEKTAPKS

SEQ ID NO: 6013 - DNA, 636 bp, Glycine max
  misc_feature: Ceres CLONE ID no. 1077503
  misc_feature: Ceres CDNA ID no. 40351639
  CDS (3)..(443): REFERENCED BY SEQ ID NO: 6014
aaaaagatcccgcgagcaggcgagcgagcgagcgaggagggaggaggatgtcgtggcagacgtacgttgacgagcagctgctctgcgacatcgacggccagcgcctcaccgccgccgccatcctcggccacgacggcgccgtctgggcgcagtccgagcccttccccgaggtcaaacctgaagaaattactgcggtaataaatgacttcgatgaaccaggctctttggcaccaactggattattccttggtggtacaaagtacatggttattcaaggtgaacctggggctgtcattcggggcaaaaaggggtcaggaggggttacaatcaagaagacgagtctggccatcatcattggaatttacgaggaaccaatgactcctggacaatgcaacatggtggtggagaggctcggtgattaccttcttgagcagggcttctgaacccaagagtcctagtctgggccaactgggcttatgcctactgaaatgtgctaccgcataccccatgaataattagcgcacatccggatatgtttgaacaagtggaggttcctcgttatgttggaattgcttcatagtatatgtcatggggcttatatgtaatctttaaaagttgtcaaaaaaaaaaaaaaaa

SEQ ID NO: 6014 - protein, 131 aa, Glycine max
  misc_feature: Ceres CLONE ID no. 1077503
  misc_feature: Ceres CDNA ID no. 40351639
  misc_feature (2)..(126): Pfam Name: Profilin PFAM Desc: Profilin
MSWQTYVDEQLLCDIDGQRLTAAAILGHDGAVWAQSEPFPEVKPEEITAVINDFDEPGSLAPTGLFLGGTKYMVIQGEPGAVIRGKKGSGGVTIKKTSLAIIIGIYEEPMTPGQCNMVVERLGDYLLEQGF

SEQ ID NO: 6015 - DNA, 709 bp, Glycine max
  misc_feature: Ceres CLONE ID no. 1077551
  misc_feature: Ceres CDNA ID no. 40351640
  CDS (71)..(529): REFERENCED BY SEQ ID NO: 6016
actctaaaacggcgacagcttccatactcagtcctctccctcaggcagctcttctcttcgagatcgcacaatgtctctggttgcaaacgacgagttccagcacattctacgtgtgctcaatactaatgtggatgggaagcagaagatcatgtttgcccttacctccatcaagggtattggcaggcgtttggccaacatcgtctgcaagaaggccgatgtcgacatgaacaagagggctggtgagttatctgcagctgagatcgacaacctcatgaccattgttgccaacccaaaacagtacaagatcccagactggttcttgaacagacagaaagactacaaggacgggaagtactctcaagttgtctccaacgcccttgacatgaagctcagggatgatcttgaacgtctcaagaaaatcaggaaccaccgtgggctgagacactactggggtctccgtgtccgtggtcaacacaccaagacaactggtcgcagaggcaagactgttggtgtctctaagaagcgttaagccaatgatggtagctgcagctggattcaatctttgataaagaccgtcttttaatttctttgaacaattttgcacaactctattatgtgttcgtttatgagacaccttcgctactgttttataacatgaagtaagataatattttgttacttggtctttatatcaaaaaaaaaaaaaaaa

SEQ ID NO: 6016 - protein, 152 aa, Glycine max
  misc_feature: Ceres CLONE ID no. 1077551
  misc_feature: Ceres CDNA ID no. 40351640
  misc_feature (14)..(142): Pfam Name: Ribosomal_S13 PFAM Desc: Ribosomal protein S13/S18
MSLVANDEFQHILRVLNTNVDGKQKIMFALTSIKGIGRRLANIVCKKADVDMNKRAGELSAAEIDNLMTIVANPKQYKIPDWFLNRQKDYKDGKYSQVVSNALDMKLRDDLERLKKIRNHRGLRHYWGLRVRGQHTKTTGRRGKTVGVSKKR

SEQ ID NO: 6017 - DNA, 978 bp, Glycine max
  misc_feature: Ceres CLONE ID no. 1089300
  misc_feature: Ceres CDNA ID no. 29191312
  CDS (16)..(801): REFERENCED BY SEQ ID NO: 6018
tcactatcctcaaccatggccgtcgggaagaacaagaggatctctaagggaagaaagggaggcaagaagaagattgttgatcctttctccaagaaggattggtatgatatcaaggctccctctagcttcactcacagaaatgtcggaaagacacttgtttccagaactcagggtaccaagattgcgtcagagggtttgaaacacaaagttttcgaggtgtctctcgctgatcttaacaaggatgaggaccaagcttacaggaagatccgtctcagagctgaagatgtccagggcaggaatgtcttgacccagttctggggcatggacttcacaaccgacaaactcaggtccttggttaagaagtggcagactttgatcgagtctcatgttgatgttaagaccactgataactacacactgaggcttttctgcatcgccttcaccaagagacgtgctaaccaagtcaagagaacttgctatgctcaatctagccagatccgtcagatacgtagcaagatgagggagattatgatcaaggaagcttcgtcttgtgacctcaaggagcttgttgccaagtttattccagaatctattgggaaggatattgagaaggcaactcagggcatctaccctcttcagaatgttttcatccgtaaagtcaagatcctcaaggctcccaagttcgaccttggaaagctcatggaggttcacggagactacacagcagaggatgttggtgtgaaggtagacaggccggctgatgaggttgtcgaggaacctactgagattattggagcgtaagagaaggttttttgaagaaatgtttaaaaccgagagatctttgtttcatctaaaactttctagtatctttaatgcttttctctcattgtactctcttttgatcctcagcttctatgttgatgtattgattacttttctttatataaacttgagttttggataaaaaaaaaaaaaaaa

SEQ ID NO: 6018 - protein, 261 aa, Glycine max
  misc_feature: Ceres CLONE ID no. 1089300
  misc_feature: Ceres CDNA ID no. 29191312
  misc_feature (11)..(222): Pfam Name: Ribosomal_S3Ae PFAM Desc: Ribosomal S3Ae family
  misc_feature: Homolog of GI Number: 7270417 NR Desc: Putative S
  misc_feature: Homolog of GI Number: 21553921 NR Desc: putative 40S ribosomal protein S3A
  misc_feature: Homolog of GI Number: 7441118 NR Desc: ribosomal protein S3a
  misc_feature: Homolog of GI Number: 1350983 NR Desc: 40S ribosomal protein S3a
  misc_feature: Homolog of GI Number: 24817254 NR Desc: ribosomal protein S3a
  misc_feature: Homolog of GI Number: 82400124 NR Desc: 40S ribosomal protein S3a
  misc_feature: Homolog of GI Number: 6714564 NR Desc: cyc07
  misc_feature: Homolog of GI Number: 81074465 NR Desc: cyc07
  misc_feature: Homolog of GI Number: 82623437 NR Desc: 40S ribosomal protein S3a
  misc_feature: Homolog of GI Number: 77554756 NR Desc: Ribosomal S3Ae family
  misc_feature: Useful for making shorter plants
  misc_feature: Useful for modifying plant structure
  misc_feature: Useful for sterility
MAVGKNKRISKGRKGGKKKIVDPFSKKDWYDIKAPSSFTHRNVGKTLVSRTQGTKIASEGLKHKVFEVSLADLNKDEDQAYRKIRLRAEDVQGRNVLTQFWGMDFTTDKLRSLVKKWQTLIESHVDVKTTDNYTLRLFCIAFTKRRANQVKRTCYAQSSQIRQIRSKMREIMIKEASSCDLKELVAKFIPESIGKDIEKATQGIYPLQNVFIRKVKILKAPKFDLGKLMEVHGDYTAEDVGVKVDRPADEVVEEPTEIIGA

SEQ ID NO: 6019 - DNA, 543 bp, Glycine max
  misc_feature: Ceres CLONE ID no. 1100754
  misc_feature: Ceres CDNA ID no. 29191399
  CDS (3)..(440): REFERENCED BY SEQ ID NO: 6020
aagtcaacagtaaggttacttattcagtagttcttctctctcgaattttcactcactttctgtgcatcaatggcggcgataagtctccggaaggggaacacgcggcttccgccggaggtgaaccgcgtgctgtacgttcggaaccttcccttcaacatcaccagcgaggagatgtacgacatctttggcaaatacggcgccattcgccagatccgcatcggcaccaacaaggacactcgcggaaccgctttcgtcgtctacgaggacatctacgacgccaaaaccgccgtcgaccacctctccggcttcaacgtcgccaaccgctacctcatcgttctctattatcaacaagcgaagatgagcaagaagttcgatcagaagaagaaggaggacgagatcgcgcgcatgcaggagaagtacggcgtctccaccaaagataagtaaatgtaaaatacttcgttccttctcggaagtgcctagggttagggtttgggttttcgagactctgtttggtggttttacgtaagaaaaaaaaaaaaaaaa

SEQ ID NO: 6020 - protein, 124 aa, Glycine max
  misc_feature: Ceres CLONE ID no. 1100754
  misc_feature: Ceres CDNA ID no. 29191399
  misc_feature (21)..(89): Pfam Name: RRM_1 PFAM Desc: RNA recognition motif.
  misc_feature: Homolog of GI Number: 32129324 NR Desc: putative RNA binding protein
  misc_feature: Homolog of GI Number: 58382742 NR Desc: ENSANGP00000022192
  misc_feature: Homolog of GI Number: 62857825 NR Desc: LOC550003
  misc_feature: Homolog of GI Number: 66515801 NR Desc:  similar to CG13298
  misc_feature: Homolog of GI Number: 34785490 NR Desc: MGC68842 protein
  misc_feature: Homolog of GI Number: 61846456 NR Desc:  similar to RIKEN cDNA 0610009D07
  misc_feature: Homolog of GI Number: 76698314 NR Desc:  similar to splicing factor 3B
  misc_feature: Homolog of GI Number: 32564829 NR Desc: RNA
MAAISLRKGNTRLPPEVNRVLYVRNLPFNITSEEMYDIFGKYGAIRQIRIGTNKDTRGTAFVVYEDIYDAKTAVDHLSGFNVANRYLIVLYYQQAKMSKKFDQKKKEDEIARMQEKYGVSTKDK

SEQ ID NO: 6021 - DNA, 442 bp, Glycine max
  misc_feature: Ceres CLONE ID no. 1100781
  misc_feature: Ceres CDNA ID no. 40351641
  CDS (45)..(254): REFERENCED BY SEQ ID NO: 6022
actgtgttctttaagttgcagcgacaacatcagaagaagcgagaatgcctaagcaaatccacgagatcaaggacttccttctgacggcgaggaggaaggatgcgaggtcagtgaagatcaagagaagtaaggatattgtcaagttcaaggtcaggtgctcgaggtacctctacacactttgcgtcttcgaccaagagaaggccgataagcttaagcagtctcttcctccaggtttgagtgtgcaagacctttgaacatctcttcaagtgtcaatgggaccgacctgtgttgaagttttaagatacctttttatttatttggagattatagtttttgaatcaagactcttcttctcttcttttcaagacctggatttgtattttgcctaatgtggttagtaacaagaagcattcacattaattttctaaaaaaaaaaaaaaaa

SEQ ID NO: 6022 - protein, 69 aa, Glycine max [sequence omitted]

SEQ ID NO: 6023 - DNA, 1068 bp, Glycine max
  misc_feature: Ceres CLONE ID no. 1100786
  misc_feature: Ceres CDNA ID no. 29191280
  CDS (76)..(828): REFERENCED BY SEQ ID NO: 6024
aaaaaattaaagtactcgtgttcacctcgtgcccatccagattcttatcttctctcgaaaaaggttttagcgaagatgacgaagaactacccagctgttagcgaagagtaccagaaggctattgagaagtgcaagaggaagctgagaggcttgatcgctgagaagaactgtgcaccaatcatggttcgcctcgcatggcactcagctggaacattcgattgcgcctcgaggactggtggtcccttcggaacaatgaggtttgacgatgagctagctcatggagccaacaatggtctccacattgctcttaggttgttggagcctatcagggagcagttccctaccatctcccatgctgatttccatcagcttgctggtgttgtggctgttgaagtcaccggtggacctgaaattcctttccaccctggaagagaggacaagccccagccacctccagagggtcgtctccctgatgccacaaagggctgtgaccacttgaggcaggtcttcttaaagcagatgggtttaactgaccaggacattgtcgctttgtctggtgcccacactctgggaagatgccacaaggataggtctggcttcgaaggtgcctggacttcaaaccctcttattttcgacaactcttacttcaaggaacttttgagcggtgagaaggaaggtcttcttcagctcccctctgacaaggctctgttggacgatcccgttttccgtcctcttgttgagaaatacgctgctgacgaggaagcattttttgctgattacgctgaggcccacttgaagctttctgagctcgggtttgctgatgcttaagctgtgtcgttccttgtgtgatcccccgacactcatggctgtttttgggttggtggagggtttgcattacgtttgaacttttgtcatttgatttgcttaatgtactcggaaggatcttcgtagcttgttttttttttcgggtggtattatgagtttgtcgcagttctgttgctcttttgctatgatgctctcagacaattctaataaaacaattattctcagccaaaaaaaaaaaaaaaa

SEQ ID NO: 6024 - protein, 250 aa, Glycine max
  misc_feature: Ceres CLONE ID no. 1100786
  misc_feature: Ceres CDNA ID no. 29191280
  misc_feature (19)..(227): Pfam Name: peroxidase PFAM Desc: Peroxidase
  misc_feature: Homolog of GI Number: 468733 NR Desc: L
  misc_feature: Homolog of GI Number: 18265379 NR Desc: ascorbate peroxidase
  misc_feature: Homolog of GI Number: 1890354 NR Desc: L
  misc_feature: Homolog of GI Number: 24421233 NR Desc: ascorbate peroxidase
  misc_feature: Homolog of GI Number: 24421231 NR Desc: ascorbate peroxidase
  misc_feature: Homolog of GI Number: 18265381 NR Desc: ascorbate peroxidase
  misc_feature: Homolog of GI Number: 21554322 NR Desc: L
  misc_feature: Homolog of GI Number: 79317258 NR Desc: APX1
  misc_feature: Homolog of GI Number: 2746727 NR Desc: ascorbate peroxidase
  misc_feature: Homolog of GI Number: 73761751 NR Desc: cytosolic ascorbate peroxidase 1
  misc_feature: Useful for delaying flowering time
MTKNYPAVSEEYQKAIEKCKRKLRGLIAEKNCAPIMVRLAWHSAGTFDCASRTGGPFGTMRFDDELAHGANNGLHIALRLLEPIREQFPTISHADFHQLAGVVAVEVTGGPEIPFHPGREDKPQPPPEGRLPDATKGCDHLRQVFLKQMGLTDQDIVALSGAHTLGRCHKDRSGFEGAWTSNPLIFDNSYFKELLSGEKEGLLQLPSDKALLDDPVFRPLVEKYAADEEAFFADYAEAHLKLSELGFADA

SEQ ID NO: 6025 - DNA, 758 bp, Glycine max
  misc_feature: Ceres CLONE ID no. 1100789
  misc_feature: Ceres CDNA ID no. 36701092
  CDS (2)..(574): REFERENCED BY SEQ ID NO: 6026
ccccgccgccaactcctctcagagccttgctcccgcttcccctcgacgcgccgccgccgccgcctccgagcccctcgacgcccacctcgcagccatggcggagcagaccgagaagtctttcctcaagcagccaaaggttttcctcagcacgaaaaaggccgacaaggccaagaggccaggcaaggctggcaaccgcttctggaagagtgttggccttggtttcaagaccccaagggaagcgatcgatggtacctacattgacaagaagtgcccattcactggaactgttgccatcaggggcagaatcatagctggaacctgccacagtgccaagatgaacaggaccatcattgttcgcaggaactaccttcattttgtgaagaagtatcagaggtatgagaagaggcactccaacatcccagctcacatctccccctgcttccgagtcaaggaaggcgaccatgtcatcattggccagtgcagacccctgtcgaaaaccgtgagattcaatgtcctgaaggttgttccagctggaaccaccggaggcgggaagaaggctttcatcgctgcttaagcccaggctctgattcatgagtagttcatagtcagacgttttaagcacttaaacctaccaggctgctgctgttttgcgatttgattcctgtgttttctgtcaaaccgaagaatgtcgtgatctgaacatgtcttgtggaatctatctatcattaatagtttcgcttagaaaaaaaaaaaaaaaa

SEQ ID NO: 6026 - protein, 159 aa, Glycine max
  misc_feature: Ceres CLONE ID no. 1100789
  misc_feature: Ceres CDNA ID no. 36701092
  misc_feature (74)..(143): Pfam Name: Ribosomal_S17 PFAM Desc: Ribosomal protein S17
  misc_feature: Homolog of GI Number: 50938417 NR Desc: putative 40S ribosomal protein S11
  misc_feature: Homolog of GI Number: 62287477 NR Desc: 40S ribosomal protein S11
  misc_feature: Homolog of GI Number: 22470 NR Desc: ribosomal protein S11
  misc_feature: Homolog of GI Number: 50928689 NR Desc: OSJNBa0070C17.20
  misc_feature: Homolog of GI Number: 454848 NR Desc: ribosomal protein S11
  misc_feature: Homolog of GI Number: 34899760 NR Desc: putative 40S ribosomal protein S11
  misc_feature: Homolog of GI Number: 166867 NR Desc: ribosomal protein S11
  misc_feature: Homolog of GI Number: 21593611 NR Desc: cytosolic ribosomal protein S11
  misc_feature: Homolog of GI Number: 17065614 NR Desc: putative 40S ribosomal protein S11
  misc_feature: Homolog of GI Number: 20258899 NR Desc: putative ribosomal protein S11
MAEQTEKSFLKQPKVFLSTKKADKAKRPGKAGNRFWKSVGLGFKTPREAIDGTYIDKKCPFTGTVAIRGRIIAGTCHSAKMNRTIIVRRNYLHFVKKYQRYEKRHSNIPAHISPCFRVKEGDHVIIGQCRPLSKTVRFNVLKVVPAGTTGGGKKAFIAA

SEQ ID NO: 6027 - DNA, 1831 bp, Glycine max
  misc_feature: Ceres CLONE ID no. 1100819
  misc_feature: Ceres CDNA ID no. 36571715
  CDS (110)..(1600): REFERENCED BY SEQ ID NO: 6028
aagcatcaacttctaccgttctacatagcatctcctttaccaccattctagatatcagagaactttgcagctctcttaggtttttaaaaaacaccacgcaaacagcaagatggccacttccgacagtaacatgctactaaattatgttccagtttatgtgatgctcccactcggagttgtcaatgttgacaatgtttttgaagacccagatggccttaaagaacagctcttgcagcttcgagctgcgggtgttgacggggttatggttgatgtgtggtgggggatcatagaactgaaggggcctaagcagtatgattggagagcctacaggagtttgtttcagctggttcaagaatgtggcttgacactgcaagctattatgtcattccatcaatgtggagggaacgtaggagatatagttaacatcccaattccccagtgggtgcttgacattggagaatcaaatcatgatatcttctacaccaaccactcaggaacccggaacaaggaatatctaactgttggtgtggacaacgagcctatattccatggaagaacagccattgagatatacagtgactacatgaagagtttcagagaaaacatgtcagattttttagaatctggacttattatagacattgaagttgggcttggcccagcaggagagctcagatacccctcttatccacaaagccaaggatgggaatttcctggtattggcgaatttcagtgctatgacaaatatttgaaggcagatttcaaagcagctgtagcaagggctggccatcctgaatgggaactgccagatgacgcaggcaagtacaatgatgtcccagaatctactggattcttcaaatcaaatggcacgtatgtcactgagaaagggaagttcttcttgacctggtattctaacaaattgctgaatcatggtgatcaaatactagatgaagccaacaaagctttcctgggctgtaaagtcaaattagcaatcaaagtatctggaattcactggtggtacaaagttgaaaatcatgctgcagagcttactgctggatattacaaccttaatgatagagacggataccgccccattgcaagaatgctgtctcgccatcatgccattttgaactttacatgtcttgagatgagggactcagagcaaccctcagatgccaaaagtggaccacaggagcttgttcagcaggtattgagtggaggttggagagaagacatcagagttgctggagaaaatgcacttccaaggtatgatgccacagcttacaaccaaatcatactgaatgcaagaccgcaaggtgtcaacaacaatggccctccaaaactaagcatgtttggagtaacataccttcgtctatcagatgatctactgcaaaaatcaaattttaatatattcaaaaaatttgtgctaaagatgcatgcagatcaggattactgtgcaaaccctcaaaagtataatcacgccataacaccattgaagccatctgcaccaaagattcccattgaggttcttctggaagcaactaaaccaacactgccattcccctggcttccagagacagacatgaaagttgatggttgatttcccaatttggtgccatgagtaattaaataatctgctggaaataatatctaccaatataaataaagcatccagccactgtaatctgcaatgctgataataatgccatgaagtagcactgcctaaacatctacaaagtactctcgtgtactttttatgtgtgtattcctatctacgatgttaataaactattttatcaaaaaaaaaaaaaaaacaaaaaaaaaaaaaaaa

SEQ ID NO: 6028 - protein, 496 aa, Glycine max
  misc_feature: Ceres CLONE ID no. 1100819
  misc_feature: Ceres CDNA ID no. 36571715
  misc_feature (16)..(438): Pfam Name: Glyco_hydro_14 PFAM Desc: Glycosyl hydrolase family 14
  misc_feature: Homolog of GI Number: 46015332 NR Desc: Chain A
  misc_feature: Homolog of GI Number: 50513924 NR Desc: Chain A
  misc_feature: Homolog of GI Number: 50513925 NR Desc: Chain A
  misc_feature: Homolog of GI Number: 13560977 NR Desc: beta
  misc_feature: Homolog of GI Number: 62122629 NR Desc: beta
  misc_feature: Homolog of GI Number: 62122631 NR Desc: beta
  misc_feature: Homolog of GI Number: 62122633 NR Desc: beta
  misc_feature: Homolog of GI Number: 62122635 NR Desc: beta
  misc_feature: Homolog of GI Number: 71673371 NR Desc: beta
  misc_feature: Homolog of GI Number: 902938 NR Desc: beta
MATSDSNMLLNYVPVYVMLPLGVVNVDNVFEDPDGLKEQLLQLRAAGVDGVMVDVWWGIIELKGPKQYDWRAYRSLFQLVQECGLTLQAIMSFHQCGGNVGDIVNIPIPQWVLDIGESNHDIFYTNHSGTRNKEYLTVGVDNEPIFHGRTAIEIYSDYMKSFRENMSDFLESGLIIDIEVGLGPAGELRYPSYPQSQGWEFPGIGEFQCYDKYLKADFKAAVARAGHPEWELPDDAGKYNDVPESTGFFKSNGTYVTEKGKFFLTWYSNKLLNHGDQILDEANKAFLGCKVKLAIKVSGIHWWYKVENHAAELTAGYYNLNDRDGYRPIARMLSRHHAILNFTCLEMRDSEQPSDAKSGPQELVQQVLSGGWREDIRVAGENALPRYDATAYNQIILNARPQGVNNNGPPKLSMFGVTYLRLSDDLLQKSNFNIFKKFVLKMHADQDYCANPQKYNHAITPLKPSAPKIPIEVLLEATKPTLPFPWLPETDMKVDG

SEQ ID NO: 6029 - DNA, 1354 bp, Glycine max
  misc_feature: Ceres CLONE ID no. 1100879
  misc_feature: Ceres CDNA ID no. 40351642
  CDS (135)..(1118): REFERENCED BY SEQ ID NO: 6030
aaaaacaagagattttgaatttgaaatactcccgctcccgtctccatatatttgcgaaccctttttctttgtgagagacccgttatcagagaatccagaaggcgaagaagaagaaacgacagagcaagaaggaaatggcgaccaacattgggatcatggatgcggcttacttcgtcggcagatctgagattctttcttggatcaactcaactctgcaactcaatctctccaaagtcgaagaggcatgttccggcgcggttcactgccagcttctcgatgccgctcatccagggatcgtgcctatgcacaaggtcaatttcgacgccaagagcgagtatgagatgattcagaactacaaggtccttcaagatgtcttcaataaactcaaaatcaccaagcacatcgaggtcagcaagctggtgaaaggaaggccactggataacctcgagttcatgcaatggatgaaaagatactgcgattctgtcaattccggccttcagcacaattataatcctctggagaggagagaggttagcaaaggtggaagagaaacgagcaagaaatctgcaaactcgcaagcgtcaacgaagggttctactgcacagagacctcagtcttctcataattctcgaagaaatgaggtttctaatgctaaccctacaaatcaagctgcaaaggttgcgagagcagcaccttctgccggaaaccctgcctatgaagaaaagataacagagttgaagttgtcgattgatagccttgagaaggaacgggatttctactttgcaaagctgagagatattgagatactgtgccagactcctgagatagaacactcaccgattgttgctgcgatacagaagatattatatgctacagatgacaatggaacggctgtggctgaagctcaagctatgatttctgttggtcgtaaggaaatagagggattgagccccattgctgaggtttcggaggagaagagcagttcagaaactcacaagagaaagaatattgccaatattgattttgatgttgctgggcttgcaacgttgtctcccagacagaggctttctgatgtttcagatgttcattgtagcgagtcacctcttatgacttgttagggatcacgttctgttgttaattcaattagcaacttgttaaaactgtttttggtcacagtaattcctgtttcatgtgtgaattgaccgcgatattcataatgattaggggtttttagggagactattctgttataaagtatcagtatcagcccagaaaaatgtaaccagatatgttttgcctttatagaatttgctgctagtgctttgatttaaaaaaaataaaaaaaaaaaaaaaa

SEQ ID NO: 6030 - protein, 327 aa, Glycine max
  misc_feature: Ceres CLONE ID no. 1100879
  misc_feature: Ceres CDNA ID no. 40351642
  misc_feature (15)..(115): Pfam Name: CH PFAM Desc: Calponin homology
  misc_feature (207)..(255): Pfam Name: EB1 PFAM Desc: EB1
MATNIGIMDAAYFVGRSEILSWINSTLQLNLSKVEEACSGAVHCQLLDAAHPGIVPMHKVNFDAKSEYEMIQNYKVLQDVFNKLKITKHIEVSKLVKGRPLDNLEFMQWMKRYCDSVNSGLQHNYNPLERREVSKGGRETSKKSANSQASTKGSTAQRPQSSHNSRRNEVSNANPTNQAAKVARAAPSAGNPAYEEKITELKLSIDSLEKERDFYFAKLRDIEILCQTPEIEHSPIVAAIQKILYATDDNGTAVAEAQAMISVGRKEIEGLSPIAEVSEEKSSSETHKRKNIANIDFDVAGLATLSPRQRLSDVSDVHCSESPLMTC

SEQ ID NO: 6031 - DNA, 834 bp, Glycine max
  misc_feature: Ceres CLONE ID no. 1100893
  misc_feature: Ceres CDNA ID no. 25891069
  CDS (200)..(661): REFERENCED BY SEQ ID NO: 6032
ctagattagagttgatctcggctggtgatttcactagtccgcgcaggtgccaagcccggattgggcccgctgctcccctctcgtctcccgtcgtcggaccaccggcgacccctcttccaagccgccatcgtcctcacctccggcacttcctcttctccaccactcgacccagctcagcagcagggcggcggacgggaggatgatggggagcaacaaccccggcggcgctgggggagggggagggatggccccgggcacgggggccggcggcagcgacgggcggcacgacgacgaggccgtgctcaccgagttcctctcctccctcatggactacaatcccacgatcccggacgagctcgtggagcactacctcggccgaagcggcttccactgccccgacctacgcctaacaaggctggttgctgtagctgctcaaaagttcatttcagacattgcaagtgactctcttcagcactgcaaagccagggttgcagcacctgtcaaagataacaagagcaaacaaccaaaggatagacgtcttgtattgacaatggatgatctttcaaaagccttgcgtgagcatggtgttaatctgaaacatccagagtattttgcggacagcccatcagcagggatggccccctcaacaagagaggagtagaatcgattgcttcttcaacaagagagggctagaatcaattgtttcttataagcgtacccagtgaacggtcgtgtccttcccaactttatgtaacaaaaccttataagcatgtatcgaatgtcagttcttgatgtattatggacccgtagttgccttcaaaaaaaaaaaaaaaa

SEQ ID NO: 6032 - protein, 152 aa, Glycine max
  misc_feature: Ceres CLONE ID no. 1100893
  misc_feature: Ceres CDNA ID no. 25891069
  misc_feature: null
  misc_feature: Useful for making plants with altered Lignin content
  misc_feature: Useful for making plants with altered terpenoid content
  misc_feature (46)..(96): Pfam Name: TFIID_30kDa PFAM Desc: Transcription initiation factor TFIID 23
  misc_feature: Homolog of GI Number: 50726325 NR Desc: putative TATA box
  misc_feature: Homolog of GI Number: 39545934 NR Desc: TAF10
  misc_feature: Homolog of GI Number: 28416879 NR Desc: At4g31720
  misc_feature: Homolog of GI Number: 41529318 NR Desc: TATA box
  misc_feature: Homolog of GI Number: 57102914 NR Desc:  similar to Transcription initiation factor TFIID subunit 10
  misc_feature: Homolog of GI Number: 46518499 NR Desc: TAF10 RNA polymerase II
  misc_feature: Homolog of GI Number: 6119623 NR Desc: mTAFII30 protein
  misc_feature: Homolog of GI Number: 34859827 NR Desc: similar to Ilk protein
  misc_feature: Homolog of GI Number: 73988322 NR Desc:  similar to Transcription initiation factor TFIID subunit 10
  misc_feature: Homolog of GI Number: 5454106 NR Desc: TBP
MGSNNPGGAGGGGGMAPGTGAGGSDGRHDDEAVLTEFLSSLMDYNPTIPDELVEHYLGRSGFHCPDLRLTRLVAVAAQKFISDIASDSLQHCKARVAAPVKDNKSKQPKDRRLVLTMDDLSKALREHGVNLKHPEYFADSPSAGMAPSTREE

SEQ ID NO: 6033 - DNA, 815 bp, Glycine max
  misc_feature: Ceres CLONE ID no. 1100912
  misc_feature: Ceres CDNA ID no. 36569739
  CDS (94)..(411): REFERENCED BY SEQ ID NO: 6034
acatagctttgaacacaaaacaaaaagtttacgttacaaatcgcataataaccgtcctaagtttattgagagaattttgcaagtgtgagaaacatggcatctcgtcaaaacaacaagcaagagcttgatgaaagagcaaggcaaggagagactgttgtcccgggtggaactggtggcaagagcctggaggctcagcaacaccttgctgaaggaaggagcaagggagggcaaacaaggaaggaacagctgggtacagaagggtaccaggaaatgggacgcaaaggagggttgagcactgtggacaaatcaggagaagaacgtgctcaagaggaaggcattggcatcgatgagtccaagttcaggactggtaataacaagaaccagaatcagaacgaagaccaggataagtgataatgtaacacccttcactagcatgtgtagtgtgttcttatgctagcttaaatgtgagtgtcaagtgttttaggaagtaggaaaagaataggttataaaaaataatgtttaggcaatagttatataggtcaaagtgtcatgtcatgtgtgtcgtgaaataattagctagcatgtttaggttgttttagggtttcttttgcatgtgtgtttctcttatgtgtgtaagtgatcagtgaggcatggctctatagctatccagaaattagcacaagcaagcatgtgcctccatttcactaatgtgtatgtatctatggtgtgaccacgttcaatactagaatgtaatggtctcaactcttatgttaacttatcgtggcacaaacaattacgtaaaaaaaaaaaaaaaa

SEQ ID NO: 6034 - protein, 105 aa, Glycine max
  misc_feature: Ceres CLONE ID no. 1100912
  misc_feature: Ceres CDNA ID no. 36569739
  misc_feature (1)..(93): Pfam Name: LEA_5 PFAM Desc: Small hydrophilic plant seed protein
  misc_feature: Homolog of GI Number: 2270988 NR Desc: Em protein
  misc_feature: Homolog of GI Number: 1754979 NR Desc: Em protein
  misc_feature: Homolog of GI Number: 1141784 NR Desc: Em protein
  misc_feature: Homolog of GI Number: 77993668 NR Desc: Em6
  misc_feature: Homolog of GI Number: 66735602 NR Desc: LEA protein
  misc_feature: Homolog of GI Number: 71040659 NR Desc: lea protein 1
  misc_feature: Homolog of GI Number: 21281004 NR Desc: putative ABA
  misc_feature: Homolog of GI Number: 28194651 NR Desc: putative lea 1
  misc_feature: Homolog of GI Number: 556805 NR Desc: Em protein
  misc_feature: Homolog of GI Number: 6138910 NR Desc: Em H5 protein
MASRQNNKQELDERARQGETVVPGGTGGKSLEAQQHLAEGRSKGGQTRKEQLGTEGYQEMGRKGGLSTVDKSGEERAQEEGIGIDESKFRTGNNKNQNQNEDQDK

SEQ ID NO: 6035 - DNA, 1183 bp, Glycine max
  misc_feature: Ceres CLONE ID no. 1100948
  misc_feature: Ceres CDNA ID no. 40351643
  CDS (191)..(814): REFERENCED BY SEQ ID NO: 6036
ttccaatccctaatttattgccattattttccccttttcaaaaccagttcatttcgcttaccgtgttcccacaaccgaaacaaaagcttccccattttgcttcatcgtgcgaacaagctccacccaaccctaagtcgaaaacttgaactttcgttgttcgaaattagactctgattacagaagaaaagacatggccgcaagaacagttgccaaagacataatcactcttcgcggttccgcagcaatcgttagcgagttcttcggatatgctgccaacagcattctctacaaccgtggagtttatccagaagaaagctttgtgaaggttaagaaatatggcctccccatgttgctaacggaagatgagggtgtcaaatcttttctagcaaatctaactgctcagctctctgaatggcttgaagctggcaagttgcagagggtggtccttgttataatgagcaaggccaccagtgaagtgcttgaaaggtggaacttcagcattgagactgacagtgaggttgttgagaagggagtctcaagggaaaagagtgacaaggagatcatgagagagatacaagcgattatgaggcagattgcttcaagtatcacttatttgccatgcctggatgaaccttgtgtttttgatgtgttagcctatactgacaaagatgtggcagttccattcacatgggttgagagtgatccaaaactgattgcaaatccgcaaatggtgaaattgcattcctttgatactaagattcacaaggttgacactcttgtatcatacaagaatgacgaatgggatgagcagtagaggccgtctttgtcttgtatcttttgttcagcttgtatcatacaagaatgacgagaatgtgttttgtttcttcagttcttgagtgaatttcctgttgttagccctgtcaattgtgaattttctattcacattgttcgatgtatgtactactgtgggattcaacgggtattagtattaatcctcctcccttctgtatgtttgacttgttgtggcagtaagaattgccatggtagggatctcaagaaatctccctgttcttttcagagaaggttggattcatccatcatttcattcagtcttgtgaaacaaatgcctcattatgagtattaattcatttctggttctggttgttgaaaaaaaaaaaaaaaa

SEQ ID NO: 6036 - protein, 207 aa, Glycine max
  misc_feature: Ceres CLONE ID no. 1100948
  misc_feature: Ceres CDNA ID no. 40351643
  misc_feature (12)..(201): Pfam Name: HORMA PFAM Desc: HORMA domain
MAARTVAKDIITLRGSAAIVSEFFGYAANSILYNRGVYPEESFVKVKKYGLPMLLTEDEGVKSFLANLTAQLSEWLEAGKLQRVVLVIMSKATSEVLERWNFSIETDSEVVEKGVSREKSDKEIMREIQAIMRQIASSITYLPCLDEPCVFDVLAYTDKDVAVPFTWVESDPKLIANPQMVKLHSFDTKIHKVDTLVSYKNDEWDEQ

SEQ ID NO: 6037 - DNA, 1626 bp, Glycine max
  misc_feature: Ceres CLONE ID no. 1100951
  misc_feature: Ceres CDNA ID no. 25446518
  CDS (45)..(1310): REFERENCED BY SEQ ID NO: 6038
cccattctcttctcctctctgagactctcgctatcgtcacagccatggaggacgccaatcttcagaggctccattgctccgtcaagaactacgattggggtctgccaggtcacgtctccgaggttgccagactccacgcgctcaattccgcgtctcaattacacgcggaggaccctttcgccgagctttggatgggtacccacgattcaggcccttcctttttggcctcctccaacaggaatgggaatggggtctcccttaaggcttggatttcggagaaccctgatgtgctcggcgacaaggttcttcacaaatggggttctgatctccctttcttgttcaaggtgctgtctgtggggaaggccttgtctattcaggctcacccggataaagagttggcaaggactctgcataagttgcaccctgatttgtataaagatgccaatcacaaacctgagatggctcttgccatcactagttttgaggctctctgtggattcatcactctcaaggagctcaagggtgtacttcatactgttcctgaaattgtggaactggttggtgctacgaatacaaacttggtcttacaaactaatgatcaggatggtgaggagaaggtgaaacctgttctgcaggcagtgttcaccgacctcatgtcagcttgtaaagacagggtaacggatgcagtaaacagattaaaaagccgtctactcaaggagagtgaggtgaggcagttgacagataaagagcagctggtgctgcagttggaaaaacaatacccagctgatgttggtgtcatagcagccttctttcttaaccatgtaaaactcaatcctggtgaagctttgttcctaggggcaaatgaaccgcatgcatatttatcgggggagtgtgttgaatgcatggcaacttctgacaatgttgtgcgagctggcctaactcccaaacatagagatgtccagaccctttgttctatgctcacatacaaacagggttctcctgagatcttgcatggagtttctgttaatccatatgtaaataaatatactccaccatttgaggaatttgagattgatcgttgcattcttcctcaaggggaaacagtggtgttcccagcagttccaggtccttccatctttttggtcacagttggtgaaggaacaatgaacacaggatcacccaaaggtcatgtggtcaccgaaggtgatgttctttttgcagctgctaacactgagattagggttactagtgcatccgagttgcatctgtacagaacaggggtaaatagcaagttttttcaagcttcctaagtttcaacaggggatcacccaattttattttttttgtcatatgcttttgggagtcgaataatgcaactatgtgttgcgtgtaatagaagcagtttagtgtacatgcaagagtaaaaaaactaaaatcacgtagtatattgagtcatagagaaaaaagttcattatagcgaggtgggttgtcaattgtcattcgtttgttgttcataataatgttcgttaaaagccttttcggatgacattcctatttatctatttattatatcaataaatgaagggcctacagatattttttatataagcaaaaaaaaaaaaaaaa

SEQ ID NO: 6038 - protein, 421 aa, Glycine max
  misc_feature: Ceres CLONE ID no. 1100951
  misc_feature: Ceres CDNA ID no. 25446518
  misc_feature (6)..(379): Pfam Name: PMI_typeI PFAM Desc: Phosphomannose isomerase type I
  misc_feature: Homolog of GI Number: 9755456 NR Desc: Putative mannose
  misc_feature: Homolog of GI Number: 51970910 NR Desc: phosphomannose isomerase
  misc_feature: Homolog of GI Number: 60617303 NR Desc: phosphomannose isomerase
  misc_feature: Homolog of GI Number: 6957720 NR Desc: putative mannose
  misc_feature: Homolog of GI Number: 34895502 NR Desc: putative mannose
  misc_feature: Homolog of GI Number: 77551788 NR Desc: Phosphomannose isomerase type I
  misc_feature: Homolog of GI Number: 50900150 NR Desc: putative mannose
  misc_feature: Homolog of GI Number: 23574751 NR Desc: mannose
  misc_feature: Homolog of GI Number: 4505235 NR Desc: mannose
MEDANLQRLHCSVKNYDWGLPGHVSEVARLHALNSASQLHAEDPFAELWMGTHDSGPSFLASSNRNGNGVSLKAWISENPDVLGDKVLHKWGSDLPFLFKVLSVGKALSIQAHPDKELARTLHKLHPDLYKDANHKPEMALAITSFEALCGFITLKELKGVLHTVPEIVELVGATNTNLVLQTNDQDGEEKVKPVLQAVFTDLMSACKDRVTDAVNRLKSRLLKESEVRQLTDKEQLVLQLEKQYPADVGVIAAFFLNHVKLNPGEALFLGANEPHAYLSGECVECMATSDNVVRAGLTPKHRDVQTLCSMLTYKQGSPEILHGVSVNPYVNKYTPPFEEFEIDRCILPQGETVVFPAVPGPSIFLVTVGEGTMNTGSPKGHVVTEGDVLFAAANTEIRVTSASELHLYRTGVNSKFFQAS

SEQ ID NO: 6039 - DNA, 651 bp, Glycine max
  misc_feature: Ceres CLONE ID no. 1100978
  misc_feature: Ceres CDNA ID no. 40351644
  CDS (66)..(425): REFERENCED BY SEQ ID NO: 6040
gtccagggttttagccgccgcccccgcccccgcagagagaagcgagcgacagcgaggtcgacaccatggtgcagcgcctgacgtaccggaagcggcacagctacgccaccaagtccaaccagaccagggtcgtcaaaaccccaggagggaggcttgtgtaccagtacaccaagaaaagggcgagcgggccgaaatgtccggtcaccggcaagaagatccaggggatacctcatctaaggcctactgagtacaaaagatcaagattatccaggaacaggagaacagtgaaccgtccttatggtggtgttctatctggtcaggctgttagggagaggatcatccgtgctttccttgtcgaagagcaaaagattgtgaagaaggttttgaagatccagaagaccaaggagaagcagccatcaaagtgaaatggccgaggcctttttttggaggacagatggtgatgagtgttcagtcaagcctgcgcagtatgctaagcccgtggttactgaattaagctagagatttccgtccattttcttgttccgagggtggatctgggtctcgttacccgtatgctattactttgtgtttgacggtttgacctgagtacttggttatattacagttttggatacaaaaaaaaaaaaaaaa

SEQ ID NO: 6040 - protein, 119 aa, Glycine max; identical to SEQ ID NO: 3134
  misc_feature: Ceres CLONE ID no. 1100978
  misc_feature: Ceres CDNA ID no. 40351644
  misc_feature (5)..(103): Pfam Name: Ribosomal_L34e PFAM Desc: Ribosomal protein L34e

SEQ ID NO: 6041 - DNA, 578 bp, Glycine max
  misc_feature: Ceres CLONE ID no. 1101001
  misc_feature: Ceres CDNA ID no. 29191836
  CDS (27)..(467): REFERENCED BY SEQ ID NO: 6042
aaaaacctagcagtagatctaacgaaatggcgacggcgttgaagaagaacaggaagaagaggggccacgtcagcgccggtcacggacgtatcgggaagcaccgcaagcatccaggaggtcgcggtaacgcgggaggtatgcatcaccaccgtatcctcttcgacaagtaccatccaggttacttcggaaaggtgggtatgaggtacttccacaagctccgcaacaagttctactgccccattgtcaacctcgacaagctctggtctctcgtccccgaggatgtgaaggcgaagtccatcaaagacaaggtgccgatgatcgatgtgacgcagcacgggttctttaaggttcttgggaaaggtcatttgcctgagggcaagcctttcgttgtgaaggctaagcttatctccaagactgctgagaagaagatcaaggaggctggtggcgccgtcgtgctcactgcttaagttaggtcgagtttctttttttttttaatttctgtcttttggaatcgtttttgttgttgctttttggaatgagagatcttttaattaaaaaaaataaaaaaaaaaaaaaaa

SEQ ID NO: 6042 - protein, 146 aa, Glycine max
  misc_feature: Ceres CLONE ID no. 1101001
  misc_feature: Ceres CDNA ID no. 29191836
  misc_feature (107)..(140): Pfam Name: L15 PFAM Desc: Ribosomal protein L15
  misc_feature: Homolog of GI Number: 23308283 NR Desc: At1g23290/F26F24_23
  misc_feature: Homolog of GI Number: 20147177 NR Desc: At1g70600/F5A18_22
  misc_feature: Homolog of GI Number: 21553702 NR Desc: 60S ribosomal protein L27A
  misc_feature: Homolog of GI Number: 7959355 NR Desc: 60S ribosomal protein L27a
  misc_feature: Homolog of GI Number: 3608481 NR Desc: ribosomal protein L27a
  misc_feature: Homolog of GI Number: 76160998 NR Desc: ribosomal protein L27a
  misc_feature: Homolog of GI Number: 50939233 NR Desc: putative 60S ribosomal protein L27a
  misc_feature: Homolog of GI Number: 50916422 NR Desc: putative ribosomal protein L27a
  misc_feature: Homolog of GI Number: 50251205 NR Desc: putative 60S ribosomal protein L27a
  misc_feature: Homolog of GI Number: 22758850 NR Desc: ribosomal protein L22
  misc_feature: Useful for making plants with altered leaf shape eg curled leaves
  misc_feature: Useful for making plants with increased biomass
MATALKKNRKKRGHVSAGHGRIGKHRKHPGGRGNAGGMHHHRILFDKYHPGYFGKVGMRYFHKLRNKFYCPIVNLDKLWSLVPEDVKAKSIKDKVPMIDVTQHGFFKVLGKGHLPEGKPFVVKAKLISKTAEKKIKEAGGAVVLTA

SEQ ID NO: 6043 - DNA, 1081 bp, Glycine max
  misc_feature: Ceres CLONE ID no. 1101052
  misc_feature: Ceres CDNA ID no. 35383353
  CDS (177)..(830): REFERENCED BY SEQ ID NO: 6044
acagaaaggcaaacaaatcaaacagttgggtcaaaacttgccgttttacacacagaacaaaattggtagattggtaaaaaaggaaacgaaattcctcctcttcgtacttgtcagatctgattcctccgccattcttcgttcgaaaggtagggttgattgctaaatcggggaaagaaatggcgaatagagtggatcaggaatacgattatttgtttaagatcgtgttgatcggagactcgggtgttgggaaatccaacatattgtccagattcacgaggaacgagttttgcttggaatccaaatccaccatcggtgtcgaattcgccaccaggactactcaggtggaaggaaagacgatcaaagctcagatctgggacactgcaggtcaggagaggtacagagccatcactagcgcttactaccgaggcgcagtgggtgccctccttgtctacgacatcaccaagaggcagacctttgacaatgccttgaggtggctccgcgaactcagagaccatgctgattccaacatcgtcatcatgatggctggcaacaaatccgatcttaaccacttgagatccgttgctgaggaagacggtcacaatctagccgagaaggaaggtctctctttccttgagacttctgctctcgaagcaaccaacgtcgagaaagcgtttcagaccatcttaggagagatctaccatatcataagcaaaaaggcactggctgcacaagaagcggctgctgctaactccgccattccaggtcagggaactacgattaacgtcgatgacacatctggaggcgtcaaacgaggctgctgctctacctaaaaccaaaggtaatatgttttctggtttattccccatcccaagattcagacttttcttttcattgcctcctctttcatttcaagttttggctcatgcaagaccattgtagaatacttgttactctgttttttatgcccttcggttgtgttcgtttaaagcttgtgagattctttagtcagcgaagctttgttagtatcttgcgttgctgtgttatcaacatttcatctccggtatgaaaaaaaaaaaaaaaa

SEQ ID NO: 6044 - protein, 217 aa, Glycine max
  misc_feature: Ceres CLONE ID no. 1101052
  misc_feature: Ceres CDNA ID no. 35383353
  misc_feature: null
  misc_feature: Useful for making plants with altered Lignin content
  misc_feature (1)..(173): Pfam Name: Arf PFAM Desc: ADP
  misc_feature: Homolog of GI Number: 20465471 NR Desc: putative GTP
  misc_feature: Homolog of GI Number: 14532854 NR Desc: putative GTP
  misc_feature: Homolog of GI Number: 1370146 NR Desc: RAB11C
  misc_feature: Homolog of GI Number: 15222396 NR Desc: Ras
  misc_feature: Homolog of GI Number: 974778 NR Desc: small G protein
  misc_feature: Homolog of GI Number: 8778562 NR Desc: F22G5.24
  misc_feature: Homolog of GI Number: 3024506 NR Desc: Ras
  misc_feature: Homolog of GI Number: 34897394 NR Desc: Ras
  misc_feature: Homolog of GI Number: 34908298 NR Desc: Ras
  misc_feature: Homolog of GI Number: 50933495 NR Desc: putative GTP
  misc_feature: Utility: Cold Germination Useful for making plants with increased tolerance to cold stress
MANRVDQEYDYLFKIVLIGDSGVGKSNILSRFTRNEFCLESKSTIGVEFATRTTQVEGKTIKAQIWDTAGQERYRAITSAYYRGAVGALLVYDITKRQTFDNALRWLRELRDHADSNIVIMMAGNKSDLNHLRSVAEEDGHNLAEKEGLSFLETSALEATNVEKAFQTILGEIYHIISKKALAAQEAAAANSAIPGQGTTINVDDTSGGVKRGCCST

SEQ ID NO: 6045 - DNA, 715 bp, Glycine max
  misc_feature: Ceres CLONE ID no. 1101230
  misc_feature: Ceres CDNA ID no. 29191686
  CDS (105)..(506): REFERENCED BY SEQ ID NO: 6046
ataaacaccgcgccggcttgcaaatagaaccctgccgccgccgccgttcttcttcctcctcgcttcgtgttagagttagggtcgtcagctttctcagatcagagatggcggtgccgcttctgacgaggaagatcgtgaagaagcgggtcaagcacttcaagagggcccatagcgaccgctacatcggcctcaagaccagctggcgcaggccaaagggtattgattcccgtgtcaggagaaagttcaagggatgtactttgatgcccaacattggctatggttctgacaagaagaccaggcattacctgccgaacaagttcaagaagtttgttgtccacaatgtctccgagctggagctgcttatgatgcacaacaggacatactgtgctgagatcgcccacaatgtctctaccaagaagcgaaaggacattgtggagcgtgctgcgcagctggatattgttgtcacaaacaagcttgctaggcttcggagccaggaggacgagtgaaatgtttttcgcactgttgttatggctgttttgcttgttggaaactgtttgctctgggagcttgtctactcatctgttagttttatgatatgaacatgctgttattatcagtaacgagtgacaggctgaaattttgttaatggtatcaacctctcaatcagaaacctgctttgtctcttgaagacagcatgccaaaaaaaaaaaaaaaa

SEQ ID NO: 6046 - protein, 133 aa, Glycine max; identical to SEQ ID NO: 1914
  misc_feature: Ceres CLONE ID no. 1101230
  misc_feature: Ceres CDNA ID no. 29191686
  misc_feature (14)..(123): Pfam Name: Ribosomal_L32e PFAM Desc: Ribosomal protein L32
  misc_feature: Homolog of GI Number: 76057835 NR Desc: ribosomal L32
  misc_feature: Homolog of GI Number: 50947773 NR Desc: putative ribosomal protein L32
  misc_feature: Homolog of GI Number: 13899057 NR Desc: ribosomal protein L32
  misc_feature: Homolog of GI Number: 40287540 NR Desc: ly200 protein
  misc_feature: Homolog of GI Number: 77745481 NR Desc: ly200
  misc_feature: Homolog of GI Number: 71534997 NR Desc: ribosomal protein L32
  misc_feature: Homolog of GI Number: 23198054 NR Desc: ribosomal protein L32
  misc_feature: Homolog of GI Number: 21555143 NR Desc: ribosomal protein L32
  misc_feature: Homolog of GI Number: 10177580 NR Desc: ribosomal protein L32
  misc_feature: Homolog of GI Number: 50754636 NR Desc:  similar to 60S ribosomal protein L32

SEQ ID NO: 6047 - DNA, 596 bp, Glycine max
  misc_feature: Ceres CLONE ID no. 1101310
  misc_feature: Ceres CDNA ID no. 40351645
  CDS (41)..(442): REFERENCED BY SEQ ID NO: 6048
gacgtagtcgcatcgagagatcttaggaagcagcaaaaaaatggcggtcccgttgcttaccaagaaggtcgtgaagaagaggtccgccaagttcatcagaccccagagcgaccgtagaatcactgtcaaggaaagctggaggaggccaaagggtattgactctcgggtcagaagaaagttcaaaggtgtcacgttgatgcccaatgttggttacggatctgacaagaagacccgtcactatctccccaatggattcaagaagttcgttgttcacaacacgagtgacctcgagttgttgatgatgcacaacaggacttactgcgcagagattgctcacaacgtctccaccaagaagaggaaggccattgtcgagagagcttctcagctggatattgttgtcaccaacaggcttgctaggctccgtagccaagaagacgagtgaagattacaaagcacttgagatatttagttgtttctggtttgtttgcatttcgtcatgtgttttgtgtttgcactcaacaaacatgaatttttgttttaagaccgttcttgaagtattattttatattcagtatttctcaaaaaaaaaaaaaaaa

SEQ ID NO: 6048 - protein, 133 aa, Glycine max
  misc_feature: Ceres CLONE ID no. 1101310
  misc_feature: Ceres CDNA ID no. 40351645
  misc_feature (14)..(123): Pfam Name: Ribosomal_L32e PFAM Desc: Ribosomal protein L32
MAVPLLTKKVVKKRSAKFIRPQSDRRITVKESWRRPKGIDSRVRRKFKGVTLMPNVGYGSDKKTRHYLPNGFKKFVVHNTSDLELLMMHNRTYCAEIAHNVSTKKRKAIVERASQLDIVVTNRLARLRSQEDE

SEQ ID NO: 6049 - DNA, 835 bp, Glycine max
  misc_feature: Ceres CLONE ID no. 1101362
  misc_feature: Ceres CDNA ID no. 40351646
  CDS (62)..(655): REFERENCED BY SEQ ID NO: 6050
tttttctctctggttgccctagttttccaaatcgccgtgtctcactaaagaagacgaagccatggttcatgtttgctactaccgcaactatgggaaaaccttcaagggcccgcgacgtcctttcgagaaggagcgtctcgactccgagctgaagctcgtcggcgagtacgggctccgcaacaagcgtgagctctggagagtccagtactccctgagccgcatccgtaacgctgccagagatcttctgacgctcgacgagaagaatcccaagaggatcttcgaaggagaggcgcttctccgtaagatgaacaggtacgggcttctcgacgagagccagaacaagctcgattacgtcttggcgttgaccgtggagaattttcttgagcgtcgtcttcagactattgtgtttaagtctggtatggctaagtcgattcatcactcccgtgtcctcatcaggcagaggcatatcagggttggaaagcaattggtgaacattccatcgttcatggtgagacttgactcgcagaaacacatcgactttgctctaaccagtcccttcggtggtggccgtccaggaagagtgaagagaaggaacgagaagtctgcctccaagaaagcctcaggtggcgatgctgacggtgatgacgaagagtaaatctaactctcgccggttttagctatgaaacaatctgcgttttgatattttgtagtctggaacttcgttttctgaaggattgttttatgctttttatttctcctaaagagtttgtcgaaccttattaagcttatttacattaatcacattatctttaaaagctgaaaaaaaaaaaaaaaa

SEQ ID NO: 6050 - protein, 197 aa, Glycine max
  misc_feature: Ceres CLONE ID no. 1101362
  misc_feature: Ceres CDNA ID no. 40351646
  misc_feature (109)..(156): Pfam Name: S4 PFAM Desc: S4 domain
  misc_feature (7)..(108): Pfam Name: Ribosomal_S4 PFAM Desc: Ribosomal protein S4/S9 N
MVHVCYYRNYGKTFKGPRRPFEKERLDSELKLVGEYGLRNKRELWRVQYSLSRIRNAARDLLTLDEKNPKRIFEGEALLRKMNRYGLLDESQNKLDYVLALTVENFLERRLQTIVFKSGMAKSIHHSRVLIRQRHIRVGKQLVNIPSFMVRLDSQKHIDFALTSPFGGGRPGRVKRRNEKSASKKASGGDADGDDEE

SEQ ID NO: 6051 - DNA, 1282 bp, Glycine max
  misc_feature: Ceres CLONE ID no. 1101398
  misc_feature: Ceres CDNA ID no. 25892751
  CDS (84)..(1097): REFERENCED BY SEQ ID NO: 6052
atcgcaatctcgagtagccgtcccaatcctcgatctgttctcagaccctcctccgtccgtcgcagctccagatttccttccccatggctccgatcaagatcggtatcaacggtttcggccggatcggcaggcttgtggccagggttgcgctccagagccccgatgtcgagctcgtcgccgtcaacgaccccttcatcaccaccgactacatgacctacatgttcaagtatgacactgtccacggacagtggaagcaccatgaagttaaggtgaaggactccaagacccttctcttcggtgagaaggaggttgctgtgtttggctgcaggaaccctgaggagatcccatgggctgctgctggtgctgagtacgttgttgagtccaccggtgttttcaccgacaaggacaaggctgcagctcacattaagggtggtgccaagaaggtcatcatttctgctcccagcaaggatgctcccatgtttgtctgtggtgtcaatgagaaggaatacaagtctgacatcgacattgtctccaacgctagctgcaccactaactgccttgctcctcttgctaaggttatcaatgacaggtttggcattgttgagggtttgatgaccacagttcatgccatgactgcaacccagaagactgttgatggtccttccagcaaggactggagaggtggaagggctgccagcttcaacatcattccaagcagcactggtgccgcaaaggctgttggcaaggtgctcccagagcttaacggaaagttgactggaatggccttccgtgttcccactgttgatgtttctgttgttgatctgactgttagacttgcgaagccagcaacctatgatcagattaaggctgctatcaaggaggagtctgagggaaacctcaagggcattttgggttacgttgatgaggaccttgtttccactgactttcagggtgacaacaggtccagcatcttcgatgccaaggccgggattgctctgaacgacaactttgtcaagcttgtctcctggtacgacaacgagtggggatacagcacccgcgtggtcgacctcatccgtcacatgcacagcaccaagtaaatgagaggcatgaagatacaggggagagtggtttgccccagaggagtgttcaaagcctcttcttctgagaataaatttttgtatggaattatgtcagctaaaaaccttttattggatgtatcctgatggttggtcacattttggtggtattatgtacttgcttgaactgaaaaaaaaaaaaaaaa

SEQ ID NO: 6052 - protein, 337 aa, Glycine max
  misc_feature: Ceres CLONE ID no. 1101398
  misc_feature: Ceres CDNA ID no. 25892751
  misc_feature (159)..(316): Pfam Name: Gp_dh_C PFAM Desc: Glyceraldehyde 3
  misc_feature (4)..(154): Pfam Name: Gp_dh_N PFAM Desc: Glyceraldehyde 3
  misc_feature: Homolog of GI Number: 462137 NR Desc: Glyceraldehyde
  misc_feature: Homolog of GI Number: 50925303 NR Desc: OJ000223_09.15
  misc_feature: Homolog of GI Number: 51964138 NR Desc: PREDICTED OJ1791_B03.34 gene product
  misc_feature: Homolog of GI Number: 1184774 NR Desc: cytosolic glyceroldehyde
  misc_feature: Homolog of GI Number: 1184776 NR Desc: cytosolic glyceroldehyde
  misc_feature: Homolog of GI Number: 51703306 NR Desc: glyceraldehyde 3
  misc_feature: Homolog of GI Number: 66012 NR Desc: glyceraldehyde
  misc_feature: Homolog of GI Number: 82399 NR Desc: glyceraldehyde
  misc_feature: Homolog of GI Number: 56069874 NR Desc: glyceraldehyde
  misc_feature: Homolog of GI Number: 29150193 NR Desc: putative glyceraldehydes 3
  misc_feature: Useful for making ornamental plants with modified leaves
MAPIKIGINGFGRIGRLVARVALQSPDVELVAVNDPFITTDYMTYMFKYDTVHGQWKHHEVKVKDSKTLLFGEKEVAVFGCRNPEEIPWAAAGAEYVVESTGVFTDKDKAAAHIKGGAKKVIISAPSKDAPMFVCGVNEKEYKSDIDIVSNASCTTNCLAPLAKVINDRFGIVEGLMTTVHAMTATQKTVDGPSSKDWRGGRAASFNIIPSSTGAAKAVGKVLPELNGKLTGMAFRVPTVDVSVVDLTVRLAKPATYDQIKAAIKEESEGNLKGILGYVDEDLVSTDFQGDNRSSIFDAKAGIALNDNFVKLVSWYDNEWGYSTRVVDLIRHMHSTK

SEQ ID NO: 6053 - DNA, 576 bp, Glycine max
  misc_feature: Ceres CLONE ID no. 1101456
  misc_feature: Ceres CDNA ID no. 40351647
  CDS (3)..(413): REFERENCED BY SEQ ID NO: 6054
atttcgaggctcttgcggcggagaagatgcagatattcgtgaaaacgctaacgggcaagaccatcaccctcgaggtggagagcagcgacaccatcgacaatgtcaaggccaagatccaggacaaagaaggaatccctccggatcagcagaggttgatattcgccggaaagcagcttgaagatggtcgtaccctggctgactacaacatccagaaagagtcgactctgcatcttgtcctgaggctgaggggaggtatcattgagccgtctttgatggctttggctcgtaagtacaatcaagacaagatgatctgccgcaagtgttacgctcgtctgcacccaagggctgtgaactgcaggaagaagaagtgtggtcacagcaaccagttgaggcccaagaagaagatcaagtgatttgtttttttcaccggaggctcgtttatctgtgttatgttttatgtgtttcatctcttttgttttgacacaaacacgtttctgtggatttttcactagtgattctgattctctttggcttttatataatattcgaaactgtgatgtaaaaaaaaaaaaaaaa

SEQ ID NO: 6054 - protein, 128 aa, Glycine max; identical to SEQ ID NO: 3956
  misc_feature: Ceres CLONE ID no. 1101456
  misc_feature: Ceres CDNA ID no. 40351647
  misc_feature (1)..(74): Pfam Name: ubiquitin PFAM Desc: Ubiquitin family
  misc_feature (77)..(128): Pfam Name: Ribosomal_L40e PFAM Desc: Ribosomal L40e family

SEQ ID NO: 6055 - DNA, 1506 bp, Glycine max
  misc_feature: Ceres CLONE ID no. 1101488
  misc_feature: Ceres CDNA ID no. 35383354
  CDS (82)..(1224): REFERENCED BY SEQ ID NO: 6056
atttgaagtggttgggcgagtgtattcggatgaacaagcagagagtgtgtagtgcgtagggtttaagatcgcgttctttagatgaacgagttatctcagaagcagactcttgttgtccatgggattgctggtgctggttcggtggctttagccaccgccttcacttaccctcttgacaccatgaaagtcctcattcaggttggttccagcaccggtaaaaaattggaccatacccatgttttgaccagactactctctgtatccggcaatgcaggtttgttcaatggttttggctggttgttggttggaaggatttttggtctgggagcacgatttggggtttatgaaatcctgtctgccttttataaagatggtcgggaaaataattatttgtttgcttctgaggctcttttggctggcgtggtagctggtgccattgaggcagtcataagctctccattcgaactcatcaagcttcgtatgcaagttagctctgcttcatatgttcctagctccaactttgctttggaaaagggggctcgtacacctttaattgcaagattacttcatggctgttatccagacaggagggcattggaccaatatattggtctcatctccaccctaaaagccaaaaatacaaacctgaccagtgcgttgctagagtatccatggacaatgacaggatctgggagtccaccatcagtttccaatgtcaggagaccatctgacattatatctttggaaggatggagcacattatggagaggtctccgttctggaattgtccgagattctgtgtttggtggcgtatttttttcgacctggcaatttctgcaccaagcaatgctagattggaaggctgcagggatgaatcctccacccaggttaaatgaagaagtcggtccattgtctcctttgactgttagtcttactgctggattctcagcttcagttgctgctgctgcttcccatagttttgatactacaagaagtagatcgcagtgtactgtgctgccaaagtacatctctatggagagaaagattctgaagtggaaacgaccaggaaacaagtttgaaagaattactgggatccatccttctgacaggggtgtcttgttccgtggtattggttggcgaatggctcgctctgggttggcttcattcattattgtaggaagttatttatttgttgctgatcagcttgcttctagtttgacttaattaccacttgataccccctttttggttaatatgtaatgtttactatttttctcctggagaagtcacatttgggatgctgctctgtactagttagtaaagaaaaatagaaaggagacagtagaaagagaggagactgcatttgttctatacatataaaagatccttgatgtggggattcactatgggaatttgatttttaaattctcttatacaagagtttgtaccttccaatgactggtaattaaataagagtatgcattttctgtaaaaaaaaaaaaaaaa

SEQ ID NO: 6056 - protein, 380 aa, Glycine max
  misc_feature: Ceres CLONE ID no. 1101488
  misc_feature: Ceres CDNA ID no. 35383354
  misc_feature (218)..(260): Pfam Name: Mito_carr PFAM Desc: Mitochondrial carrier protein
  misc_feature: Homolog of GI Number: 50926602 NR Desc: OSJNBa0038O10.20
  misc_feature: Homolog of GI Number: 516597 NR Desc: ATP/ADP translocator
MNELSQKQTLVVHGIAGAGSVALATAFTYPLDTMKVLIQVGSSTGKKLDHTHVLTRLLSVSGNAGLFNGFGWLLVGRIFGLGARFGVYEILSAFYKDGRENNYLFASEALLAGVVAGAIEAVISSPFELIKLRMQVSSASYVPSSNFALEKGARTPLIARLLHGCYPDRRALDQYIGLISTLKAKNTNLTSALLEYPWTMTGSGSPPSVSNVRRPSDIISLEGWSTLWRGLRSGIVRDSVFGGVFFSTWQFLHQAMLDWKAAGMNPPPRLNEEVGPLSPLTVSLTAGFSASVAAAASHSFDTTRSRSQCTVLPKYISMERKILKWKRPGNKFERITGIHPSDRGVLFRGIGWRMARSGLASFIIVGSYLFVADQLASSLT

SEQ ID NO: 6057 - DNA, 1631 bp, Glycine max
  misc_feature: Ceres CLONE ID no. 1101515
  misc_feature: Ceres CDNA ID no. 35383355
  CDS (147)..(1295): REFERENCED BY SEQ ID NO: 6058
aactagcagccttggcttttctttcatcctctctctcgaacttatttatctctctctgtttctctgttttgctctgcttctcaaaacataaccttttattattatagtattttactattataaactaattttgcattgctaatgcaatggccatagagtgcataacaaatatacaatcaatgtctcaaccacaaaagcaccaccaagagcacaaagaagatgaagcaccattggtttttgatgcctcacttctcaggcaccaactcaacctaccaaaacagttcatttggcctgatgaggaaaagccatgcatgaatgtgcctgagcttggtgtccctctcattgacttgggggggttcctctctggtgaccctgttgcaacaatggaggctgcaaggatagttggtgaggcatgccaaaagcatggtttctttcttgtggtgaaccatgggattgatgccaagttaatctctaatgctcatagctacatggatgacttctttgaggttcctctgtctcagaaacagagggctcagaggaaaacaggggaacactgtggttatgctagtagcttcactggcaggttctcttcaaagcttccatggaaagagacactttcttttcagtactcggctgaggaaaattcatccactattgtcaaagactacttgtgcaacacattggagaaagagtttgagcaatttgggagggtttaccaggactattgtgatgccatgagcaatctttctttggggataatggaacttttgggaatgagtcttggagttggtaaagcatgttttagagagttctttgaagagaataactcaataatgaggctcaattactaccctccttgtcaaaagcctgacctcactttgggcactggacctcactgtgacccaacatctttgaccattcttcaccaagaccaagtgggaggcctccaagtttttgttgacaatgagtggcattccattagcccaaatttcaatgcttttgttgtcaacataggtgacaccttcatggctctttcaaatggaaggtacaagagttgcttgcatagggcagtggtgaacagcaagaccacaagaaaatctcttgctttctttttgtgtccaaaaggtgataaggtggttagtccaccaagtgaattggtggatgatttgacaccaaggatataccctgattttacatggcctatgctgcttgagtttactcagaaacattatagagctgacatgaaaacccttgaggcattcaccaactggcttcttcaacggaaaatgagctgaaatgaaattttcaagcacatatgaatggcatattatctattagcctttgatagtctcctatgaatgaatagtgacaagtgtcaagtggaagaagtgtaattgatggcggagaaaagggcagcagcaaaaaggcactgagttggaaaaattgaaagaaaattcatgttttcttcatgaattgagtgttgcacgagtagtgattggagtagtattgaacaaaacaagggaaatgagataaaaatatttataaggcgtcaatgagaaaaaatcgccagctaatttttgtaatttttctttggtgatatagaaaagttattattaaaaaaaaaaaaaaaa

SEQ ID NO: 6058 - protein, 382 aa, Glycine max
  misc_feature: Ceres CLONE ID no. 1101515
  misc_feature: Ceres CDNA ID no. 35383355
  misc_feature: null
  misc_feature: Useful for making plants with modulated flowering time
  misc_feature (226)..(325): Pfam Name: 2OG PFAM Desc: 2OG
  misc_feature: Homolog of GI Number: 2108428 NR Desc: GA 20
  misc_feature: Homolog of GI Number: 18496057 NR Desc: gibberellin 20
  misc_feature: Homolog of GI Number: 8919865 NR Desc: gibberellin 20
  misc_feature: Homolog of GI Number: 2262201 NR Desc: gibberellin 20
  misc_feature: Homolog of GI Number: 2108432 NR Desc: gibberellin 20
  misc_feature: Homolog of GI Number: 1848146 NR Desc: gibberellin 20
  misc_feature: Homolog of GI Number: 34013372 NR Desc: gibberellin 20
  misc_feature: Homolog of GI Number: 28316360 NR Desc: gibberellin 20
  misc_feature: Homolog of GI Number: 53139596 NR Desc: gibberellin 20
  misc_feature: Homolog of GI Number: 6855711 NR Desc: gibberellin c20
  misc_feature: Useful for making bigger plants
  misc_feature: Useful for making plants with altered leaf shape eg curled leaves
  misc_feature: Useful for making plants with increased biomass
  misc_feature: Useful for modifying plant structure
MAIECITNIQSMSQPQKHHQEHKEDEAPLVFDASLLRHQLNLPKQFIWPDEEKPCMNVPELGVPLIDLGGFLSGDPVATMEAARIVGEACQKHGFFLVVNHGIDAKLISNAHSYMDDFFEVPLSQKQRAQRKTGEHCGYASSFTGRFSSKLPWKETLSFQYSAEENSSTIVKDYLCNTLEKEFEQFGRVYQDYCDAMSNLSLGIMELLGMSLGVGKACFREFFEENNSIMRLNYYPPCQKPDLTLGTGPHCDPTSLTILHQDQVGGLQVFVDNEWHSISPNFNAFVVNIGDTFMALSNGRYKSCLHRAVVNSKTTRKSLAFFLCPKGDKVVSPPSELVDDLTPRIYPDFTWPMLLEFTQKHYRADMKTLEAFTNWLLQRKMS

SEQ ID NO: 6059 - DNA, 657 bp, Glycine max
  misc_feature: Ceres CLONE ID no. 1101527
  misc_feature: Ceres CDNA ID no. 25446723
  CDS (147)..(401): REFERENCED BY SEQ ID NO: 6060
cttttgaaatttcttttgtgaaacctagccagccagcgattgccgccatttgcttctcctccgaacgatccaacaattcaacggccctgtgtttgttaattgagattttagattcaacgctttaacattgggattttcagggtacaatggcttccaacatctcaccttctgcctttgataaagagcagatatttggaatggctgaaaaggagatggagtatcgggttgaattattcaacaagatgacccagacatgtttcaataagtgtgttgacaataggtacaaggaatccgagctaaatatgggtgaaaatagttgcattgaccgctgtgtttcaaaatactggcatgtgactaatctaattggtcagctgcttggttctgggaagcctgcaatgtaatccaagtgtactgttgtgtttccttttgcggttagcaagctgtgagctacatctacgatattgttagttgcttccacaactaaggaagcgtaaatactttgcaatgtctttatttttgtccacgactattttgaggtttatcggttttgttaggaaaggaattgattttgagcttttgaggtagagccaatggtgaacaataaaactagttttagtcaattaagttcattcttcgtttctaaaaaaaaaaaaaaaa

SEQ ID NO: 6060 - protein, 84 aa, Glycine max
  misc_feature: Ceres CLONE ID no. 1101527
  misc_feature: Ceres CDNA ID no. 25446723
  misc_feature (14)..(80): Pfam Name: zf PFAM Desc: Tim10/DDP family zinc finger
  misc_feature: Homolog of GI Number: 5107088 NR Desc: small zinc finger
  misc_feature: Homolog of GI Number: 5107180 NR Desc: small zinc finger
  misc_feature: Homolog of GI Number: 50935395 NR Desc: small zinc finger
  misc_feature: Homolog of GI Number: 34897366 NR Desc: putative zinc finger protein
  misc_feature: Homolog of GI Number: 54635538 NR Desc: GA22092
  misc_feature: Homolog of GI Number: 24657258 NR Desc: CG9878
  misc_feature: Homolog of GI Number: 5107172 NR Desc: small zinc finger
  misc_feature: Homolog of GI Number: 59798976 NR Desc: Mitochondrial import inner membrane translocase subunit tim10
  misc_feature: Homolog of GI Number: 21618669 NR Desc: Timm13a protein
  misc_feature: Homolog of GI Number: 66847827 NR Desc: mitochondrial  intermembrane space translocase subunit Tim10
MASNISPSAFDKEQIFGMAEKEMEYRVELFNKMTQTCFNKCVDNRYKESELNMGENSCIDRCVSKYWHVTNLIGQLLGSGKPAM

SEQ ID NO: 6061 - DNA, 796 bp, Glycine max
  misc_feature: Ceres CLONE ID no. 1101529
  misc_feature: Ceres CDNA ID no. 29191687
  CDS (218)..(652): REFERENCED BY SEQ ID NO: 6062
gaggaaccaattcgaatcgagaggaagaaagatggtgtctgggtcagggttatgctcgaagcgtgtcgtggtcgacgcaaggcaccacatgctgggccgtctagcttcgatcatcgctaaggagttgctcaacgggcagagagtcgttgtggtcagatgcgaggagatttgcctgtcaggtggattggttcgtcagaagatgaagtacatgaggttcatgaggaaacgcatgaacactaagccttctcacggtcccattcacttcagggctccctctaagatcttctggcgcaccgttcgtgggatgatcccacacaagaccaagcgtggagctgctgctcttgcacgcttgaaggtctttgaaggagtcccacctccttacgacaaggtcaagagaatggttattcctgatgctctcaaggttttgaggctccaggctggtcacaagtactgcttgttgggacgtctgtcttctgaggttggctggaaccactacgataccattaaggagcttgaggtcaaaagaaaggagaggtcacaggctgtgtatgagcgtaagaagcagctcagcaagctcaggactaaggccgaaaaggttgcagaggagaagcttggttcgcagctcgatgttcttgcacccatcaagtactgagaattggcatctatcttttggtttaatacttaatttggtgctcgtctcgattctacctttgaattttgtttctgcttttagtagcttgtaaacttgaagattggaatgagactttttggtttttttgaaaaaaaaaaaaaaaaa

SEQ ID NO: 6062 - protein, 206 aa, Glycine max
  misc_feature: Ceres CLONE ID no. 1101529
  misc_feature: Ceres CDNA ID no. 29191687
  misc_feature (11)..(127): Pfam Name: Ribosomal_L13 PFAM Desc: Ribosomal protein L13
  misc_feature: Homolog of GI Number: 23297306 NR Desc: putative 60S ribosomal protein
  misc_feature: Homolog of GI Number: 19423912 NR Desc: putative 60S ribosomal protein
  misc_feature: Homolog of GI Number: 6642654 NR Desc: putative 60S ribosomal protein L13A
  misc_feature: Homolog of GI Number: 4753651 NR Desc: ribosomal protein L13a like protein
  misc_feature: Homolog of GI Number: 21593767 NR Desc: 60S ribosomal protein L13a
  misc_feature: Homolog of GI Number: 79313149 NR Desc: structural constituent of ribosome
  misc_feature: Homolog of GI Number: 76573371 NR Desc: 60S ribosomal protein L13a
  misc_feature: Homolog of GI Number: 21326116 NR Desc: putative 60S ribosomal protein
  misc_feature: Homolog of GI Number: 37718812 NR Desc: putative ribosomal protein L13a
  misc_feature: Homolog of GI Number: 50933743 NR Desc: putative 60S ribosomal protein
MVSGSGLCSKRVVVDARHHMLGRLASIIAKELLNGQRVVVVRCEEICLSGGLVRQKMKYMRFMRKRMNTKPSHGPIHFRAPSKIFWRTVRGMIPHKTKRGAAALARLKVFEGVPPPYDKVKRMVIPDALKVLRLQAGHKYCLLGRLSSEVGWNHYDTIKELEVKRKERSQAVYERKKQLSKLRTKAEKVAEEKLGSQLDVLAPIKY

SEQ ID NO: 6063 - DNA, 1245 bp, Glycine max
  misc_feature: Ceres CLONE ID no. 1101701
  misc_feature: Ceres CDNA ID no. 36701052
  CDS (172)..(918): REFERENCED BY SEQ ID NO: 6064
aaaatctatctccaatccttgcaaccttctctctttctctctctgtgtattagttgttgctgttcacaccggtaatttcactgtgttctgttatatgcatctctttaccaaattgccccttctcagagggtttggaggctatgccgaaaacgggttaaataagctcggaaaatgattctcacaaagcagtaccgatgcatacactcagctagttgtcaatgtactaaagggcatttaagtgaagatatgatattcttagtatttcataatttgaattggaatcccaagctaattgcaactctatcatgtgtgtgcaaatggtttgatgatcttgccaagcgagttctatggaaagagttttgtcgaacaagagctccgaaaatgttgtgtgatctgcaatctaatgggagccacattgttgatgggaactggagggccctagggaagcttcttatatactgttcaggatgcacaaaaggtggcttgttcaatagcattcagattcctggtcactttgtttatcagacacgattttctagaacatcaggaaagagctttcttttgccacaatgcaggactgatgttttgtatgtatgtgatccttgtgagcatcttgaccaaggtgaggaaggagatgtaggattcttccgtggcatttttaagtcatttgcaacctcaaaggtcaggaagatgcttattaataaaggtgccaagctccatccaacagaagtctgcccttattgtaaggcaaagttgtggagcatgctgcaagccaaaatgatccctcaaagtgctagttgcaggttgggttcttatgatgattgcattgagtattatgtgtgcctcaacggccacatgcttgggatatgtaccctattaccattgtctgattcagaagaggcatctgaattggagtaatacctaaatgattttcaggttggcagtaaatcttcacaagtcggttgaacgctgccggtatactcctggtttaattgactactcagcacctaaaatatgcattaacttgccctcaagcttgaagctgcaatctcacccatcccaagccagcatttccaaggatggtcgaagatattaatcaatttctcgtatgaatcattatacagaaggttgttactgtgaaccatgtgatatcccatttagattgatacgtggtgtctctgcgtgtgtaataattcatacttgttcaatatagaatcaggattatcactaaaaaaaaaaaaaaaa

SEQ ID NO: 6064 - protein, 248 aa, Glycine max; identical to SEQ ID NO: 1746
  misc_feature: Ceres CLONE ID no. 1101701
  misc_feature: Ceres CDNA ID no. 36701052
  misc_feature: Homolog of GI Number: 14210079 NR Desc: circadian clock coupling factor ZGT
  misc_feature: Homolog of GI Number: 34908976 NR Desc: putative circadian clock coupling factor ZGT
  misc_feature: Homolog of GI Number: 52353476 NR Desc: putative circadian clock coupling factor ZGT

SEQ ID NO: 6065 - DNA, 910 bp, Glycine max
  misc_feature: Ceres CLONE ID no. 1103907
  misc_feature: Ceres CDNA ID no. 29191190
  CDS (113)..(742): REFERENCED BY SEQ ID NO: 6066
aatacgatcagttttggttcgtcttctcttcgagaggaagctttgatttgatcgtaatcgatagattgttattgttgattaagagagttgagtttttttgtgatcggaggtgatggattggggaagtgtgacggctgaagatctcgtcgatgctctccgagaggttgattggtcgtcgccgccgcgtccgctgtctgagttcttctcaaggttcaccgttcctaaatctctcgctaaatgggacagccgcctcaagtgcaatctctactattaccgaacgaactacttcatcatgatcgtctttatacttggattgggatttcttacaaggcctctcgccattctctctgcctttttgactgcagtaactgtggcatttcttaatgacagctttgcaggttcctttagtgagaaggccacacgaaccatcagaagtttctccccacagttagctgctaaaatgagacctccattggcgcctgtcattcgtggacgcccatcagcaaagagagcaatctatatctgtggccaaccccgttgggtctttgtcttgatatcctcacttgtgagttttgccctttggtatatttcatgtggtttgttcaccgtctctttggcactactcattgggcttcttgctacaattcttcatgcaaccttgagaacacccaacttgaaggcacgtcttaacaccttcagggaggaatttcgagcagtgtggcgtaactacagtgagatctagagtaatgtaagctcgagcagagtattgctgttgctgtaagctttgatttttttagctccatgactcggattatctgttacttgatttggtttctgctttctgtagccatattggcaacaagaaacaactcatttcaatgacttttctgtatcaaaaaaaaaaaaaaaa

SEQ ID NO: 6066 - protein, 209 aa, Glycine max
  misc_feature: Ceres CLONE ID no. 1103907
  misc_feature: Ceres CDNA ID no. 29191190
  misc_feature (16)..(178): Pfam Name: PRA1 PFAM Desc: PRA1 family protein
  misc_feature: Homolog of GI Number: 53749355 NR Desc: unknow protein
  misc_feature: Homolog of GI Number: 21360427 NR Desc: At3g11395/At3g11395
  misc_feature: Homolog of GI Number: 15810043 NR Desc: AT5g02040/T7H20_90
  misc_feature: Homolog of GI Number: 34908286 NR Desc: P0005H10.15
MDWGSVTAEDLVDALREVDWSSPPRPLSEFFSRFTVPKSLAKWDSRLKCNLYYYRTNYFIMIVFILGLGFLTRPLAILSAFLTAVTVAFLNDSFAGSFSEKATRTIRSFSPQLAAKMRPPLAPVIRGRPSAKRAIYICGQPRWVFVLISSLVSFALWYISCGLFTVSLALLIGLLATILHATLRTPNLKARLNTFREEFRAVWRNYSEI

SEQ ID NO: 6067 - DNA, 894 bp, Glycine max
  misc_feature: Ceres CLONE ID no. 1103927
  misc_feature: Ceres CDNA ID no. 40351648
  CDS (69)..(638): REFERENCED BY SEQ ID NO: 6068
attgagccctgttcttcttcttcttcttctgactcttggtctgatctcttacaagaaatatcacacaaatggcgttcgcaggaacaacacaaaaatgcatggcctgtgacaaaaccgtttacctcgttgacaagttaaccgcagataaccgggtctaccacaaagcctgtttccgctgtcaccattgcaaaggaactctcaagcttagcaattacaactcctttgaaggagttctctattgcagaccacattttgatcagaacttcaagagaacaggaagtcttgagaagagcttcgaagggacaccaaagatcggaaaaccggataggcctttggagggagagagacctgctggtactaaagtgtctaatatgtttggtggaacacgagaaaaatgcgttggctgtgacaaaaccgtctatccaattgagaaggtgtcggtgaatgggacattgtaccacaagagctgcttcaagtgtacacatggaggatgcacgataagtccttcgaattacatagctcacgaggggaagctttattgcaagcaccatcatattcagctgatcaaggagaaaggaaatttgagccagcttgaaggaggagataatgccgctaaggacaaagtggacgctgcttgaaaaaaaaagagatacagttcattttgacccttgagaaccaatagtctcactacctctcgatctgcaacatatattggttttctttcttcttaaacttgtgttctttctcgttgtttcttttgggatctttgttgtctcctcgggtgatcttgttcactcttcgttgggtttcttgagatgaaacaaagaaacatataaataatggaatatttgcttatgagaatatatgcattgcgttcgaaaaaaaaaaaaaaaa

SEQ ID NO: 6068 - protein, 189 aa, Glycine max
  misc_feature: Ceres CLONE ID no. 1103927
  misc_feature: Ceres CDNA ID no. 40351648
  misc_feature (110)..(167): Pfam Name: LIM PFAM Desc: LIM domain
MAFAGTTQKCMACDKTVYLVDKLTADNRVYHKACFRCHHCKGTLKLSNYNSFEGVLYCRPHFDQNFKRTGSLEKSFEGTPKIGKPDRPLEGERPAGTKVSNMFGGTREKCVGCDKTVYPIEKVSVNGTLYHKSCFKCTHGGCTISPSNYIAHEGKLYCKHHHIQLIKEKGNLSQLEGGDNAAKDKVDAA

SEQ ID NO: 6069 - DNA, 1676 bp, Glycine max
  misc_feature: Ceres CLONE ID no. 1103970
  misc_feature: Ceres CDNA ID no. 29191774
  CDS (111)..(1340): REFERENCED BY SEQ ID NO: 6070
gatttcttttctctttagctgcttcttttgtctctccaaactaacatccagattgctctgttactatcaaaaggccttctttcctcatttcggacgcacgctccccatccatgtctacttgtgtaaaatcccgagatgtttgtattgttggtgttgcacggacgccaataggtggtttacttggcaccctatcatctctttctgccacagagttaggctcaattgctattaagactgctctcaagagagcaaatgttgatccatcactcgtgcaagaggtgttttttgggaatgttcttagtgccaatttagggcaggctcctgccagacaggctgcattaggtgcaggaattcctacatctgtaatctgcactactattaacaaggtctgtgcatcagggatgaaagctaccatgcttgcagcactcaccatacaattcggtctcaatgatgttgttgtggctggtggtatggaaagcatgtcaaatgcacctaagtacattgcggaggccaggaaagggtctcggtatggacatgataccatcattgatggtatggtcaaagatggcctttgggatgtctataataacttcggcatgggagtatgtgccgaactatgtgcagatcagcatgtcataacaagagatgagcaggactcttatgccattcgaagctttgagagaggaatatctgcccaaaatgctggtcattttgcttgggagatagttccggttgaagtttccactggaagagggagggcttccaaaattgttgataaagatgaaggcctggggaagtttgatgctgcaaagttaaggaagcttagaccaagctttaaagaggtcgggggttctgtgactgctggcaatgcttctagcataagtgatggtgctgctgcattagtgctagtgagcgaagagaaggcacgtgagcttggattgcatgtaattgcaaagataaaaggatatggggatgcagctaaggcgcctgaattatttacaactgctccttcccttgcaataccaaaagctatatcaaatgctggtcttgatgcttctcaaatagattattatgaaataaatgaagctttttcggttgtagctcttgcaaatcagaagcttcttggtcttgatcctgaaaaagttaacgcgcacgggggagctgtgtcattggggcatcccttgggttgcagtggagctcgcatcttagttacattattaggggtattgaggcagaagagagggaagtatggtgttgccgccatctgcaatgggggaggaggagcatctgctcttgttcttgagctcatgccggttgctgtgggacgttctttattatgacaaagatctccttacatcatactactttgcaacacttatactttttatttaaaataacaaaacatgtaataagtttagtcatcaacaaagtttgaatggtactggattcggtctctttaagcaaagtctcggtaagtcttgtggataaaaaaaaaatgtgatttggagaaaatatcaatcaagtttttcgatggagattagttatcaacaaaattgatagatgttccacactaataccatggtgacaaaaaaaattgtaatctgttcggtcaaaggaaaaaaatgatctttagtaaagctccacctgctatgattgtttgaaaaaaaaaaaaaaaa

SEQ ID NO: 6070 - protein, 409 aa, Glycine max
  misc_feature: Ceres CLONE ID no. 1103970
  misc_feature: Ceres CDNA ID no. 29191774
  misc_feature (277)..(399): Pfam Name: Thiolase_C PFAM Desc: Thiolase
  misc_feature (7)..(270): Pfam Name: Thiolase_N PFAM Desc: Thiolase
  misc_feature: Homolog of GI Number: 19880269 NR Desc: acetoacetyl
  misc_feature: Homolog of GI Number: 21618008 NR Desc: acetoacyl
  misc_feature: Homolog of GI Number: 16417944 NR Desc: acetyl Co
  misc_feature: Homolog of GI Number: 8777413 NR Desc: acetyl
  misc_feature: Homolog of GI Number: 42573610 NR Desc: acetyl
  misc_feature: Homolog of GI Number: 30695277 NR Desc: acetyl
  misc_feature: Homolog of GI Number: 53854350 NR Desc: cytosolic acetoacetyl
  misc_feature: Homolog of GI Number: 53854352 NR Desc: peroxisomal acetoacetyl
  misc_feature: Homolog of GI Number: 20258989 NR Desc: putative acetyl
  misc_feature: Homolog of GI Number: 50899020 NR Desc: putative acetyl
MSTCVKSRDVCIVGVARTPIGGLLGTLSSLSATELGSIAIKTALKRANVDPSLVQEVFFGNVLSANLGQAPARQAALGAGIPTSVICTTINKVCASGMKATMLAALTIQFGLNDVVVAGGMESMSNAPKYIAEARKGSRYGHDTIIDGMVKDGLWDVYNNFGMGVCAELCADQHVITRDEQDSYAIRSFERGISAQNAGHFAWEIVPVEVSTGRGRASKIVDKDEGLGKFDAAKLRKLRPSFKEVGGSVTAGNASSISDGAAALVLVSEEKARELGLHVIAKIKGYGDAAKAPELFTTAPSLAIPKAISNAGLDASQIDYYEINEAFSVVALANQKLLGLDPEKVNAHGGAVSLGHPLGCSGARILVTLLGVLRQKRGKYGVAAICNGGGGASALVLELMPVAVGRSLL

SEQ ID NO: 6071 - DNA, 1870 bp, Glycine max
  misc_feature: Ceres CLONE ID no. 1104004
  misc_feature: Ceres CDNA ID no. 24766235
  CDS (111)..(1718): REFERENCED BY SEQ ID NO: 6072
agaaggttgtggggttagggctttagagtgtcttttcttctttttcttcttcttcttcttcgttgaatcgcgattgttctgttgtgcgactgaaagaagagagatcgaaaatggcgttggctttcgacgagttcggaaggcctttcataatcctgaaggaacaggagcagaagagcagacttcgaggtttggacgctcagaaagccaacatctccgccggcaaagccgtcgctcgcatcctccgaacctccctcggccccaaaggcatggacaagatgctccagagccccgacggcgacgtcactatcacgaacgacggtgccacgatccttgaccagatggacgtggacaaccaaatcgcgaagctgatggtggagctctcgcggagtcaggactacgaaatcggcgacggaaccaccggcgtcgtcgtcatggccggcgcgcttctcgagaaggccgagcgcctcctcgagcggggaattcaccccatcaggatcgccaagggttacgaaatggcgtccaggatcgccgtcgagcatctcgagcgcgtcgccaacaagttcgagttcgacgagtccaatttggagcccctcattcaaacttgcatgaccaccctctcctccaaaattgtgaatcggtgtaagcgtagcttggctgagattgctgttaaggctgttcttgctgttgctgatctggcgaggaaggatgttaatttggatctaattaaagtggaagggaaagttgggggtaaattggaggataccgagttgatctatgggattgttgtggacaaggatatgagtcatcctcaaatgcctaagcaaattgaggatgctaaaattgctatcctcacatgcccctttgagcctcccaagccaaagactaagcataaggttgacattgatacagtggagaagttccagacgttgaggttgcaggaacagaagtattttgatgacatggttcagaaatgcaaggatgtgggtgcaacccttgtcatttgccaatggggttttgacgatgaagcaaatcatctcttaatgcacaggaacttgccagctgttagatgggttggtggtgtagagttggaattgatagctatagcaactggtggaagaattgttcctaggtttcaggagttatctccagaaaagttgggaaaggctggtatggttcgagaaaagtcctttggtacaacaaaagaccgaatgctgtacattgaacattgtgcaaactcaagggctgtaactatattcattcgtggaggtaacaaaatgatcattgaggagacaaagcgcagccttcatgatgccttgtgcgtggctaggaatcttatccggaacaactctattgtctatggtggtggttcagctgagatttcttgctctatagctgtggaggcagctgctgatagataccctggagtagaacagtatgcaattagagcatttggggatgctttggaggccatcccaatggcccttgctgaaaatagtggcctgcaaccaattgaaacattatctgctgttaagtctcagcaaataaaggataataaccctcactttggcattgattgtaatgatgttggcactaatgacatgcgtgagcaaaatgtctttgaaactttgatcggaaagcagcaacagctcctactcgctactcaagttgtcaagatgatactgaaaattgatgatgtcatctccccatctgagtactgatatttttaaactcagtcatggtctacgtcaagatgctgaattggtgatactattttgtttcgatcggtttggttgtagtaagagtccgtacgttcacttgaaatgcaagattttggcccggtttgtatcggaaaaaaaaaaaaaaaaaaaaa

SEQ ID NO: 6072 - protein, 535 aa, Glycine max
  misc_feature: Ceres CLONE ID no. 1104004
  misc_feature: Ceres CDNA ID no. 24766235
  misc_feature (40)..(534): Pfam Name: Cpn60_TCP1 PFAM Desc: TCP
  misc_feature: Homolog of GI Number: 23463047 NR Desc: At1g24510/F21J9_150
  misc_feature: Homolog of GI Number: 27924333 NR Desc: Cct5
  misc_feature: Homolog of GI Number: 61881779 NR Desc:  similar to KIAA0098 protein
  misc_feature: Homolog of GI Number: 435173 NR Desc: T complex polypeptide 1
  misc_feature: Homolog of GI Number: 1587206 NR Desc: T complex protein
  misc_feature: Homolog of GI Number: 4206124 NR Desc: T
  misc_feature: Homolog of GI Number: 42571633 NR Desc: T
  misc_feature: Homolog of GI Number: 32565114 NR Desc: chaperonin Containing TCP
  misc_feature: Homolog of GI Number: 53791802 NR Desc: putative T complex protein
  misc_feature: Homolog of GI Number: 435175 NR Desc: t complex polypeptide 1
  misc_feature: Useful for making bigger plants
MALAFDEFGRPFIILKEQEQKSRLRGLDAQKANISAGKAVARILRTSLGPKGMDKMLQSPDGDVTITNDGATILDQMDVDNQIAKLMVELSRSQDYEIGDGTTGVVVMAGALLEKAERLLERGIHPIRIAKGYEMASRIAVEHLERVANKFEFDESNLEPLIQTCMTTLSSKIVNRCKRSLAEIAVKAVLAVADLARKDVNLDLIKVEGKVGGKLEDTELIYGIVVDKDMSHPQMPKQIEDAKIAILTCPFEPPKPKTKHKVDIDTVEKFQTLRLQEQKYFDDMVQKCKDVGATLVICQWGFDDEANHLLMHRNLPAVRWVGGVELELIAIATGGRIVPRFQELSPEKLGKAGMVREKSFGTTKDRMLYIEHCANSRAVTIFIRGGNKMIIEETKRSLHDALCVARNLIRNNSIVYGGGSAEISCSIAVEAAADRYPGVEQYAIRAFGDALEAIPMALAENSGLQPIETLSAVKSQQIKDNNPHFGIDCNDVGTNDMREQNVFETLIGKQQQLLLATQVVKMILKIDDVISPSEY

SEQ ID NO: 6073 - DNA, 504 bp, Glycine max
  misc_feature: Ceres CLONE ID no. 1104028
  misc_feature: Ceres CDNA ID no. 24766236
  CDS (59)..(355): REFERENCED BY SEQ ID NO: 6074
gtgtcgaatcgaattgggcgatagggtttcttcatcaatctctggggagacgacgaagatggtgtgcgataagtgtgagaagaagttatcaaaggtgatagttccagataagtggaaggatggtgctcgtaatgttaccgaaggtggtggccgcaagatcaacgagaacaaacttctctccaagaagaacagatggacaccttacggtactgctaccacgaagtgcacgatctgcaagcagcaagtgcatcaagatggtaaatattgtcacacatgtgcctatagcaaaggagtgtgtgccatgtgcgggaagcaagtgttggacacgaagatgtataagcaaagcaatgtttaaccaaatccctctaagcttcttcaccctttgatgtctatttgcataaccaggggactatctttgttatatcatgtgttaattctctgtacctcactcttttgtttctagtaaaaacaaacaaaagcttccctctaaaaaaaaaaaaaaaa

SEQ ID NO: 6074 - protein, 98 aa, Glycine max
  misc_feature: Ceres CLONE ID no. 1104028
  misc_feature: Ceres CDNA ID no. 24766236
  misc_feature: Homolog of GI Number: 50941887 NR Desc: putative postsynaptic protein CRIPT
  misc_feature: Homolog of GI Number: 9910166 NR Desc: postsynaptic protein Cript
  misc_feature: Homolog of GI Number: 50740455 NR Desc:  similar to postsynaptic protein CRIPT
  misc_feature: Homolog of GI Number: 55242933 NR Desc: ENSANGP00000018599
  misc_feature: Homolog of GI Number: 31204973 NR Desc: ENSANGP00000018599
  misc_feature: Homolog of GI Number: 34785628 NR Desc: Cript protein
MVCDKCEKKLSKVIVPDKWKDGARNVTEGGGRKINENKLLSKKNRWTPYGTATTKCTICKQQVHQDGKYCHTCAYSKGVCAMCGKQVLDTKMYKQSNV

SEQ ID NO: 6075 - DNA, 1262 bp, Glycine max
  misc_feature: Ceres CLONE ID no. 1104077
  misc_feature: Ceres CDNA ID no. 25891446
  CDS (190)..(1203): REFERENCED BY SEQ ID NO: 6076
aacgcaccatttccataactccttacaccacacctcctcctcgtttatccattcccccatctacaacagctaatgcgatccaattccaattagatctagggtttctctttccctcgccggagaacaacaccgattttccggcgctggcttcacggatctcgcatcactgtttgataatacattggcaaaatgtacaccaaatcggcgcagtcatcgtttcgggaccggacacacgaattccagagcattgcggagaggttgaagaagacaggatcagcgccaaatggacaaagcagcagctcatccagatcggaggaacagcgatcggcgattgcaaatcaatcagagttcaacagaagagcttccaagatcggcttggggattcaccaaacgtctcagaagctcgccaagctcgccaagttggcgaaaaggacttcggtttttgatgaccctactatggaaatccaagagcttacgggggttattaagcaagatatcactgctctaaactctgcggttgtggatcttcagttactctgcaactctaggaacgagagtgggaacgcttctaccgacacgactagccattcaaccacggtggttgatgacctgaagacaaggttgatgagcaccactaaagagtttaaggatgttctcaccatgcgaactgagaacttgaaagtgcatgagaatagaaggcagctgttttcggccaatggttctaaggactctgcaaatccttttgtccggcaacggccgttggctacaaggtcggctgctaatacttctaatgcccccgctccaccatgggctaccgggtcatcttcatctcagttgtttcctaagaagcaggtagatggggagagtcaaccattgctgcaacagcagcagcagcagcagcaagaggtagttcccttgcaagacagttacatgcaaagcagagctgaagctcttcagaatgttgagtccaccattcatgagctcagcaacatctttaatcaactagcaactcttgtttcccaacaaggagagattgccatcaggatcgatgaaaatatggatgatacactggcaaatgtagagggggcgcaaggggctttgttgaagtatctgaacagcatatcttctaataggtggctgatgatcaagattttctttgtattaatattttttcttatggttttcttattttttgtggcatagtcattctaatgacagagaaatgaaaacgaggacacatatgacgcccttaaaaaaaaaaa

SEQ ID NO: 6076 - protein, 337 aa, Glycine max
  misc_feature: Ceres CLONE ID no. 1104077
  misc_feature: Ceres CDNA ID no. 25891446
  misc_feature (250)..(312): Pfam Name: SNARE PFAM Desc: SNARE domain
  misc_feature (50)..(156): Pfam Name: Syntaxin PFAM Desc: Syntaxin
  misc_feature: Homolog of GI Number: 34906154 NR Desc: putative syntaxin of plants 31
  misc_feature: Homolog of GI Number: 30793955 NR Desc: putative syntaxin SYP32
  misc_feature: Homolog of GI Number: 9759101 NR Desc: t
  misc_feature: Homolog of GI Number: 2981439 NR Desc: syntaxin of plants 31
  misc_feature: Homolog of GI Number: 51513291 NR Desc: Stx5a
  misc_feature: Homolog of GI Number: 54645455 NR Desc: GA18038
  misc_feature: Homolog of GI Number: 42733918 NR Desc: similar to syntaxin 5
  misc_feature: Homolog of GI Number: 66852489 NR Desc: ER
  misc_feature: Homolog of GI Number: 62511147 NR Desc: Syntaxin
MYTKSAQSSFRDRTHEFQSIAERLKKTGSAPNGQSSSSSRSEEQRSAIANQSEFNRRASKIGLGIHQTSQKLAKLAKLAKRTSVFDDPTMEIQELTGVIKQDITALNSAVVDLQLLCNSRNESGNASTDTTSHSTTVVDDLKTRLMSTTKEFKDVLTMRTENLKVHENRRQLFSANGSKDSANPFVRQRPLATRSAANTSNAPAPPWATGSSSSQLFPKKQVDGESQPLLQQQQQQQQEVVPLQDSYMQSRAEALQNVESTIHELSNIFNQLATLVSQQGEIAIRIDENMDDTLANVEGAQGALLKYLNSISSNRWLMIKIFFVLIFFLMVFLFFVA

SEQ ID NO: 6077 - DNA, 840 bp, Glycine max
  misc_feature: Ceres CLONE ID no. 1104087
  misc_feature: Ceres CDNA ID no. 36582192
  CDS (2)..(700): REFERENCED BY SEQ ID NO: 6078
ccacgccgtccctctttctcttctccccgatcgccgtctccgtttccatcctcccgccgctgccgccatggacggcgtcatcggccagatcttggagaagcaagtcctgtcggccgcgaaggcggtcgaggacaagctagacgagcagatcgccgcgctcgagcggctcgacccggacgacatcgaggcgctacgcgagcgccggatgctgcagatgcgccgcgcggccgagcgccgggccaagtggcgcgccctggggcacggcgagtacacggaggtccccgagaaagagttcttctccgccgccaaggccagcgagcgcatggtgtgccacttctaccgcgacaactggccctgcaaggttatggacaaacacatgtcgattcttgctaaacagcatgtagaaacacggtttatcaaaatccatgctgaaaaggctccctttctgaccgaaaaactaagggttgttgtgcttccaactcttgccttagtgaagaacgccaaggttgaggattatgtggttggatttgatgagctgggtggtaaagatgacttcagcactgaagatctggaggaacgcattgcgaaagctcaagtgatcttcctcgacggagaggggcctgcaaatccttccaagcaagctgctgccagcaagcgaagcgttcgacaatcagatactggcaactcagactctgactagttctgttcctgtattgaaggcgtgtgcgccaaggatttttatatataggatttacgccaagctgttatgctatccttactagtaataggaaagaagtttgcgtggcgatggcgatttgaaccgcaaaaaaaaaaaaaaaa

SEQ ID NO: 6078 - protein, 210 aa, Glycine max
  misc_feature: Ceres CLONE ID no. 1104087
  misc_feature: Ceres CDNA ID no. 36582192
  misc_feature: Homolog of GI Number: 50942957 NR Desc: putative ATP binding protein associated with cell differentiation
  misc_feature: Homolog of GI Number: 28950741 NR Desc: At2g18990
  misc_feature: Homolog of GI Number: 21594045 NR Desc: putative ATP binding protein
  misc_feature: Homolog of GI Number: 68366132 NR Desc:  similar to ATP binding protein associated with cell differentiation isoform 2
  misc_feature: Homolog of GI Number: 73970067 NR Desc:  similar to ATP binding protein associated with cell differentiation
  misc_feature: Homolog of GI Number: 62896791 NR Desc: ATP binding protein associated with cell differentiation variant
  misc_feature: Homolog of GI Number: 55622728 NR Desc:  similar to ATP binding protein associated with cell differentiation
  misc_feature: Homolog of GI Number: 2598194 NR Desc: ATP binding protein
  misc_feature: Homolog of GI Number: 23484524 NR Desc: Arabidopsis thaliana K1F13.6
MDGVIGQILEKQVLSAAKAVEDKLDEQIAALERLDPDDIEALRERRMLQMRRAAERRAKWRALGHGEYTEVPEKEFFSAAKASERMVCHFYRDNWPCKVMDKHMSILAKQHVETRFIKIHAEKAPFLTEKLRVVVLPTLALVKNAKVEDYVVGFDELGGKDDFSTEDLEERIAKAQVIFLDGEGPANPSKQAAASKRSVRQSDTGNSDSD

SEQ ID NO: 6079 - DNA, 1160 bp, Glycine max
  misc_feature: Ceres CLONE ID no. 1104115
  misc_feature: Ceres CDNA ID no. 25446519
  CDS (53)..(940): REFERENCED BY SEQ ID NO: 6080
aaacgaaacagatagctgtttctttctctcacgctaccgccatcgttcatcaatggccaccctcaacctctcttcgttgcaagctctctcctcccatcgtttatgctcttcttttccccaaaatacccctaccccttccttcaatttccagctaaaaccctcaattaacccgcgcccaatttctctgaaaccctacgtttccgagaagcctcgcgcgcgcgtggtggcattggccgtgaagagcctcggcgatacggaggcgctggcggtgtcgcctgaaaatgacggccccgccggagaactgccgtcgggcgccggcgtctacgccgtgtacgacacgaacggcgacgttcagttcatcggtttgtcgcggaacattgccgcgagcgttgcggcgcactggaaatcagtgccggagctgtgcggttccgttaaggctggggtagtggatgaaccagacagagaaactctaacccaagcatggaagtcttggatggaagaatacataaaagatagtggaaaagttccacctggcaacgaatcaggaaatgccacttgggtcaggcaggcacctaaaaggaagcctgatcttcgattaacacctggtcgccgcatgcaattaactgtccctcttgagaacctcattgacgggttggtgaaagagaacaaggtagttgcattcattaagggccctagaagtgcacccttatgtggattctcacagagggtgatagccattcttgaaaatgaaggagtagattatgagagtgtaaatgtgctcgacgaagagtataattacggattgagggaaacacttaaaaagtacagcaactggcccacattccctcagatttttgtggatggtgaactggttgggggttgtgatatattgacctccatgtatgagaaaggtgaactggctagcttgttcaaaaaataattgtgcaagttacctgcatttgagcattcttttgaacttgggggataggagtagaaagtgggagaggtaagggaagcgtgtaatgcaggttatttaaactctgttgtatgaattaatcttttagatacaaggggagaaaagaaaaaaggaaaattagttatgtatatttgatttttatcatagtacaaaatggttgtctttttcaaaaaaaaaaaaaaaa

SEQ ID NO: 6080 - protein, 295 aa, Glycine max
  misc_feature: Ceres CLONE ID no. 1104115
  misc_feature: Ceres CDNA ID no. 25446519
  misc_feature (206)..(293): Pfam Name: Glutaredoxin PFAM Desc: Glutaredoxin
  misc_feature: Homolog of GI Number: 77553802 NR Desc: Glutaredoxin
  misc_feature: Homolog of GI Number: 51473912 NR Desc: glutaredoxin 3
  misc_feature: Homolog of GI Number: 28262637 NR Desc: glutaredoxin
  misc_feature: Homolog of GI Number: 42454200 NR Desc: COG0278: Glutaredoxin
  misc_feature: Homolog of GI Number: 15893071 NR Desc: glutaredoxin
  misc_feature: Homolog of GI Number: 57526735 NR Desc: zgc:73343
  misc_feature: Homolog of GI Number: 27752305 NR Desc: CAXIP1 protein
  misc_feature: Homolog of GI Number: 22997425 NR Desc: COG0607: Rhodanese
MATLNLSSLQALSSHRLCSSFPQNTPTPSFNFQLKPSINPRPISLKPYVSEKPRARVVALAVKSLGDTEALAVSPENDGPAGELPSGAGVYAVYDTNGDVQFIGLSRNIAASVAAHWKSVPELCGSVKAGVVDEPDRETLTQAWKSWMEEYIKDSGKVPPGNESGNATWVRQAPKRKPDLRLTPGRRMQLTVPLENLIDGLVKENKVVAFIKGPRSAPLCGFSQRVIAILENEGVDYESVNVLDEEYNYGLRETLKKYSNWPTFPQIFVDGELVGGCDILTSMYEKGELASLFKK

SEQ ID NO: 6081 - DNA, 882 bp, Glycine max
  misc_feature: Ceres CLONE ID no. 1104136
  misc_feature: Ceres CDNA ID no. 29191728
  CDS (3)..(710): REFERENCED BY SEQ ID NO: 6082
gcgccgccccctcctcccaccctgcctcgtcgcggaacagtgctcccaccgccggcgccatgagtaagctgcagagcgacgccctgagggaggcaatcacaaacattatcaatgactgccgtgagaagaatcgcaagttcgttgaaaccattgagctgcagattggtctgaagaactatgacccacaaaaggacaagcgtttcagtggttctgttaagcttcctcacatccctcgcccaaagatgagggtttgcatgcttggtgatgcccagcatgttgaagaggcagggaaaatgggcctagactgtatggatgtggaatcccttaagaagatgaacaaaaacaagaagctggtcaagaagcttgcaaagaagtatcatgctttccttgcatctgaggctatcatcaagcagattccccgacttcttggacctggtcttaacaaggcaggaaagtttccaactttggtgtctcaccaggaatccctcgagtccaaggttaatgagaccaaggccacagtcaagttccagctgaaaaaggtgctttgcatgggtgttgccgttggccacctgggtatggaggagaagcagatcttccagaacgtgcagatgagcgtcaacttcctcgtctctctgttgaagaagaattggcaaaacgtgagatgcttgtacctgaagagcacgatgggaaaggtgtaccggttgttctaggctctagtcttctaggatttccaggagattgacaacttggaacttttgttgctttctcaattatcaaattttcgtgcgcgacgagtgacaattattgtcttgtaccgagatggtttgttctattgtctggaacttgatgacattttatccgttgtcaaaaaaaaaaaaaaaa

SEQ ID NO: 6082 - protein, 216 aa, Glycine max
  misc_feature: Ceres CLONE ID no. 1104136
  misc_feature: Ceres CDNA ID no. 29191728
  misc_feature (10)..(212): Pfam Name: Ribosomal_L1 PFAM Desc: Ribosomal protein L1p/L10e family
  misc_feature: Homolog of GI Number: 50252685 NR Desc: putative ribosomal protein L10a
  misc_feature: Homolog of GI Number: 56785395 NR Desc: putative 60S ribosomal protein L10A
  misc_feature: Homolog of GI Number: 50948455 NR Desc: putative 60S ribosomal protein L10A
  misc_feature: Homolog of GI Number: 57471702 NR Desc: ribosomal protein L10A
  misc_feature: Homolog of GI Number: 21386915 NR Desc: putative ribosomal protein L10
  misc_feature: Homolog of GI Number: 9757825 NR Desc: 60S ribosomal protein L10A
  misc_feature: Homolog of GI Number: 15810665 NR Desc: putative 60S ribosomal protein L10A
  misc_feature: Homolog of GI Number: 25294932 NR Desc: 60S ribosomal protein L10A
  misc_feature: Homolog of GI Number: 47026982 NR Desc: 60S ribosomal protein L10A
  misc_feature: Homolog of GI Number: 70909669 NR Desc: ribosomal protein L10Ae
MSKLQSDALREAITNIINDCREKNRKFVETIELQIGLKNYDPQKDKRFSGSVKLPHIPRPKMRVCMLGDAQHVEEAGKMGLDCMDVESLKKMNKNKKLVKKLAKKYHAFLASEAIIKQIPRLLGPGLNKAGKFPTLVSHQESLESKVNETKATVKFQLKKVLCMGVAVGHLGMEEKQIFQNVQMSVNFLVSLLKKNWQNVRCLYLKSTMGKVYRLF

SEQ ID NO: 6083 - DNA, 728 bp, Glycine max
  misc_feature: Ceres CLONE ID no. 1104163
  misc_feature: Ceres CDNA ID no. 25446694
  CDS (89)..(592): REFERENCED BY SEQ ID NO: 6084
aaaaacgctcgtcgtcgtcgtcttcctccgcactccggtgatcgaacaccacgaagaagtaatcccaaggagaaaaaaaggcttagagatgcattcatttggatacagagcaaatgctctgctcacgttctccgtcacggcgctggctttcatctgcgcgatcgcgtccttctctgacaaattcagcaaccagaatccctctgctgagatccagatacttaacatcaatcgtcttaagaagcagtcttatggcaatgatgaggtcagcttgacactggacatatcggcagacttgcagtcactgtttacttggaacaccaaacaggttttcgctttcgtggcagcggaatacgaatccccaatgaactccctgaatcaggtttctctatgggatgtgattatccctgataaggagcatgccaagtttaggattcaaacctcaaacaagtaccgtttcattgatcagggacataatcttcgtgggaaagagttcaacttgacgttacactggcatgtcatgcccaagaccggaaagatgcttgctgacaagatcgtcatgcctggttacagcttaccagatgcatacaaatgatgaaggctgtgaagaaagcatcaaagagtttttgaatttcgtttttcctggaaaagattctgttaaaagtactattaatctattagaacttttctaaatagaaagaataaatgcatgaccaaaaaaaaaaaaaaaa

SEQ ID NO: 6084 - protein, 167 aa, Glycine max
  misc_feature: Ceres CLONE ID no. 1104163
  misc_feature: Ceres CDNA ID no. 25446694
  misc_feature (1)..(167): Pfam Name: SPC22 PFAM Desc: Signal peptidase subunit
  misc_feature: Homolog of GI Number: 28973603 NR Desc: putative signal peptidase
  misc_feature: Homolog of GI Number: 28558783 NR Desc: signal peptidase protein
  misc_feature: Homolog of GI Number: 79313123 NR Desc: signal peptidase
  misc_feature: Homolog of GI Number: 49176606 NR Desc: signal peptidase protein
  misc_feature: Homolog of GI Number: 55770065 NR Desc: putative signal peptidase
  misc_feature: Homolog of GI Number: 58376923 NR Desc: ENSANGP00000018480
  misc_feature: Homolog of GI Number: 47937536 NR Desc: MGC79052 protein
  misc_feature: Homolog of GI Number: 62859239 NR Desc: SPCS3
  misc_feature: Homolog of GI Number: 46228362 NR Desc: possible signal peptidase subunit
MHSFGYRANALLTFSVTALAFICAIASFSDKFSNQNPSAEIQILNINRLKKQSYGNDEVSLTLDISADLQSLFTWNTKQVFAFVAAEYESPMNSLNQVSLWDVIIPDKEHAKFRIQTSNKYRFIDQGHNLRGKEFNLTLHWHVMPKTGKMLADKIVMPGYSLPDAYK

SEQ ID NO: 6085 - DNA, 699 bp, Glycine max
  misc_feature: Ceres CLONE ID no. 1104169
  misc_feature: Ceres CDNA ID no. 40351649
  CDS (1)..(516): REFERENCED BY SEQ ID NO: 6086
acaacccaatccgtcgcgatccacttcaagttccccaaatccccaaccccgcagcgcgcgcaggccgaagcccggttcgcagtcgacgagaagcaggagagatcgatggcgcgtacgaagcagaccgcccggaagtctaccggcggcaaggcgcctcgcaagcagctggccaccaaggcggcgaggaagtcggcgccgaccaccggcggcgtgaagaagccccaccgctacaggcccggcacggtggcgctgcgtgagatccgcaagtaccagaagagcacggagctgctcatccgcaagctgccgttccagcgcctggtgcgggagatcgcgcaggacttcaagacggacctccggttccagagccacgccgtgctggcgctccaggaggctgccgaggcgtacctcgtcgggctcttcgaggacaccaacctctgcgccatccacgccaagcgcgtcaccatcatgcccaaggacatccagctcgcccgccgcatccgcggggagcgcgcctagatcaagcatctgccttggcaacttccatcgccggattgctgcaatgtagtgtagctgtccgttcgtcgcctctggtttcagatcgtgttagcaataggcaataggccacttctattttgttgtaaaaaagtattctggttggttacatagttacaatgactcatttcaaaaaaaaaaaaaaaa

SEQ ID NO: 6086 - protein, 136 aa, Glycine max; identical to SEQ ID NO: 30
  misc_feature: Ceres CLONE ID no. 1104169
  misc_feature: Ceres CDNA ID no. 40351649
  misc_feature (58)..(134): Pfam Name: Histone PFAM Desc: Core histone H2A/H2B/H3/H4

SEQ ID NO: 6087 - DNA, 990 bp, Glycine max
  misc_feature: Ceres CLONE ID no. 1104182
  misc_feature: Ceres CDNA ID no. 25446724
  CDS (25)..(642): REFERENCED BY SEQ ID NO: 6088
aaaaacgataaagataaataaaagatgcaattgcaattggtgtcgccgtgtagggttccacgtgtaggaggtgcagtggtagtgggaggcattcatagaattgggaccttgacctccactgtcaccgtgagaagaagaagtaaagcagtgactactgcaatgcgagcggtggttcagcgcgtggcctctgcctccgtcgaggtcgaaggccgcatcgtctccgagattggccccggccttctcgtcctcgtcggaatccacgactccgattccgacgccgacgccgattacatatgccgaaaggtcttgaacatgaggctgttcccaaatgaaaatacgggcaaagcgtgggaccacagtgtgatgcagaaaaattatcaagtcttattggtgagtcagtttacgttgtatggattcctgaagggtaacaaaccggattttcacgtagccatggcgcctcagagagccaagcccttctatgcctctttagttgacaggtttaggaacgcctataactctgatgcaatcaaggacggtgtatttggagcaatgatgaaggtaaatttggttaatgatggaccagttaccatgcagcttgattcaaattcaccaaagaatacagttgatgcagcagaatcttgatcagtggttgatctggcttgatgaaattgagcttgaattttggctcttccgtcagaaagaccaaatgcaagacacacattatgtgttattcattctagttgaagttctttctcccccaatgtagtgactagtgaccccactttgtaacactatttagttcaaagaatgccttagattgtccctgttcgttctgccatagctcatatgggaatagagtttggaacccttttggactaaacaagctaataccggatgactactaatccgggttacccttattcaaggttgtattttaactggttccatccaatattgttaaataaccattataatgccaaaaaaaaaaaa

SEQ ID NO: 6088 - protein, 160 aa, Glycine max
  misc_feature: Ceres CLONE ID no. 1104182
  misc_feature: Ceres CDNA ID no. 25446724
  misc_feature (28)..(148): Pfam Name: Tyr_Deacylase PFAM Desc: D
  misc_feature: Homolog of GI Number: 17473902 NR Desc: RNA helicase
  misc_feature: Homolog of GI Number: 56784580 NR Desc: putative histidyl
  misc_feature: Homolog of GI Number: 34904530 NR Desc: B1066G12.10
  misc_feature: Homolog of GI Number: 50417408 NR Desc: Hars2
  misc_feature: Homolog of GI Number: 55651145 NR Desc:  similar to Probable D
  misc_feature: Homolog of GI Number: 72081196 NR Desc:  similar to Probable D
  misc_feature: Homolog of GI Number: 51010963 NR Desc: zgc:92657
  misc_feature: Homolog of GI Number: 57104368 NR Desc:  similar to Probable D
  misc_feature: Homolog of GI Number: 34858857 NR Desc: similar to histidyl tRNA synthetase 2
  misc_feature: Homolog of GI Number: 54657666 NR Desc: RNA helicase
MRAVVQRVASASVEVEGRIVSEIGPGLLVLVGIHDSDSDADADYICRKVLNMRLFPNENTGKAWDHSVMQKNYQVLLVSQFTLYGFLKGNKPDFHVAMAPQRAKPFYASLVDRFRNAYNSDAIKDGVFGAMMKVNLVNDGPVTMQLDSNSPKNTVDAAES

SEQ ID NO: 6089 - DNA, 428 bp, Glycine max
  misc_feature: Ceres CLONE ID no. 1104239
  misc_feature: Ceres CDNA ID no. 40041393
  CDS (122)..(349): REFERENCED BY SEQ ID NO: 6090
gaaccaaattctagctcctttcagctgcacaagagtctccaatcccaactctctctctctctccacttgccaaaggaaaaaggctaaagagaaacccacacacacacacacacacagaaatatgtcttccccaagcaagcgccgagagatggacttgatgaaactgatgatgagtgattacaaggtcgagatgattaatgatggaatgcaagaattttatgtgcaattccatggacccaatgacagtccttatcatggtggtgtgtggttttctttccttccaacgtacctctcattgacaaataaacgtgcaaacttatgtgtgcataattttcttatgtatgcttaagttttgtaattggatgctatctagtttttcatatctaatagggtgttgtgtcagtttttatgtaaaaaaaaaaaaaaaa

SEQ ID NO: 6090 - protein, 75 aa, Glycine max
  misc_feature: Ceres CLONE ID no. 1104239
  misc_feature: Ceres CDNA ID no. 40041393
  misc_feature (7)..(50): Pfam Name: UQ_con PFAM Desc: Ubiquitin
  misc_feature: Homolog of GI Number: 6066285 NR Desc: ubiquitin carrier protein 4
  misc_feature: Homolog of GI Number: 21281093 NR Desc: putative E2
  misc_feature: Homolog of GI Number: 431270 NR Desc: ubiquitin conjugating enzyme
  misc_feature: Homolog of GI Number: 136644 NR Desc: Ubiquitin
  misc_feature: Homolog of GI Number: 20465509 NR Desc: putative ubiquitin
  misc_feature: Homolog of GI Number: 431266 NR Desc: ubiquitin conjugating enzyme
  misc_feature: Homolog of GI Number: 1076427 NR Desc: ubiquitin
  misc_feature: Homolog of GI Number: 78708751 NR Desc: Ubiquitin
  misc_feature: Homolog of GI Number: 37534846 NR Desc: putative acetohydroxyacid isomeroreductase
  misc_feature: Homolog of GI Number: 629564 NR Desc: ubiquitin
MSSPSKRREMDLMKLMMSDYKVEMINDGMQEFYVQFHGPNDSPYHGGVWFSFLPTYLSLTNKRANLCVHNFLMYA

SEQ ID NO: 6091 - DNA, 1128 bp, Glycine max
  misc_feature: Ceres CLONE ID no. 1104251
  misc_feature: Ceres CDNA ID no. 25087654
  CDS (231)..(869): REFERENCED BY SEQ ID NO: 6092
gaaatgattaatgggtatagaaaaaataagaaaaagaggagcgattggattgggggtgggtaaggggagtgggaacaccattccatatcatttatctatctgtatctgcttctctttgcttaacatttctcactcacaacacaaaatcatctaatctatctatctatctcattcatgtgtctaattctaccttacttgtgtttgtaacgctattactcattactgtgtaaatggcatatgttgatgttattcgattacaatttcagtcctttttcttctccccctcaccactttctgctaagaggctattctatcctctcgcctattcttctgccccagcgccacctgctactcttgctttcgcgcccagaaagcaattgctttcttttaaggtatgtgcaactgttgctgaaactggtcagccaaaatggtgggaaaagaatgcaccaaatatgattgacattcactccacgcaagaatttctgagtgctttgagtcaagctggagatagactagttattgttgaattttatggaacttggtgtgcttcttgccgagcattattccccaagctatgcagaacagctgaagaacaccctgaaattcttttcctcaaagtaaattttgatgagaataagccaatgtgtaaaaggttgaatgttaaagtacttccttacttccacttttatcgtggggctgaggggcagcttgaatcattttcatgttcacttgccaagtttcaaaaaataaaagatgccatggagatacataacacagctcgatgcagcattggtccacctgtgagcattggcgatctgcttgctgaaccttcctctgttgccaaggatagaccagcagaatctgtgtaaccatagtacttctgttcacgcttttgtattataagctgtctcataaagggaaacctcaaagaaggctgtactctagagaaacttatgatgtgaaggatatatgtactctgtatatttactgttttttttcgtattagaagaataccgagcagaattgtttgttctttttcattcttgaccattcatttgctgattgtaatcaagtacttgaaaacttcggtgaaatgaaatgtttctaattatggcttaaaaaaaaaaa

SEQ ID NO: 6092 - protein, 212 aa, Glycine max
  misc_feature: Ceres CLONE ID no. 1104251
  misc_feature: Ceres CDNA ID no. 25087654
  misc_feature (75)..(155): Pfam Name: Thioredoxin PFAM Desc: Thioredoxin
  misc_feature: Homolog of GI Number: 50933157 NR Desc: putative thioredoxin
  misc_feature: Homolog of GI Number: 18417441 NR Desc: thioredoxin family protein
  misc_feature: Homolog of GI Number: 21554313 NR Desc: thioredoxin
  misc_feature: Homolog of GI Number: 21553512 NR Desc: putative thioredoxin
  misc_feature: Homolog of GI Number: 4538945 NR Desc: putative thioredoxin
  misc_feature: Homolog of GI Number: 4973258 NR Desc: thioredoxin
  misc_feature: Homolog of GI Number: 7269866 NR Desc: Thioredoxin
  misc_feature: Homolog of GI Number: 18377422 NR Desc: thioredoxin
  misc_feature: Homolog of GI Number: 53748517 NR Desc: thioredoxin 2
  misc_feature: Homolog of GI Number: 2459410 NR Desc: putative thioredoxin
MAYVDVIRLQFQSFFFSPSPLSAKRLFYPLAYSSAPAPPATLAFAPRKQLLSFKVCATVAETGQPKWWEKNAPNMIDIHSTQEFLSALSQAGDRLVIVEFYGTWCASCRALFPKLCRTAEEHPEILFLKVNFDENKPMCKRLNVKVLPYFHFYRGAEGQLESFSCSLAKFQKIKDAMEIHNTARCSIGPPVSIGDLLAEPSSVAKDRPAESV

SEQ ID NO: 6093 - DNA, 1330 bp, Glycine max
  misc_feature: Ceres CLONE ID no. 1104293
  misc_feature: Ceres CDNA ID no. 40351650
  CDS (546)..(1094): REFERENCED BY SEQ ID NO: 6094
atcctcttttcttacaggaaaagcttcatgaaaaagagatcaaggcttctaagaataaataaataaaatatctgcttacacaaccaaacttcaatatctcaaccgaaaaaaacatgaaatcacctcaatcaataaatacaaacaatggaaacttcaatattgtacaaaatctagtcaaataaaaaaaattcaatcttgagtggtacaaaaatcatagcctatcaattatcaatttgtaaaaaaaataaaaattcaattttattgttgcctccgtcgccgccgccgcggattcgcagatctgaagacaatctggaggtggcggctttctagtcgtggagcgtctccgtcgtcgttggggcggtgggaatgaatgcagagttagggctttttttattattagggtaaaatggtcttttgacatgttaaaaaaccatatttaattacgaaacataaaaacatccaccttcctctcttacgccgttctttgccctcatctctctctcgccggcgtcgctacgaaggaaagcaatttactgtgaagaacaatgaggaagctaaagtttcatgaaaagaagcttttgaagaaggttaattttttggaatggaagagggaagggggtcacagagagaacctcattatgcaacgctaccatgttactggacgggacgattacaaaaaatattcaggtttatgccatatggttcagaagttagtaaacatattgaaacagatggacccaaaggatccttttcgggttgatatgactgataagcttttggagaaactctacaacatgggtgtgattccaaccaggcaaagcatcacactatgcgaacgtttaactgtgtcatccttctgtaggcgtaggctctcaactgttttggtgagactaaaatttgctgagcacttgaaagaagctgtcacgtacattgagcaagggcatatacgagttggtccagagacagttacagacccggctttccttgtaactagaaacatggaagacttcgttacatgggtggattcatccaaaataaagagaaaggtgcttcagtacaatgacaaattggatgactatgatttaatgaattaagtggaaagctaaatgtcagcttattgtggtttactatatatgaatcatggacgagttttgtttccttaggcgggtagtttagacaggcttggattttaatgggattatttttaatttaaatgcataccagatgattaaggtgatgatgtaatgagcctggaaattactgaatcatgatagtgatgttaaatgtttaaatgtattttgcttttttccagtcaaaaaaaaaaaaaaaa

SEQ ID NO: 6094 - protein, 182 aa, Glycine max
  misc_feature: Ceres CLONE ID no. 1104293
  misc_feature: Ceres CDNA ID no. 40351650
  misc_feature (1)..(106): Pfam Name: Ribosomal_S4 PFAM Desc: Ribosomal protein S4/S9 N
  misc_feature (107)..(154): Pfam Name: S4 PFAM Desc: S4 domain
MRKLKFHEKKLLKKVNFLEWKREGGHRENLIMQRYHVTGRDDYKKYSGLCHMVQKLVNILKQMDPKDPFRVDMTDKLLEKLYNMGVIPTRQSITLCERLTVSSFCRRRLSTVLVRLKFAEHLKEAVTYIEQGHIRVGPETVTDPAFLVTRNMEDFVTWVDSSKIKRKVLQYNDKLDDYDLMN

SEQ ID NO: 6095 - DNA, 978 bp, Glycine max
  misc_feature: Ceres CLONE ID no. 1104361
  misc_feature: Ceres CDNA ID no. 29191688
  CDS (3)..(836): REFERENCED BY SEQ ID NO: 6096
acccctcgagcaaccgcgccgccgccgccgctccccagcgttcgggtcgctcgccgccggccagctcgcgccgcaactccgccatgaagttgaacatcgcgaaccccaccacggggtgccagaagaaggtcgagatcgatgacgaccagaagctgcggaacctttatgataagaggatctcccaggaggtagttggtgatcttcttggtgaggaattcaagggttatatcttcaagatcatgggtggatgtgataagcagggcttcccaatgaagcaaggagtgctaacttctgggcgtgtccgccttctgcttcacagaggcacaccttgcttccgtggttttggcaggcgtaatggtgagcgcaggaggaagtccgtccgtggttgcattgtcagccaagacctatcagttatcaacttggtgattgtcaagaagggtgagaatgatctgccaggccttaccgacactgagaagcccaggatgaggggacccaagagggcttccaagatcaagaagctcttcaaccttggcaaggatgatgatgtccgcagctatgtcaacacataccgcaggaccttccttaacaagaagggcaagaaggtgagcaaggcccccaagatccagcgtcttgtgactcccttgacactccagaggaagcgcgccagaatcgcagacaagaagaagaggatcgccaagaagaagtctgaggctgccgagtaccagaagctgcttgcacagaggctgaaggagcagagagaccgccggagcgagagcatggccaagaggaggtcgaagctgtctgctgccaccaaggcacctgctgcctctgcctaagatgtttacagtcttccgttattagttgtaatagcggaagaatttctcgcactttgttgaatgatatgaatctagctgctactttcagcgtttgttgagttgtaattgatgctgttttgcgtgaagaaaaaaaaaaaaaaaa

SEQ ID NO: 6096 - protein, 250 aa, Glycine max
  misc_feature: Ceres CLONE ID no. 1104361
  misc_feature: Ceres CDNA ID no. 29191688
  misc_feature (1)..(129): Pfam Name: Ribosomal_S6e PFAM Desc: Ribosomal protein S6e
  misc_feature: Homolog of GI Number: 9931636 NR Desc: ribosomal protein s6 RPS6
  misc_feature: Homolog of GI Number: 1917019 NR Desc: ribosomal protein S6 RPS6
  misc_feature: Homolog of GI Number: 34906842 NR Desc: putative 40S ribosomal protein S6
  misc_feature: Homolog of GI Number: 37991906 NR Desc: ribosomal protein s6 RPS6
  misc_feature: Homolog of GI Number: 76161014 NR Desc: ribosomal protein S6
  misc_feature: Homolog of GI Number: 7649387 NR Desc: S6 ribosomal protein
  misc_feature: Homolog of GI Number: 44662864 NR Desc: ribosomal protein S6
  misc_feature: Homolog of GI Number: 72384462 NR Desc: 52O08_33
  misc_feature: Homolog of GI Number: 20147379 NR Desc: AT5g10360/F12B17_290
  misc_feature: Homolog of GI Number: 2224751 NR Desc: ribosomal protein S6
MKLNIANPTTGCQKKVEIDDDQKLRNLYDKRISQEVVGDLLGEEFKGYIFKIMGGCDKQGFPMKQGVLTSGRVRLLLHRGTPCFRGFGRRNGERRRKSVRGCIVSQDLSVINLVIVKKGENDLPGLTDTEKPRMRGPKRASKIKKLFNLGKDDDVRSYVNTYRRTFLNKKGKKVSKAPKIQRLVTPLTLQRKRARIADKKKRIAKKKSEAAEYQKLLAQRLKEQRDRRSESMAKRRSKLSAATKAPAASA

SEQ ID NO: 6097 - DNA, 799 bp, Glycine max
  misc_feature: Ceres CLONE ID no. 1104449
  misc_feature: Ceres CDNA ID no. 29191281
  CDS (103)..(627): REFERENCED BY SEQ ID NO: 6098
atcctctctctcatcagaagaagaagggacgaaagaagaagtatctttgttttcgctctcttctctctcctttcgatctttgacgattagaaaacgaaagtgatggctgcagttaatgggtaccaaggaaacactccggcggcgtcaaagcaatctgctcctctgactaagactgttgatagccaatctgttctcaaaaggctgcaatctgaactaatgggcttgatgatgggtggtgacccggggatatctgctttcccagaggaagacaacatattctgttggaaagggacaataacaggaagcaaagatactgtgtttgaaggaactgagtacagactctcactctctttctccaatgactatcctttcaagcctcctaagatcaagttccacactggttgcttccaccccaatgttgatgtctatggcaatatctgtttggacattcttcaggataaatggtcatctgcatatgatgtgaggacaatactactatcgattcagagccttttgggagaaccgaacatcagctcaccattgaacactcaagcagcgcagctctggagcaaccaagaagagtataggaagatggttgagaagctctacaagccccccagtgcatgataacttcaggatgtgtcattcctttgctctataatttgtttctgatcatcaacagttttatctgtaacattttacctagccttttgacctgagccaaatattgatattgatgtgagcttttcaaaaattaatcagaatgatatacacattcttcttaaaaaaaaaaaaaaaa

SEQ ID NO: 6098 - protein, 174 aa, Glycine max
  misc_feature: Ceres CLONE ID no. 1104449
  misc_feature: Ceres CDNA ID no. 29191281
  misc_feature (33)..(169): Pfam Name: UQ_con PFAM Desc: Ubiquitin
  misc_feature: Homolog of GI Number: 66354450 NR Desc: ubiquitinating enzyme
  misc_feature: Homolog of GI Number: 21618179 NR Desc: E2
  misc_feature: Homolog of GI Number: 66354448 NR Desc: ubiquitinating enzyme
  misc_feature: Homolog of GI Number: 9454557 NR Desc: Putative ubiquitin carrier protein
  misc_feature: Homolog of GI Number: 1493838 NR Desc: cyclin
  misc_feature: Homolog of GI Number: 4388942 NR Desc: E2
  misc_feature: Homolog of GI Number: 24663332 NR Desc: CG10682
  misc_feature: Homolog of GI Number: 57104646 NR Desc:  similar to Ubiquitin
  misc_feature: Homolog of GI Number: 54642160 NR Desc: GA10491
  misc_feature: Homolog of GI Number: 70878938 NR Desc: ubiquitin
MAAVNGYQGNTPAASKQSAPLTKTVDSQSVLKRLQSELMGLMMGGDPGISAFPEEDNIFCWKGTITGSKDTVFEGTEYRLSLSFSNDYPFKPPKIKFHTGCFHPNVDVYGNICLDILQDKWSSAYDVRTILLSIQSLLGEPNISSPLNTQAAQLWSNQEEYRKMVEKLYKPPSA

SEQ ID NO: 6099 - DNA, 632 bp, Glycine max
  misc_feature: Ceres CLONE ID no. 1104574
  misc_feature: Ceres CDNA ID no. 25446520
  CDS (174)..(434): REFERENCED BY SEQ ID NO: 6100
attctcatgtcatgtgcttcccagtatataaggaccacctcaccttcttttcatttcctcattcattcataaatcttagttactttatcagtatcattcattatcactacgattgttctaaaagcaattattactcttgagaagaattaaaagatcatcatcacaataacaagatgagttcaggaattagagcatggagtgtggcagctagtgttggagttgtggaggccttgaaagaccaaggcatatgcaggtggaatcatgctttaagatcagctcaacaccatctcaaaaaccatgttggctcattctctcaggctaacaagctttcttcttctgctatgatctccacaacactaaaacatgagaaggcaaagcaatcagaggagtccttcagaactgtcatgtacttaagctgctggggccccaactagatatcataagtccaataagaaaatattctttctcttttaatttctagaaattatcaagcttagtcacaaaggaagatgagggttgagatttctggggtcacattgtatagtatttgaagtttgttttgctcatgtgacaatcagtttgtaaattttgataaatgatagtgtttagcattgccaaaaaaaaaaaaaaaa

SEQ ID NO: 6100 - protein, 86 aa, Glycine max
  misc_feature: Ceres CLONE ID no. 1104574
  misc_feature: Ceres CDNA ID no. 25446520
  misc_feature: Homolog of GI Number: 6688818 NR Desc: putative wound
  misc_feature: Homolog of GI Number: 21553934 NR Desc: probable wound
  misc_feature: Homolog of GI Number: 19320 NR Desc: wound induced protein
  misc_feature: Homolog of GI Number: 50928991 NR Desc: OSJNBa0043L09.19
  misc_feature: Homolog of GI Number: 50928999 NR Desc: OSJNBa0043L09.23
  misc_feature: Homolog of GI Number: 50929003 NR Desc: OSJNBa0043L09.25
  misc_feature: Homolog of GI Number: 50929001 NR Desc: OSJNBa0043L09.24
  misc_feature: Homolog of GI Number: 50928989 NR Desc: OSJNBa0043L09.18
MSSGIRAWSVAASVGVVEALKDQGICRWNHALRSAQHHLKNHVGSFSQANKLSSSAMISTTLKHEKAKQSEESFRTVMYLSCWGPN

SEQ ID NO: 6101 - DNA, 519 bp, Glycine max
  misc_feature: Ceres CLONE ID no. 1107554
  misc_feature: Ceres CDNA ID no. 40351651
  CDS (75)..(401): REFERENCED BY SEQ ID NO: 6102
aggttttgttttagtttttaagctcgtccgtccccttgtagcgccgctcttcctctgttcagtcaatctcttcaatggcaccgaagaaggataaagttccaccaccgtcctctaagcccgccaaatccggcggcggaaagcagaagaagaagaagtggagcaagggaaagcaaaaggagaaggtgaacaacatggttctcttcgatcaagctacttacgacaagcttctctccgaagctcccaagttcaaactcatcactccctccatcctctccgaccgtcttcggatcaatgggtcacttgctaggaaggccattagagatttgatggctaaaggaaccatcaggatggtctctactcactctagccagcagatttacactagggccacccacaactaagtttctcgtttcattatgtgtgtttcctctctctcttttgtctcaagtctttgactcgatgtttagatgttgaatcttttcccttcaatcaagattttcaagaaaaaaaaaaaaaaaa

SEQ ID NO: 6102 - protein, 108 aa, Glycine max
  misc_feature: Ceres CLONE ID no. 1107554
  misc_feature: Ceres CDNA ID no. 40351651
  misc_feature (1)..(106): Pfam Name: Ribosomal_S25 PFAM Desc: S25 ribosomal protein
MAPKKDKVPPPSSKPAKSGGGKQKKKKWSKGKQKEKVNNMVLFDQATYDKLLSEAPKFKLITPSILSDRLRINGSLARKAIRDLMAKGTIRMVSTHSSQQIYTRATHN

SEQ ID NO: 6103 - DNA, 854 bp, Glycine max
  misc_feature: Ceres CLONE ID no. 1107555
  misc_feature: Ceres CDNA ID no. 40351652
  CDS (1)..(609): REFERENCED BY SEQ ID NO: 6104
actgtcgcacccgtgcaccaccaccaccccaccatcaccaaaggggaacgagcgccgccgagcacgcacgcccgcccgcctccccccaccggagcacgcgcgccgccccgaattcgcctctcgcatccgtcgggcggtctcctccccgtgcccctccacttagctggaatggcgtcgagcggtgacgcagccggagttgtcgtgccgaggaactttagactgctggaagagcttgagagaggagagaagggcattggggatggaacagttagctatggaatggatgacgcagatgatatctacatgcgctcctggacaggaacaataattggtccccacaacactgtccatgagggccggatttatcagctgaagcttttctgtgacaaggactatcccgacaggccaccgactgttaggtttcactcaagaatcaacatgacctgtgtaaatgccgagactggattggtggaccaaaggaagtttagcctgctgtccaactggcgccgtgagtacacaatggagaacatcttgatacagcttaagaaagagatggcgacatcacacaaccggaaactagtgcagcctccggaggggacggtctactgaacgagcgctcatcgcgtcgaacgtgtcattcccaaggaccctcgcggttctcattttagatatcgcataagatcgcaacatttggtgcaaacgattatgtataactttgacggtgtccttcacatggttttgtgtgtcttgtcttgttatatctcctgggtaagcctgtgttgtaatgatacgctggagcttcagctatgtttttaaaagtaccattacgttgcttcataaaaaaaaaaaaaaaa

SEQ ID NO: 6104 - protein, 146 aa, Glycine max
  misc_feature: Ceres CLONE ID no. 1107555
  misc_feature: Ceres CDNA ID no. 40351652
  misc_feature (17)..(89): Pfam Name: UQ_con PFAM Desc: Ubiquitin
MASSGDAAGVVVPRNFRLLEELERGEKGIGDGTVSYGMDDADDIYMRSWTGTIIGPHNTVHEGRIYQLKLFCDKDYPDRPPTVRFHSRINMTCVNAETGLVDQRKFSLLSNWRREYTMENILIQLKKEMATSHNRKLVQPPEGTVY

SEQ ID NO: 6105 - DNA, 692 bp, Zea mays
  misc_feature: Ceres CLONE ID no. 1112671
  misc_feature: Ceres CDNA ID no. 36707046
  CDS (137)..(496): REFERENCED BY SEQ ID NO: 6106
accatttcttccctctcgccttcccctccgccggcaatcccacgtccaatcagccgccgctccagccttccatccatccatcccgtagctgctctctattacgccagcgatcgagagaccaagaggagcaggagcgatggcgaggagctcgttcaagctggagcaccccttcgaaaggaggcaagctgaggctaaccgcatcagggagaagtaccccgatagaattcctgtcattgttgagaaggccgagaggagtgacatcccagacatcgacaagaaaaagtaccttgtccccgccgacctcacagtgggacagtttgtgtacgtggtgcggaagcgcatcaagctcagcgccgagaaggcgatcttcatcttcgtgaagaacaccctcccaccaacagctgccctgatgtctgccatctacgaggagaacaaggacgaggacgggttcctctacatgacctacagcggcgagaacacctttgggctgctatgagtggcgccgcgccgccgtggatcgacgtcggacaatgcccctcctcctgtaaatacttaaaaaaaaaataggcgtctcaagaatccgtgtacataataatctggcatgtcttgcatcaaaagcaactcgttgcgtccactgtctgttgaaactattgaagcgtactaaacatttaagcaaaaaaaaaaaaaaaaaa

SEQ ID NO: 6106 - protein, 119 aa, Zea mays
  misc_feature: Ceres CLONE ID no. 1112671
  misc_feature: Ceres CDNA ID no. 36707046
  misc_feature (14)..(117): Pfam Name: MAP1_LC3 PFAM Desc: Microtubule associated protein 1A/1B
  misc_feature: Homolog of GI Number: 50941899 NR Desc: putative microtubial binding protein
  misc_feature: Homolog of GI Number: 50928837 NR Desc: OSJNBa0053K19.12
  misc_feature: Homolog of GI Number: 34595981 NR Desc: microtubule
  misc_feature: Homolog of GI Number: 50937683 NR Desc: putative microtubule associated protein
  misc_feature: Homolog of GI Number: 21592920 NR Desc: putative microtubule
  misc_feature: Homolog of GI Number: 30102824 NR Desc: At4g21980
  misc_feature: Homolog of GI Number: 4581162 NR Desc: putative microtubule
  misc_feature: Homolog of GI Number: 21553487 NR Desc: symbiosis
  misc_feature: Homolog of GI Number: 3024687 NR Desc: SYMBIOSIS
  misc_feature: Homolog of GI Number: 2072023 NR Desc: symbiosis
MARSSFKLEHPFERRQAEANRIREKYPDRIPVIVEKAERSDIPDIDKKKYLVPADLTVGQFVYVVRKRIKLSAEKAIFIFVKNTLPPTAALMSAIYEENKDEDGFLYMTYSGENTFGLL

SEQ ID NO: 6107 - DNA, 821 bp, Glycine max
  misc_feature: Ceres CLONE ID no. 1113233
  misc_feature: Ceres CDNA ID no. 35383356
  CDS (1)..(564): REFERENCED BY SEQ ID NO: 6108
ctagcatctccaactccagccgccgccacacccacagccaatcctccccagcccaagctcgcagccatgcctcccaagctcgacccgtcccagatcgtggaggtgtatgtccgcgtcaccggcggggaggtcggcgctgcgtcgtccctggcccccaagatcggtccgctcggtctctccccaaagaagatcggagaagacatcgccaaggagacggccaaggactggaagggcctccgcgtcaccgtcaagctcaccgtccagaatcgccaggccaaggtgtccgtcgtcccctccgccgcagccctcgtcatcaaggcgctcaaggagcccgagagggaccgcaagaaggtcaagaacatcaagcacaacggcaacatcagcctcgacgacgtcatcgagatcgccaagatcatgaaggtccgctccatggccaaggagatggccggcaccgtcaaggagatcctcggcacctgcgtcagcgtcggctgcaccgtcgacggcaaggaccccaaggatctgcagacggagatcgacgacggcgaggtggagatccccgcttaagaaggcttggctttggggaggttgttatgtgaggctgctgaagtagtttctcctatctagatgcttcctgatgcagttgagagaatggatgtgatgtcttcacttgttctactcttgcggaagaagaaacttttgtcatgctttagtggttccattgtgagactatttttactgctttaatgagtaccttccggaatcaatcaatgttattatggcagctagaatatcatatgttgagttttgtcaaaaaaaaaaaa

SEQ ID NO: 6108 - protein, 165 aa, Glycine max
  misc_feature: Ceres CLONE ID no. 1113233
  misc_feature: Ceres CDNA ID no. 35383356
  misc_feature (12)..(71): Pfam Name: Ribosomal_L11_N PFAM Desc: Ribosomal protein L11
  misc_feature (76)..(144): Pfam Name: Ribosomal_L11 PFAM Desc: Ribosomal protein L11
  misc_feature: Homolog of GI Number: 50900506 NR Desc: OSJNBa0093F12.16
  misc_feature: Homolog of GI Number: 50911805 NR Desc: putative 60S ribosomal protein L12
  misc_feature: Homolog of GI Number: 40287508 NR Desc: 60S ribosomal protein L12
  misc_feature: Homolog of GI Number: 21593741 NR Desc: 60S ribosomal protein L12
  misc_feature: Homolog of GI Number: 21592414 NR Desc: 60S ribosomal protein L12
  misc_feature: Homolog of GI Number: 2677830 NR Desc: ribosomal protein L12
  misc_feature: Homolog of GI Number: 22655306 NR Desc: 60S ribosomal protein L12
  misc_feature: Homolog of GI Number: 3986695 NR Desc: ribosomal protein L12
  misc_feature: Homolog of GI Number: 19075423 NR Desc: 60s ribosomal protein L12.1/L12A
MPPKLDPSQIVEVYVRVTGGEVGAASSLAPKIGPLGLSPKKIGEDIAKETAKDWKGLRVTVKLTVQNRQAKVSVVPSAAALVIKALKEPERDRKKVKNIKHNGNISLDDVIEIAKIMKVRSMAKEMAGTVKEILGTCVSVGCTVDGKDPKDLQTEIDDGEVEIPA

SEQ ID NO: 6109 - DNA, 688 bp, Glycine max
  misc_feature: Ceres CLONE ID no. 1113252
  misc_feature: Ceres CDNA ID no. 29191282
  CDS (69)..(332): REFERENCED BY SEQ ID NO: 6110
atcgcttctcttctcctccatagttctccgtcgaccgtcgtccgagcagacagaaaaaaaccctaaaaatggatgggcatgattctgaggaccctactaagcagagcactgctgatatgactgcttttgtccaaaatcttctgcagcagatgcaatccaggttccagacaatgtccgactccatcatcacaaagatcgatgacatgggaggcagaatcaatgagctggagcaaagcatcaatgatctaagagccgagatgggagttgaaggcactcctcctgctgcctccaaatctggcgatgaacccaaaacaccccctagttccacttgaacactaagtgtcacatgatcttcctgcttatgtatgcatctgcagaaacattctcaagtttgttcaggagcagtgttattacttttagatttcagtttcaaaaggcatgaatatgttgttgagttcatcagattgattgatggaggatgtgggtacattacattattatgcacttatgttgacttgctttctatgttggttttgagataactgagaaagaccagtgcttgatggatctatactccgcttggttatacattttattctctatagtccgaatgtatagcaattacaactttgtgtgtaccctaacaatctatcattatcgatttttatcagtaaaaaaaaaaaaaaaa

SEQ ID NO: 6110 - protein, 87 aa, Glycine max
  misc_feature: Ceres CLONE ID no. 1113252
  misc_feature: Ceres CDNA ID no. 29191282
  misc_feature (14)..(67): Pfam Name: HSBP1 PFAM Desc: Heat shock factor binding protein 1
  misc_feature: Homolog of GI Number: 55296018 NR Desc: putative heat shock factor binding protein
  misc_feature: Homolog of GI Number: 38349095 NR Desc: heat shock factor binding protein 2
  misc_feature: Homolog of GI Number: 20257534 NR Desc: heat shock factor
  misc_feature: Homolog of GI Number: 24583901 NR Desc: CG5446
  misc_feature: Homolog of GI Number: 30523308 NR Desc: HSBP1
  misc_feature: Homolog of GI Number: 30523306 NR Desc: HSBP1
  misc_feature: Homolog of GI Number: 30523310 NR Desc: HSBP1
  misc_feature: Homolog of GI Number: 50753907 NR Desc:  similar to heat shock factor binding protein 1
MDGHDSEDPTKQSTADMTAFVQNLLQQMQSRFQTMSDSIITKIDDMGGRINELEQSINDLRAEMGVEGTPPAASKSGDEPKTPPSST

SEQ ID NO: 6111 - DNA, 874 bp, Glycine max
  misc_feature: Ceres CLONE ID no. 1113321
  misc_feature: Ceres CDNA ID no. 40351653
  CDS (189)..(647): REFERENCED BY SEQ ID NO: 6112
aacttttcaattcctctcgctgagatcgagaaccgacccacctgttcctctgatcaccgacggtcaccgccgctacacagatgttcgcttgacgacctcttctcgccgcgatctttgcctcttcctgtaatcgccgtcttttgctcaacaacgagatctgtttttttccacgagtaaaggtaaggaggatgtcgactccagcaaggaagaggttgatgagggatttcaagaggttgcagcaagacccacctgcgggtatcagcggtgctccacacgacaacaatatcatgctctggaatgctgttatattcgggcctgatgacaccccatgggatggaggtactttcaaactctcactgcagttctctgaggattatccaaataaaccaccgacagttcgctttgtgtcacggatgtttcatccaaatatttatgcagatgggagtatttgcttggacattctacaaaaccagtggagtccaatatatgatgttgctgctatacttacctccatccagtcattgctctgtgatccaaatccgaattctcctgcaaattcggaagctgctcggatgtacagcgaaaacaagcgtgagtacaacagaaaagtgcgtgatgttgtcgagcaaagttggactgctgattagtattagttagttgtaagctctgcaactctctcctactctcaattactcaatgtcacaattaaagcaacggctttcttatcttttcattcatgtcttttgtgtgtgtttcaaaactctattgattgaatgctttgatggcttctatgaagcctaacgtccttgtaaaaactttgtaccaaaccttctgaattgttcacttttttttgtatataaaaaaaaaaaaaaaa

SEQ ID NO: 6112 - protein, 152 aa, Glycine max
  misc_feature: Ceres CLONE ID no. 1113321
  misc_feature: Ceres CDNA ID no. 40351653
  misc_feature (8)..(145): Pfam Name: UQ_con PFAM Desc: Ubiquitin
MSTPARKRLMRDFKRLQQDPPAGISGAPHDNNIMLWNAVIFGPDDTPWDGGTFKLSLQFSEDYPNKPPTVRFVSRMFHPNIYADGSICLDILQNQWSPIYDVAAILTSIQSLLCDPNPNSPANSEAARMYSENKREYNRKVRDVVEQSWTAD

SEQ ID NO: 6113 - DNA, 688 bp, Glycine max
  misc_feature: Ceres CLONE ID no. 1113335
  misc_feature: Ceres CDNA ID no. 40351654
  CDS (60)..(470): REFERENCED BY SEQ ID NO: 6114
acaaatctcccttctcttcaattcatatccatctagaaaaagtcgcatcttaaaagaggatggctcgtacgaagcaaaccgctagaaagtccaccggaggcaaagctcccaggaagcagctcgccaccaaggcggcgaggaagtctgctccgacgaccggaggagtcaagaagccgcaccgttaccgtccaggaaccgtcgcgcttcgtgagatcaggaagtaccagaagagcacggagctcttgatccgtaagcttcctttccagcgtctggttcgtgaaatcgctcaggacttcaagacggatctgaggttccagagccacgccgtgttggctctccaggaggcggctgaggcgtacctcgtgggtttgttcgaggatacgaatctctgcgcgattcacgcgaagagggtcacgatcatgcccaaggatattcagttggccaggaggattcgtggtgaacgtgcttaacatgtttctctgttttcaatttagatttgaatcatgtattattaattagtgttttttttcggattacatttgtgttaaactttcaaccagctcgtttaatcagagctgatattaatcttttgttttaatcatgtttctttgttgaatcgttttgattgttaatgtacgaaacatgttgataattatagaaacctaatttatcaaaaaaaaaaaaaaaa

SEQ ID NO: 6114 - protein, 136 aa, Glycine max; identical to SEQ ID NO: 30
  misc_feature: Ceres CLONE ID no. 1113335
  misc_feature: Ceres CDNA ID no. 40351654
  misc_feature (58)..(134): Pfam Name: Histone PFAM Desc: Core histone H2A/H2B/H3/H4

SEQ ID NO: 6115 - DNA, 580 bp, Glycine max
  misc_feature: Ceres CLONE ID no. 1113404
  misc_feature: Ceres CDNA ID no. 40351655
  CDS (44)..(310): REFERENCED BY SEQ ID NO: 6116
gaagcttgagagagagagagagagaattgaaacgtcgggagcaatggcgagcaccaaagttcaaaggattatgactcaacctatcaacttgatttttaggtttcttcaaagcaaagctaggatccagatttggctttttgagcagaaagatttgaggattgaaggaagaatcactgggtttgacgaatacatgaacctagtgttggatgaagctgaagaagtgagcatcaagaagaacaccagaaaacaacttggaaggattcttcttaaaggagacaacataacgctgatgatgaacacgggaaagtgatagacttttctctcaagaaaaactctcaaggattagtacatgggcttttcgattatatccaaagcttttgctaagtacatgttgagttgagctcctcttcttcttcagttaactgacaatgccttcttctcttcgttatcgtgtaatattgcaatgtagtaagttagtaacaaggtttgagaaattattgagtttgttggaatcttaaggatggtattgcctctttttggttaatggaaattactattttcgggaaaaaaaaaaaaaaaa

SEQ ID NO: 6116 - protein, 88 aa, Glycine max
  misc_feature: Ceres CLONE ID no. 1113404
  misc_feature: Ceres CDNA ID no. 40351655
  misc_feature (19)..(85): Pfam Name: LSM PFAM Desc: LSM domain
MASTKVQRIMTQPINLIFRFLQSKARIQIWLFEQKDLRIEGRITGFDEYMNLVLDEAEEVSIKKNTRKQLGRILLKGDNITLMMNTGK

SEQ ID NO: 6117 - DNA, 819 bp, Glycine max
  misc_feature: Ceres CLONE ID no. 1113411
  misc_feature: Ceres CDNA ID no. 40351656
  CDS (83)..(544): REFERENCED BY SEQ ID NO: 6118
acgacgtagcatccgttgctagctagcttcgttctctctaaaataaaccctaaattatccgcgagatcgatcgaatccgataatggcgaatagtaatctaccgcgaagaatcatcaaggaaactcaacggctgcttagtgaaccggctccggggataagtgcgtctccgtcagaggagaatatgcgatatttcaatgttatgattcttggtcctacccagtctccttatgaaggaggagttttcaagttggagctctttttgcctgaagagtatcctatggcagctcccaaagttaggtttctcaccaagatttaccatcctaacattgacaagcttggaagaatttgccttgacatattgaaagacaagtggagtcctgcgctacaaataagaactgtgctcttgagtattcaagctcttctaagtgcaccaaacccagatgatccactctctgagaacatagctaagcattggaagagtaatgaagctgaagctgtggagacagctaaggagtggactcgtctgtatgcaagtggcgcttgatggggggagtgcaacaggagaaagatcattgtcatttaaataagattatatatggtgaaacactctatctcaaggttttatccaaatccttcttttctaaaacatggaaaaaaaaagatttgtactctctggatatgtataactactagggaggatttaagactagtttacccatatttgcaaactaactttcttcaaatgtgcttgcgcttgctgtgtttagaaatattctctaattattaaagcactgctagatgataaaaaaaaaaaaaaaa

SEQ ID NO: 6118 - protein, 153 aa, Glycine max
  misc_feature: Ceres CLONE ID no. 1113411
  misc_feature: Ceres CDNA ID no. 40351656
  misc_feature (9)..(146): Pfam Name: UQ_con PFAM Desc: Ubiquitin
MANSNLPRRIIKETQRLLSEPAPGISASPSEENMRYFNVMILGPTQSPYEGGVFKLELFLPEEYPMAAPKVRFLTKIYHPNIDKLGRICLDILKDKWSPALQIRTVLLSIQALLSAPNPDDPLSENIAKHWKSNEAEAVETAKEWTRLYASGA

SEQ ID NO: 6119 - DNA, 1292 bp, Glycine max
  misc_feature: Ceres CLONE ID no. 1113444
  misc_feature: Ceres CDNA ID no. 25446803
  CDS (161)..(1021): REFERENCED BY SEQ ID NO: 6120
attcattcattcattgtagcgttcttgctgggtttgccgtgtttgcgttctttgttccatcggagaagacccttttcccttttagcttcactcttttctctctctttatctgtcaacgatccaagtctacttctgaagcatctttttactgtcacttgacatggcatcaagacaccgtgttcacagagaacccttgaatgctcgaaggggttacccaccggaagggccatatgctcgggtggctcccatgcctcgaccactgcctcctattcctcctcatccgtctgtgttggaagaggaacttgaatttcagcatgccgagatgcgaaggctcgtggcagacaacaggaggttgattgatgaccgaatggcgttgcagcgagaccttggggccgctaaggaggagcttcatcgcatgaatcttgccattggtgacattcgcgccgagcatgaggcgcattcgagggagcttgttgagaaaggcatgaagatggaggctgaccttagggcaaatgagcctttgaagaatgaggtcatgcaactgcgatctgaagttaagaaacttaacaatctcaaacaagaactgacagggaaggttcagacactcactcaagatgttgcaaggttacaagcagacaatcaacaaattcctatgatgagggctaagattgatggcctgcaccaagagctaatgcatgccagaaccatggtggattacgaaaagaaggcaaacatggagttcatggaacagaggcagtcaatggagaaaaatttggtttccatggcccgggaagttgagaaattacgtgctgagcttgctagtgctgatagcagacattggggtgctggtatgtcaggtgggccttatggaacaaaatttggtagcccagagggttttccagctccatatgcagatggatatggcagtgttcacctgggtgctgcagataaaggtcctatgtatggggcgggtgctgcctcaagaaaggagcatgagaagccacacatgaatcgtcgttgaaattcaagttattgctattggtgatgaagaaaggcttgctatcactttgccttctctatttgcagaatagctgagattgagtttgatgtccttctgtgtatgcatgcgacaacagtggtcattttatctggaactctggatatatttagtcctaaactggcatatgtaggttttagtgtcgctttgcttttttttaaagaaaacattgctgcagtatctcagtttataatttagtatgatggaattcttcactttaaaaaaaaaaaaaaaa

SEQ ID NO: 6120 - protein, 286 aa, Glycine max
  misc_feature: Ceres CLONE ID no. 1113444
  misc_feature: Ceres CDNA ID no. 25446803
  misc_feature: Homolog of GI Number: 12323180 NR Desc: myosin
  misc_feature: Homolog of GI Number: 50945975 NR Desc: myosin
  misc_feature: Homolog of GI Number: 50937587 NR Desc: myosin
  misc_feature: Homolog of GI Number: 50925177 NR Desc: OSJNBa0044K18.21
  misc_feature: Homolog of GI Number: 47678879 NR Desc: transglutaminase
  misc_feature: Homolog of GI Number: 47678875 NR Desc: transglutaminase
MASRHRVHREPLNARRGYPPEGPYARVAPMPRPLPPIPPHPSVLEEELEFQHAEMRRLVADNRRLIDDRMALQRDLGAAKEELHRMNLAIGDIRAEHEAHSRELVEKGMKMEADLRANEPLKNEVMQLRSEVKKLNNLKQELTGKVQTLTQDVARLQADNQQIPMMRAKIDGLHQELMHARTMVDYEKKANMEFMEQRQSMEKNLVSMAREVEKLRAELASADSRHWGAGMSGGPYGTKFGSPEGFPAPYADGYGSVHLGAADKGPMYGAGAASRKEHEKPHMNRR

SEQ ID NO: 6121 - DNA, 885 bp, Glycine max
  misc_feature: Ceres CLONE ID no. 1113477
  misc_feature: Ceres CDNA ID no. 24766237
  CDS (224)..(757): REFERENCED BY SEQ ID NO: 6122
gtcttgtaaagaaatctaaagctcatctcttagctcctctgtactcctcctccacacttccttccctccaacgagttccaaaacgcgagtagccatgtcgctcacgatcccgacgaacctcgttctcaacccgagatccaacaaatctctcactcaatccttgcctaaatccaccgcgagattcgtttgctccgatgacaaatccgcgacgcagcaacagtccatgaaggctttctccgccgcagtcgctctctcttccatcctcctatcagctccgatgccagccgtcgctgatatctcggggttgacaccttgcaaggagtcgaaacagttcgccaagagggagaagcaacagatcaagaagcttcaatcatctcttaagctctacgctcctgaaagtgctcctgctcttgctcttaacgctcagatcgagaagaccaaacgcaggttcgacaactacggcaagtatggacttctctgtggcgcagacggtctaccccacctgatagtgaacggagaccagcggcattggggagagttcataactccaggccttctcttcctttacattgctggatggatcgggtgggttggacgaagctacttgatagcaatcagcgatgagaagaaaccagcaatgaaagagatcatcattgatgttccattggctagtcgcctcatcttccgtggtttcatttggcctgttgctgcttacagagcgttactcaatggcgatctcattgccaaggatgtctagaaaaacaaaaacaaatctatatttgttgttttggtttgcttctctctctttctctctatctcatgttttccagtgtatgtattgatatctctaattaactcttcctttcaaagaaaaaaaaaaaaaaa

SEQ ID NO: 6122 - protein, 220 aa, Glycine max
  misc_feature: Ceres CLONE ID no. 1113477
  misc_feature: Ceres CDNA ID no. 24766237
  misc_feature (46)..(220): Pfam Name: PSI_PsaF PFAM Desc: Photosystem I reaction centre subunit III
  misc_feature: Homolog of GI Number: 21593588 NR Desc: photosystem I subunit III precursor
  misc_feature: Homolog of GI Number: 23397082 NR Desc: putative photosystem I reaction centre subunit III precursor
  misc_feature: Homolog of GI Number: 15450361 NR Desc: At1g31330/T19E23_1
  misc_feature: Homolog of GI Number: 8954295 NR Desc: photosystem I reaction center subunit III
  misc_feature: Homolog of GI Number: 30013659 NR Desc: putative photosystem I subunit III precursor
  misc_feature: Homolog of GI Number: 1172664 NR Desc: Photosystem I reaction centre subunit III (Light-harvesting complex I 17 kDa protein) (PSI-F)
  misc_feature: Homolog of GI Number: 21303 NR Desc: PSI subunit IV preprotein
  misc_feature: Homolog of GI Number: 1076728 NR Desc: photosystem
  misc_feature: Homolog of GI Number: 3885892 NR Desc: photosystem
  misc_feature: Homolog of GI Number: 34897038 NR Desc: photosystem
MSLTIPTNLVLNPRSNKSLTQSLPKSTARFVCSDDKSATQQQSMKAFSAAVALSSILLSAPMPAVADISGLTPCKESKQFAKREKQQIKKLQSSLKLYAPESAPALALNAQIEKTKRRFDNYGKYGLLCGADGLPHLIVNGDQRHWGEFITPGLLFLYIAGWIGWVGRSYLIAISDEKKPAMKEIIIDVPLASRLIFRGFIWPVAAYRALLNGDLIAKDV

SEQ ID NO: 6123 - DNA, 731 bp, Glycine max
  misc_feature: Ceres CLONE ID no. 1113527
  misc_feature: Ceres CDNA ID no. 25446739
  CDS (70)..(552): REFERENCED BY SEQ ID NO: 6124
acacaccaaatatttcggcagttaatagcaatttcgataagaaaagttccaaaattcagctaagagaaaatgtctctcattccaaacattttcggtggtcgtaggagcaatgtgttcgatcctttctcacttgacatgtgggatcccttcaaggattttcctttcccaaattccgtctctacttccttccctgagttttctcgggaaaattctgcgtttgtgagcactcgtgtggattggaaggagaccccagaggcgcacgtgttcaaggccgatattcccgggctgaagaaggaggaagtgaaggtgcagattgaagatgataaggtgcttcagataagcggagagaggaacgttgagaaggaagataagaacgacacgtggcatcgcgtggagcgtagcagtggaaagttcatgaggaggttcagattgccggagaatgcaaaagtgaatgaagtgaaggcttctatggaaaatggggttcttactgttactgttcctaaggaagaggttaagaatcatgatgttaaggccatagaaatctctggttaagcagaagcaaatgttgttggtcttttttgtttgaagtcgtgtgcttttctttgttctaatatgatgtgagtgggagttgtgattgtacaaacaaataaaatagttgtataaacttggaagtcgtgtgcttttctttgttctaatgtagtgaattagatttgggaaaaaaaaaaaaaaaa

SEQ ID NO: 6124 - protein, 160 aa, Glycine max
  misc_feature: Ceres CLONE ID no. 1113527
  misc_feature: Ceres CDNA ID no. 25446739
  misc_feature (56)..(159): Pfam Name: HSP20 PFAM Desc: Hsp20/alpha crystallin family
  misc_feature: Homolog of GI Number: 123539 NR Desc: 17.5 kDa class I heat shock protein
  misc_feature: Homolog of GI Number: 224545 NR Desc: protein
  misc_feature: Homolog of GI Number: 19618 NR Desc: heat shock protein
  misc_feature: Homolog of GI Number: 123538 NR Desc: 17.5 kDa class I heat shock protein
  misc_feature: Homolog of GI Number: 25809052 NR Desc: heat shock protein
  misc_feature: Homolog of GI Number: 123555 NR Desc: 18.1 kDa class I heat shock protein
  misc_feature: Homolog of GI Number: 123540 NR Desc: 17.6 kDa class I heat shock protein
  misc_feature: Homolog of GI Number: 6969974 NR Desc: low molecular weight heat shock protein
  misc_feature: Homolog of GI Number: 8671873 NR Desc: Contains similarity to 17.6 KD class I heat shock protein from Arabidopsis thaliana giP13853
  misc_feature: Homolog of GI Number: 507209 NR Desc: low molecular weight heat
  misc_feature: Useful for delaying flowering time
  misc_feature: Useful for increasing chlorophyll and photosynthetic capacity
  misc_feature: Useful for making ornamental plants with modified flowers
  misc_feature: Useful for making ornamental plants with modified leaves
  misc_feature: Useful for making plants with increased biomass
  misc_feature: Useful for making plants with increased biomass and foliage
  misc_feature: Useful for making plants with increased biomass and foliage
  misc_feature: Useful for making plants with increased biomass and foliage
  misc_feature: Useful for making shorter plants
  misc_feature: Useful for making stronger plants
MSLIPNIFGGRRSNVFDPFSLDMWDPFKDFPFPNSVSTSFPEFSRENSAFVSTRVDWKETPEAHVFKADIPGLKKEEVKVQIEDDKVLQISGERNVEKEDKNDTWHRVERSSGKFMRRFRLPENAKVNEVKASMENGVLTVTVPKEEVKNHDVKAIEISG

SEQ ID NO: 6125 - DNA, 520 bp, Glycine max
  misc_feature: Ceres CLONE ID no. 1113571
  misc_feature: Ceres CDNA ID no. 40351657
  CDS (71)..(313): REFERENCED BY SEQ ID NO: 6126
attcacttgttgtttcaaaccttcatcaagacaaattaaaaactttccatcttccgattctctagagaaaatgtcttgctgcggaggaaactgtggatgcggagctggctgcaagtgcgttggttgcggaggttgcaaaatgtacccagacttgggcttctccggcgagaccaccaccaccgagactcttgtcctcggcgttgctccggctatgaactctcagtacgaggcttccggcgagactttcgtcgccgagaacgatgcctgcaaatgtggatctgactgcaagtgcaacccttgcacctgcaaatgaagaatcatataagaccctaagactgcaatatatctaaatgtttgtgtaataatggctgatttctccggttgttttgccggcgacataagtcttctttgtcctttgtctgtgtgtgtttatggtttggtcataagatatctctttatgttgtatctctgtgactatatatataaaccaaaaatattatgggtaaaaaaaaaaaaaaaa

SEQ ID NO: 6126 - protein, 80 aa, Glycine max
  misc_feature: Ceres CLONE ID no. 1113571
  misc_feature: Ceres CDNA ID no. 40351657
  misc_feature (1)..(79): Pfam Name: Metallothio_2 PFAM Desc: Metallothionein
MSCCGGNCGCGAGCKCVGCGGCKMYPDLGFSGETTTTETLVLGVAPAMNSQYEASGETFVAENDACKCGSDCKCNPCTCK

SEQ ID NO: 6127 - DNA, 746 bp, Glycine max
  misc_feature: Ceres CLONE ID no. 1113662
  misc_feature: Ceres CDNA ID no. 25446740
  CDS (84)..(563): REFERENCED BY SEQ ID NO: 6128
aagaaacttcagcaaaacaaacaaaccagagtaataaaaatcttcaacttttagcagttttttttttctatattgcagaagccatggatttcagggtgatgggtttggattctccattgttccacacgctgcaacacatgatggacatgtcagaggacgctgcaggggacaacaagacatacagtgctccgacacggtcatacgttcgagacgccaaagcaatggctgcaacacctgcggatgtgaaggaatatcccaactcctacgtattcgagattgacatgccagggttgaaatctggggacataaaggttcaggttgaagacgacaacgtgcttctgattagtggggagagaaagagggatgaagaaatagaaggggtgaagtatctgagaatggagagaaggattgggaagttcatgcgcaagtttgtgttacctgagaatgccaacactgatgcaatctctgctgtgtgccaagatggggtgcttagtgtcatagtgcagaaattgcctccaccggaacctaagaaacctaagactattgaggttaaggttgcttgaacaacttgtagaacgaagttaaataaacgtttgtttccctctctagtagaagcaggggaagtaatgttttttctgatttgaaggtttttctgttctcaaagcaatggttttatggtattgtgattttgtgatgttgtaatcagatgatgctatatcagttgtttagtaaaaaaaaaaaaaaaa

SEQ ID NO: 6128 - protein, 159 aa, Glycine max
  misc_feature: Ceres CLONE ID no. 1113662
  misc_feature: Ceres CDNA ID no. 25446740
  misc_feature (53)..(157): Pfam Name: HSP20 PFAM Desc: Hsp20/alpha crystallin family
  misc_feature: Homolog of GI Number: 5257560 NR Desc: cytosolic class II low molecular weight heat shock protein
  misc_feature: Homolog of GI Number: 1773291 NR Desc: class II small heat shock protein Le
  misc_feature: Homolog of GI Number: 71498 NR Desc: heat shock protein 17.7
  misc_feature: Homolog of GI Number: 3336894 NR Desc: Hsp20.2 protein
  misc_feature: Homolog of GI Number: 47607140 NR Desc: small heat stress protein Hsp17.4
  misc_feature: Homolog of GI Number: 3639075 NR Desc: cytosolic class II small heat shock protein HCT2
  misc_feature: Homolog of GI Number: 37933812 NR Desc: 17.7 kDa heat shock protein
  misc_feature: Homolog of GI Number: 123550 NR Desc: 17.1 kDa class II heat shock protein
  misc_feature: Homolog of GI Number: 1552553 NR Desc: 17kD heat shock protein
  misc_feature: Homolog of GI Number: 18661 NR Desc: heat shock protein
MDFRVMGLDSPLFHTLQHMMDMSEDAAGDNKTYSAPTRSYVRDAKAMAATPADVKEYPNSYVFEIDMPGLKSGDIKVQVEDDNVLLISGERKRDEEIEGVKYLRMERRIGKFMRKFVLPENANTDAISAVCQDGVLSVIVQKLPPPEPKKPKTIEVKVA

SEQ ID NO: 6129 - DNA, 510 bp, Glycine max
  misc_feature: Ceres CLONE ID no. 1113668
  misc_feature: Ceres CDNA ID no. 40351658
  CDS (80)..(373): REFERENCED BY SEQ ID NO: 6130
gaattgtttgtatataaaagcatagtttgagcacatagaaaatggcactcagtagagaattaaataaaatcaagaaagcatgcatatgatgaagaaggtgtgtgggtttgcaatagtggtgatggcagcactttttctggtggagatgagtcccatggcagaggctgtgacttgtagccctgtggagttgagtccctgtttgggggcaatcacgtcctcttcaccaccatcgacaacttgttgccagaaggtgagggaacaaaggccatgcctctgtggttacctcaaaaaccctagtctgaggccatatgtcaactctcctggttccagaagggttgctagctcttgtggggttcccttcccaacttgttagtcactttttacttcatatatatgtaataaactccccctactgttggctggaaattatatatatatatatatatatgttgaagaaattcactcaataaatttgttgtgtatttcagtgcttgaaaaaaaaaaaaaaaa

SEQ ID NO: 6130 - protein, 97 aa, Glycine max
  misc_feature: Ceres CLONE ID no. 1113668
  misc_feature: Ceres CDNA ID no. 40351658
  misc_feature (32)..(97): Pfam Name: Tryp_alpha_amyl PFAM Desc: Protease inhibitor/seed storage/LTP family
MHMMKKVCGFAIVVMAALFLVEMSPMAEAVTCSPVELSPCLGAITSSSPPSTTCCQKVREQRPCLCGYLKNPSLRPYVNSPGSRRVASSCGVPFPTC

SEQ ID NO: 6131 - DNA, 964 bp, Glycine max
  misc_feature: Ceres CLONE ID no. 1113773
  misc_feature: Ceres CDNA ID no. 36706685
  CDS (2)..(784): REFERENCED BY SEQ ID NO: 6132
tcccgccgccgcccctcttctctcctctgcccacaaaaccctagccgtcgcctcacagctcgccgccgacgcagcgagctctccctccaccgccgcaaccatggcgacccagatcagcaagaagaagaagtttgtgagcgatggcgttttctacgccgagctgaacgagatgctgacccgggagcttgccgaggacggctactccggcgtggaggtgcgcgtgacgccgatgcgcacggagatcatcatcagggccacgcggacgcagaacgtgcttggtgagaagggccgcaggatcagggagctcacctccgtcgtccagaagcgcttcaacttcccggagaacggcgttgagctttacgccgagaaggtcgtcaaccgtggcctctgcgccatcgcccaggccgagtcactccgctacaagctcctcggaggccttgccgtccgcagggcttgctatggtgttcttcgctttgttatggagagtggtgctaagggttgtgaggtcattgtgagtggcaagctcagggcccagagagccaagtcgatgaagttcaaggacggctacatgatctcatctggtcagcccgtcaacgagtacattgatgctgcagttaggcacgttcttttcagacagggcgttcttggtatcaaggtgaagattatgcttgactgggaccccaagggcaagcttggccctaccactccgctgcctgacctcgtcaccatccaccccccgaaggaggaggacgagctgcgccccccggctttggttgaggtctaaagtcccagtagagcaagcagaccatgaaacgtcacatcattttggtcgtagctagttttctatccctgtgataagcgagggctatgcaacgcttggttacctattttactttttaatggacaaaagtttctgtgtaatgctgctatgttaatttcgtttaaactaaaaaaaaaaaaaaaa

SEQ ID NO: 6132 - protein, 227 aa, Glycine max
  misc_feature: Ceres CLONE ID no. 1113773
  misc_feature: Ceres CDNA ID no. 36706685
  misc_feature: There is no branching.
  misc_feature: Useful for making plants with modulated biomass
  misc_feature (104)..(188): Pfam Name: Ribosomal_S3_C PFAM Desc: Ribosomal protein S3
  misc_feature (45)..(102): Pfam Name: KH_2 PFAM Desc: KH domain
  misc_feature: Homolog of GI Number: 22204124 NR Desc: putative 40S ribosomal protein S3
  misc_feature: Homolog of GI Number: 38093738 NR Desc: putative ribosomal protein
  misc_feature: Homolog of GI Number: 50939157 NR Desc: putative 40S ribosomal protein
  misc_feature: Homolog of GI Number: 20466075 NR Desc: AT5g35530/MOK9_14
  misc_feature: Homolog of GI Number: 16323404 NR Desc: putative ribosomal protein S3a homolog
  misc_feature: Homolog of GI Number: 20258907 NR Desc: putative 40S ribosomal protein
  misc_feature: Homolog of GI Number: 83283961 NR Desc: 40S ribosomal protein
  misc_feature: Homolog of GI Number: 41056077 NR Desc: ribosomal protein S3
  misc_feature: Homolog of GI Number: 37595356 NR Desc: ribosomal protein S3
MATQISKKKKFVSDGVFYAELNEMLTRELAEDGYSGVEVRVTPMRTEIIIRATRTQNVLGEKGRRIRELTSVVQKRFNFPENGVELYAEKVVNRGLCAIAQAESLRYKLLGGLAVRRACYGVLRFVMESGAKGCEVIVSGKLRAQRAKSMKFKDGYMISSGQPVNEYIDAAVRHVLFRQGVLGIKVKIMLDWDPKGKLGPTTPLPDLVTIHPPKEEDELRPPALVEV

SEQ ID NO: 6133 - DNA, 1010 bp, Glycine max
  misc_feature: Ceres CLONE ID no. 1113804
  misc_feature: Ceres CDNA ID no. 25447400
  CDS (163)..(738): REFERENCED BY SEQ ID NO: 6134
accccctatgttacccttaccaaccagtgcatctaaaattagggtaaacctgaacgttcttctcagtgttccttataaaacccttgtaagcgcctcctttttctttctctcgttcctgctgaagcagaagggttcctcactctcttcatctgattgaacaaaatgtacacctcgaggaagaaaattcacaaggataaggatgccgagcccactgaatttgaggagacagttggacagtacttgttcgacttggagaacaccaatcaggatctgaaaagtgacttgaaagatctctacataaaccaagctattcaaatggatgtggctggtaatcgcaaggctgtagtcatctatgtgcctttcagattgaggaaggcattccgcaagattcatcttcgacttgtcagagagttggagaagaagtttagtgggaaggatgttgtcttgattgccacaaggaggatcgtgcgaccgccaaagaaaggctctgctgttcagcgaccccgaacccgcactttgaccgctgtccatgatgccatgctggaggatgttgtgtatcctgcagagattgttggcaaacgggccagatatagaattgatggctcaaaaataatgaaggttttcttggaccccaaggagcgcaacaacactgagtacaagctggagaccttttctggagtttacaggaagcttactggaaaagatgtagtatttgagtatccaatctcagaagcctgagatgctgctgcttggtttaatggagtattgtttttttggcagatttttctgttagaattacatatttatgttaaacaataaccaaaattttgacttctggaattttatttgatgcttcttcaccttgatgacattaaaatcaccaagggagagtattttctgtggctatacttggatttagattggttttcctttaggataaatattgaaccttggctttatttgttacacgagtgttgtgttgtccacagtgcataaaaaaaaaaaaaaaa

SEQ ID NO: 6134 - protein, 191 aa, Glycine max
  misc_feature: Ceres CLONE ID no. 1113804
  misc_feature: Ceres CDNA ID no. 25447400
  misc_feature: The plant is abnormally large.
  misc_feature: The plant is abnormally small.
  misc_feature: Useful for making plants with modulated biomass
  misc_feature (4)..(191): Pfam Name: Ribosomal_S7e PFAM Desc: Ribosomal protein S7e
  misc_feature: Homolog of GI Number: 77999315 NR Desc: ribosomal protein S7
  misc_feature: Homolog of GI Number: 57471724 NR Desc: ribosomal protein S7
  misc_feature: Homolog of GI Number: 4128206 NR Desc: 40S ribosome protein S7
  misc_feature: Homolog of GI Number: 5532505 NR Desc: 40S ribosomal protein S7 homolog
  misc_feature: Homolog of GI Number: 6957719 NR Desc: putative 40S ribosomal protein
  misc_feature: Homolog of GI Number: 55167942 NR Desc: putative 40S ribosomal protein S7
  misc_feature: Homolog of GI Number: 4588906 NR Desc: ribosomal protein S7
  misc_feature: Homolog of GI Number: 22671664 NR Desc: ribosomal protein S7
  misc_feature: Homolog of GI Number: 14787424 NR Desc: Ribosomal protein S7
  misc_feature: Homolog of GI Number: 21592413 NR Desc: 40S ribosomal protein S7
  misc_feature: Useful for decreasing plant size
  misc_feature: Useful for delaying flowering time
  misc_feature: Useful for increasing chlorophyll and photosynthetic capacity
  misc_feature: Useful for making larger plants
  misc_feature: Useful for making ornamental plants with modified flowers
  misc_feature: Useful for making ornamental plants with modified leaves
  misc_feature: Useful for making plants with altered leaf shape eg curled leaves
  misc_feature: Useful for making plants with increased biomass
  misc_feature: Useful for making plants with increased biomass and foliage
  misc_feature: Useful for making plants with increased biomass and foliage
MYTSRKKIHKDKDAEPTEFEETVGQYLFDLENTNQDLKSDLKDLYINQAIQMDVAGNRKAVVIYVPFRLRKAFRKIHLRLVRELEKKFSGKDVVLIATRRIVRPPKKGSAVQRPRTRTLTAVHDAMLEDVVYPAEIVGKRARYRIDGSKIMKVFLDPKERNNTEYKLETFSGVYRKLTGKDVVFEYPISEA

SEQ ID NO: 6135 - DNA, 505 bp, Glycine max
  misc_feature: Ceres CLONE ID no. 1115649
  misc_feature: Ceres CDNA ID no. 29191689
  CDS (37)..(324): REFERENCED BY SEQ ID NO: 6136
acttctcaagtgattttgtaactcgcatccgctgcaatgacgaagggaacggggagtttcggaaagaggaggaacaagagtcacactctctgcgtgagatgtggccgtcgcagtttccacatccagaagagccgttgctccgcctgtgcttaccccgccgctcgcaagaggacctataactggagtgtgaaggcaatccgtaggaagaccaccggaactggaaggatgaggtatcttcgcaatgtgcctcgcaggttcaagactggcttcagagaaggtaccgaagccaagccaaggaacaaggcagcagcttcatcatcttaaacactagatttatggcgtctgagtttgttggcatgaatactctgttttattattcagcatctgattactatttatctttttggtgtgttttgtactctttttataaagttttggacttgaatgagatttctgttaactttgcaatttggaatttgcaagtcctgtaaaaaaaaaaaaaaaa

SEQ ID NO: 6136 - protein, 95 aa, Glycine max
  misc_feature: Ceres CLONE ID no. 1115649
  misc_feature: Ceres CDNA ID no. 29191689
  misc_feature (2)..(55): Pfam Name: Ribosomal_L37e PFAM Desc: Ribosomal protein L37e
  misc_feature: Homolog of GI Number: 21280805 NR Desc: putative 60S ribosomal protein L37
  misc_feature: Homolog of GI Number: 21553481 NR Desc: putative ribosomal protein
  misc_feature: Homolog of GI Number: 21537060 NR Desc: putative 60s ribosomal protein L37
  misc_feature: Homolog of GI Number: 44662866 NR Desc: ribosomal protein L37
  misc_feature: Homolog of GI Number: 50915832 NR Desc: putative ribosomal protein L37
  misc_feature: Homolog of GI Number: 50904689 NR Desc: putative 60S ribosomal protein L37
  misc_feature: Homolog of GI Number: 24642107 NR Desc: CG9091
  misc_feature: Homolog of GI Number: 19852052 NR Desc: 60S ribosomal protein L37
  misc_feature: Homolog of GI Number: 45934571 NR Desc: 60S ribosomal protein L37
  misc_feature: Homolog of GI Number: 62548130 NR Desc: ribosomal protein L37
MTKGTGSFGKRRNKSHTLCVRCGRRSFHIQKSRCSACAYPAARKRTYNWSVKAIRRKTTGTGRMRYLRNVPRRFKTGFREGTEAKPRNKAAASSS

SEQ ID NO: 6137 - DNA, 752 bp, Glycine max
  misc_feature: Ceres CLONE ID no. 1115674
  misc_feature: Ceres CDNA ID no. 36706686
  CDS (118)..(576): REFERENCED BY SEQ ID NO: 6138
agtttttctaatcggtttgcgcgagagtttagagtgtaaaacggcgagagcttctcatcttctctctcaggcagcttctcatcttctctctcaggcagcttctattccaaccgaacaatgtcgctggtagcaaacgaggagttccagcacattctgcgtgtgctcaacaccaacgtcgatggcaagcagaagattatgtttgctcttacctccatcaagggtattggaaggagactggccaacattgtctgcaagaaagccgatgtcgacatgaacaagagggccggtgagttgtctgcagctgagatcgacaacctcatgaccatcgtagcaaacccgaagcagtacaagattccagactggttcttgaacagacagaaggactacaaggatggaaagtactcccaggttgtttccaatgccctcgacatgaagctcagggatgatcttgaacgcctcaagaagatcaggaaccaccgtgggctgaggcactactggggtctccgtgtccgtggacaacacaccaagacaactggtcgcagaggaaagactgttggtgtctctaagaagcgttaagacaatgatgctagctgcagctgggattggatctttgacaaggcccctttttttatgttttgttgcaagtctcaaaatctggattttaggttttttttgtaagacatccttcacttgttttttcacatttcgttatattacttttgtcacggtatctctgaaaaaaaaaaaaaaaa

SEQ ID NO: 6138 - protein, 152 aa, Glycine max
  misc_feature: Ceres CLONE ID no. 1115674
  misc_feature: Ceres CDNA ID no. 36706686
  misc_feature (14)..(142): Pfam Name: Ribosomal_S13 PFAM Desc: Ribosomal protein S13/S18
  misc_feature: Homolog of GI Number: 56236126 NR Desc: At1g22780
  misc_feature: Homolog of GI Number: 17978783 NR Desc: S18.A ribosomal protein
  misc_feature: Homolog of GI Number: 40287492 NR Desc: putative ribosomal protein
  misc_feature: Homolog of GI Number: 22204120 NR Desc: putative ribosomal protein S18
  misc_feature: Homolog of GI Number: 50919149 NR Desc: putative ribosomal protein S18A
  misc_feature: Homolog of GI Number: 50934523 NR Desc: putative ribosomal protein S18
  misc_feature: Homolog of GI Number: 24266988 NR Desc: ribosomal protein S18
  misc_feature: Homolog of GI Number: 71040621 NR Desc: ribosomal protein S18
  misc_feature: Homolog of GI Number: 67083901 NR Desc: ribosomal protein S18
MSLVANEEFQHILRVLNTNVDGKQKIMFALTSIKGIGRRLANIVCKKADVDMNKRAGELSAAEIDNLMTIVANPKQYKIPDWFLNRQKDYKDGKYSQVVSNALDMKLRDDLERLKKIRNHRGLRHYWGLRVRGQHTKTTGRRGKTVGVSKKR

SEQ ID NO: 6139 - DNA, 1823 bp, Glycine max
  misc_feature: Ceres CLONE ID no. 1115723
  misc_feature: Ceres CDNA ID no. 24726906
  CDS (572)..(1630): REFERENCED BY SEQ ID NO: 6140
aaaaaccctagattttcaaatctagggttttgttttcttaacttgttacggttatggttatggttctggttcaggaactgaactcccacccttgctaatttcacttttctcttctcaatcttagcctctggtttttctacattttccctccctcgctaacctctgccatgggattttcaatgctgattttgtttcacctctaaagccactccctctcttattttcttcaaccttttggcattcgcaactcatcttctttgtggtgtttctaggtaaacgagacccttgtacgtgcattcacttgacaaaatctccgagcttgttacttgaatatctggagctagcttctgggctttagatcctcttctttcttctttgcattagggttaaagatctattttttccatcattgtgaaagctatttgcttttgactagtagaagggtacctagctaaacccctgtttttacatcttcactagtttcatagtttaagaagttagtagcaccagtgaaagggtttgaagttgaggaggaaaaattatcacaattgacaaacctgttagtaaatgcatggatgggagagaaggcatggcatttcctggtggctctgctccatattacatgcagcatagaggaggaggggttggtgggtctgttccaggaaccgggacacagagtggagggtttcaaccaccctctggctttagagctttgtcaaatgtctctccaggttctgcatttaaagtagagtctcagcctcaacatgctagttttagtcatggcattaacacaggttcctctcctgatggtggaagtggagtgccttcttctggtgagcctgtgaagaagaaaagagggaggcctaggaagtatggccctgatggatctgtttccttgatgctctctcccatgtctgccactgctaattccaccccgggatcgggcacttcttcggagaaacgacccagggggcgcccacctggaagtggaaggaagcaacagcttgccactctaggtgaatggatgaacaattctgcaggactggccttttcacctcatgttatcaccgttggagttggggaggacattgtagcaaagttattgtcatttgcaaggcagagaccaagggctgtgtgcatcttaacaggaactgggacaatttcttcagtcactctgcgccaacccgcttctactagcatcagtgttacatatgagggccgatttcaaatattatgcttgtctggttcttacttggttgctgaagaaggtggacctcacaatagaacgggtggcatgagtgtttccctttctagtcctgatggtcatatcattggtggtggtgttactaggcttgttgctgcaagcccagtgcaggtggtagcatgcagtttcgtatatgggggctccaagccaaagactaaagaagtgaccactaccactactactacaaaagatagcagttcagagcctcagagtagtgataagttagcgtctccagccagtgctcctccacctaatcaaaactacacctcttcttctccgttcccaggcatttggcctgcatcgtcaaggccagtagaggttaaaagtgcacatccacatactggtattgacttgacgcgtgggtgaagaccatttattattctataagagactttgtagttttgtatagagatctcttgtaaatgaaccgaatttgtgagcattgtgactcttcctatctatcactgttgatgggtgacaagttcgcgctaacctatgctgtaaccaatggatttcagggttaagtaacagtcttgactttgcaaaaaaaaaaaaaaaa

SEQ ID NO: 6140 - protein, 352 aa, Glycine max
  misc_feature: Ceres CLONE ID no. 1115723
  misc_feature: Ceres CDNA ID no. 24726906
  misc_feature (92)..(104): Pfam Name: AT_hook PFAM Desc: AT hook motif
  misc_feature: Homolog of GI Number: 2213536 NR Desc: DNA
  misc_feature: Homolog of GI Number: 2213534 NR Desc: DNA
  misc_feature: Homolog of GI Number: 6633838 NR Desc: F2K11.15
  misc_feature: Homolog of GI Number: 20466009 NR Desc: putative DNA
  misc_feature: Homolog of GI Number: 17979309 NR Desc: putative DNA
  misc_feature: Homolog of GI Number: 21387187 NR Desc: putative AT
  misc_feature: Homolog of GI Number: 31711840 NR Desc: At3g61310
  misc_feature: Homolog of GI Number: 6850898 NR Desc: putative DNA
  misc_feature: Homolog of GI Number: 37537056 NR Desc: putative AT
  misc_feature: Homolog of GI Number: 14326504 NR Desc: At2g33620/F4P9.39
MDGREGMAFPGGSAPYYMQHRGGGVGGSVPGTGTQSGGFQPPSGFRALSNVSPGSAFKVESQPQHASFSHGINTGSSPDGGSGVPSSGEPVKKKRGRPRKYGPDGSVSLMLSPMSATANSTPGSGTSSEKRPRGRPPGSGRKQQLATLGEWMNNSAGLAFSPHVITVGVGEDIVAKLLSFARQRPRAVCILTGTGTISSVTLRQPASTSISVTYEGRFQILCLSGSYLVAEEGGPHNRTGGMSVSLSSPDGHIIGGGVTRLVAASPVQVVACSFVYGGSKPKTKEVTTTTTTTKDSSSEPQSSDKLASPASAPPPNQNYTSSSPFPGIWPASSRPVEVKSAHPHTGIDLTRG

SEQ ID NO: 6141 - DNA, 641 bp, Glycine max
  misc_feature: Ceres CLONE ID no. 1115779
  misc_feature: Ceres CDNA ID no. 35383357
  CDS (77)..(469): REFERENCED BY SEQ ID NO: 6142
atcattttccgctgttcgccgcaaaagaagagaagaagagacgcaaaacaggcttgagaagctctttgctgcgaacatgactttcaaacgaaggaacggtggtaggaacaagcacaaccgtggtcatgtgaacccaatcaggtgttccaactgcgggaaatgctgtcccaaggataaggcgattaagagattcctcgtcaggaacatcgttgagcaagctgccatcagagatgttcaagaagctagtgtttacgatggttacactctaccaaagttgtacgctaagatgcagtactgtgtttcatgtgctatccactctcacgttgtgagagttcgatcgcgcactaaccgtagagttcgtaccccaccgccccgttttgccagacgcaaggaggatgctcccaagcctggacaacctggtcaggcccctcgccctgctggtggtgctccagctgctcctcgtgcctaaagactgcaacaagcgggcaatcccaaactctttatattctagtagtctcagtcttgtctggagtttgtgaaaatgtttttgacgtttggttaaagatagttttgaatgctttgagactttaaaaaaaaaaaaaaaaaaaaaaaaaaaaaaaaaaataaaaaaaaaaaaaaaa

SEQ ID NO: 6142 - protein, 130 aa, Glycine max
  misc_feature: Ceres CLONE ID no. 1115779
  misc_feature: Ceres CDNA ID no. 35383357
  misc_feature (1)..(120): Pfam Name: Ribosomal_S26e PFAM Desc: Ribosomal protein S26e
  misc_feature: Homolog of GI Number: 22137298 NR Desc: AT3g56340/F18O21_300
  misc_feature: Homolog of GI Number: 24111313 NR Desc: At2g40590/T2P4.6
  misc_feature: Homolog of GI Number: 56236112 NR Desc: At2g40510
  misc_feature: Homolog of GI Number: 20466414 NR Desc: 40S ribosomal protein S26
  misc_feature: Homolog of GI Number: 5706704 NR Desc: ribosomal protein S26
  misc_feature: Homolog of GI Number: 56201998 NR Desc: putative ribosomal protein S26
  misc_feature: Homolog of GI Number: 3885515 NR Desc: similar to ribosomal protein S26
  misc_feature: Homolog of GI Number: 50931777 NR Desc: putative 40S ribosomal protein S26
  misc_feature: Homolog of GI Number: 7440567 NR Desc: probable ribosomal protein S31
  misc_feature: Homolog of GI Number: 61654752 NR Desc: S26
MTFKRRNGGRNKHNRGHVNPIRCSNCGKCCPKDKAIKRFLVRNIVEQAAIRDVQEASVYDGYTLPKLYAKMQYCVSCAIHSHVVRVRSRTNRRVRTPPPRFARRKEDAPKPGQPGQAPRPAGGAPAAPRA

SEQ ID NO: 6143 - DNA, 676 bp, Glycine max
  misc_feature: Ceres CLONE ID no. 1115782
  misc_feature: Ceres CDNA ID no. 36582144
  CDS (64)..(474): REFERENCED BY SEQ ID NO: 6144
acatcgattacaaatctcgcttctcttcaattcaatccttcgagaaaaagtcgcatctagacaatggctcgtacgaagcaaaccgctagaaagtccaccggaggcaaagctcccaggaagcagctcgccaccaaggcggcgaggaagtctgctccgacgaccggaggagtcaagaagccgcaccgttaccgtcccgggaccgttgcgcttcgtgagatcaggaagtaccagaagagcacggagcttttgatccgtaagcttcctttccagcgtctcgttcgtgagatcgctcaggacttcaagacggatctgaggttccagagccacgccgtgttggctctccaggaggcggctgaggcgtaccttgtgggtttgttcgaggatactaatctctgcgcgattcacgcgaagagggtcacgatcatgcccaaggatattcagttggcgaggaggattcgtggtgaacgtgcttgagatgtttctctgttttcaattttagattatgatcgtgtattattattattagtgttttttttcggattacaatttgtgttaaactttcaaccagctcgtttaatcaagactgatattaatcttttttttaatcatgtttctttgttgaatcgttttgattgttaattaatgaaacattttaattataaaaaaaaaaaaaaaa

SEQ ID NO: 6144 - protein, 136 aa, Glycine max; identical to SEQ ID NO: 30
  misc_feature: Ceres CLONE ID no. 1115782
  misc_feature: Ceres CDNA ID no. 36582144
  misc_feature (58)..(134): Pfam Name: Histone PFAM Desc: Core histone H2A/H2B/H3/H4
  misc_feature: Homolog of GI Number: 37991915 NR Desc: histone H3.2 protein
  misc_feature: Homolog of GI Number: 18698662 NR Desc: disease
  misc_feature: Homolog of GI Number: 62642119 NR Desc: histone 3
  misc_feature: Homolog of GI Number: 73808026 NR Desc: histone H3
  misc_feature: Homolog of GI Number: 68362812 NR Desc:  similar to CG31613
  misc_feature: Homolog of GI Number: 74004201 NR Desc:  similar to histone 1
  misc_feature: Homolog of GI Number: 57098927 NR Desc:  similar to histone protein Hist2h3c1
  misc_feature: Homolog of GI Number: 74004208 NR Desc:  similar to histone 1
  misc_feature: Homolog of GI Number: 30061401 NR Desc: H3 histone
  misc_feature: Homolog of GI Number: 61842355 NR Desc:  similar to HIST1H3I protein

SEQ ID NO: 6145 - DNA, 581 bp, Glycine max
  misc_feature: Ceres CLONE ID no. 1115810
  misc_feature: Ceres CDNA ID no. 35383358
  CDS (58)..(429): REFERENCED BY SEQ ID NO: 6146
attctccgagccaacaagtagcagcgccgcaccatttgaacaagattcaagctcacgatggctaggattaaggttcacgaactgagagacaagtcgaagagcgatcttcagaaccagcttcaggatcttaaggctgagcttgctctcctccgtgtcgctaaggtcaccggaggtgctccaaacaagttctccaaaatcaaggttgtccgaaaatcaatagctcaggtgttgaccgtgacttctcagaagcagaagtctgctctcagagaagcgtacaagaacaagaagttcatccctcttgatctccgtcccaagaaaacacgtgctatccgcaggcgccttaccaaacatcagctatcgttgaaaacagagcgtgagaagaagaaggaaatgtacttcccaatcaggaagtacgccatcaaagtttaaatctttctattagaaactctgtttcagcttttgttcttttggtggaaccttgttattggttctttacttgtgctatggtgtcaaacagtttcagtaacatggattttggttcttatttatattttcattttaaaacaaaaaaaaaaaaaaaa

SEQ ID NO: 6146 - protein, 123 aa, Glycine max
  misc_feature: Ceres CLONE ID no. 1115810
  misc_feature: Ceres CDNA ID no. 35383358
  misc_feature (6)..(64): Pfam Name: Ribosomal_L29 PFAM Desc: Ribosomal L29 protein
  misc_feature: Homolog of GI Number: 21592412 NR Desc: putative 60S ribosomal protein L35
  misc_feature: Homolog of GI Number: 33589770 NR Desc: At5g02610
  misc_feature: Homolog of GI Number: 30102548 NR Desc: At3g55170
  misc_feature: Homolog of GI Number: 17104643 NR Desc: putative 60S ribosomal protein L35
  misc_feature: Homolog of GI Number: 6984224 NR Desc: 60S ribosomal protein L35
  misc_feature: Homolog of GI Number: 62751093 NR Desc: similar to 60S ribosomal protein L35
  misc_feature: Homolog of GI Number: 71535092 NR Desc: putative 60S ribosomal protein L35
  misc_feature: Homolog of GI Number: 50923665 NR Desc: OSJNBb0006N15.8
  misc_feature: Homolog of GI Number: 51979244 NR Desc: PREDICTED OJ1126_B06.24 gene product
  misc_feature: Useful for sterility
MARIKVHELRDKSKSDLQNQLQDLKAELALLRVAKVTGGAPNKFSKIKVVRKSIAQVLTVTSQKQKSALREAYKNKKFIPLDLRPKKTRAIRRRLTKHQLSLKTEREKKKEMYFPIRKYAIKV

SEQ ID NO: 6147 - DNA, 1681 bp, Glycine max
  misc_feature: Ceres CLONE ID no. 1115926
  misc_feature: Ceres CDNA ID no. 25891123
  CDS (188)..(1594): REFERENCED BY SEQ ID NO: 6148
acttactttctattccactttaccaaaaccaccaaagcttgtggttttttaactcttggtctcatttgtcaatggaaaaaggcttttgtgttggcatccttgttttgattccttctatcatgtgaaacaaatctttcatttggtgttggtgttgcgtgtggaagaaaaagttgtgtttcaaatttcaatgacttctgctactagttatactccttcacctgaaaacaaacctcagatccagcacataattaacattcctgaacaaatggagcctgaggtgcatgatcaatgttgcatttacaaggttcctcatcatctcctgaaattgaatgtggaagcttatacaccacagttcatctcaataggccctcttcacagtgacaagccagaactaaagcaagagaagcagaaacaaaggtattttcatgctttttggaaacgtctatctcacaagcaaggtttagctttgtcacaatacaaagccttccttgaagagaacatagaaaagataggtaattgttattccaagccagaacttcacaaggaggaaaagtttgttgacttgatcctcttagactctgtcttcataatggagctgtttttgagaaaagcaaacaaatctgaacagaagaatgatcacatgttcaccacatcatgggtgtgcaagttggctcaacgtgatttgttactacttgaaaatcagattcccatgtttgtgttggaggaattgcacacaagggtcatccttggagacaatggcacaaaagaaaacagtgttaaatttgttgagcttgcctttaactactttgaagactattatttttcacacaagccaagttttgaagtggagatgatcaagaagtgtaaatcttgcaaacacttcactgatttgatcagatacaccttcttgcctacaaaaatccaggttgagggggtgaataatgtgagtgtgaatccatcacaacatttcaccccttgtcaagtggaatgtgttcttagaactgcaacaaagttgaatgaggctggtgttagctttgagaaagttcaaggtaggagctatttggacataaagtttgagaaaactccaatcctcagctggttcttatgttttggttgcttaccattctccaaatggttcaaagctcgtttgcagataccccatttgaaagtagaccaagtcacagaatgtgttctaaggaacctcattgccttggagcagtgtcactattccgaccaacctttcatatgcaactatgtgactctaattgattctttgattcacactcaagaggatgtggagctgctggttgacacagaaatcattgaccatgaacttggaagccacactgaattggcaactatgataaatggcctttgcaagcatgttttggtgacttcaaattattatggcaaaaccacaaaggaactcaatgaacactacaactgctgttggaaacactacatgggtatgctgatatctgtgtacttccgtgacccttggagattcagttcaactattgtaggaattgctgttttcttatttgctgttgttaactttctaaggattattggtgtgtttcgtccaaattattgacactaatgattttagaattttgcctggcacatgctaaaaaaaaaaaaaaaaaaaaaaaaaaaaaaaaaaagaaaaaaaaaaaaaaaa

SEQ ID NO: 6148 - protein, 468 aa, Glycine max
  misc_feature: Ceres CLONE ID no. 1115926
  misc_feature: Ceres CDNA ID no. 25891123
  misc_feature: Homolog of GI Number: 50926288 NR Desc: OSJNBb0116K07.15
  misc_feature: Homolog of GI Number: 5852173 NR Desc: zhb0003.1
  misc_feature: Homolog of GI Number: 34894670 NR Desc: B1153F04.26
  misc_feature: Homolog of GI Number: 34914138 NR Desc: P0496H05.18
  misc_feature: Homolog of GI Number: 34914152 NR Desc: P0496H05.27
  misc_feature: Homolog of GI Number: 5852175 NR Desc: zhb0005.1
MTSATSYTPSPENKPQIQHIINIPEQMEPEVHDQCCIYKVPHHLLKLNVEAYTPQFISIGPLHSDKPELKQEKQKQRYFHAFWKRLSHKQGLALSQYKAFLEENIEKIGNCYSKPELHKEEKFVDLILLDSVFIMELFLRKANKSEQKNDHMFTTSWVCKLAQRDLLLLENQIPMFVLEELHTRVILGDNGTKENSVKFVELAFNYFEDYYFSHKPSFEVEMIKKCKSCKHFTDLIRYTFLPTKIQVEGVNNVSVNPSQHFTPCQVECVLRTATKLNEAGVSFEKVQGRSYLDIKFEKTPILSWFLCFGCLPFSKWFKARLQIPHLKVDQVTECVLRNLIALEQCHYSDQPFICNYVTLIDSLIHTQEDVELLVDTEIIDHELGSHTELATMINGLCKHVLVTSNYYGKTTKELNEHYNCCWKHYMGMLISVYFRDPWRFSSTIVGIAVFLFAVVNFLRIIGVFRPNY

SEQ ID NO: 6149 - DNA, 691 bp, Glycine max
  misc_feature: Ceres CLONE ID no. 1115933
  misc_feature: Ceres CDNA ID no. 25446804
  CDS (152)..(460): REFERENCED BY SEQ ID NO: 6150
atgacctttctaactaatctacagtccatcctgtaataatctccgtttcaacaccaaacaccaagcgaaacctgaattaagcctcttcttcttcatcgaatcgaaacaacctcgtccgtgctaaggaaactcaacgacagagactgcaacaatgtacgtagatcacgcgttctcgatttcggacgaggatatcatgatgggaacctcgtacaccgtcaacaacaaaccccccatcaaggagattgccctcgccgtttccctcctcgtttgcggcgtcctcggcatcgtcatcggttctctcatggcctacaaccacgtcggcggcgacactgctcacgggatcttctttgcagtactgggatttatcttgttcataccgggtttctactacacgcggattgcgtattatgcttacaagggatacaaagggttctctttctcaaacataccacccgtgtagctgtactagctagccatgtctcataatttaggttcacatagcttcctcatgtacagatattccatggttgtactctatgttctttctttctttctttcttgtgttgtgttgtgtgtgttttgtctgacaaatgatgagtgtttagattgtagtttgtaattgctatatatgatatactgccactttctatgcttgatttttttttctccagtgtcaaaaaaaaaaaaaaaa

SEQ ID NO: 6150 - protein, 102 aa, Glycine max
  misc_feature: Ceres CLONE ID no. 1115933
  misc_feature: Ceres CDNA ID no. 25446804
  misc_feature: Homolog of GI Number: 49256223 NR Desc: MGC84021 protein
  misc_feature: Homolog of GI Number: 49904255 NR Desc: MGC89669 protein
  misc_feature: Homolog of GI Number: 51258427 NR Desc: MGC84111 protein
  misc_feature: Homolog of GI Number: 37183347 NR Desc: HSPC274
  misc_feature: Homolog of GI Number: 55651055 NR Desc:  similar to chromosome 20 open reading frame 30
  misc_feature: Homolog of GI Number: 58331120 NR Desc: chromosome 20 open reading frame 30 isoform 1
MYVDHAFSISDEDIMMGTSYTVNNKPPIKEIALAVSLLVCGVLGIVIGSLMAYNHVGGDTAHGIFFAVLGFILFIPGFYYTRIAYYAYKGYKGFSFSNIPPV

SEQ ID NO: 6151 - DNA, 821 bp, Glycine max
  misc_feature: Ceres CLONE ID no. 1115963
  misc_feature: Ceres CDNA ID no. 36518184
  CDS (26)..(526): REFERENCED BY SEQ ID NO: 6152
agatactattcaagagttgaaggaaatggctgaagcacaactacgagaccagcatggcaaccctgtcccactcaccgatcaatacggtaatccggttatcttaactgacgagcgcggtaatcccgtccaactcactggtgtcgctaccaccgctaccggcacagcaggttctgggtttgggtcctatggtaccggtgcttacggtggtggtgcaagtgcaaccaccgttgcagatcttttggcaacccaaccaaggagtggcagggaggctagagagcttcgtcgttcctccagttcaagctctagctcgtctgaggatgatgggcaaggtgggaggaggaagaagggagtgaaggataaaataaaagagaaactaccaggggtaggaggagggaataataataaggagcatgcacacacaacaactgctccaaccaccgccactaaccaccctgctgatcagcatgagaagaagggcataatggagaggatcaaagaaaaattgcctggccaccacacccactgaaaacctgcgttacattaccatatgtttgcgcctgtctgtcttatatatgtaacataaagtactatatatgtcatgggctgagtatcttgtgcaattatgctctttatattatgttcagaatatatatctgattatgtcactatcttgattcttttgaatcatgtatatggatgtgttccatcttctctttgtatgcaccttcgattaatatctcggcctcgatcgcatcagtgtgacttctgcttttattttataataataacgcttctttataatatcaaaaaaaaaaaaaaaa

SEQ ID NO: 6152 - protein, 166 aa, Glycine max
  misc_feature: Ceres CLONE ID no. 1115963
  misc_feature: Ceres CDNA ID no. 36518184
  misc_feature (4)..(23): Pfam Name: Dehydrin PFAM Desc: Dehydrin
  misc_feature: Homolog of GI Number: 2270990 NR Desc: dehydrin
  misc_feature: Homolog of GI Number: 37547535 NR Desc: dehydrin
  misc_feature: Homolog of GI Number: 46020012 NR Desc: dehydrin
  misc_feature: Homolog of GI Number: 2689251 NR Desc: Dhn1
  misc_feature: Homolog of GI Number: 51572266 NR Desc: dehydrin 1
  misc_feature: Homolog of GI Number: 1438521 NR Desc: dhn1
  misc_feature: Homolog of GI Number: 24030249 NR Desc: putative dehydrin
  misc_feature: Homolog of GI Number: 1438518 NR Desc: dhn1
  misc_feature: Homolog of GI Number: 21593864 NR Desc: putative dehydrin
  misc_feature: Homolog of GI Number: 19032422 NR Desc: 48 kDa dehydrin
MAEAQLRDQHGNPVPLTDQYGNPVILTDERGNPVQLTGVATTATGTAGSGFGSYGTGAYGGGASATTVADLLATQPRSGREARELRRSSSSSSSSSEDDGQGGRRKKGVKDKIKEKLPGVGGGNNNKEHAHTTTAPTTATNHPADQHEKKGIMERIKEKLPGHHTH

SEQ ID NO: 6153 - DNA, 1134 bp, Glycine max
  misc_feature: Ceres CLONE ID no. 1116014
  misc_feature: Ceres CDNA ID no. 29191217
  CDS (112)..(822): REFERENCED BY SEQ ID NO: 6154
acaacatccatgtcccatacatctttagcagcaagagaactcaaacagtttaattttcttcaaaactagtttttttttggttttagttggtatcctcggaagagagagaaaatgttgggaattttcagcggagctatagtatcattgccggaagagctggtggctgccgggaaccgaactccgtcgccgaagacaaccggatcggtcctagtcaacaagttcgtagagaaaaatccctctgccgtgtccgtacaggtcggcgactacgtgcagcttgcttatagccaccacaaagagagtcctctccggccaaggtcatttggggctaaggatgagatattctgcttgttccaaggctcacttgacaacctaggaagccttaaacaacaatatgggctggcaaagaatgcaaacgaggttctcttggtcattgaggcttacaagactctccgtgacagagctccttacccagccaaccacgtcgtgtcacacctaagtggcgattttgcctttgtggtctttgataaatcaacctccactctgtttgtagcctctgaccaagaaggtaaggtaccattgtactgggggataacagctgatgggtatgtggcatttgctgatgatattgagttgctaaaaggtgcttgtggcaaatctcttgcttctttccctcaaggctgtttttactcgactgccttaggtgggcttaggagctttgagaaccctaagaacaagatcactgccattcctgctagagaggaagaaatttggggagccaccttcaaggtggaaggagcagcagttcttgcacatggagagtgaaagaatcaagatccatctctcttaatatctaaactccaacagcaaacaaaataatgatgtagagaaaacaagaagctgttctatgagtttttttttttttttaaatgttatcaatggttggtgatgatgatgcgtgtagtgtgttctctcttttgtacaatccgtgtccgtctcttctgctgtttgtagtgactttgtcccaataagttatgtctcaaaactcaaaatctaccttctcttgatcctttttttatctcatgttcagatcttgtgtttcttcagtaagtcttgcaattaaaaaaaaaaaaaaaa

SEQ ID NO: 6154 - protein, 236 aa, Glycine max
  misc_feature: Ceres CLONE ID no. 1116014
  misc_feature: Ceres CDNA ID no. 29191217
  misc_feature: Homolog of GI Number: 7488440 NR Desc: aluminum
  misc_feature: Homolog of GI Number: 21280809 NR Desc: putative aluminium
  misc_feature: Homolog of GI Number: 34541994 NR Desc: Al
  misc_feature: Homolog of GI Number: 56606534 NR Desc: aluminum
  misc_feature: Homolog of GI Number: 13958130 NR Desc: aluminium induced protein
  misc_feature: Homolog of GI Number: 77548680 NR Desc: aluminium
  misc_feature: Homolog of GI Number: 77553672 NR Desc: aluminium
  misc_feature: Homolog of GI Number: 20340249 NR Desc: aluminum
  misc_feature: Homolog of GI Number: 53800524 NR Desc: COG0367: Asparagine synthase
  misc_feature: Useful for making plants with altered leaf shape eg curled leaves
  misc_feature: Useful for making plants with increased biomass and foliage
  misc_feature: Useful for making stronger plants
  misc_feature: Useful for modifying fruit shape and seed yield
MLGIFSGAIVSLPEELVAAGNRTPSPKTTGSVLVNKFVEKNPSAVSVQVGDYVQLAYSHHKESPLRPRSFGAKDEIFCLFQGSLDNLGSLKQQYGLAKNANEVLLVIEAYKTLRDRAPYPANHVVSHLSGDFAFVVFDKSTSTLFVASDQEGKVPLYWGITADGYVAFADDIELLKGACGKSLASFPQGCFYSTALGGLRSFENPKNKITAIPAREEEIWGATFKVEGAAVLAHGE

SEQ ID NO: 6155 - DNA, 685 bp, Glycine max
  misc_feature: Ceres CLONE ID no. 1116034
  misc_feature: Ceres CDNA ID no. 36703391
  CDS (3)..(359): REFERENCED BY SEQ ID NO: 6156
tcgccgcagctcgcccccgtctcccggatttcgccgccgccgccgctgctcgccgcccaagcctcctacccgtcgacgagatgacgaagcgcaccaagaaggctggaattgttggcaaatatggtacacgttatggtgccagtttgcgtaagcagatcaagaagatggaggtgtctcagcactccaagtacttctgtgagttctgcgggaagtttgctgtgaagaggaaagcagttggaatttggggatgcaaggactgtgggaaggtgaaggctggcggtgcttacaccatgaacactgccagtgcagtcactgtcaggagcaccatccgtcgcttgagggagcagactgaagcataagttgctaccagcagtgttttgtcctaaggaattatctgttttttgcagtttagacgatactttggattcagttctgttggctgtttagtcaagggtatctttgtacttggtgccatggatgtttttgttatggtattccccccatccttctgttgctgttgcctgatttactgtggattcttttgtgccttctgccatccgagctatcttgaccattaggaactggaatcgtgtctaagaattgcacaagcgaaaatgtggtcctccatttggttggttttcttttgaatgaggaacttcatgcttctataaaaaaaaaaaaaaaa

SEQ ID NO: 6156 - protein, 92 aa, Glycine max; identical to SEQ ID NO: 294
  misc_feature: Ceres CLONE ID no. 1116034
  misc_feature: Ceres CDNA ID no. 36703391
  misc_feature: null
  misc_feature: Useful for making plants with modulated cold sensitivity
  misc_feature (2)..(91): Pfam Name: Ribosomal_L37ae PFAM Desc: Ribosomal L37ae protein family
  misc_feature: Homolog of GI Number: 56202147 NR Desc: putative ribosomal protein L37a
  misc_feature: Homolog of GI Number: 34911166 NR Desc: putative 60S ribosomal protein L37a
  misc_feature: Homolog of GI Number: 50932741 NR Desc: putative 60S ribosomal protein L37a
  misc_feature: Homolog of GI Number: 58578274 NR Desc: 60S ribosomal protein L37a
  misc_feature: Homolog of GI Number: 4090257 NR Desc: ribosomal protein L37A
  misc_feature: Homolog of GI Number: 4741896 NR Desc: 60S ribosomal protein L37a
  misc_feature: Homolog of GI Number: 6016699 NR Desc: putative 60S ribosomal protein L37a
  misc_feature: Homolog of GI Number: 395077 NR Desc: ribosomal protein L37a
  misc_feature: Homolog of GI Number: 71042079 NR Desc: Chain D
  misc_feature: Homolog of GI Number: 7576200 NR Desc: protein synthesis initiation factor

SEQ ID NO: 6157 - DNA, 1122 bp, Glycine max
  misc_feature: Ceres CLONE ID no. 1116041
  misc_feature: Ceres CDNA ID no. 25447440
  CDS (95)..(946): REFERENCED BY SEQ ID NO: 6158
gttctgttcagtgtaactaaacacaaaccccaaaaaccaaaatcacaactcccaaagcaaaaacccaaatcccaaatgatagtagtaacatgagatgacagacgaccgcgtgcatccaatcccaaacctagctatgtctccggccaccgcccactggacctctgacgccatccacggcggacccctccgtcgtgtcgacctcgactccggcaccaacggctgggcctcccctcccggtgacctcttcctcctccgctcccccaattatttcaccaaacgccagaaatcacccgccggcgactacctcctctccccctccggtatggactggctcaaatcccaatccaaactcgacaacgtcctctcccggcccgacaaccgcatggcccaggccctccgccaggcccaggcccaaggcaaatccctcaaaagcttcatcttcgcagtcaaccttcaagtccctggaaaagaacatcacagcgcggtcttctacttctcaaccgacgaaccgataacctccggttcgctcctctcccggttcatcgagggcgacgacgcgttccgaaaccagcggttcaagctcgtgaaccggatcgtgaagggtccatggatcgtgaaaaaggctgtggggaattacagcgcttgcttattgggaaaggcgctgacgtgcaactatcacagaggaccaaactacttcgagattgacgtggacattgggagcagcgccatcgccaacgctatcctgcgcctcgcgctggggtatgttaccagcgtcaccatcgatatggggtttgttgtggaggcgcagagcgaggaggagctgccggagaggctcatcggagcggttagggtttgccagatggagatgtccgccgccaccgtcgtcgatgcccccaacgcgccgcgcggtaacaaggtcaatcacctaagcggtaacgacgagtaactaattgaaaaataataacaatgagttttttttttgttttacataaaaattactatttagattacttaatttgatttcaccaactgcttggtcctcgttcttggtgtaattttaggcttttttttttcggggagtaataaatattcactcaattcggtccaaaaaaaaaaaaaaaa

SEQ ID NO: 6158 - protein, 283 aa, Glycine max
  misc_feature: Ceres CLONE ID no. 1116041
  misc_feature: Ceres CDNA ID no. 25447440
  misc_feature: Homolog of GI Number: 18086359 NR Desc: AT5g45560/MFC19_23
  misc_feature: Homolog of GI Number: 42566947 NR Desc: pleckstrin homology / lipid-binding START domain-containing protein
  misc_feature: Homolog of GI Number: 57335420 NR Desc: START domain
  misc_feature: Homolog of GI Number: 57335418 NR Desc: START domain
  misc_feature: Homolog of GI Number: 42569411 NR Desc: pleckstrin homology lipid-binding START domain-containing protein
  misc_feature: Homolog of GI Number: 30694123 NR Desc: pleckstrin homology lipid-binding START domain-containing protein
  misc_feature: Homolog of GI Number: 188864 NR Desc: mucin
  misc_feature: Homolog of GI Number: 186396 NR Desc: mucin
MTDDRVHPIPNLAMSPATAHWTSDAIHGGPLRRVDLDSGTNGWASPPGDLFLLRSPNYFTKRQKSPAGDYLLSPSGMDWLKSQSKLDNVLSRPDNRMAQALRQAQAQGKSLKSFIFAVNLQVPGKEHHSAVFYFSTDEPITSGSLLSRFIEGDDAFRNQRFKLVNRIVKGPWIVKKAVGNYSACLLGKALTCNYHRGPNYFEIDVDIGSSAIANAILRLALGYVTSVTIDMGFVVEAQSEEELPERLIGAVRVCQMEMSAATVVDAPNAPRGNKVNHLSGNDE

SEQ ID NO: 6159 - DNA, 625 bp, Glycine max
  misc_feature: Ceres CLONE ID no. 1116140
  misc_feature: Ceres CDNA ID no. 40351659
  CDS (44)..(430): REFERENCED BY SEQ ID NO: 6160
aaccaaattaaagccctagtagactcaaaactcggaggcagagatgacggtagaagcagtgaaccctaaggcgtaccctttagctgattcccagctagcgataacaatcctcgatcttgttcagcaagctacgaattacaagcagctcaagaaaggagctaatgaagctaccaagacactgaaccgtggaatctctgagttcgtggttatggctgctgatgctgagcctctcgagattcttcttcatctccctcttctcgccgaagataagaatgtgccgtatgtgtttgtgccatcgaagcaagcccttggcagagcatgtggagtgacaagacccgtgattgcttgttcggttacctcaaacgaggctagccaattgaaatctcaaattcagcagctcaaggatgccattgagaagcacctcatctaatatttatggcaggttatgagtgatggtcttcgttgttttggtgcaaatgcagttttgaacaagaataactatttattttcatatatttggtttgttggtttgatgattttggtcttttcttgaaacgtaatgttgatgtaagaagccaaatgaagcatcaataaacacaaatatttcctaaaaaaaaaaaaaaaa

SEQ ID NO: 6160 - protein, 128 aa, Glycine max
  misc_feature: Ceres CLONE ID no. 1116140
  misc_feature: Ceres CDNA ID no. 40351659
  misc_feature (20)..(114): Pfam Name: Ribosomal_L7Ae PFAM Desc: Ribosomal protein L7Ae/L30e/S12e/Gadd45 family
MTVEAVNPKAYPLADSQLAITILDLVQQATNYKQLKKGANEATKTLNRGISEFVVMAADAEPLEILLHLPLLAEDKNVPYVFVPSKQALGRACGVTRPVIACSVTSNEASQLKSQIQQLKDAIEKHLI

SEQ ID NO: 6161 - DNA, 1237 bp, Glycine max
  misc_feature: Ceres CLONE ID no. 1116201
  misc_feature: Ceres CDNA ID no. 24766239
  CDS (231)..(926): REFERENCED BY SEQ ID NO: 6162
aacgtgccctctctcacctcctgcacgttctccctcttttctctcaccatcagaaagcgctttttttttttttttttcttctacctccgtttctccgtctccacatttctccttcacgaactcccgatttttcttcctcttcaatctcgtccctctctgtctctccatccttaaatatacacaacatcttctaaggagaaaggggttccgaaagttacgataaaataaaaatggatccaaacgcggtgaagtccactctctccaatctggcgtttggaaacgtaatggcggcagctgcccgtgattatcagaaggaattgcatgctcaagagaagacacatgcatcaagttcagtacatcaggaggttgaccttgacgagttaatggatgatcctgagttggaaaaattgcatgcagataggattgcagctcttaagaaagaagcagagaaacgggaggaatggaagaagaaaggtcatggagaatttagggaagtaaccgagggtgatttcttaggcgaagtcacaggaagtgaaaaagtgatttgtcacttctaccataaggagttctatagatgcaagataatggataagcatttaaagtctcttgcaccaaagcatatcgatacaaagttcatcaagcttgatgcagagaatgcaccattctttgttacaaaactggctatcaagactttaccctgcgtcatactgttcagacaaggagtagcagtagatagattggtaggatttcaagatgtgggaggtaaagatgattttaccacaagaacgctggaggctctgctgataaagaaaggtataattgaggtgaagaaagctgaggatgatgaagatgatgaatatcaagacagtacacgtagagttgtaagatcctccatgattgctggttctgattctgattctgattaaaattaatcagctggtggcattaaaagaagaatcctctgtttatcttcttcatatccttttggatttcgggcttgtataatctttgctgcacttgtggtttgtttgcttttgggaagtggtttgatgaatccatagcaatcatacagaagctatactgcgctacaactgttgtatgaacctgtccctgtaggaaattgctaacgtttctcgcatccgaggggtatcaaaagttagaacttcatttgtaacagtagaaattgatataggttttctaaaatggatttaattattgttcaaaaaaaaaaaaaaaa

SEQ ID NO: 6162 - protein, 231 aa, Glycine max
  misc_feature: Ceres CLONE ID no. 1116201
  misc_feature: Ceres CDNA ID no. 24766239
  misc_feature: Homolog of GI Number: 54287642 NR Desc: putative ATP
  misc_feature: Homolog of GI Number: 38051964 NR Desc: Txndc9 protein
  misc_feature: Homolog of GI Number: 52789353 NR Desc: ATP binding protein associated with cell differentiation
  misc_feature: Homolog of GI Number: 61861464 NR Desc:  similar to ATP binding protein associated with cell differentiation
  misc_feature: Homolog of GI Number: 82942320 NR Desc:  similar to thioredoxin domain containing 9
  misc_feature: Homolog of GI Number: 21105482 NR Desc: ES cell
  misc_feature: Homolog of GI Number: 49248541 NR Desc: thioredoxin domain containing 9
  misc_feature: Homolog of GI Number: 22208751 NR Desc: SPAC2F3.12c
  misc_feature: Homolog of GI Number: 23484524 NR Desc: Arabidopsis thaliana K1F13.6
  misc_feature: Homolog of GI Number: 2598194 NR Desc: ATP binding protein
MDPNAVKSTLSNLAFGNVMAAAARDYQKELHAQEKTHASSSVHQEVDLDELMDDPELEKLHADRIAALKKEAEKREEWKKKGHGEFREVTEGDFLGEVTGSEKVICHFYHKEFYRCKIMDKHLKSLAPKHIDTKFIKLDAENAPFFVTKLAIKTLPCVILFRQGVAVDRLVGFQDVGGKDDFTTRTLEALLIKKGIIEVKKAEDDEDDEYQDSTRRVVRSSMIAGSDSDSD

SEQ ID NO: 6163 - DNA, 1080 bp, Glycine max
  misc_feature: Ceres CLONE ID no. 1116208
  misc_feature: Ceres CDNA ID no. 29191218
  CDS (149)..(892): REFERENCED BY SEQ ID NO: 6164
agcactttcgccgctgctctccgctttcatagggtttatctctttcctcttcccctctcgcgcacggcagccggattccctaccgcaggcgagccaccacgccggccggagctcggagataaggtagttgtttagcaagcaatcgagaatgtcgtcggtgcagctctccggtgccggtgttgccacggtggccttcaacaacactggtctgcgcccctctcaggcgtcagcagtcagagtgtgctcatcgaggcgctcatctcgtagcctcgttgtcagggctgccactgtcgtcaccccgaagtatacatcactcaagcctctgggagacagagtgcttgtgaagcttagcgcagctgaggagaagaccattggtggaattttgcttccatcctccgcgcagtccaagcctcagggaggcgagattgttgctgttggagggggtagaaccattggggataagaaggtggaggtcagcataccgactggatctcaagttgtatattcaaagtatgctggtactgaggttgaatacaacaactccaagcatcttattatgaaagaggatgacatcataggtattcttgaatctgatgatgtcaaagacatgaagcctctcaatgaccggattctcatcaaggttgcagaggcttcagacaagactgaagctggtcttatcctcaccgagacaaccaaggagaagccatccattggaacagtcgtagctgttggtccgggctctcttgacgaggaaggcaagaggcagccattgccagtgtcaccaggcagcaccgtgctgtactccaagtacgcaggcggcgagttcaagggagctgatggcacgaactacattgtgttgagagtgtctgatgtgatggctgagctctcttaagtgtgtggtttattactttgtttcagttttgagttcacgatataggctagcatgagtggtaagattgctatgtgataaccacttgatgctgtttcggatgattacggaattgtacgagcaaacctgttgtctgggataaaaacatttactgaatttgtttacaaagggagccaaaaaaaaaaaaaaaa

SEQ ID NO: 6164 - protein, 247 aa, Glycine max
  misc_feature: Ceres CLONE ID no. 1116208
  misc_feature: Ceres CDNA ID no. 29191218
  misc_feature (153)..(246): Pfam Name: Cpn10 PFAM Desc: Chaperonin 10 Kd subunit
  misc_feature: Homolog of GI Number: 51090748 NR Desc: putative chaperonin 21 precursor
  misc_feature: Homolog of GI Number: 50915298 NR Desc: putative 20 kDa chaperonin
  misc_feature: Homolog of GI Number: 51090747 NR Desc: putative chaperonin 21 precursor
  misc_feature: Homolog of GI Number: 50660327 NR Desc: chloroplast chaperonin 21
  misc_feature: Homolog of GI Number: 17065646 NR Desc: putative chloroplast Cpn21 protein
  misc_feature: Homolog of GI Number: 3057150 NR Desc: chaperonin 10
  misc_feature: Homolog of GI Number: 7331143 NR Desc: chaperonin 21 precursor
  misc_feature: Homolog of GI Number: 21780187 NR Desc: cp10
  misc_feature: Homolog of GI Number: 51091339 NR Desc: putative chaperonin 21 precursor
  misc_feature: Homolog of GI Number: 51091814 NR Desc: putative chaperonin 21 precursor
MSSVQLSGAGVATVAFNNTGLRPSQASAVRVCSSRRSSRSLVVRAATVVTPKYTSLKPLGDRVLVKLSAAEEKTIGGILLPSSAQSKPQGGEIVAVGGGRTIGDKKVEVSIPTGSQVVYSKYAGTEVEYNNSKHLIMKEDDIIGILESDDVKDMKPLNDRILIKVAEASDKTEAGLILTETTKEKPSIGTVVAVGPGSLDEEGKRQPLPVSPGSTVLYSKYAGGEFKGADGTNYIVLRVSDVMAELS

SEQ ID NO: 6165 - DNA, 917 bp, Glycine max
  misc_feature: Ceres CLONE ID no. 1116266
  misc_feature: Ceres CDNA ID no. 40351660
  CDS (167)..(775): REFERENCED BY SEQ ID NO: 6166
aaaaataaataaataacaaaaacattcaccgtttaggtctctctctcgctctcgctcgtctttgttccgaagaagatcgctgaaaatactatcgccatattatccctttaccacgagcttctcgtttgattcgttgggagatcgatctagaaacgatactttagccatgaatcctgaatatgactacctgttcaagcttttgcttatcggtgactctggtgttggaaaatcttgcttgcttctaaggtttgctgatgattcttacctggatagctacatcagtaccattggtgttgactttaaaatccgcacagttgaacaagacggaaagacaatcaaactccagatttgggacacagcaggccaagaacgtttcaggaccatcaccagcagctactacagaggagctcatggaatcattgtcacctatgatgtcacggaccaagagagcttcaacaacgtcaaacagtggctgaatgaaatcgaccgttacgccagtgagaacgtgaacaagctactggttgggaacaaaaacgatctcacatcgcagaaggttgtatccactgagacagctcaggcttttgcagatgaactggggatccctttcttggaaacaagtgctaaaaatgcaaccaatgttgaagaagctttcatggccatgactgctgctattaagaccagaatggctagccaaccagctggaggtgccaagccaccgacggtcaatattcgcggacagccagtgaaccagcaatcaggctgttgctcatcttgattctattagtctcaagaagtctctttggatcataactcaccattataatcatttgtttgcattgcatgtaagacctctcaaattgacaactttcttttcctttcgttttatagcttttctcttcttaaaaaaaaaaaaaaaa

SEQ ID NO: 6166 - protein, 202 aa, Glycine max
  misc_feature: Ceres CLONE ID no. 1116266
  misc_feature: Ceres CDNA ID no. 40351660
  misc_feature: null
  misc_feature: Useful for making plants with altered Lignin content
MNPEYDYLFKLLLIGDSGVGKSCLLLRFADDSYLDSYISTIGVDFKIRTVEQDGKTIKLQIWDTAGQERFRTITSSYYRGAHGIIVTYDVTDQESFNNVKQWLNEIDRYASENVNKLLVGNKNDLTSQKVVSTETAQAFADELGIPFLETSAKNATNVEEAFMAMTAAIKTRMASQPAGGAKPPTVNIRGQPVNQQSGCCSS

SEQ ID NO: 6167 - DNA, 1215 bp, Glycine max
  misc_feature: Ceres CLONE ID no. 1116291
  misc_feature: Ceres CDNA ID no. 36707174
  CDS (2)..(1024): REFERENCED BY SEQ ID NO: 6168
cacaagctcacagaagccatcttgctccgttccagctcaggcgagcagcgaccaccttccggcgagggcagtgggcagcagcgatggagggcaaggaggaggacgtgcggctcggggcgaacaagtactcggagcgtcagcccatcggcacggcggcgcaggggtccgaggacaaggactacaaggagcccccgccggcgccgcttttcgagcccggcgagctcaagtcctggtccttctaccgcgccggcatcgccgagttcatggccaccttcctcttcctctacgtcaccatcctcaccgtgatggggtacagcggcgccgcctccaagtgcgccaccgtcggcatccagggcatcgcctggtccttcggcggcatgatcttcgccctcgtctactgcaccgccggcatctccggcgggcacatcaacccggcggtgaccttcgggctgttcctggcgaggaagctgtcgctgacccgggcggtgttctacatcatcatgcagtgcctgggcgccatctgcggcgccggcgtggtgaaggggttccagcagggcctgtacatgggcaacggcggcggcgccaacgtggtggcgcccggctacaccaagggctccggcctcggcgccgagatcatcggcaccttcgtcctcgtctacaccgtcttctccgccaccgacgccaagaggaacgccagggactcccacgttcccatcctcgccccgctgccaatcgggttcgccgtgttcctggtccacctggccaccatccccatcaccggcaccggcatcaacccggcgaggagcctcggcgcggccatcatctacaacagggagcacgcctggtcagaccactggatcttctgggtcggccccttcatcggcgccgcgctcgccgccgtctaccaccaggtggtcatcagagcgatcccgttcaagaccaagtcctaagctgctgttcttcctgctacaaagaagatgccaacccaacccgaagagcaaagctgcgtgttctgaatttctgatggggcggctatctcttcccgtcgtccgtgttactaccgtggaattccaatttgtcttccaagtttgatgtactactagtcttgctctgtattcacctgaaccggaacccagacttgtatgtaatctcatcagtactcagttgtgtgtgcaaatccaatcaatcaagtttattcatgtgtgcaaaaaaaaa

SEQ ID NO: 6168 - protein, 288 aa, Glycine max
  misc_feature: Ceres CLONE ID no. 1116291
  misc_feature: Ceres CDNA ID no. 36707174
  misc_feature (46)..(275): Pfam Name: MIP PFAM Desc: Major intrinsic protein
  misc_feature: Homolog of GI Number: 6692753 NR Desc: HvPIP1
  misc_feature: Homolog of GI Number: 7649312 NR Desc: aquaporin 2
  misc_feature: Homolog of GI Number: 2894534 NR Desc: aquaporin
  misc_feature: Homolog of GI Number: 4768911 NR Desc: plasma membrane MIP protein
  misc_feature: Homolog of GI Number: 13447795 NR Desc: plasma membrane integral protein ZmPIP1
  misc_feature: Homolog of GI Number: 22762044 NR Desc: plasma membrane intrinsic protein
  misc_feature: Homolog of GI Number: 29650725 NR Desc: plasma membrane intrinsic protein
  misc_feature: Homolog of GI Number: 542126 NR Desc: transmembrane protein
  misc_feature: Homolog of GI Number: 4388774 NR Desc: transmembrane protein
  misc_feature: Homolog of GI Number: 2696804 NR Desc: water channel protein
MEGKEEDVRLGANKYSERQPIGTAAQGSEDKDYKEPPPAPLFEPGELKSWSFYRAGIAEFMATFLFLYVTILTVMGYSGAASKCATVGIQGIAWSFGGMIFALVYCTAGISGGHINPAVTFGLFLARKLSLTRAVFYIIMQCLGAICGAGVVKGFQQGLYMGNGGGANVVAPGYTKGSGLGAEIIGTFVLVYTVFSATDAKRNARDSHVPILAPLPIGFAVFLVHLATIPITGTGINPARSLGAAIIYNREHAWSDHWIFWVGPFIGAALAAVYHQVVIRAIPFKTKS

SEQ ID NO: 6169 - DNA, 864 bp, Glycine max
  misc_feature: Ceres CLONE ID no. 1116321
  misc_feature: Ceres CDNA ID no. 29191690
  CDS (152)..(601): REFERENCED BY SEQ ID NO: 6170
acacgatcctcttcctctataaagcctcgcccccgcgacacagatgcacccagtcgcgcactgaaaccccccacgccatcatcgccccatcaacgcgcagctcgcgtaacatttgcaggccctcatcgtcccctcgaggtctccgtttgccatggcggaccagctcagcgaggagcagattggcgagttcaaggaggccttcagcctcttcgacaaggacggcgatggcagcatcaccaccaaggagcttggaaccgtgatgcgctcccttggccagaacccgaccgaggcagagctgcaggacatgatcaacgaggtggatgcggacggcaacggcaccatcgacttcccagagttcctgaacctgatggcccgcaagatgaaggacaccgactcagaggaggagctcaaggaggcgttccgtgtgttcgacaaggaccagaacggtttcatctctgcagcggagctccgccaggtgatgaccaacctcggggagaagctttccgaggaggaggtggaggagatggtccgcgaggccgacgtggatggcgacggccagatcaactacgacgagttcgtcaaggtcatgatggccaagtgaggaacaaccaccctctgaaataaccctttctattttcgtcgaataacgaaccgtctggcacgctgctggtactgacacttgttggctaggtgtagtcactgaggggagaagggccagatactattttttttgttctcttggtcacggacttctcctgtactttgctggatttggtgtttttcttggctgggttgcatcttggttcatgcttgttcggtttgttgaaagttatacactaattttgcgcaaaaaaaaaaaaaaaa

SEQ ID NO: 6170 - protein, 149 aa, Glycine max
  misc_feature: Ceres CLONE ID no. 1116321
  misc_feature: Ceres CDNA ID no. 29191690
  misc_feature (48)..(76): Pfam Name: efhand PFAM Desc: EF hand
  misc_feature: Homolog of GI Number: 747917 NR Desc: calmodulin
  misc_feature: Homolog of GI Number: 21616055 NR Desc: putative calmodulin
  misc_feature: Homolog of GI Number: 1755001 NR Desc: calmodulin TaCaM2
  misc_feature: Homolog of GI Number: 42374718 NR Desc: calmodulin
  misc_feature: Homolog of GI Number: 20190 NR Desc: calmodulin
  misc_feature: Homolog of GI Number: 1773321 NR Desc: calmodulin
  misc_feature: Homolog of GI Number: 4103961 NR Desc: calmodulin
  misc_feature: Homolog of GI Number: 29294049 NR Desc: calmodulin
  misc_feature: Homolog of GI Number: 50748592 NR Desc:  similar to calmodulin 1
  misc_feature: Homolog of GI Number: 76628526 NR Desc:  similar to calmodulin 1
MADQLSEEQIGEFKEAFSLFDKDGDGSITTKELGTVMRSLGQNPTEAELQDMINEVDADGNGTIDFPEFLNLMARKMKDTDSEEELKEAFRVFDKDQNGFISAAELRQVMTNLGEKLSEEEVEEMVREADVDGDGQINYDEFVKVMMAK

SEQ ID NO: 6171 - DNA, 547 bp, Glycine max
  misc_feature: Ceres CLONE ID no. 1116400
  misc_feature: Ceres CDNA ID no. 29191691
  CDS (42)..(380): REFERENCED BY SEQ ID NO: 6172
attttgcagcagtcttgttcgttttatcagccgacgagaaaatggtgaagggacgccaaggagaacgtgtcagactctacgttaggggaaccatcttgggatacaaaaggtccaagtccaaccagtacccaaacacatcccttatccagatcgaaggagtcaacactacagaggaggtaacatggtacaagggaaagaggatggcttacatctacaaggctaagaccaagaagaacggtagccactaccgttgcatctggggaaaggttaccaggcctcatggtaacagcggtgttgtccgtgccaaattcacatcgaacttgcctcctaagtccatgggaatgagggtcagagtcttcatgtatccgagcaacatatgaagaacagcatcaactttgagttagctgtggttttgtccactagttcgttgttttgtattttgatactgaaagcattttccgttctttgttttaagtgttttggtgattatctgaacgacttcaaaatcatgaatctggtttttgatcccagaaaaaaaaaaaaaaaa

SEQ ID NO: 6172 - protein, 112 aa, Glycine max
  misc_feature: Ceres CLONE ID no. 1116400
  misc_feature: Ceres CDNA ID no. 29191691
  misc_feature (12)..(106): Pfam Name: Ribosomal_L35Ae PFAM Desc: Ribosomal protein L35Ae
  misc_feature: Homolog of GI Number: 17104787 NR Desc: putative ribosomal protein
  misc_feature: Homolog of GI Number: 30102814 NR Desc: At1g41880
  misc_feature: Homolog of GI Number: 21593235 NR Desc: ribosomal protein L35a
  misc_feature: Homolog of GI Number: 13430186 NR Desc: ribosomal protein L33
  misc_feature: Homolog of GI Number: 50915390 NR Desc: putative ribosomal protein L35A
  misc_feature: Homolog of GI Number: 18092339 NR Desc: ribosomal protein L35A
  misc_feature: Homolog of GI Number: 14719290 NR Desc: ribosomal protein L35A
  misc_feature: Homolog of GI Number: 50932737 NR Desc: putative ribosomal protein L35A
  misc_feature: Homolog of GI Number: 55741076 NR Desc: rpl35A
  misc_feature: Homolog of GI Number: 65303423 NR Desc: 60S ribosomal protein l35a
  misc_feature: Useful for making ornamental plants with modified flowers
  misc_feature: Useful for making stronger plants
  misc_feature: Useful for sterility
MVKGRQGERVRLYVRGTILGYKRSKSNQYPNTSLIQIEGVNTTEEVTWYKGKRMAYIYKAKTKKNGSHYRCIWGKVTRPHGNSGVVRAKFTSNLPPKSMGMRVRVFMYPSNI

SEQ ID NO: 6173 - DNA, 632 bp, Glycine max
  misc_feature: Ceres CLONE ID no. 1116406
  misc_feature: Ceres CDNA ID no. 36706807
  CDS (57)..(467): REFERENCED BY SEQ ID NO: 6174
acatacaaaccttcccattctctagattgttcgtagcgactctgtttgatttcgaaatggctcgtaccaagcaaaccgcaaggaaatccaccggcggcaaagccccaagaaagcagctggcaacgaaagcagccagaaaatccgctccggcgaccggcggcgtgaagaagccacacagattccgtccaggaacggtggccttgagagagatcaggaagtaccagaagagcactgagcttctgatccgtaagcttcctttccagcgtctggttcgtgagatcgctcaggatttcaagacggatctaaggtttcagagcagcgcagtggcggctctacaggaagcagccgaggcttaccttgttgggttatttgaggacaccaatctctgtgcgattcatgcgaagagagtcactatcatgcctaaggatatccagctggctaggagaatccgtggtgaaagagcttgaagagttatgcgatctgcttctcggttttaactttcatgtgttagttaatgcgtcgtttatgtctagcctttgttaaaagagagtccctgaaggtgttcgacgaaatatcccaacgagcatatctcttgtttaataaaaacttatttgataaaaaaaaaaaaaaaa

SEQ ID NO: 6174 - protein, 136 aa, Glycine max; identical to SEQ ID NO: 358
  misc_feature: Ceres CLONE ID no. 1116406
  misc_feature: Ceres CDNA ID no. 36706807
  misc_feature (58)..(134): Pfam Name: Histone PFAM Desc: Core histone H2A/H2B/H3/H4
  misc_feature: Homolog of GI Number: 59799581 NR Desc: Histone H3
  misc_feature: Homolog of GI Number: 68441481 NR Desc:  similar to CG31613
  misc_feature: Homolog of GI Number: 1362108 NR Desc: histone H3 homolog
  misc_feature: Homolog of GI Number: 50960584 NR Desc: HIST2H3C protein
  misc_feature: Homolog of GI Number: 55775689 NR Desc: histone 3
  misc_feature: Homolog of GI Number: 166384 NR Desc: histone H3
  misc_feature: Homolog of GI Number: 122083 NR Desc: Histone H3
  misc_feature: Homolog of GI Number: 30061401 NR Desc: H3 histone
  misc_feature: Homolog of GI Number: 57098927 NR Desc:  similar to histone protein Hist2h3c1
  misc_feature: Homolog of GI Number: 76612873 NR Desc:  similar to H3 histone

SEQ ID NO: 6175 - DNA, 589 bp, Glycine max
  misc_feature: Ceres CLONE ID no. 1119683
  misc_feature: Ceres CDNA ID no. 29191692
  CDS (42)..(386): REFERENCED BY SEQ ID NO: 6176
aaaaaaccctagctttacctccgccaccaagcgcctccacaatgaagctcgtcagattcttgatgaagctgaacaacgagacggtgaccatcgagctcaagaatggtaccaccgtccacggcaccatcattggcgtcgacatcagcatgaatactcatctgaagactgtcaagctcacattgaaagggaagaatcctgttacccttgaccaccttagtgtgaggggaaacaacattcgatattacatccttcctgacagcttaaacctggagacgttgctggttgaggaaacaccaagggtgaagcctaagaagcctactgcagggaaacctatgggtcgtgggcgcggccgtggtcgtgggcgcggtcgtggcagggggcgctgagctatgttataccttggaaattttgcactgcatgcttgtgtgcagtgtaatctggtttcttacttgtacggagcaatattcttattagagccaagaagacgttgatattggctgtaccagctgttcttgatgtggaattatgttatgttgttggtgtttgactgatgttctgaagtgtgctagctttaaaaaaaaaaaaaaaa

SEQ ID NO: 6176 - protein, 114 aa, Glycine max
  misc_feature: Ceres CLONE ID no. 1119683
  misc_feature: Ceres CDNA ID no. 29191692
  misc_feature (5)..(70): Pfam Name: LSM PFAM Desc: LSM domain
  misc_feature: Homolog of GI Number: 50909887 NR Desc: putative small nuclear ribonucleoprotein D1 polypeptide 16kDa
  misc_feature: Homolog of GI Number: 50924966 NR Desc: OSJNBa0089K21.2
  misc_feature: Homolog of GI Number: 6466942 NR Desc: putative small nuclear ribonucleoprotein
  misc_feature: Homolog of GI Number: 21536940 NR Desc: small nuclear riboprotein Sm
  misc_feature: Homolog of GI Number: 83272157 NR Desc: putative small nuclear ribonucleoprotein D1
  misc_feature: Homolog of GI Number: 57089749 NR Desc:  similar to small nuclear ribonucleoprotein D1 polypeptide 16kDa
  misc_feature: Homolog of GI Number: 60832252 NR Desc: small nuclear ribonucleoprotein D1 polypeptide
  misc_feature: Homolog of GI Number: 49250837 NR Desc: MGC69276 protein
  misc_feature: Homolog of GI Number: 27545253 NR Desc: small nuclear ribonucleoprotein D1 polypeptide
  misc_feature: Homolog of GI Number: 32959908 NR Desc: small nuclear ribonucleoprotein Sm D1
MKLVRFLMKLNNETVTIELKNGTTVHGTIIGVDISMNTHLKTVKLTLKGKNPVTLDHLSVRGNNIRYYILPDSLNLETLLVEETPRVKPKKPTAGKPMGRGRGRGRGRGRGRGR

SEQ ID NO: 6177 - DNA, 1304 bp, Glycine max
  misc_feature: Ceres CLONE ID no. 1119687
  misc_feature: Ceres CDNA ID no. 25401122
  CDS (29)..(1108): REFERENCED BY SEQ ID NO: 6178
acactatttcttattattctctcacgtaatggcgtcttcagctcaagtgccaaacctcttcggcagtgccacctcagctccgccgccaaccccggcggcgcaccacgacaacatcatgtcctcctccgacgccgccgacgcgctctcctgcctcctccaccgcctcccgcccacgctctcccttcccacgcgcctcccctcgccttcctccgcagccgccacgtctcccccctccctctccctaaacgacgtattctcctgcgtttcaaaactcggttacgcgcaactcaccgatcactcagtcccctccgaactcgccaactcggccgagtcggaagcgcttgccctctttgacctttccaaagaacagaagaactctctctttcccaaaaactggcctctcggatacggcggcgacgacgaagacgaagacgagctcgccgagtcgttccgcttcgactcggcgtgttcgaccgagtcgaacgagttggcactcttttccctgcgcaagtttgcgcgcgaactggagatgctgggtttaaagatcgttgatgggttaacaaaggacttggggtgtgagaatccgcttggggatgacccgaaccggttctgttcggttctgtgggtttcggagtctctgtccgggaacaaatcgggtgggttttacccgtttgtaatcggattgcagtaccagataaggaatcagaaatactcattgctgtcggattcgggatgggtttctgtgctgccacacgtggactcgattttggtcactgttggtgacattgctcaggtgtggagcaatgacaagttaaagaaagtgagaggcagaccaatggccacagtgggagatgaaaatggttcacgctgcataacaatgtcattgctgataactcttccaacagatagcagagtggctccactccttcccaaggcaacctgcaacaaggaacaaaaggaagaagaagttgatgaagaaagcaatgatggtggtgaagaactagagaagagggtgttcaactcttttgattttgaggactatgcttggagagtgtaccatgaacgcatcattttcaaagatccattggataggtaccgtgttgcttagaagttgttgtttgatcttctcagccatcgatgttttgtgtgagattcattaatttgtcatgctagtgttagttagtctagtaagatttgaattttggatgggtgaaagggaaatatgagaggactgcaataatgagatgaatatcatatgctccatttatttattggattaaaaaaaaagaaaaaaaaaaaaaaaa

SEQ ID NO: 6178 - protein, 359 aa, Glycine max
  misc_feature: Ceres CLONE ID no. 1119687
  misc_feature: Ceres CDNA ID no. 25401122
  misc_feature: Homolog of GI Number: 34907964 NR Desc: B1088C09.30
  misc_feature: Homolog of GI Number: 188864 NR Desc: mucin
  misc_feature: Homolog of GI Number: 30725492 NR Desc: At3g24600
  misc_feature: Homolog of GI Number: 58388035 NR Desc: ENSANGP00000010844
  misc_feature: Homolog of GI Number: 186396 NR Desc: mucin
  misc_feature: Homolog of GI Number: 33150824 NR Desc: Ser/Arg
  misc_feature: Homolog of GI Number: 55586489 NR Desc:  similar to Ser/Arg
  misc_feature: Homolog of GI Number: 57043292 NR Desc:  similar to serine/arginine repetitive matrix 1
  misc_feature: Homolog of GI Number: 23274133 NR Desc: Serine/arginine repetitive matrix 1
  misc_feature: Homolog of GI Number: 42542379 NR Desc: serine/arginine repetitive matrix 1
MASSAQVPNLFGSATSAPPPTPAAHHDNIMSSSDAADALSCLLHRLPPTLSLPTRLPSPSSAAATSPPSLSLNDVFSCVSKLGYAQLTDHSVPSELANSAESEALALFDLSKEQKNSLFPKNWPLGYGGDDEDEDELAESFRFDSACSTESNELALFSLRKFARELEMLGLKIVDGLTKDLGCENPLGDDPNRFCSVLWVSESLSGNKSGGFYPFVIGLQYQIRNQKYSLLSDSGWVSVLPHVDSILVTVGDIAQVWSNDKLKKVRGRPMATVGDENGSRCITMSLLITLPTDSRVAPLLPKATCNKEQKEEEVDEESNDGGEELEKRVFNSFDFEDYAWRVYHERIIFKDPLDRYRVA

SEQ ID NO: 6179 - DNA, 960 bp, Glycine max
  misc_feature: Ceres CLONE ID no. 1119749
  misc_feature: Ceres CDNA ID no. 25447292
  CDS (3)..(701): REFERENCED BY SEQ ID NO: 6180
aaaactcactcacactctctctactgctagattcgacgattcccgaagtgccttcctcctcctcctccttcttcccctctaatcggatccaacacccttctctactcttcacttttcgctctctttctctacatagtttctttttcactctcccattcttcttttttaagcaacaacaacctcattcctcggatcctaagaaaatgggaaccagagtgtggtgttgtttcatgatgttcttcctctctctcaatgctcttgcaatagcattggaagatcacaacctcaaaacgacgtccagggatgacatcaagtgcaccccatgtggccaagttccctccccgccgccaccctctccgccgccgccagcagctccaaccaccacctactgccctccgcctccgtcgcctccaagctccggcggtggtggtgcttactattactctccgccgccactctctcaatatatctactcttctcccccgccgccggcgtccaccggcggcggtggtggcggcgtttactactacccaccgccgagagggtactacccaacgccgccgcctcccaacccaattgtgccttatttcccgttttactaccatacccctccgccgccttccacggcggcgcctccgccggtgaaaggctcgttggtctgtgcaatttcgttcttaactctttttattgcatttctttaataggaagaaaaaaaaaaaaaaggggaaattgtggaaataagtgcacaaattagcagatcttgggaagtgaaagtgaggtgagtccaagcaaggacagtgtgcttatttcccattttgcccctgaacttgttacaatttctttcaagtatcatatgataatgataagaatcacttcttagtggtgactttaatgtaggttgatctgcaatttgttgacaatttgtaattgtatctagtcttttgaaaaaaaaaaaaaaaa

SEQ ID NO: 6180 - protein, 156 aa, Glycine max
  misc_feature: Ceres CLONE ID no. 1119749
  misc_feature: Ceres CDNA ID no. 25447292
  misc_feature: Homolog of GI Number: 37202016 NR Desc: At4g16140
  misc_feature: Homolog of GI Number: 34894480 NR Desc: OJ1116_C07.3
  misc_feature: Homolog of GI Number: 52077531 NR Desc: extensin like protein
  misc_feature: Homolog of GI Number: 791150 NR Desc: extensin
  misc_feature: Homolog of GI Number: 1345537 NR Desc: extensin
  misc_feature: Homolog of GI Number: 100209 NR Desc: extensin
  misc_feature: Homolog of GI Number: 3204132 NR Desc: extensin
  misc_feature: Homolog of GI Number: 81869 NR Desc: hydroxyproline
  misc_feature: Homolog of GI Number: 1015937 NR Desc: extensin class 1 protein
  misc_feature: Homolog of GI Number: 4033606 NR Desc: Extensin
  misc_feature: Useful for increasing chlorophyll and photosynthetic capacity
  misc_feature: Useful for making plants with increased biomass
  misc_feature: Useful for making plants with increased biomass and foliage
  misc_feature: Useful for sterility
MMFFLSLNALAIALEDHNLKTTSRDDIKCTPCGQVPSPPPPSPPPPAAPTTTYCPPPPSPPSSGGGGAYYYSPPPLSQYIYSSPPPPASTGGGGGGVYYYPPPRGYYPTPPPPNPIVPYFPFYYHTPPPPSTAAPPPVKGSLVCAISFLTLFIAFL

SEQ ID NO: 6181 - DNA, 982 bp, Glycine max
  misc_feature: Ceres CLONE ID no. 1119766
  misc_feature: Ceres CDNA ID no. 25446726
  CDS (90)..(650): REFERENCED BY SEQ ID NO: 6182
acatcgagtccgagaagcattcctagctagaagaaggaaatcacttttcactttcgggctatttgctttcttagggcatctctaacaatatggccaaatccactttctttgtctgccttaacctttcattactcttctctctagtcacagccacttactactcaagtttaaccccaacacttttgggttttcgcgaggagaagttcacccacctccacttcttcttccatgatgtcgtgtcgggcccaaagcccagcatggtgtttatcgccgagcccaacgggaaagcgaaggatgcccttccgttcggaaccgttgtggcgatggacgaccctttaaccgtgggccccgaacaggactcaaaacttgtgggaaaagcccaagggatttacacttcgatatcacaggaagagatgggactaatgatggtgatgacgatggcattcaccaatggagatttcaacggcagcaccatcagcgtgttggggaggaacatgatcatgagtgaacctgttagggaaatggctattgttggtggcactggagcttttaggtttgcacgtggctacgctcaagccaggttttactctgttgatttcaccaaaggagatgctatcgtggaatacgatgtattcgtgaaccattattgagtcctacgtattagtttttattggtttataataaaagaacaaaagatagaattattgtagaacaaaaagaatgagtaattaaccagtagtagttttggtccaagggtgatagatgcttagaagtccaccacacacctttgcataagacttgaatttctttgagtctttgtagtaagctcctaatgtcattttcatgacattattgttagtcccgcctcctgatcgatgttaccttcttatctttttcgttgtgaagagtaatgatatactggatctccttaatacagagatttatattcttgaaaattaatgaaattaaaaaaaaaaaaaaa

SEQ ID NO: 6182 - protein, 186 aa, Glycine max
  misc_feature: Ceres CLONE ID no. 1119766
  misc_feature: Ceres CDNA ID no. 25446726
  misc_feature (14)..(185): Pfam Name: Dirigent PFAM Desc: Dirigent
  misc_feature: Homolog of GI Number: 71040679 NR Desc: disease resistance
  misc_feature: Homolog of GI Number: 51971026 NR Desc: putative disease resistance response protein
  misc_feature: Homolog of GI Number: 6227011 NR Desc: F12P19.3
  misc_feature: Homolog of GI Number: 62734190 NR Desc: F12P19.3
  misc_feature: Homolog of GI Number: 62734184 NR Desc: At5g42500
  misc_feature: Homolog of GI Number: 4803932 NR Desc: putative disease resistance response protein
  misc_feature: Homolog of GI Number: 62734181 NR Desc: At5g42500
  misc_feature: Homolog of GI Number: 4803933 NR Desc: putative disease resistance response protein
  misc_feature: Homolog of GI Number: 62734201 NR Desc: At3g13650
  misc_feature: Homolog of GI Number: 62734205 NR Desc: disease resistance response protein/dirigent protein
MAKSTFFVCLNLSLLFSLVTATYYSSLTPTLLGFREEKFTHLHFFFHDVVSGPKPSMVFIAEPNGKAKDALPFGTVVAMDDPLTVGPEQDSKLVGKAQGIYTSISQEEMGLMMVMTMAFTNGDFNGSTISVLGRNMIMSEPVREMAIVGGTGAFRFARGYAQARFYSVDFTKGDAIVEYDVFVNHY

SEQ ID NO: 6183 - DNA, 508 bp, Glycine max
  misc_feature: Ceres CLONE ID no. 1119767
  misc_feature: Ceres CDNA ID no. 25446521
  CDS (80)..(238): REFERENCED BY SEQ ID NO: 6184
aattgaaattgaagaaacggtgtttctagggttcgctttcgcagttgagatttgagaattgactttgagaattggaaaaatggccggtttaccagcgaggatccgtctccaacccaccgacgtcaaagccgccgccttgtggggcgtcactgccgtcaccggcgctctctacctcgttcagccatggggatggttgaagaagacattcttggagaagccagatcctgagcaaaaatgagttggcatctgagagagtgatttgaattttttgatcatgcaaaggatgggtcaaagaataacagttgaataatgttattttctgctgaggtcttctcgcacctgtattgcgttctgaatttagatattaatttttaatgttctgtgctggttttcacttggagattttctgttttaaatcatcttccttctggctcagccatgttgaatgagtgaactacagaatttatggcaataggattctttgctgaggataaaaaaaaaaaaaaaa

SEQ ID NO: 6184 - protein, 52 aa, Glycine max
  misc_feature: Ceres CLONE ID no. 1119767
  misc_feature: Ceres CDNA ID no. 25446521
  misc_feature: Homolog of GI Number: 633683 NR Desc: cytochrome c reductase subunit
MAGLPARIRLQPTDVKAAALWGVTAVTGALYLVQPWGWLKKTFLEKPDPEQK

SEQ ID NO: 6185 - DNA, 531 bp, Glycine max
  misc_feature: Ceres CLONE ID no. 1119798
  misc_feature: Ceres CDNA ID no. 35383359
  CDS (66)..(296): REFERENCED BY SEQ ID NO: 6186
gggattgtttctgtgttttctaacaagcaatggctatgagatcgtgggtgagtcgaggaggatccatgactcgtttgatggactcaacaaatcgaggggctttgagtcggttcttgagcgacaagggtcgcattctcagcgaggaggaacaggccaaagagaatgtctacatccagaaatgggagagggagaggttggagaaacagaagcaactgtctgagaaggccaaggctctcacggacaaagatgcttctgctgctgctcataagaaacctgaaggtgctcaaaaggactgagtttatctttcacacaacccgtcaaggtcactttgtgggaaataagcatggagaataaaacacattgaccctgagtgaactttggtctttgtatagattgtgtttcttgtttatttgtagtttcgtgacggatgaaaccatgccattgcatccaccaaacttggtacgtttgttatgaacttgtgatgtaatcctttccagtaaattttctcttctgcgaaaaaaaaaaaaaaaa

SEQ ID NO: 6186 - protein, 76 aa, Glycine max
  misc_feature: Ceres CLONE ID no. 1119798
  misc_feature: Ceres CDNA ID no. 35383359
  misc_feature: Homolog of GI Number: 50948469 NR Desc: putative F1F0
  misc_feature: Homolog of GI Number: 28416549 NR Desc: At5g04750
  misc_feature: Homolog of GI Number: 5106371 NR Desc: F1F0
  misc_feature: Homolog of GI Number: 9758450 NR Desc: F1F0
  misc_feature: Homolog of GI Number: 1096930 NR Desc: H ATPase inhibitor
MTRLMDSTNRGALSRFLSDKGRILSEEEQAKENVYIQKWERERLEKQKQLSEKAKALTDKDASAAAHKKPEGAQKD

SEQ ID NO: 6187 - DNA, 588 bp, Glycine max
  misc_feature: Ceres CLONE ID no. 1119815
  misc_feature: Ceres CDNA ID no. 40351661
  CDS (24)..(410): REFERENCED BY SEQ ID NO: 6188
agaacacaagaagccacacaaagatgcagatcttcgtgaaaaccctgaccgggaagaccatcaccctcgaggtcgagtcctccgacaccatcgataatgtcaaggccaagatccaagacaaagaaggtatccctccggatcagcagcgattgatcttcgctggaaaacagctcgaagatggccgtactctggctgactacaacatccagaaagaatccacccttcatcttgtgttgaggcttaggggaggaatcatcgagccttctttgatggcgttggctcgcaagtacaaccaagacaagatgatctgccgcaagtgctatgcacgtcttcacccgagggctgtaaactgcaggaagaagaagtgtggccatagcaaccagttgaggcccaagaagaagatcaagtagactctgttcaaggaactatctgctggcttgcttgactcttttttttctttgccttcccgagttgttttgtttcactgaatttttatgttatcttcaaagattatatcagtaaaaggatttgttgatctgcttatgctgaattaattatttgctttctttatcaaaaaaaaaaaaaaaa

SEQ ID NO: 6188 - protein, 128 aa, Glycine max; identical to SEQ ID NO: 3956
  misc_feature: Ceres CLONE ID no. 1119815
  misc_feature: Ceres CDNA ID no. 40351661
  misc_feature (1)..(74): Pfam Name: ubiquitin PFAM Desc: Ubiquitin family
  misc_feature (77)..(128): Pfam Name: Ribosomal_L40e PFAM Desc: Ribosomal L40e family

SEQ ID NO: 6189 - DNA, 573 bp, Glycine max
  misc_feature: Ceres CLONE ID no. 1119830
  misc_feature: Ceres CDNA ID no. 29191219
  CDS (59)..(370): REFERENCED BY SEQ ID NO: 6190
aattcaaaccaaaatcccaaatcctcaaattcgatttgtaccaaattttcttcacaaaatgtctggtcgtgggaaaggtggcaagggtttgggaaagggaggtgccaagaggcacagaaaagttcttcgtgataacattcaaggtatcacgaaacctgcgattcgtaggttagcgagaagaggtggcgttaagaggatcagtggtttgatctatgaggaaaccagaggagttctgaagattttcttggagaacgtgattcgagatgctgtgacctacaccgagcacgctaggaggaagacggtgactgccatggatgtggtttatgcgctcaagaggcagggaaggaccctctatggtttcggaggctgaatgattgattcttagtattattaaattatgttgcaggatataatattatgcctgttcttctgaaattcggtgtgatgtttagtttagattcgttctgtaacatatgaatcttcaaaggttctgttcggcacagaaaatgtactactttaattgaaattaaaatgaaggagcagcgttttcgtggtgcaaaaaaaaaaaaaaaa

SEQ ID NO: 6190 - protein, 103 aa, Glycine max; identical to SEQ ID NO: 8
  misc_feature: Ceres CLONE ID no. 1119830
  misc_feature: Ceres CDNA ID no. 29191219
  misc_feature (66)..(92): Pfam Name: TAF PFAM Desc: TATA box binding protein associated factor
  misc_feature: Homolog of GI Number: 62648434 NR Desc:  similar to germinal histone H4 gene
  misc_feature: Homolog of GI Number: 68441405 NR Desc:  similar to histone H2A
  misc_feature: Homolog of GI Number: 56798269 NR Desc: histone H4
  misc_feature: Homolog of GI Number: 27692935 NR Desc: Hist1h4i protein
  misc_feature: Homolog of GI Number: 55626084 NR Desc:  similar to Histone H2A.1
  misc_feature: Homolog of GI Number: 57106967 NR Desc:  similar to germinal histone H4 gene
  misc_feature: Homolog of GI Number: 55667113 NR Desc:  similar to germinal histone H4 gene
  misc_feature: Homolog of GI Number: 61834317 NR Desc:  similar to germinal histone H4 gene
  misc_feature: Homolog of GI Number: 74004256 NR Desc:  similar to germinal histone H4 gene
  misc_feature: Homolog of GI Number: 27692960 NR Desc: Hist1h4h protein

SEQ ID NO: 6191 - DNA, 723 bp, Glycine max
  misc_feature: Ceres CLONE ID no. 1119928
  misc_feature: Ceres CDNA ID no. 40351662
  CDS (27)..(554): REFERENCED BY SEQ ID NO: 6192
gcagccaattctcccgtttagcagcaatggtgaagtactctcaagaacccgacaatcagaccaagtcttgtaaggctagaggatccgaccttagggttcacttcaagaacacccgtgaaacagcgcacgccatcaggaagctaccattgctcaaggcgaagaggtaccttgaagatgtgatagctcacaagcaagccattcccttcacccgtttctgcagaggtgttggaaggactgcccaagccaagaacaggcactctaatggtcagggacgttggcctgcgaagtctgctcagttcgttcttgatttgcttaagaacgctgagagcaatgctgaggtgaaaggtttggatgttgatgccctcttcatatcacacatccaagtgaaccaggccgcaaagcaaaggagaaggacttaccgtgcccacggaagaatcaatccttacatgtcaaacccatgccacattgagttgattttgtctgagaaagaagagtctgtcaagaaagagccggagacgcagttggcagctaagtctaagaaatcagcagcttaagctttctttgttttttttagtctcctttttgtgttgttgaaagagattttgtttcatttttctccatcttgtcaagacgatagatatgttttttgttggatcttttgttcagtgttgctgtttgatgatggttactagttccgctaagtttataaaaaaaaaaaaaaaa

SEQ ID NO: 6192 - protein, 175 aa, Glycine max
  misc_feature: Ceres CLONE ID no. 1119928
  misc_feature: Ceres CDNA ID no. 40351662
  misc_feature (17)..(153): Pfam Name: Ribosomal_L22 PFAM Desc: Ribosomal protein L22p/L17e
MVKYSQEPDNQTKSCKARGSDLRVHFKNTRETAHAIRKLPLLKAKRYLEDVIAHKQAIPFTRFCRGVGRTAQAKNRHSNGQGRWPAKSAQFVLDLLKNAESNAEVKGLDVDALFISHIQVNQAAKQRRRTYRAHGRINPYMSNPCHIELILSEKEESVKKEPETQLAAKSKKSAA

SEQ ID NO: 6193 - DNA, 1077 bp, Glycine max
  misc_feature: Ceres CLONE ID no. 1119930
  misc_feature: Ceres CDNA ID no. 35383360
  CDS (63)..(839): REFERENCED BY SEQ ID NO: 6194
aaaaaatttcaaaccaccactcagatccttagacgaagaacaaaggattgttgaaatcgaagatgtcatcatcatcacgtgaagagaatgtgtacatggcgaagctagcggagcaagccgagcgttacgaagagatggtggagttcatggagaaagttgccaaatctgttgacaacgaagagctcacagtcgaagagaggaaccttctctccgtcgcttacaagaacgtgattggagcgaggagggcttcgtggaggatcatctcttccatcgagcagaaggaagagagcaaagggaacgaggatcacgttgctatcatcaaggactacaggggcaagatcgaagctgagcttagcaagatctgcgatggaatcttgaatgttcttgaagctcatctcattccctctgcttcgcctgctgagtctaaagtgttttacctgaagatgaagggagattatcacaggtatcttgctgagtttaaggctggcaacgagaggaaagatgctgctgaaagcactttggttgcgtacaagtctgctcaggacattgccactgctgagttggctcccactcacccgatcaggcttggtcttgcactcaacttctctgtgttttactatgagatccttaactcccctgaccgtgcctgcagcctcgccaagcaggcttttgatgaagcaatcgctgagttggacacgttgggtgaggaatcgtacaaggacagtacactgatcatgcagcttctcagggacaatctcactctctggacttcggacatgacagacgaagcaggagatgagataaaggagacgtcgaagccagaaggtgctgcagagtaaagctgaagactgaggaagtggttttatcaaggtataaacttcctagaaggttatgtgataattctgagtgagggatggtagctcagaactcgtaccagataacacttttattgtttgttttgtttgtttgaaaaccactttgcgaatttgcgattgattcctcctttaggttcctcgaaattttctatttttcagtgaaataaaaacctgcagtctgctcttaaaaaaaaaaaaaaaa

SEQ ID NO: 6194 - protein, 258 aa, Glycine max
  misc_feature: Ceres CLONE ID no. 1119930
  misc_feature: Ceres CDNA ID no. 35383360
  misc_feature: Useful for making plants with modulated growth and phenotype characteristics
  misc_feature: null
  misc_feature: The sequence is a functional homolog of  SEQ ID NO 1777 in the  11/479,226 US patent application
  misc_feature: The sequence is a functional homolog of  SEQ ID NO 2350 in the  10/374,780 US patent application
  misc_feature: The sequence is a functional homolog of  SEQ ID NO 342 in the  10/412,699 US patent application
  misc_feature: The sequence is a functional homolog of  SEQ ID NO 344 in the  10/412,699 US patent application
  misc_feature: The sequence is a functional homolog of  SEQ ID NO 782 in the  11/479,226 US patent application
  misc_feature: The sequence is a functional homolog of  SEQ ID NO 786 in the  11/479,226 US patent application
  misc_feature: The sequence is a functional homolog of  SEQ ID NO 789 in the  11/479,226 US patent application
  misc_feature: The sequence is a functional homolog of  SEQ ID NO 790 in the  10/225,066 US patent application
  misc_feature: The sequence is a functional homolog of  SEQ ID NO 797 in the  11/479,226 US patent application
  misc_feature: The sequence is a functional homolog of  SEQ ID NO 801 in the  11/479,226 US patent application
  misc_feature: The sequence is a functional homolog of  SEQ ID NO 805 in the  11/479,226 US patent application
  misc_feature: Useful for making plants with modulated drought sensitivity
  misc_feature (6)..(243): Pfam Name: 14 PFAM Desc: 14
  misc_feature: Homolog of GI Number: 20334752 NR Desc: AT5g16050/F1N13_190
  misc_feature: Homolog of GI Number: 166717 NR Desc: GF14 psi chain
  misc_feature: Homolog of GI Number: 79329220 NR Desc: GRF3
  misc_feature: Homolog of GI Number: 55375985 NR Desc: 14
  misc_feature: Homolog of GI Number: 8515888 NR Desc: 14
  misc_feature: Homolog of GI Number: 1575725 NR Desc: SGF14A
  misc_feature: Homolog of GI Number: 44917151 NR Desc: 14
  misc_feature: Homolog of GI Number: 44917153 NR Desc: 14
  misc_feature: Homolog of GI Number: 2921512 NR Desc: GF14 protein
  misc_feature: Homolog of GI Number: 6957715 NR Desc: putative 14
MSSSSREENVYMAKLAEQAERYEEMVEFMEKVAKSVDNEELTVEERNLLSVAYKNVIGARRASWRIISSIEQKEESKGNEDHVAIIKDYRGKIEAELSKICDGILNVLEAHLIPSASPAESKVFYLKMKGDYHRYLAEFKAGNERKDAAESTLVAYKSAQDIATAELAPTHPIRLGLALNFSVFYYEILNSPDRACSLAKQAFDEAIAELDTLGEESYKDSTLIMQLLRDNLTLWTSDMTDEAGDEIKETSKPEGAAE

SEQ ID NO: 6195 - DNA, 882 bp, Glycine max
  misc_feature: Ceres CLONE ID no. 1119939
  misc_feature: Ceres CDNA ID no. 25892491
  CDS (82)..(612): REFERENCED BY SEQ ID NO: 6196
aaaaaatcaaaagcttttagttttctatatcactctcaactttactcctcttcaatcagttgcatattctttgctattccaatggccactgttgaggttgtgtcagccaaggttgccctcccagaggacacaaaagaggcatcattgaaggttgacgaggagaagaacacagaagaagttgttgagactccaacaccagaaactgtagtcactgagcaaaccaaggaggaaagtactgaggccccacgacctgcagcttcagaagacaagccctcggttgaagttcagactaaagaggtggcagaggaagttgtgtctgagaccgtcacacaagagccaacagttgagaaacaagaagctgctgagggaacaaaagaaaatgccgatcctgctgagattaagacaccagaagctgcagaagatgttaatgttaaggaagagaaagaagctgaggctgaagctaaggaggaagaggccccggcagagaaaagtgaggagaaggttgagacagaagggtcagctgaaaagaaagaggaggaagtgattgcagaagctgaagctgagaagaaggaggaggtcacagtcacagacacagaggctccaacagagtaaaagaatgtgaagaggggaaatgtgcagtttaagtgagtgtttgagagggtatttttttcttagttgcatcgtgtcttgttgctccatgcatgtcttttctttgtttagtggtctaataaaaagtctagctagggaagggatgagtgatgcgaatgccaaccactcagtacaagaaccacatggcatgtagtctttcaatctgatctatggggtgtgcatggctagctctccatccaatgaattatgttatggtcaaaaaaaaaaaaaaaa

SEQ ID NO: 6196 - protein, 176 aa, Glycine max
  misc_feature: Ceres CLONE ID no. 1119939
  misc_feature: Ceres CDNA ID no. 25892491
  misc_feature: Homolog of GI Number: 2367429 NR Desc: Nlj21
  misc_feature: Homolog of GI Number: 2467082 NR Desc: ag13
  misc_feature: Homolog of GI Number: 21585695 NR Desc: allergenic
  misc_feature: Homolog of GI Number: 7406667 NR Desc: putative ripening
  misc_feature: Homolog of GI Number: 7406665 NR Desc: putative ripening
  misc_feature: Homolog of GI Number: 9049359 NR Desc: vacuolar calcium binding protein
  misc_feature: Homolog of GI Number: 37788142 NR Desc: glutamic acid
  misc_feature: Homolog of GI Number: 21483 NR Desc: induced stolon tip protein
  misc_feature: Homolog of GI Number: 2133786 NR Desc: NF
  misc_feature: Homolog of GI Number: 68247618 NR Desc: similar to AAA ATPase containing von Willebrand factor type A
MATVEVVSAKVALPEDTKEASLKVDEEKNTEEVVETPTPETVVTEQTKEESTEAPRPAASEDKPSVEVQTKEVAEEVVSETVTQEPTVEKQEAAEGTKENADPAEIKTPEAAEDVNVKEEKEAEAEAKEEEAPAEKSEEKVETEGSAEKKEEEVIAEAEAEKKEEVTVTDTEAPTE

SEQ ID NO: 6197 - DNA, 780 bp, Glycine max
  misc_feature: Ceres CLONE ID no. 1120007
  misc_feature: Ceres CDNA ID no. 29191775
  CDS (20)..(583): REFERENCED BY SEQ ID NO: 6198
aaagtcgacagcacaagccatgggtatcgatcttatcgcgggaggtaagagcaagaagaccaaaaggactgctccaaagtccgatgatgtctacctcaagcttctcgtcaagctataccggtttttggtaaggagaaccggcagcaagttcgatgctgtgatccttaagaggctttttatgagcaaagtcaacaaagcccctctttcactctccaagctcgttgagttcatgaagggaaaggatggtaagattgctgtgttggttgggacaataactgacgatttgagagtgcatgagattcctgccatgaaggttactgccttgaggtttacagagagggctagggctaggatcgagaaagctggtggagagtgcttaacattcgaccagcttgctctcgttgctccgttgggacagaacacggttctacttagaggaccaaagaactctcgtgaagcagtgaagcactttggtcttgctcctggtgtgccacacagccactccaagccctatgttaggtctaagggaaggaagtttgagaaagccagaggaaagcgaaagagtcgtggtttcaaggtctaagaagaggtctctactgtttcgacggggtgttatttcgttatggttgctttcagtatagcagttttgctagtgaactcatgtgttcctcttttcctattccagacattgttttatctgtcttttcgtcctaaacgacaattaaatgttttgcttaataacattttgagaatttactgccgccaaaaaaaaaaaaaaaa

SEQ ID NO: 6198 - protein, 187 aa, Glycine max
  misc_feature: Ceres CLONE ID no. 1120007
  misc_feature: Ceres CDNA ID no. 29191775
  misc_feature (98)..(117): Pfam Name: L15 PFAM Desc: Ribosomal protein L15
  misc_feature: Homolog of GI Number: 6714451 NR Desc: putative 60S ribosomal protein L18
  misc_feature: Homolog of GI Number: 606970 NR Desc: cytoplasmic ribosomal protein L18
  misc_feature: Homolog of GI Number: 23397141 NR Desc: putative 60S ribosomal protein
  misc_feature: Homolog of GI Number: 34897628 NR Desc: cytoplasmic ribosomal protein L18
  misc_feature: Homolog of GI Number: 57471708 NR Desc: ribosomal protein L18
  misc_feature: Homolog of GI Number: 25295214 NR Desc: 60S ribosomal protein L18
  misc_feature: Homolog of GI Number: 3021348 NR Desc: ribosomal protein L18
  misc_feature: Homolog of GI Number: 50939929 NR Desc: putative cytoplasmic ribosomal protein L18
  misc_feature: Homolog of GI Number: 28798549 NR Desc: 60S ribosomal protein
  misc_feature: Homolog of GI Number: 61654648 NR Desc: L18
MGIDLIAGGKSKKTKRTAPKSDDVYLKLLVKLYRFLVRRTGSKFDAVILKRLFMSKVNKAPLSLSKLVEFMKGKDGKIAVLVGTITDDLRVHEIPAMKVTALRFTERARARIEKAGGECLTFDQLALVAPLGQNTVLLRGPKNSREAVKHFGLAPGVPHSHSKPYVRSKGRKFEKARGKRKSRGFKV

SEQ ID NO: 6199 - DNA, 851 bp, Glycine max
  misc_feature: Ceres CLONE ID no. 1120036
  misc_feature: Ceres CDNA ID no. 40351663
  CDS (57)..(677): REFERENCED BY SEQ ID NO: 6200
atcatttctctcgtctcgccgcaaccttttctctgacattcatctgagttgaagaaatgaagcacaacaatgtcatccccaatggtcatttcaagaagcactggcagaactatgtcaagacttggttcaaccagcctgccaggaaaaccaggagaagagttgcgagacaaaagaaggctgtgaagatcttcccccgtcctactgctggacctcttcgccctgttgtacacggtcagactcttaagtacaacatgaaggtcagaaccggtaaaggtttcactcttgaagagctcaaggctgctggaatccccaagaagttggcaccaaccattggtatctctgttgaccatcgccgcaagaacagatctctcgagggtcttcagtccaatgtccagaggctcaaaacctacaaggctaagttggtcatcttcccgcgtcgtgccaggaaggtcaaggctggtgattctactgcagaagagttggccaatgccactcaagtccaaggggactacatgcctattgtccgtgagaagccaacaatggagcttgtgaagctgacctctgagatgaaatcagtcaaggcttttgacaagatccgtctggagcgcacaaacaagagacatgccggtgctagagccaagagagctgctgatgctgagaaagaagagaagaagtgagagaagcactttatctcttgtcaacgtttgaatcagtttttttttgtgtatcagactctgttttgtttctacttcagagctttatccttcaaagattttgctgctacttggtttatctggatttatggaaaaaaaatcatttttcacatcaaaaaaacaaaaaaaaaaaaaaaa

SEQ ID NO: 6200 - protein, 206 aa, Glycine max
  misc_feature: Ceres CLONE ID no. 1120036
  misc_feature: Ceres CDNA ID no. 40351663
  misc_feature: null
  misc_feature: Useful for making plants with modulated nitrogen use efficiency
  misc_feature: Useful for making plants with modulated phosphate use efficiency
  misc_feature (5)..(183): Pfam Name: Ribosomal_L13e PFAM Desc: Ribosomal protein L13e
MKHNNVIPNGHFKKHWQNYVKTWFNQPARKTRRRVARQKKAVKIFPRPTAGPLRPVVHGQTLKYNMKVRTGKGFTLEELKAAGIPKKLAPTIGISVDHRRKNRSLEGLQSNVQRLKTYKAKLVIFPRRARKVKAGDSTAEELANATQVQGDYMPIVREKPTMELVKLTSEMKSVKAFDKIRLERTNKRHAGARAKRAADAEKEEKK

SEQ ID NO: 6201 - DNA, 804 bp, Glycine max
  misc_feature: Ceres CLONE ID no. 1120044
  misc_feature: Ceres CDNA ID no. 24766240
  CDS (3)..(590): REFERENCED BY SEQ ID NO: 6202
cacgagacccagacccgcagaccgccttcccccccactcctctccgcttccagactcctcttcgccgccgattcgtcccgccgccccatccgctccgtcgcgacgccatgtcggtgacgctgcacacgaacctgggggacatcaaggtggaggttttctgcgaccaggtgccgcggacggcggagaactttttagccctgtgcgcgagcggctactacgacggcaccgtcttccaccgcaacatcaaggggttcatggtgcagggcggcgacccgacgggcaccggcaagggcggcgcctcgatctggggcggcaagttcgcggacgagttccgggaggcgctcaagcacggcgcccggggcaccctgtccatggccaactccgggcccaacaccaacggcagccagttcttcatcacctacgccaagcagccccacctcaacggccactacaccgtgttcgccaaggtcatccacggcttcgacgtgcttgacctcatggagaagacccccaccggccccgccgaccgccccctcgccgagatcaggctcaaccgcgtcaccgtccacgccaaccccctcgccgggtaggcctttcttctctcctggatggctggcctggcctggcctggcctctgctgctaatctaggaaccggaaccaaatttggctctgtaatatcatcatcgtctggttacctgaattctacctacctgcctacccgcaagaacatgatgctgctagtatactggtgtgttgaatgatgatactgcaatgcaagcgtttggctaaaaaaaaaaaaaaaa

SEQ ID NO: 6202 - protein, 160 aa, Glycine max
  misc_feature: Ceres CLONE ID no. 1120044
  misc_feature: Ceres CDNA ID no. 24766240
  misc_feature (2)..(154): Pfam Name: Pro_isomerase PFAM Desc: Cyclophilin type peptidyl
  misc_feature: Homolog of GI Number: 50948681 NR Desc: ESTs AU030008
  misc_feature: Homolog of GI Number: 14043400 NR Desc: Peptidylprolyl isomerase
  misc_feature: Homolog of GI Number: 19557640 NR Desc: peptidylprolyl isomerase
  misc_feature: Homolog of GI Number: 66534975 NR Desc:  similar to Peptidylprolyl isomerase
  misc_feature: Homolog of GI Number: 21746159 NR Desc: peptidylprolyl isomerase
  misc_feature: Homolog of GI Number: 28190012 NR Desc: CYP10L
  misc_feature: Homolog of GI Number: 49523292 NR Desc: MGC89451 protein
  misc_feature: Homolog of GI Number: 57110927 NR Desc:  similar to peptidylprolyl isomerase
  misc_feature: Homolog of GI Number: 41058088 NR Desc: RE40650p
  misc_feature: Homolog of GI Number: 54658601 NR Desc: cyclophilin
MSVTLHTNLGDIKVEVFCDQVPRTAENFLALCASGYYDGTVFHRNIKGFMVQGGDPTGTGKGGASIWGGKFADEFREALKHGARGTLSMANSGPNTNGSQFFITYAKQPHLNGHYTVFAKVIHGFDVLDLMEKTPTGPADRPLAEIRLNRVTVHANPLAG

SEQ ID NO: 6203 - DNA, 773 bp, Glycine max
  misc_feature: Ceres CLONE ID no. 1120057
  misc_feature: Ceres CDNA ID no. 40351664
  CDS (41)..(541): REFERENCED BY SEQ ID NO: 6204
gtgagtgagtgacagagagagatagaaagattaagacaaaatgccgccgaagttggacccatctcagatcgtcgacgtctacgtccgcgtcaccggaggcgaggtcggagcagcgagttcactcgcccctaagatcggtccactcggtctcgcgcccaagaagatcggagaagacatcgccaaggagacggcgaaagagtggaaaggcctgagagtcaccgtcaagctcaccgtccagaatcgtcaagccaaggtcaccgtcgttccctccgccgcggctctggtcatcaaggccttgaaggagcccgagagagaccgcaagaaggtgaagaacatcaaacacaacgggaacatctcgtttgatgacgtcatcgagatcgctaagatcatgcgaccgaggtctatcgccaaggagttgagcgggacggtgagggagatcttggggacttgcgtctccgtggggtgcacggtcgatgggagagacccgaaggatcttcaggaggagattgtcagtggagacattgaggttcctaacgagtgaaaggtttcgttttgttgttgagttctcttaatgttttgtcttttcgagaatttgtttttttttggtatattatgttttcggtattgttattttggagacgatagttttggatttgcacatttgaaccattagaatgtttcatttctataatctatccacttggtattgaagtgtctaaatggttgattagtcatttctcgaaaattataatcaattaaaaaaaaaaaaaaaa

SEQ ID NO: 6204 - protein, 166 aa, Glycine max
  misc_feature: Ceres CLONE ID no. 1120057
  misc_feature: Ceres CDNA ID no. 40351664
  misc_feature (12)..(71): Pfam Name: Ribosomal_L11_N PFAM Desc: Ribosomal protein L11
  misc_feature (76)..(144): Pfam Name: Ribosomal_L11 PFAM Desc: Ribosomal protein L11
MPPKLDPSQIVDVYVRVTGGEVGAASSLAPKIGPLGLAPKKIGEDIAKETAKEWKGLRVTVKLTVQNRQAKVTVVPSAAALVIKALKEPERDRKKVKNIKHNGNISFDDVIEIAKIMRPRSIAKELSGTVREILGTCVSVGCTVDGRDPKDLQEEIVSGDIEVPNE

SEQ ID NO: 6205 - DNA, 820 bp, Glycine max
  misc_feature: Ceres CLONE ID no. 1120076
  misc_feature: Ceres CDNA ID no. 29191693
  CDS (25)..(465): REFERENCED BY SEQ ID NO: 6206
actaaatcatatcgaatccacaacatgactcttggcgctggaggatcgagtgttgttgttccaaggaactttcggttgctggaggagcttgaacgtggggagaaaggtattggagatggaactgtgagctatggaatggatgatggagatgacatttacatgcgctcttggactggcaccatcatcgctcctcacaacactgttcatgaaggtcggatctatcagttgaagctcttttgtgacaaagattaccctgagaaacctcccaccgtccgcttccattcacgtatcaacatgacttgtgtcaaccatgaaacaggagtggtggaacctaagaagtttgggcttcttgcgaactggcaaagggagtacacaatggagactatactaacacagctgaagaaggagatgtctacgtcgcataaccgtaagcttgttcaacctccagaaggcacttgcttctagtagctcttggtttgttcaaaatctttgccccttctcatactgaagtatgtatctgggggtactccattgtcgttctcaagcttttttcttctaaatttgtgataaaaaaatggtctatgtggatggtggtgatgatgttcgattgatcatctgaagtttatccttgtgtgcaaattatccaaaaagaacagcgtcttccccaatccatgtgttcagtctcttgaattttacttggtttatgctaacagtttgtatcagtccttttatgaaatcgccctggttgtattggttggtagttatgtaatgttcctaatgttattaccagcaagaaattatcataaaaaaaaaaaaaaaa

SEQ ID NO: 6206 - protein, 146 aa, Glycine max
  misc_feature: Ceres CLONE ID no. 1120076
  misc_feature: Ceres CDNA ID no. 29191693
  misc_feature (17)..(138): Pfam Name: UQ_con PFAM Desc: Ubiquitin
  misc_feature: Homolog of GI Number: 30693656 NR Desc: ubiquitin
  misc_feature: Homolog of GI Number: 78191460 NR Desc: ubiquitin
  misc_feature: Homolog of GI Number: 20260068 NR Desc: putative ubiquitin
  misc_feature: Homolog of GI Number: 46577794 NR Desc: ubiquitin
  misc_feature: Homolog of GI Number: 30686662 NR Desc: ubiquitin
  misc_feature: Homolog of GI Number: 75755857 NR Desc: TO38
  misc_feature: Homolog of GI Number: 50725506 NR Desc: putative ubiquitin
  misc_feature: Homolog of GI Number: 77557031 NR Desc: ubiquitin
  misc_feature: Homolog of GI Number: 50929773 NR Desc: OSJNBa0088H09.10
  misc_feature: Homolog of GI Number: 2982253 NR Desc: CROC
MTLGAGGSSVVVPRNFRLLEELERGEKGIGDGTVSYGMDDGDDIYMRSWTGTIIAPHNTVHEGRIYQLKLFCDKDYPEKPPTVRFHSRINMTCVNHETGVVEPKKFGLLANWQREYTMETILTQLKKEMSTSHNRKLVQPPEGTCF

SEQ ID NO: 6207 - DNA, 1396 bp, Glycine max
  misc_feature: Ceres CLONE ID no. 1120123
  misc_feature: Ceres CDNA ID no. 25447150
  CDS (116)..(1168): REFERENCED BY SEQ ID NO: 6208
attcatttcatttcattcacacacactcaaaccctatcaaaggaacaaacccgaaacaacccacccaaccctaattcaactcttccgatctgatcactgtgagtaaaaattctaaatgagccgggcacaggatgcaaaccgatcattcttcccttttggaaatccttttaggatgatatcaccgaaaggcccaaaaatttcttcacagctgttgttaatattacatgcttttgaagcaactttggaagagaggctgaaaaagcttattcccaagagcaaggatgagatcctcagcttgtcttggatgactttggccatgcaggcactttgtgagagtcataatgacattaaaaccctcataacagagcttgagcttcctgtacatgattgggatgagaaatggatagatgtgtacttggatattagtgtgaagttactagatatatgtattgcatttagctctgaattatcacgcctgaaccagggccatcttttacttcattgtgcattgcacaatttaggttcttcctcttcagagcagtatgttcgggcatgctcttcacttgatggttggaaacagcatattggttctggaaaccctagggttgagaaatgtggcagcattttggatgatcttctgcggtcacttgatctgccaaaggttaaaaagtctgctaaagggaaggttttgatgcaagctatgtatggagtaaaggtgcagacagtatttttatgcagtgtgtttgctgcggctttttcgggctctacaaagaatatgtcagatttggatgtggctgatgtatattcttgggctccaacctttaaaagtttgcaagatcttgtaaatggggaaattagagttagaagtgggcgatttactatattgaatgagttggaagtagttgattcctctatgaaggaattatatcctattatccagggcgtctcagatgccattgagacagaatcacttgcgaagattgttggggaattaggcagagcaacagagaagctttcacaaggattagatcttcttacaaaggaagtcgatagctttttccaggtggtcttgaccggtcgtgatgccttgctatctagtttgaggtcaggtgcaactttcattgacagcattcaggcgggtaacagagatgcacaaatagtcaattgaatgtgttgcagcctaactctggtacataccgatggatctaggtattggtttttctgttttaagattgatggttttcaatcatgtttggcttattgtattcaagttagaatgagtaataggttatatgattatattatggttcttaaatgtatatttgtgatgttctgtgtaatattatatgataaaatatatataagaaagttgcttgtgctcaaaaaaaaaaaaaaa

SEQ ID NO: 6208 - protein, 350 aa, Glycine max
  misc_feature: Ceres CLONE ID no. 1120123
  misc_feature: Ceres CDNA ID no. 25447150
  misc_feature: Homolog of GI Number: 16604342 NR Desc: At2g46080/T3F17.27
MSRAQDANRSFFPFGNPFRMISPKGPKISSQLLLILHAFEATLEERLKKLIPKSKDEILSLSWMTLAMQALCESHNDIKTLITELELPVHDWDEKWIDVYLDISVKLLDICIAFSSELSRLNQGHLLLHCALHNLGSSSSEQYVRACSSLDGWKQHIGSGNPRVEKCGSILDDLLRSLDLPKVKKSAKGKVLMQAMYGVKVQTVFLCSVFAAAFSGSTKNMSDLDVADVYSWAPTFKSLQDLVNGEIRVRSGRFTILNELEVVDSSMKELYPIIQGVSDAIETESLAKIVGELGRATEKLSQGLDLLTKEVDSFFQVVLTGRDALLSSLRSGATFIDSIQAGNRDAQIVN

SEQ ID NO: 6209 - DNA, 1360 bp, Glycine max
  misc_feature: Ceres CLONE ID no. 1120253
  misc_feature: Ceres CDNA ID no. 40351665
  CDS (93)..(1166): REFERENCED BY SEQ ID NO: 6210
ccaccaagaacaagttcaccgtccaatcccagtccggcagccccgcatttgatcccctcgaccggcatcccatccccaccccgtccaggaggatgcacaaggcgtcgtcgctgtcggagctgggcttcgactccggcggcgcgtcgtcgggcttcttccggcccgtggccgacggctgcccggtcaccccgacctcctccgccgtcccgcaccgccgcctcaccaagatctccgtcatcggcgccggcaacgtgggcatggccatcgcgcagaccatcctcacccagaacctggccgacgagatcgcgctcgtcgacgcgctccccgacaagctccgcggcgaggcgctcgacctgcagcacgccgccgccttcctcccgcgcgtccgcatcgtctccggcaccgacgccgccgtcaccaagaactccgacctcgtcatcgtcacggccggggccaggcagatccccagcgagaccaggctcaacctgctgcagcggaacgtcgccctctaccgcaagatcgtgccgcccgtcgccaagcactcccaggacgcgctgctgctcgtcgtctccaaccccgtcgacgtgctcacctacgtcgcatggaggctctccggcttccccgccagccgcgtcatcggctccggtaccaacctcgactcctcccgcttcaggttcctcatcgccgagcacctcgacgtcaacgcgcaggacgtgcaggcatacatggtgggtgagcacggcgacagctcggtggcgatctggtcaagcatcagcgtgggcgggatgccggcgttcaagtcgctgcgcgacagccaccggaacttcgacgaggcggcgctggaggggatccggcgcgccgtggtgggcggcgcctacgaggtgatcggcctcaaggggtacacctcttgggccattggctactctgttgccagcctcgctgcttccctcctccgcgaccagcgtcgcgtgcaccctgtctctgtccttgcctcgggcttccatggcatctcagacggccacgaggtgttcctcagcctgcccgcccgcctcggccgcggcggcatcctcggcgtcgccgagatggacctcaccgaggccgaggccgcgcagctccggcgctcggccaagacgctctgggagaactgccagctcctcgacctctgacgcgacttgctgtgaaatcctgaagcatttacaagaactctactgctatatgttgctctgttgctgctcccacacgaatgcttgtgtaattttgaagtgttttcttagggatgatgaagtaatgtaacgcctcttaatttcatgaaataaaatgcgatttgtgccagcattgctaaagaaaaaaaaaaaaaaaa

SEQ ID NO: 6210 - protein, 357 aa, Glycine max
  misc_feature: Ceres CLONE ID no. 1120253
  misc_feature: Ceres CDNA ID no. 40351665
  misc_feature (186)..(357): Pfam Name: Ldh_1_C PFAM Desc: lactate/malate dehydrogenase
  misc_feature (44)..(60): Pfam Name: NAD_Gly3P_dh_N PFAM Desc: NAD
MHKASSLSELGFDSGGASSGFFRPVADGCPVTPTSSAVPHRRLTKISVIGAGNVGMAIAQTILTQNLADEIALVDALPDKLRGEALDLQHAAAFLPRVRIVSGTDAAVTKNSDLVIVTAGARQIPSETRLNLLQRNVALYRKIVPPVAKHSQDALLLVVSNPVDVLTYVAWRLSGFPASRVIGSGTNLDSSRFRFLIAEHLDVNAQDVQAYMVGEHGDSSVAIWSSISVGGMPAFKSLRDSHRNFDEAALEGIRRAVVGGAYEVIGLKGYTSWAIGYSVASLAASLLRDQRRVHPVSVLASGFHGISDGHEVFLSLPARLGRGGILGVAEMDLTEAEAAQLRRSAKTLWENCQLLDL

SEQ ID NO: 6211 - DNA, 927 bp, Glycine max
  misc_feature: Ceres CLONE ID no. 1120257
  misc_feature: Ceres CDNA ID no. 29191694
  CDS (39)..(767): REFERENCED BY SEQ ID NO: 6212
gccgtcgtctctttgattgatctttgtgggaattggaaatggcggaatcaaaggttgtagttccggagtcagtcctgaagaagaggaagagagaggaggagtgggctctcgcgaagaagcagagcgctgaagctgcgaagaagacgaacgccgccaacaggaagcttatctacaaaagggccgagcagtacgccaaggagtatgccgagaaggagaaggagttgatctcattgaaacgtgaggctaagttgaagggaggtttctatgttgaccctgaagctaagctcttgttcatcattcgtatccgtggtatcaatgccattgacccaaagactaagaagattcttcagctcttgcgtttgagacagatattcaacggtgtgtttctcaaagtcaacaaggctacaatgaacatgcttcgtcgtgttgagccctatgtgacttacgggttccccaatttgaagagtgttaaggagttgatctacaagagaggatacggaaagcttaaccaccagagggtggctttgactgacaactctattgttgagcaggctctaggtaaacatgggatcatctgcactgaggatttgatccacgagattctaacagttggacctcatttcaaggaggccaacaacttcctgtggccattccagcttaaggcaccacttggtggtctaaagaagaagagaaaccactacgttgaaggtggtgatgctggaaaccgtgaaaacttcatcaatgagcttatcaggaggatgaattagatgttttcttttccaatatccgttttattacctatcttgtcttcaccaaatgtttcctcctggattttgatctttttgttcaagttaaatgacattttgagctttctcttttgttgtctttgtatcctagtttgtgatattgataaaaaaaaaaaaaaaa

SEQ ID NO: 6212 - protein, 242 aa, Glycine max
  misc_feature: Ceres CLONE ID no. 1120257
  misc_feature: Ceres CDNA ID no. 29191694
  misc_feature (11)..(81): Pfam Name: Ribosomal_L30_N PFAM Desc: Ribosomal L30 N
  misc_feature (82)..(134): Pfam Name: Ribosomal_L30 PFAM Desc: Ribosomal protein L30p/L7e
  misc_feature: Homolog of GI Number: 19310657 NR Desc: putative ribosomal protein L7
  misc_feature: Homolog of GI Number: 3212879 NR Desc: 60S ribosomal protein L7
  misc_feature: Homolog of GI Number: 21593176 NR Desc: 60S ribosomal protein L7
  misc_feature: Homolog of GI Number: 11994560 NR Desc: 60S ribosomal protein L7
  misc_feature: Homolog of GI Number: 445613 NR Desc: ribosomal protein L7
  misc_feature: Homolog of GI Number: 77999275 NR Desc: thaliana 60S ribosomal protein L7
  misc_feature: Homolog of GI Number: 50942629 NR Desc: putative 60S ribosomal protein L7
  misc_feature: Homolog of GI Number: 50928547 NR Desc: OSJNBb0015N08.13
  misc_feature: Homolog of GI Number: 57471716 NR Desc: ribosomal protein L7
  misc_feature: Homolog of GI Number: 61654622 NR Desc: L7
MAESKVVVPESVLKKRKREEEWALAKKQSAEAAKKTNAANRKLIYKRAEQYAKEYAEKEKELISLKREAKLKGGFYVDPEAKLLFIIRIRGINAIDPKTKKILQLLRLRQIFNGVFLKVNKATMNMLRRVEPYVTYGFPNLKSVKELIYKRGYGKLNHQRVALTDNSIVEQALGKHGIICTEDLIHEILTVGPHFKEANNFLWPFQLKAPLGGLKKKRNHYVEGGDAGNRENFINELIRRMN

SEQ ID NO: 6213 - DNA, 1104 bp, Glycine max
  misc_feature: Ceres CLONE ID no. 1120437
  misc_feature: Ceres CDNA ID no. 25446805
  CDS (161)..(889): REFERENCED BY SEQ ID NO: 6214
aatttcattttccctcctccttccaattaaatattctcaacattatatataccataatcccttccgcacacttccattgccaaagcgtcttctcaacaaccatttctttctttcggatttctgtttctctggtttcattttagtttttccggctagaagaatgtccagctcatcggaatatttggtattttccggccaccacccggcgaactctccggcggaaaagtccactttctctcagacttgtagtctattgagccaatacatcaaggaaaagggtaccttcggagaccttaccctcgggatgacttgcactgccgaaacaaacggttcccctgagacatcttgtcactctgcaacaaccatggagttgtttcccacgatcatcacgcaacggaacccaactactgtggatttcctatctccccagactgcttatcctcaccactcagaggttccaaccatggttaaatcaagtgcttttaagtctatggagaaggagcctaaagctgctcagttgacgatcttttatgctgggcaagttgttgtgtttcatgattttcctgctgaaaaattggaggagataacgtcattagccggcaagggaatatcccaaagccaaaacacctctgcttatgctcacactcataaccagcaagtgaatcatccttcctttgttcctaatatctcccctcaagcaccgtccagaccacttgtttgtgatctgccaattgctaggaaagcttcacttcatcggttcctttctaagagaaaagatagaattgctgccaaagcaccctatcaaataaacaatcccaactctgcttcaagtaagccggctgaatccatgtcatggcttggattaggtgctcaatcaacacaagtctaagtgcatttgcagtttttagtagttttggcctctcttttttctacatttgattttgtagctcttttgtctttttaacttctactctactatgactatgatagatctaacattagtagtaggtgcaggcttcaattattatgattgcaaatatttcctgtaattagtatttcaaattcttgtagtcattcttctcattttcaaaaaaaaaaaaaaaa

SEQ ID NO: 6214 - protein, 242 aa, Glycine max
  misc_feature: Ceres CLONE ID no. 1120437
  misc_feature: Ceres CDNA ID no. 25446805
  misc_feature (113)..(148): Pfam Name: Zim PFAM Desc: ZIM motif
  misc_feature: Homolog of GI Number: 16604489 NR Desc: At1g19180/T29M8_5
  misc_feature: Useful for making plants with increased biomass
MSSSSEYLVFSGHHPANSPAEKSTFSQTCSLLSQYIKEKGTFGDLTLGMTCTAETNGSPETSCHSATTMELFPTIITQRNPTTVDFLSPQTAYPHHSEVPTMVKSSAFKSMEKEPKAAQLTIFYAGQVVVFHDFPAEKLEEITSLAGKGISQSQNTSAYAHTHNQQVNHPSFVPNISPQAPSRPLVCDLPIARKASLHRFLSKRKDRIAAKAPYQINNPNSASSKPAESMSWLGLGAQSTQV

SEQ ID NO: 6215 - DNA, 1620 bp, Glycine max
  misc_feature: Ceres CLONE ID no. 1120510
  misc_feature: Ceres CDNA ID no. 24766241
  CDS (154)..(1353): REFERENCED BY SEQ ID NO: 6216
ataaaactttgcccaaaaagaggatgttaaagctgggcctgaaataataatactactccaatattctcttctcaaacctactcttctatctttcgctctccccctctgcgtttctgacagtgttactgtgtgtgttttccgcggaaaatcaaaatgggtatcattgaaaagatcaaagaaattgaagccgagatggctcggacacagaaaaataaagccacagagtatcatcttgggcagctcaaggctaaaatagcaaaattaaggacacaattattggagcctccaaaaggttctagtggaggtggagaaggatttgaagttacaaaattcggtcatggacgtgttgcactgattggatttccaagtgtggggaagtctactcttttgacaatgttaacgggcacacattctgaagctgcatcttatgagtttactactttgacctgtattcctgggattatacactataatgatactaaaattcagttactcgatcttcctggaattattgaaggtgcatctgaaggcaagggacgtggaagacaggttattgctgttgctaaatcttcagacatagtattgatggttcttgatgcttccaaaagtgagggtcataggcaaatattgaccaaagagctcgaagctgtgggcttgcggttaaacaagagaccacctcagatatattttaaaaagaaaaagacggggggcatttcattcaacagcactttgcctttgactcatgtggatgagaagctttgttatcagattctgcacgagtacaagattcacaatgcagagatccttttccgtgaggatgctacagtggatgatctcatagatgtcattgaaggaaaccgaaaatacatgaagtgtgtatatgtctacaacaagatagatgttattggtattgatgatgtggacagattagcccgtcaaccaaattctgttgtcattagctgcaatttgaagctgaacttagacagactgcttgcaaggatgtgggatgaaatgggtctggttagagtttacacaaaaccacaaggccagcagcctgattttggtgatcctgtggttctttctgctgatagaggtggctgcactgtagaagacttctgcaaccatatacacagaagtttggtgaaggatgtgaagtatgttctggtctggggtactagtgcaaggcactacccgcagcactgtggtcttagtcacaatcttcatgacgaggatgttgttcagattgtgaagaaaaaggaaaaggaagagggaggaaggggacgatttaaatcacattccaatgctcctgccaggatatctgacagagagaagaaggcaccactgaagacataattatatgacacagcctgtgatttcatcattgatttttgcctagtggatgggaaaaatgactataggtgatgatacatccaaaggcaaaggttcttatcttgattgctcatgcaacataggattgaaaattcctcctgagcactaagtggggcacctatatttttttgtcacccaagtgttgtaacatcccctccccctcttttgaataatagtttttatcagttatgaagtgtgcatctatgatttgaagagaaaaaaaaaaaaaaa

SEQ ID NO: 6216 - protein, 399 aa, Glycine max
  misc_feature: Ceres CLONE ID no. 1120510
  misc_feature: Ceres CDNA ID no. 24766241
  misc_feature (286)..(366): Pfam Name: TGS PFAM Desc: TGS domain
  misc_feature: Homolog of GI Number: 8778457 NR Desc: F1L3.17
  misc_feature: Homolog of GI Number: 2058456 NR Desc: GTP
  misc_feature: Homolog of GI Number: 2345148 NR Desc: developmentally regulated GTP binding protein
  misc_feature: Homolog of GI Number: 15220113 NR Desc: developmentally regulated GTP
  misc_feature: Homolog of GI Number: 55167981 NR Desc: putative GTP binding protein
  misc_feature: Homolog of GI Number: 29824115 NR Desc: putative GTP
  misc_feature: Homolog of GI Number: 13877991 NR Desc: putative developmentally regulated GTP
  misc_feature: Homolog of GI Number: 66540013 NR Desc:  similar to GA19430
  misc_feature: Homolog of GI Number: 49903487 NR Desc: Drg2
  misc_feature: Homolog of GI Number: 35505538 NR Desc: MGC69136 protein
  misc_feature: Useful for making plants with increased biomass and foliage
MGIIEKIKEIEAEMARTQKNKATEYHLGQLKAKIAKLRTQLLEPPKGSSGGGEGFEVTKFGHGRVALIGFPSVGKSTLLTMLTGTHSEAASYEFTTLTCIPGIIHYNDTKIQLLDLPGIIEGASEGKGRGRQVIAVAKSSDIVLMVLDASKSEGHRQILTKELEAVGLRLNKRPPQIYFKKKKTGGISFNSTLPLTHVDEKLCYQILHEYKIHNAEILFREDATVDDLIDVIEGNRKYMKCVYVYNKIDVIGIDDVDRLARQPNSVVISCNLKLNLDRLLARMWDEMGLVRVYTKPQGQQPDFGDPVVLSADRGGCTVEDFCNHIHRSLVKDVKYVLVWGTSARHYPQHCGLSHNLHDEDVVQIVKKKEKEEGGRGRFKSHSNAPARISDREKKAPLKT

SEQ ID NO: 6217 - DNA, 542 bp, Glycine max
  misc_feature: Ceres CLONE ID no. 1120553
  misc_feature: Ceres CDNA ID no. 25446522
  CDS (131)..(370): REFERENCED BY SEQ ID NO: 6218
aacctaatcgcactccgctctccgcactccgctattgcacctccctcgacggcacctcaggcgcactcgttttcggttccgattgcattgaatcaaatctgagaaccattctcattgcccgtctgtaatcatgtcaggaaagtatatcatttctgctattcttggatcatttggagttgcatgggtttgtgattattatgtttcagagaaaaagctatttggaggttctacccctggcactattacgaacaatgagtgggcagaagagactgacaaaaaattgcaggcatggcctcgtactgccggtccaccagtggtcatgaatcccataagtcgccgaaatttcattgtgaagtctcgccctgagtaataatattttttgattgattttgagttaattggtgcaccttggtcatgggatatgtttccataaatgatgataatgtttgaggtcaaacccttgcagttcaattagtgttttgatgtttaaacatgtgaatgtttactaataaaatgttacttaagcaaaaaaaaaaaaaaaa

SEQ ID NO: 6218 - protein, 79 aa, Glycine max
  misc_feature: Ceres CLONE ID no. 1120553
  misc_feature: Ceres CDNA ID no. 25446522
  misc_feature: Homolog of GI Number: 15223334 NR Desc: ozone
  misc_feature: Homolog of GI Number: 34897932 NR Desc: ozone
  misc_feature: Homolog of GI Number: 21387039 NR Desc: stress
  misc_feature: Homolog of GI Number: 34897944 NR Desc: ozone
  misc_feature: Homolog of GI Number: 50910341 NR Desc: putative stress
  misc_feature: Homolog of GI Number: 6715639 NR Desc: T25K16.16
  misc_feature: Homolog of GI Number: 50925981 NR Desc: OSJNBa0067K08.15
  misc_feature: Homolog of GI Number: 7739775 NR Desc: stress
MSGKYIISAILGSFGVAWVCDYYVSEKKLFGGSTPGTITNNEWAEETDKKLQAWPRTAGPPVVMNPISRRNFIVKSRPE

SEQ ID NO: 6219 - DNA, 777 bp, Glycine max
  misc_feature: Ceres CLONE ID no. 1120568
  misc_feature: Ceres CDNA ID no. 36706808
  CDS (105)..(560): REFERENCED BY SEQ ID NO: 6220
tctgagctttcggcggcggcggcgcactcatcgtgatctcaaccaggcgcgcactcctcctcctcgccgtcgtcgtctccggtccaccgccgctccacgcgaccatgtcgtcgaagaggaagaccagggagcccaaggaggagaatgtcacccttggaccggctgtccgtgagggagagcatgtctttggcgttgctcacatctttgcatccttcaatgacactttcatccatgtgactgacttgtctgggagggaaaccctggtgcggatcactggtggaatgaaggtcaaggctgatcgtgatgagtcttcaccctatgctgctatgcttgcatctcaggatgttgctacacgttgcaaggagcttggtattaccgcactgcacattaagctccgtgccactggaggcaacaagaccaagacacctggacctggagctcagtctgctctcagggctcttgctcgttctgggatgaaaattgggcgcattgaggacgtgactccagttcccactgacagcacccgccggaagggaggaaggaggggaaggaggctgtaagctatcttccaactctactggtggcaatcaagaaacttactcctctctgggtagtcctgctgtttctatgaatgtcatgaggagctttaattttgctctgttgaggatcatttgctgttagtcgtactatgaatgttgcttggatcctatttttggttcagaaacttgtggtatttatgcaaaaaactagcttttcagtcgaaaaaaaaaaaaaaaa

SEQ ID NO: 6220 - protein, 151 aa, Glycine max
  misc_feature: Ceres CLONE ID no. 1120568
  misc_feature: Ceres CDNA ID no. 36706808
  misc_feature: The plant is abnormally large.
  misc_feature: Useful for making plants with modulated biomass
  misc_feature (29)..(147): Pfam Name: Ribosomal_S11 PFAM Desc: Ribosomal protein S11
  misc_feature: Homolog of GI Number: 50905421 NR Desc: putative ribosomal protein S14
  misc_feature: Homolog of GI Number: 50924099 NR Desc: OJ000126_13.9
  misc_feature: Homolog of GI Number: 131773 NR Desc: 40S ribosomal protein S14
  misc_feature: Homolog of GI Number: 28436071 NR Desc: cytoplasmic ribosomal protein S14
  misc_feature: Homolog of GI Number: 21618105 NR Desc: putative ribosomal protein S14
  misc_feature: Homolog of GI Number: 131772 NR Desc: 40S ribosomal protein S14
  misc_feature: Homolog of GI Number: 77745450 NR Desc: ribosomal protein S14
  misc_feature: Homolog of GI Number: 21595448 NR Desc: putative 40S ribosomal protein S14
  misc_feature: Homolog of GI Number: 21593698 NR Desc: 40S ribosomal protein S14
  misc_feature: Homolog of GI Number: 2565340 NR Desc: ribosomal protein S14
MSSKRKTREPKEENVTLGPAVREGEHVFGVAHIFASFNDTFIHVTDLSGRETLVRITGGMKVKADRDESSPYAAMLASQDVATRCKELGITALHIKLRATGGNKTKTPGPGAQSALRALARSGMKIGRIEDVTPVPTDSTRRKGGRRGRRL

SEQ ID NO: 6221 - DNA, 593 bp, Glycine max
  misc_feature: Ceres CLONE ID no. 1120633
  misc_feature: Ceres CDNA ID no. 40351666
  CDS (75)..(386): REFERENCED BY SEQ ID NO: 6222
ataaactcaagcatcgaatcttcttcaacgctaaacttttctcaagaaaaaaaacccaatttcatcggaaaaaaatgtcgggacgtggaaagggaggaaagggtttgggcaaaggaggagccaagcgtcacaggaaggttctgagagacaacatccaaagaatcaccaagccggcgattcggaggctggctcgtagaggtggagtcaagcgtatcagtggtctcatctacgaggagacacgtggagtcctcaagatctttttggagaacgttattcgagacgctgtgacttacaccgagcacgccaggaggaagactgtgactgcgatggatgtggtctacgcgttgaagaggcaagggaggacgctttacgggtttggtggttaagggtctcttgtagattcgcgttttgcgtttctgggtttctttaggcgtgttcttaaggaagtttctaatcaaatcatgttttccttagcgtttgtgttttgaattccgtttgagttcgatcttttgtgtgttgcgttagcgtttcgttatgtgtaattacgcaattttatctatgaagctatttcgagtttaaaaaaaaaaaaaaaa

SEQ ID NO: 6222 - protein, 103 aa, Glycine max
  misc_feature: Ceres CLONE ID no. 1120633
  misc_feature: Ceres CDNA ID no. 40351666
  misc_feature (66)..(92): Pfam Name: TAF PFAM Desc: TATA box binding protein associated factor
MSGRGKGGKGLGKGGAKRHRKVLRDNIQRITKPAIRRLARRGGVKRISGLIYEETRGVLKIFLENVIRDAVTYTEHARRKTVTAMDVVYALKRQGRTLYGFGG

SEQ ID NO: 6223 - DNA, 1308 bp, Glycine max
  misc_feature: Ceres CLONE ID no. 1120675
  misc_feature: Ceres CDNA ID no. 40351667
  CDS (60)..(1124): REFERENCED BY SEQ ID NO: 6224
gcattgatcgtcttcccctaaacaacactgattgattatctttctctcgtgacggcgccatgtctctcctctcagatctcgtcaacctcaacctctctgactccaccgagaaaatcatagccgaatacatatggatcggtggatctggaatggacatcagaagcaaagccagaacactcccaggaccagtgagcgatccatcaaagcttcctaagtggaactacgacggatccagcaccggtcaagccgccggagatgacagtgaagtcattctataccctcaggcgatattccgtgatccgttcaggaaaggcaacaacattctggtgatgtgtgatgcttacacgccggcagggaatccaattccgaccaacaagaggcacaacgctgctaagatcttcagcaaccccaaagttgcctctgaggagccttggtatgggattgaacaagaatacacattgatgcaaaagggtgtgaactggcccattggttggcctatcggtggcttccctggcccacagggaccatactactgtggtgtgggagctgacaaagccattggtcgtgacatcgtggatgcgcactacaaggcctgtatttacgcaggtattggcatctctggtgtcaatggagaagtcatgcctggccagtgggagttccaagtcggtcctgttgagggtattagtgctggtgaccaagtctgggtcgctagataccttcttgagaggatcaccgagatctctggtgtcaatgtcagcttcgaccctaagccagtcccgggtgattggaacggagctggagctcactgcaactacagcacgaagtcgatgaggaacgacggaggattagctgtgattaagaaagccatagagaagcttcaggtgaagcacaaggagcacattgctgcttacggtgaaggcaacgagcgtcgcctcacggggaagcacgagaccgcggacatcaacacgttctcttggggagtggcgaaccgtggagcttcggtgagagtgggacgtgacactgagaaagaaggcaaaggttacttcgaggacagaaggccagcttctaacatggatccttacgttgttacttccatgattgctgaaaccaccatcctcggttaaaatcgcacacgttcttatgtttgggtttatcttatctggtctggttttcaatttgcaaacttgtgcttgtgattgccggtttatctcggtttaaataattcttatgacgacattttgtattttttttcttcctagtttcgaataattaaataaggtattcatatggtgaaaaaaaaaaaaaaaa

SEQ ID NO: 6224 - protein, 354 aa, Glycine max
  misc_feature: Ceres CLONE ID no. 1120675
  misc_feature: Ceres CDNA ID no. 40351667
  misc_feature (103)..(354): Pfam Name: Gln PFAM Desc: Glutamine synthetase
  misc_feature (17)..(98): Pfam Name: Gln PFAM Desc: Glutamine synthetase
MSLLSDLVNLNLSDSTEKIIAEYIWIGGSGMDIRSKARTLPGPVSDPSKLPKWNYDGSSTGQAAGDDSEVILYPQAIFRDPFRKGNNILVMCDAYTPAGNPIPTNKRHNAAKIFSNPKVASEEPWYGIEQEYTLMQKGVNWPIGWPIGGFPGPQGPYYCGVGADKAIGRDIVDAHYKACIYAGIGISGVNGEVMPGQWEFQVGPVEGISAGDQVWVARYLLERITEISGVNVSFDPKPVPGDWNGAGAHCNYSTKSMRNDGGLAVIKKAIEKLQVKHKEHIAAYGEGNERRLTGKHETADINTFSWGVANRGASVRVGRDTEKEGKGYFEDRRPASNMDPYVVTSMIAETTILG

SEQ ID NO: 6225 - DNA, 788 bp, Glycine max
  misc_feature: Ceres CLONE ID no. 1120700
  misc_feature: Ceres CDNA ID no. 25446523
  CDS (123)..(572): REFERENCED BY SEQ ID NO: 6226
ctttttgttgttctctcaaactttaataatctcataaattagcagaacgaagaggaacaaaaacaagaagaagaattggattcgaaaatcgtagcgtagcgttggtgcgattgaacgatacgatgggaagaggaaaattcaagagcaagcccactggtcgccgccagttctccaccccggaagatatgcaagctgagcatgaagaggaagaacccgaggaagtatctggagatgaatctggagaagaatctgaagaagaaacttctaagaaaaaaggaacacaaggggttattgagattgaaaatcccaacttagtaaagccaaagaccttgaaagctagagatgttgatgttggaaaaacaacagaactttcaaggcgtgaaagggaggagatagagaaacagagagcccatgagcgctatatgaggctgcaagagcaaggaaaaacagaacaagcaaagaaggatttagaacgtttagctcttatacgtcagcaaagggaagatgctgctaaaaagcgagaagaagagaaagctgcgaaagagcagaagaaggctgaagcgcgcaagtgaatttcctggaaaatgtcatgttgccaaatttactccatattagtaggaggatatgtactcttactacacttcaacattatgtccatttagctttatattatggtattgctataccaagctggtaacatgtaatgcaattattttcatattctgtggtttaaaatcgtgattatatataaacgtttttaaaaattacacataaaaaaaaaaaaaaaa

SEQ ID NO: 6226 - protein, 149 aa, Glycine max
  misc_feature: Ceres CLONE ID no. 1120700
  misc_feature: Ceres CDNA ID no. 25446523
  misc_feature: Homolog of GI Number: 57899606 NR Desc: putative 28 kDa heat
  misc_feature: Homolog of GI Number: 34909600 NR Desc: P0435B05.20
  misc_feature: Homolog of GI Number: 1518855 NR Desc: HASPP28
  misc_feature: Homolog of GI Number: 30584165 NR Desc: Homo sapiens PDGFA associated protein 1
  misc_feature: Homolog of GI Number: 7657441 NR Desc: PDGFA associated protein 1
  misc_feature: Homolog of GI Number: 73958089 NR Desc:  similar to PDGFA associated protein 1
  misc_feature: Homolog of GI Number: 55628996 NR Desc:  similar to 28 kDa heat
  misc_feature: Homolog of GI Number: 50755563 NR Desc:  similar to kinase substrate HASPP28
MGRGKFKSKPTGRRQFSTPEDMQAEHEEEEPEEVSGDESGEESEEETSKKKGTQGVIEIENPNLVKPKTLKARDVDVGKTTELSRREREEIEKQRAHERYMRLQEQGKTEQAKKDLERLALIRQQREDAAKKREEEKAAKEQKKAEARK

SEQ ID NO: 6227 - DNA, 730 bp, Glycine max
  misc_feature: Ceres CLONE ID no. 1120742
  misc_feature: Ceres CDNA ID no. 35383361
  CDS (129)..(443): REFERENCED BY SEQ ID NO: 6228
gatattatccgtcagtagccagaggtggaaatataaactttccctccccaatttctgtccatgttttcatctgcggaaactcctccgttctcaaaaccctaacccgacgccaccattcatccgatccaatgagttcgagaggagccagcgcgctgctatctcgagccagcaggattcgctcgaagcttcaaacggcgctggaagccaccgttttggaggtggacgacgtgtcgtaccagcacgcgggccacgccgccgtgaagggaagttccgacaaagaaacccacttcaacgtgaagatcgtatcgcccaagttcgagggccagagcctcgtcaaacgacaccgtctcgtctacgacctcctcgccgaggagctccagagcggcctccacgccctctctatcgtcgccaaaacgctccacgaaacaaaccctaataagtgacgcgtcgggagtgtcaaagttcgaggcttttccgccgttaaagctccttcctctgtcacagcgacccattcagctcatccactcattttcattcaattttgctgggaggatgtctcactggatttgaagcttaaaagtatcaactataaagatgattgcaaatcctcagagaacagcaaattgcatttcattgtttggatttttagtggaagtaattgaattatgggacagataacaattataattacaataatataaaatttcgacctcgaaaaaaaaaaaaaaaa

SEQ ID NO: 6228 - protein, 104 aa, Glycine max
  misc_feature: Ceres CLONE ID no. 1120742
  misc_feature: Ceres CDNA ID no. 35383361
  misc_feature (19)..(100): Pfam Name: BolA PFAM Desc: BolA
  misc_feature: Homolog of GI Number: 51969256 NR Desc: BolA like protein
  misc_feature: Homolog of GI Number: 51969538 NR Desc: BolA like protein
  misc_feature: Homolog of GI Number: 51968914 NR Desc: BolA like protein
  misc_feature: Homolog of GI Number: 23505763 NR Desc: At1g55800/F14J16_13
  misc_feature: Homolog of GI Number: 50899228 NR Desc: BolA
  misc_feature: Homolog of GI Number: 8778492 NR Desc: F20N2.18
  misc_feature: Homolog of GI Number: 48862924 NR Desc: COG0271: Stress
  misc_feature: Homolog of GI Number: 71898738 NR Desc: BolA
MSSRGASALLSRASRIRSKLQTALEATVLEVDDVSYQHAGHAAVKGSSDKETHFNVKIVSPKFEGQSLVKRHRLVYDLLAEELQSGLHALSIVAKTLHETNPNK

SEQ ID NO: 6229 - DNA, 631 bp, Glycine max
  misc_feature: Ceres CLONE ID no. 1120755
  misc_feature: Ceres CDNA ID no. 24766213
  CDS (109)..(375): REFERENCED BY SEQ ID NO: 6230
gtatctagggtttttttacctccgcgctccgcctgcccacacgcggttccgtccagaagcttctagacacttccagtcggaggaggagctcacgccgcagcagcagccatggcgtccaccaaagtccagcgtatcatgacccagcccatcaacctcatctttcggttcctccagagcaaagcgcgcatccagatctggcttttcgagcagaaggatatgcggatcgagggtcgtatcatcggctttgatgagtacatgaacctggttctcgaggatgctgaggaaatcaacattaagaagaacaccaggaaatcgttgggaaggatactcttgaaaggcgacaacataactctgatgatgaacactggaaagtgaagcttctctctctaggatggctggcgttgtcgttcctatgttgagcgttcctgtgatactttgtactccacccaggctgatatgcatgtagcttgtcgttgtggtcatttgaggatatgtaacgtctgttgtccatctatgaacccagacccagtaaatccattctgtctactccgtgcaagatgtttgatcaagatgatgagcttattggttgtgtttaagattgacatgaacagatccaaaaaaaaaaaaaaaa

SEQ ID NO: 6230 - protein, 88 aa, Glycine max
  misc_feature: Ceres CLONE ID no. 1120755
  misc_feature: Ceres CDNA ID no. 24766213
  misc_feature (19)..(85): Pfam Name: LSM PFAM Desc: LSM domain
  misc_feature: Homolog of GI Number: 50904957 NR Desc: putative small nuclear ribonucleoprotein polypeptide E
  misc_feature: Homolog of GI Number: 21592486 NR Desc: putative small nuclear ribonucleoprotein E
  misc_feature: Homolog of GI Number: 21593343 NR Desc: small nuclear ribonucleoprotein homolog
  misc_feature: Homolog of GI Number: 7269933 NR Desc: small nuclear ribonucleoprotein homolog
  misc_feature: Homolog of GI Number: 55242718 NR Desc: ENSANGP00000022836
  misc_feature: Homolog of GI Number: 31205115 NR Desc: ENSANGP00000022836
  misc_feature: Homolog of GI Number: 50603823 NR Desc: MGC89991 protein
  misc_feature: Homolog of GI Number: 49256559 NR Desc: MGC82471 protein
  misc_feature: Homolog of GI Number: 27721799 NR Desc: similar to small nuclear ribonucleoprotein E
  misc_feature: Homolog of GI Number: 57111277 NR Desc:  similar to small nuclear ribonucleoprotein E
MASTKVQRIMTQPINLIFRFLQSKARIQIWLFEQKDMRIEGRIIGFDEYMNLVLEDAEEINIKKNTRKSLGRILLKGDNITLMMNTGK

SEQ ID NO: 6231 - DNA, 837 bp, Glycine max
  misc_feature: Ceres CLONE ID no. 1120798
  misc_feature: Ceres CDNA ID no. 40351668
  CDS (142)..(591): REFERENCED BY SEQ ID NO: 6232
acaaatcgctcccggccccctccttcctcctctcccccacccgtacggtcaaacaagagaccccccgcccccctctctcctccacctccatctccagcgctcgccgcgagaagccgagaaggaagagcctgagaaggtagcatggcggaccaactcaccgacgaccagatcgccgagttcaaggaagccttcagcctattcgacaaggacggcgacggttgcatcacaaccaaggagctgggaacagttatgcgctcgctggggcagaacccaaccgaggcagagctccaggacatgatcaacgaggtcgatgccgatggcaacggcaccatcgacttcccggagttcctcaacctgatggctcgcaagatgaaggacaccgactcggaggaagagctcaaggaggccttccgggtgttcgacaaggaccagaacggtttcatctcggccgcggagctccgccacgtcatgaccaacctcggcgagaagctaacggatgacgaggtcgacgagatgatccgcgaggctgacgtcgacggggacggccagatcaactacgaggagttcgtcaaggtgatgatggccaagtgatccagccgatgttcatgtccggtggtattattatttttaccggggaggaggaaattgtgctatgcatattagtagtaaggaatgcggctctcgtttccttgtctttgcccccgaaccagaagaagcgtactagtagacgtagttgctcaagagcattcatggaatcctcctcccctgctgctaccctgtctctctcccgtgtgtcattgaaacatctttctttctgtgtgaaaaaaaaaaaaaaaa

SEQ ID NO: 6232 - protein, 149 aa, Glycine max
  misc_feature: Ceres CLONE ID no. 1120798
  misc_feature: Ceres CDNA ID no. 40351668
  misc_feature (12)..(40): Pfam Name: efhand PFAM Desc: EF hand
MADQLTDDQIAEFKEAFSLFDKDGDGCITTKELGTVMRSLGQNPTEAELQDMINEVDADGNGTIDFPEFLNLMARKMKDTDSEEELKEAFRVFDKDQNGFISAAELRHVMTNLGEKLTDDEVDEMIREADVDGDGQINYEEFVKVMMAK

SEQ ID NO: 6233 - DNA, 777 bp, Glycine max
  misc_feature: Ceres CLONE ID no. 1120820
  misc_feature: Ceres CDNA ID no. 25891024
  CDS (96)..(554): REFERENCED BY SEQ ID NO: 6234
aaagcagcttctccccccagattattcacttccaaggcatttcatcttattcacttccaaaggggtaccctgagatcacaaaggatcacaaaactatggccaagggagttgcagttctgaacagcagtgagggtgttaaggggaccatcttcttcacccatgaaggaaacggtgccactactgtgacaggaactgtttctggccttaaacctggtctccatggtttccatgtccatgctcttggtgacaccactaacggttgcatgtctaccggtccacatttcaaccctgatggtaaaactcacggtgcaccggaggatgctaatcgtcatgctggcgatctaggaaacatcattgttggggatgatggaactgccaccttcacaatcactgacagccagattccccttagtggtccaaactctattgtcggaagggccgttgttgtccacgcagaccctgatgacctcggaaagggaggccatgaactcagcttgtctactggaaacgcaggcggccgtgttgcttgtggtattattggtcttcagggctaagctgttgcttttcgacgaagagagtgatgtaataaggaggttcgacctctagacatggctagtttgtgtatctttggtgtgtgtgtgtgtggctgtaataattgagcttagtggctcattgcttttggtttaagacgaaagaacacataatgttttctgtttcatgaataacagagatggttgaaaacaataaaataatattgatatgaaaaaaaaaaaaaaa

SEQ ID NO: 6234 - protein, 152 aa, Glycine max
  misc_feature: Ceres CLONE ID no. 1120820
  misc_feature: Ceres CDNA ID no. 25891024
  misc_feature (2)..(152): Pfam Name: Sod_Cu PFAM Desc: Copper/zinc superoxide dismutase
  misc_feature: Homolog of GI Number: 134602 NR Desc: Superoxide dismutase
  misc_feature: Homolog of GI Number: 2305111 NR Desc: Cu/Zn superoxide dismutase
  misc_feature: Homolog of GI Number: 3288850 NR Desc: cytosolic Cu/Zn superoxide dismutase
  misc_feature: Homolog of GI Number: 1204050 NR Desc: cytosolic Cu/Zn
  misc_feature: Homolog of GI Number: 20258871 NR Desc: putative superoxide dismutase
  misc_feature: Homolog of GI Number: 24421235 NR Desc: superoxide dismutase
  misc_feature: Homolog of GI Number: 1204052 NR Desc: cytosolic Cu/Zn
  misc_feature: Homolog of GI Number: 9802567 NR Desc: F22O13.32
  misc_feature: Homolog of GI Number: 38228697 NR Desc: superoxide dismutase
  misc_feature: Homolog of GI Number: 13274150 NR Desc: putative cytosolic CuZn
  misc_feature: Useful for making plants with increased biomass and foliage
MAKGVAVLNSSEGVKGTIFFTHEGNGATTVTGTVSGLKPGLHGFHVHALGDTTNGCMSTGPHFNPDGKTHGAPEDANRHAGDLGNIIVGDDGTATFTITDSQIPLSGPNSIVGRAVVVHADPDDLGKGGHELSLSTGNAGGRVACGIIGLQG

SEQ ID NO: 6235 - DNA, 800 bp, Glycine max
  misc_feature: Ceres CLONE ID no. 1120914
  misc_feature: Ceres CDNA ID no. 25446524
  CDS (78)..(497): REFERENCED BY SEQ ID NO: 6236
gcacaccgaagaaagactactcccatcatctcctccagcttcttcttcttcgtctctgaaactagtttgattcagccatggctaatgcggcgtcaggtatggcagtccatgatgactgcaagctcaagtttctcgaactcaaggctaaaaggactttccgtttcatcgtttacaagatcgaggagcagcagaaacaagtggttgttgagaagctcggcgagcctggtcaatcccatgatgactttgcagcttctcttcctgctgatgaatgccgttacgccgttttcgatttcgatttcgtcactgctgagagttgccagaagagcaagatcttcttcgtcgcatggtctccggacacagcaagagtgagaagcaagatgatctacgcgagctctaaggacaggttcaagagagagcttgacggaattcaagtagagcttcaagctaccgatccaactgagatggatctcgatgttttcaaaagccgagccaactgaggaatacatcctccataaatgaattggttgaatccaaatttctcctactattactgaattgatatatgcttgttctttaagtttgctgtgaaggcaccaccaaaaccaaaacagcttcatttcattggtctctgtcttccctatgtcttttatattttttttttttggtccttgcagtgttttgcttaaaacttaagagatttggcttgtgctcttttaccatttgtgtaagaaacccccaaacactttaccaaaagatgaatcttattggcacattgtgtcgtatcaaaaaaaaaaaaaaaa

SEQ ID NO: 6236 - protein, 139 aa, Glycine max
  misc_feature: Ceres CLONE ID no. 1120914
  misc_feature: Ceres CDNA ID no. 25446524
  misc_feature: The plant senesces significantly late copared to wild-type.
  misc_feature: Useful for making plants with modulated time to senescence
  misc_feature (12)..(139): Pfam Name: Cofilin_ADF PFAM Desc: Cofilin/tropomyosin
  misc_feature: Homolog of GI Number: 15810613 NR Desc: putative actin depolymerizing factor 3
  misc_feature: Homolog of GI Number: 17065584 NR Desc: putative actin depolymerizing factor 1
  misc_feature: Homolog of GI Number: 21536985 NR Desc: actin depolymerizing factor 4
  misc_feature: Homolog of GI Number: 23198338 NR Desc: actin depolymerizing factor 2
  misc_feature: Homolog of GI Number: 4185511 NR Desc: actin depolymerizing factor 4
  misc_feature: Homolog of GI Number: 14906219 NR Desc: actin
  misc_feature: Homolog of GI Number: 14906210 NR Desc: actin
  misc_feature: Homolog of GI Number: 68166241 NR Desc: actin depolymerizing factor
  misc_feature: Homolog of GI Number: 19699262 NR Desc: At1g05180/YUP8H12_21
  misc_feature: Homolog of GI Number: 7339501 NR Desc: actin depolymerizing factor 2
MANAASGMAVHDDCKLKFLELKAKRTFRFIVYKIEEQQKQVVVEKLGEPGQSHDDFAASLPADECRYAVFDFDFVTAESCQKSKIFFVAWSPDTARVRSKMIYASSKDRFKRELDGIQVELQATDPTEMDLDVFKSRAN

SEQ ID NO: 6237 - DNA, 1260 bp, Glycine max
  misc_feature: Ceres CLONE ID no. 1120926
  misc_feature: Ceres CDNA ID no. 24766214
  CDS (46)..(1116): REFERENCED BY SEQ ID NO: 6238
aaaaatacaaaaaaagtttagttttctgttcagattcctagaaaaatgtcggctcttgcagatttaatcaatctcgatctctccgactcctctgagaagatcattgccgagtacatatggattggtggatcaggcttggatatgagaagcaaagcaaggactttgccgggaccagtgaaggatccatcggagttaccgaaatggaactatgacggttcaagcaccggccaagcccccggcgatgacagtgaagtcatcatctaccctcaagctatcttcaaagatccattcagaagaggcaacaacatccttgtgatgtgtgacgcttatacaccggctggcgaaccgatcccaaccaacaaaaggcatgcggcggccaagatctttagcgacccaaccgttgccgccgaagaaacatggtacggaattgagcaagagtatactttgctccaaaaggatactaagtggccagttggttggcccgtcggtggcttcccaggtcctcagggaccatactactgtggagttggagcagacaaagcctttggaagagacatcgtagatgctcattacaaagcatgtctttacgccggaatcaatgtcagtggcactaacggagaagtcatgcccggccagtgggagttccaagtcggtccaaccgttggaatagctgccgctgatcaggtctgggtcgctcgttacatcctcgagaggatcacagaattggctggagtggttttgtctcttgaccctaaaccaattccgggagattggaatggtgcaggagcacacacaaattacagcaccaagtcgatgagggaagatggagggtacgagatcataaagaaagcgatagagaagcttggactgcgtcacaaggaacacatcgctgcttatggtgaaggcaacgagcgtcgtctcactggaagacacgagactgctgatatcaacactttcttatggggtgttgcaaaccgtggggcatcgattagggttggtcgtgacacagagaaagatgggaaaggatactttgaagatcgtaggccagcgtcgaacatggatccctacactgtgacctccatggttgctgaaaccacaatcctctggaaaccatgaaggaagaaaccttgagtctcaaggaacctcttatatcagttcatgttgattcttctattgtctattcctctttatgaaacacttctcatgtgttctttgtttaagaatgtttgatttaaactctttccaaaaaaaaaaaaaaaa

SEQ ID NO: 6238 - protein, 356 aa, Glycine max
  misc_feature: Ceres CLONE ID no. 1120926
  misc_feature: Ceres CDNA ID no. 24766214
  misc_feature (103)..(355): Pfam Name: Gln PFAM Desc: Glutamine synthetase
  misc_feature (17)..(98): Pfam Name: Gln PFAM Desc: Glutamine synthetase
  misc_feature: Homolog of GI Number: 12643762 NR Desc: GLUTAMINE SYNTHETASE
  misc_feature: Homolog of GI Number: 417060 NR Desc: Glutamine synthetase nodule isozyme
  misc_feature: Homolog of GI Number: 1934756 NR Desc: cytosolic glutamine synthetase
  misc_feature: Homolog of GI Number: 599656 NR Desc: glutamate
  misc_feature: Homolog of GI Number: 5701896 NR Desc: glutamate
  misc_feature: Homolog of GI Number: 1084412 NR Desc: glutamate
  misc_feature: Homolog of GI Number: 68599 NR Desc: glutamate
  misc_feature: Homolog of GI Number: 322833 NR Desc: glutamate
  misc_feature: Homolog of GI Number: 436422 NR Desc: glutamine
  misc_feature: Homolog of GI Number: 40457328 NR Desc: glutamine synthetase GS58
MSALADLINLDLSDSSEKIIAEYIWIGGSGLDMRSKARTLPGPVKDPSELPKWNYDGSSTGQAPGDDSEVIIYPQAIFKDPFRRGNNILVMCDAYTPAGEPIPTNKRHAAAKIFSDPTVAAEETWYGIEQEYTLLQKDTKWPVGWPVGGFPGPQGPYYCGVGADKAFGRDIVDAHYKACLYAGINVSGTNGEVMPGQWEFQVGPTVGIAAADQVWVARYILERITELAGVVLSLDPKPIPGDWNGAGAHTNYSTKSMREDGGYEIIKKAIEKLGLRHKEHIAAYGEGNERRLTGRHETADINTFLWGVANRGASIRVGRDTEKDGKGYFEDRRPASNMDPYTVTSMVAETTILWKP

SEQ ID NO: 6239 - DNA, 1073 bp, Glycine max
  misc_feature: Ceres CLONE ID no. 1120946
  misc_feature: Ceres CDNA ID no. 25447151
  CDS (242)..(838): REFERENCED BY SEQ ID NO: 6240
tcatatactactaatatgaccgatggatgatgttacatgtatgatggtgcagtaatttcactatttatccgtttgaatttcgcgacactttaaattcaaagccactctgtgttgaagaggcacagcacaacttgtttatcggaacgttgctataaacgttgttgttttcagataaacacgtgactcactatctatctatcaatcgatatctccgagttcaaccgaaccaaactccgaagctatggcagagctccaaaccaaggttgaacctgttacggtcccggctccggctccggtggatcccgagccaccgctagctgaggctccgccgctcgagaagaaagcggtggcggtgccaccacctgttccggctgcggcagaggaaaccaaagctcttgttgttgtggagaaggagaatgagaagataccagaacctgtaaaaaagaacgcctcaggtggatcccttgatagagacattgctcttgcagaaatagagaaagagaaacgattgtctaatgtgaaggcttgggaagaaagtgaaaaatccaaagcagagaataaagcccaaaagcagctctctgctgttgctgcttgggaaaacagcaagaaagcagctcttgaagctcagctgagaaaaattgaggaacaactagagaaaaagaaagcagaatatggtgaaaaaatgaaaaacaaaatagccttagttcacaagcaagcagaggagaagagagcaatggttgaagccaagcgtggtgaagaaattctcaaggcagaggaaatagctgcaaaacaccgtgcaactggaacctctccaaagaaggcctttggatgcttttaaatttttattcctttttttgttgttgtgcttttgtgcctgatgtcatagcaataatgaaatttttgtctataatattttcatgtttgttttttaaatgttgtttatgtgtgtacgaaatggaaagggggacactatgaagtttgtgacatacagaacagcctctagatctttttgttaagatgaagtgttctatgctgtttattcatttgttttttccataaaaaaaaaaaaaaaa

SEQ ID NO: 6240 - protein, 198 aa, Glycine max
  misc_feature: Ceres CLONE ID no. 1120946
  misc_feature: Ceres CDNA ID no. 25447151
  misc_feature (84)..(195): Pfam Name: Remorin_C PFAM Desc: Remorin
  misc_feature: Homolog of GI Number: 50926698 NR Desc: OSJNBb0039L24.13
  misc_feature: Homolog of GI Number: 34925093 NR Desc: Remorin
  misc_feature: Homolog of GI Number: 17104525 NR Desc: putative DNA
  misc_feature: Homolog of GI Number: 4731573 NR Desc: remorin 1
  misc_feature: Homolog of GI Number: 19310659 NR Desc: putative remorin protein
  misc_feature: Homolog of GI Number: 601843 NR Desc: DNA
  misc_feature: Homolog of GI Number: 21555669 NR Desc: remorin
  misc_feature: Homolog of GI Number: 42573455 NR Desc: remorin family protein
  misc_feature: Homolog of GI Number: 4883530 NR Desc: remorin 2
  misc_feature: Homolog of GI Number: 50938461 NR Desc: remorin
MAELQTKVEPVTVPAPAPVDPEPPLAEAPPLEKKAVAVPPPVPAAAEETKALVVVEKENEKIPEPVKKNASGGSLDRDIALAEIEKEKRLSNVKAWEESEKSKAENKAQKQLSAVAAWENSKKAALEAQLRKIEEQLEKKKAEYGEKMKNKIALVHKQAEEKRAMVEAKRGEEILKAEEIAAKHRATGTSPKKAFGCF

SEQ ID NO: 6241 - DNA, 779 bp, Glycine max
  misc_feature: Ceres CLONE ID no. 1120953
  misc_feature: Ceres CDNA ID no. 29191400
  CDS (70)..(576): REFERENCED BY SEQ ID NO: 6242
accccctcgtcgctgctgcgtctctctctctcccgcaacctccagataataaaaaaacaataagcgaccatgttggtgtacaccgatcttctcaccggtgatgagcttctctctgactctttcccttacaaggagattgagaatggtattctttgggaagttgaaggaaagtggactaccaagggatgtgtagaggttaacattggtgccaacccatctgctgaggaaggtggtgaggacgagggtgttgacgactctgttgagaaggttgttgacattgtcgacactttcaggcttcaggagcagcccacttacgacaagaaggggttcatcgcctacatcaagaagtacatcaagcttttgacgcccaagctcaccccggaacagcaggaggagttcaagaagggtattgagggagctaccaagtaccttctccccaagctcaaggacttccaattctttgttggggagggcatgcacgatgacagcactattgtctttgcttattacaaggagggtgctactaacccaacatttttgtactttgcacatggtttgaaggaggtcaagtgctgagtgagaagctctttgtcgggttactatggtcgggtcgcagcgactctcagtttatgcttatgtgttgtgtttttggtcgtccccctattaaaatttgtctaccagtttgcttttttctttcttgcgtcttgtgttctgtgttgggaaattgttaagttatttgatctcgaatacaaacggttatttgaaaaaaaaaaaaaaaa

SEQ ID NO: 6242 - protein, 168 aa, Glycine max
  misc_feature: Ceres CLONE ID no. 1120953
  misc_feature: Ceres CDNA ID no. 29191400
  misc_feature (1)..(165): Pfam Name: TCTP PFAM Desc: Translationally controlled tumour protein
  misc_feature: Homolog of GI Number: 16033628 NR Desc: translationally controlled tumor protein
  misc_feature: Homolog of GI Number: 19310667 NR Desc: putative translationally controlled tumor protein
  misc_feature: Homolog of GI Number: 21595816 NR Desc: translationally controlled tumor protein
  misc_feature: Homolog of GI Number: 83316256 NR Desc: translationally controlled tumor protein
  misc_feature: Homolog of GI Number: 78191404 NR Desc: P23 tumor protein
  misc_feature: Homolog of GI Number: 2507443 NR Desc: Translationally controlled tumor protein homolog
  misc_feature: Homolog of GI Number: 303835 NR Desc: 21kd polypeptide
  misc_feature: Homolog of GI Number: 1419685 NR Desc: TCTP
  misc_feature: Homolog of GI Number: 587546 NR Desc: P23 protein
  misc_feature: Homolog of GI Number: 76161018 NR Desc: P23
MLVYTDLLTGDELLSDSFPYKEIENGILWEVEGKWTTKGCVEVNIGANPSAEEGGEDEGVDDSVEKVVDIVDTFRLQEQPTYDKKGFIAYIKKYIKLLTPKLTPEQQEEFKKGIEGATKYLLPKLKDFQFFVGEGMHDDSTIVFAYYKEGATNPTFLYFAHGLKEVKC

SEQ ID NO: 6243 - DNA, 496 bp, Glycine max
  misc_feature: Ceres CLONE ID no. 1120957
  misc_feature: Ceres CDNA ID no. 40351669
  CDS (59)..(313): REFERENCED BY SEQ ID NO: 6244
ctctcgcttattgctgccgtctctactctctttaccgtgccttgagattcttgcgaagatggttctacaaaacgatatcgatctgcttaacccaccagcagagcttgagaagaggaagcacaagctcaagcgtcttgttcaatctcccaactcattcttcatggatgtgaagtgccaaggctgcttcaacatcactactgttttcagtcactcgcagactgttgtggtgtgtggaaactgccagacagttctttgccagcctacaggaggaaaggccaggctcacagaaggatgctctttcaggaaaaagtgagatttgattttgaagcttgaagcaatcatcaaatcagtcaaagccgttttcttttttgttctaatgatattatgaatcttggttatctgttttaaaaaggttggagtttagtggaagaaacctttgttgatgtttggattttaaggttattactattttaaaggttcaaaaaaaaaaaaaaaa

SEQ ID NO: 6244 - protein, 84 aa, Glycine max
  misc_feature: Ceres CLONE ID no. 1120957
  misc_feature: Ceres CDNA ID no. 40351669
  misc_feature (30)..(84): Pfam Name: Ribosomal_S27e PFAM Desc: Ribosomal protein S27
MVLQNDIDLLNPPAELEKRKHKLKRLVQSPNSFFMDVKCQGCFNITTVFSHSQTVVVCGNCQTVLCQPTGGKARLTEGCSFRKK

SEQ ID NO: 6245 - DNA, 1364 bp, Glycine max
  misc_feature: Ceres CLONE ID no. 1121034
  misc_feature: Ceres CDNA ID no. 40041394
  CDS (79)..(1137): REFERENCED BY SEQ ID NO: 6246
aattttttttataatacaagaccagagttagtcttttttgaggtactcagccatcactaatcagcactagcaacagccatgggagaggtagacacagctttcatccaagaaccagaacacaggccaaagctctctcccaaccaagcagaaggaattcccataattgacctctctccaataaccaaccacgcagtttcagatccatctgccattgaaaacttagtgaaggagatagaaagtgcatgcaaggagtggggtttcttccaagtaaccaaccatggggtgcccctcactctaaggcaaaacattgagaaagcctcaagactgttctttgaacagactcaggaggagaagaagaaggttagcagagacgagaaatccacaactggttactatgacacagaacacaccaagaacgttagggactggaaagaagtgtttgattttctagccaaagatcccacttttattcctgtcacttctgatgaacatgatgatcgagtcactcactggactaatgtatcccctgaataccctccaaactttagggatataatggaagagtatattcaagaggtggaaaagctgtcctttaagctcttggagcttatagctctgagcttaggccttgaggcaaagaggtttgaagagtttttcatgaaagatcaaacgagctttattcgactcaaccactatcctccatgcccttaccctcaccttgctcttggtgttggccgacacaaggatggtggagccttaaccgttcttgcacaagatgaggttggaggacttgaagtgaaacgcaaagcagatcaagagtggataagagtgaaacctacaccagatgcttatataatcaacgttggtgatcttattcaggtttggagcaatgatgcctatgagagtgtggaacacagagtgatggttaactctgagaaagaaaggttttctattccgtttttcttcaaccctgcacatgacatagaagtcaagcctttggaggagttgacaaatgaacacaatccttcaaaatataggccatacaaatggggcaagtttcttgttcacagaaagggaagcaatttcaagaaacagaatgtggaaaacattcagatttatcattataagataacctaaaggataagaaattagcttattcatgtaaagcagattgatctaagaatgtttctgatatatatgtgggactgtgatattatttgctgctaaaaagttactagtgtgcattatgtatagcaacgaatagaagaaacatatttggctgtctaaaaaaaaaaaaaaaaaaaaaaaaaaaaaaaaaaaaaaaaaaaaaaaaaaaaaaaaaaaaagaaaaaaaaaaaaaaaaa

SEQ ID NO: 6246 - protein, 352 aa, Glycine max
  misc_feature: Ceres CLONE ID no. 1121034
  misc_feature: Ceres CDNA ID no. 40041394
  misc_feature (197)..(298): Pfam Name: 2OG PFAM Desc: 2OG
  misc_feature: Homolog of GI Number: 50428684 NR Desc: putative oxidoreductase
  misc_feature: Homolog of GI Number: 42572483 NR Desc: oxidoreductase
  misc_feature: Homolog of GI Number: 30685157 NR Desc: oxidoreductase
  misc_feature: Homolog of GI Number: 50942943 NR Desc: putative Isopenicillin N synthase and related dioxygenases
  misc_feature: Homolog of GI Number: 18103924 NR Desc: putative oxylase protein
  misc_feature: Homolog of GI Number: 22137300 NR Desc: AT5g05600/MOP10_14
  misc_feature: Homolog of GI Number: 21537324 NR Desc: leucoanthocyanidin dioxygenase
  misc_feature: Homolog of GI Number: 20259908 NR Desc: putative anthocyanidin synthase
  misc_feature: Homolog of GI Number: 56202311 NR Desc: putative anthocyanidin synthase
  misc_feature: Useful for making plants that grow better in shade
  misc_feature: Useful for making plants with altered leaf shape eg curled leaves
MGEVDTAFIQEPEHRPKLSPNQAEGIPIIDLSPITNHAVSDPSAIENLVKEIESACKEWGFFQVTNHGVPLTLRQNIEKASRLFFEQTQEEKKKVSRDEKSTTGYYDTEHTKNVRDWKEVFDFLAKDPTFIPVTSDEHDDRVTHWTNVSPEYPPNFRDIMEEYIQEVEKLSFKLLELIALSLGLEAKRFEEFFMKDQTSFIRLNHYPPCPYPHLALGVGRHKDGGALTVLAQDEVGGLEVKRKADQEWIRVKPTPDAYIINVGDLIQVWSNDAYESVEHRVMVNSEKERFSIPFFFNPAHDIEVKPLEELTNEHNPSKYRPYKWGKFLVHRKGSNFKKQNVENIQIYHYKIT

SEQ ID NO: 6247 - DNA, 1930 bp, Glycine max
  misc_feature: Ceres CLONE ID no. 1121076
  misc_feature: Ceres CDNA ID no. 40041395
  CDS (257)..(1618): REFERENCED BY SEQ ID NO: 6248
atggagctatctgaaacgcgggggaagaaagagggcaacgcagatgaaacgaaggtagaaaaacaaaattgacaaaaaagttcgatcatattagggttagggtttttctacgcatcgaatagtcactcaaattcgactcaaattccccaaattggagaaacctcaacattactgccttgctagggatagaaagaaggggtggcatcaaaagactcaaagcagtggaaatgctgggagaataaatagttgagtggaaatgagtaggttgtctttcaggcctcgaccacttgacattcataagaagctccccattgtcaagtccatcaaggactttgatgatgatgaggcaccagcttctactacccggaattcacaattactgcgtgctgttcctgagatcgaaaatgaggtacctcaaactcccagcaagaaattggcttctgaaatacctactcctcagtttgttgttgtggatacatatgaaagggactattcttgcactttttctcaaccgacttcctatttgcgggcaagagctcgggctgagattggcgagtttgttgagtatgacttagataatgaagatgaggattggcttttcgagtttaatgaagagaggaagattttgacacctgaaacgtttgagagtcttcttttcaagttggaggtattggatcataaagctcgtgaaagagctggacttataacacctacacttggttcaccaattcctgtgctactacggcttgatactgctattgaggccttacaagcacagggcttcaagtattcaattatccagtccatatatgattattggaaagagaagcgagaacggtggcaaaagcctgttctgcgacgtttgcagccgcctccaccagttaacgacaccaacccgtataatgtctttcggccaagggagaaggcccacagacttcacacaagaaggatgcaaaggagagaaaacaacgtgcagtcatttgaaaagctccgccaggtcaggcgcaaccttgaccaagctaaaagcttgttggaagcgttgatcaagagggaagagaaaaaaagagaagtaatggagagtgaagttatgctgcagaggatgcaaatgaagtacaagcatgaaaccgagtttttggaagacaacatagcactctctggatttactcccttcacttccaagtttgtttccagtgaagaggaatatttcgattcagatgatgtcatgataaaccgtcttccccgcacacggtctactgcagtacagtatttgccttctcatgaaaccaacgttcccatggttcctgccgttagtacaaagcaagagttcaggaggagatatgtcccacatggatggcctcataaactggatccacttgagccagttttattgttcaccaaacctctacttccagataagttggccatggcaggcatcatgccaccagattcaatcacaccaaatggtggggtgtcaccaccgccatatagatttcgtggaagaatgggtagaggtggccgtataatatttgaccgatggaatccacttatgcaaacaccaattgattgtggtaattcttattatatgccgccaaaaccacgaccttcaacatgtaactaatttgtgtgtgcaatctgtggtgctaaattggtatctatcctgttgtttagaatttaattgataacctaatcattaggaaggtacaatgttgcgaagggaacttgtaaacatgatttaggcctgtaagttttttttttcctcttcttttctaggtacaaggccattaagtatttttcattggggtagtaaaagctagatgcattttgtattgatatattttcgagtttcctctgccttagctcatgcaatgggttcacactttttatgtagaaaataaataaaataaagtttcttccaaaaaaaaaaaaaaaa

SEQ ID NO: 6248 - protein, 453 aa, Glycine max
  misc_feature: Ceres CLONE ID no. 1121076
  misc_feature: Ceres CDNA ID no. 40041395
  misc_feature: Homolog of GI Number: 50944455 NR Desc: enhancer of polycomb
  misc_feature: Homolog of GI Number: 50253111 NR Desc: enhancer of polycomb
  misc_feature: Homolog of GI Number: 20152913 NR Desc: enhancer of polycomb
  misc_feature: Homolog of GI Number: 3152596 NR Desc: YUP8H12R.36
MSRLSFRPRPLDIHKKLPIVKSIKDFDDDEAPASTTRNSQLLRAVPEIENEVPQTPSKKLASEIPTPQFVVVDTYERDYSCTFSQPTSYLRARARAEIGEFVEYDLDNEDEDWLFEFNEERKILTPETFESLLFKLEVLDHKARERAGLITPTLGSPIPVLLRLDTAIEALQAQGFKYSIIQSIYDYWKEKRERWQKPVLRRLQPPPPVNDTNPYNVFRPREKAHRLHTRRMQRRENNVQSFEKLRQVRRNLDQAKSLLEALIKREEKKREVMESEVMLQRMQMKYKHETEFLEDNIALSGFTPFTSKFVSSEEEYFDSDDVMINRLPRTRSTAVQYLPSHETNVPMVPAVSTKQEFRRRYVPHGWPHKLDPLEPVLLFTKPLLPDKLAMAGIMPPDSITPNGGVSPPPYRFRGRMGRGGRIIFDRWNPLMQTPIDCGNSYYMPPKPRPSTCN

SEQ ID NO: 6249 - DNA, 744 bp, Glycine max
  misc_feature: Ceres CLONE ID no. 1121078
  misc_feature: Ceres CDNA ID no. 40351670
  CDS (63)..(560): REFERENCED BY SEQ ID NO: 6250
ctctctcgcaaaacatcaaaccgttttgtctctttgcgatcagatctcatcggagagcaattatggcttcaggtttcagcggcgatgaaactgctcctttcttcggattcctcggcgccgccgccgctctcgttttctcatgtatgggagcagcgtacgggacagcgaagagcggggtcggcgtggcgtcgatgggtgtgatgagaccagagcttgtgatgaaatcgattgttcccgtggtcatggctggtgtgttaggtatctatggtctcatcattgctgtcatcatcagtactggaatcaaccctaaggccaagtcttactatctcttcgacggctatgctcatctctcttcgggtctcgcttgtggtctcgccggtctctccgccggtatggctattggtatcgtcggcgacgctggtgttagagcgaatgcacaacaaccgaagctgtttgtgggaatgattttgattctcatctttgctgaagcacttgcgctgtacggtctcattgttggtatcatcctctcgtctcgtgctggtcagtctagagccgagtgaactcagaaagccttttggtcaagtccttttgtaatgtttatgatatgtttcacttttggttttcttttgtggcattgtgagtttttgagtttctcatgggaacaagcaaaacatgggtgataatcatttgactttctggttctaattatatttttcatttgcacactcaaaaaaaaaaaaaaaa

SEQ ID NO: 6250 - protein, 165 aa, Glycine max
  misc_feature: Ceres CLONE ID no. 1121078
  misc_feature: Ceres CDNA ID no. 40351670
  misc_feature (93)..(158): Pfam Name: ATP PFAM Desc: ATP synthase subunit C
MASGFSGDETAPFFGFLGAAAALVFSCMGAAYGTAKSGVGVASMGVMRPELVMKSIVPVVMAGVLGIYGLIIAVIISTGINPKAKSYYLFDGYAHLSSGLACGLAGLSAGMAIGIVGDAGVRANAQQPKLFVGMILILIFAEALALYGLIVGIILSSRAGQSRAE

SEQ ID NO: 6251 - DNA, 1259 bp, Glycine max
  misc_feature: Ceres CLONE ID no. 1121084
  misc_feature: Ceres CDNA ID no. 25447443
  CDS (74)..(934): REFERENCED BY SEQ ID NO: 6252
acctttagttcagttactacttacgaaaccatcttctcttctcttctcttaaacccttcaaaaccccacgacgatgatgactactgctcccactacctctactttcttcttcctcctctcttctctcaatccccacccacctcgctccttcttcagacacaaaccactctttaacaacccctcccttctcctgcgccctcctttgaggtctcctcgacacttaacccgcgccgccgccgccgcctccgccgctgatgacaacatcgccttcgtcgagagcaagagcttcgtgtccacgcagggctgggactccgacacagtcctcgactacaaaatcaacgaggacgagttccacaagatctgcctggtcgattgcgacttcttcattcgcaagccccccgaccccgacaacgatgtctacgatttcagagagatgtatgttactcctccggatacagatgtttattcaattcccaaggttctcgctccaatgccgcagaagtacattagatgtgcgcagagtgattatggaagctacaatgtgacagagccacctattgatgcgcctcgagatcctctgtataaaactgagagggagatcctcaaggtgtacttgacaaaacactacaaaaatcgaaggaagggtgatcctgagtttgttcttgattttgaagagatttatgttgttgattccaaaaccaagtcaattaccagagccaaagttttggtaacagctcctggagggagaacaagagatagaaggagtgacttgcttgttatatctgatcgtgggagctccttcaaaataatacatgcgagtgaaaaagaggatccaacgactgtcatagaaaaacaagagtgggagaatagcagagaagaaatggagagacatcttagaaagctaagagacttcagcatttcaaattggttttgagtgataagaaggtattcctttccaagaatgcctcatgggtataaacagcatggtacagaggtcgaacttgggcacgaacatacgggcaattggacttaatctttcacttttgaaattgtgtgctagctgcttgatcgtttgtatattttgttgtaacttgttgaagatgcggctgttggaattcaatatctatgagagtgatctgccgatatgctgttatgacctacactacagttgaatgttctctggatgtataccttggttttttctccaaactctgatcaaacctactgatttaagaatgagaataaaaaaaaaaaaaaaa

SEQ ID NO: 6252 - protein, 286 aa, Glycine max
  misc_feature: Ceres CLONE ID no. 1121084
  misc_feature: Ceres CDNA ID no. 25447443
  misc_feature: Homolog of GI Number: 56783932 NR Desc: putative tonoplast membrane integral protein
MMTTAPTTSTFFFLLSSLNPHPPRSFFRHKPLFNNPSLLLRPPLRSPRHLTRAAAAASAADDNIAFVESKSFVSTQGWDSDTVLDYKINEDEFHKICLVDCDFFIRKPPDPDNDVYDFREMYVTPPDTDVYSIPKVLAPMPQKYIRCAQSDYGSYNVTEPPIDAPRDPLYKTEREILKVYLTKHYKNRRKGDPEFVLDFEEIYVVDSKTKSITRAKVLVTAPGGRTRDRRSDLLVISDRGSSFKIIHASEKEDPTTVIEKQEWENSREEMERHLRKLRDFSISNWF

SEQ ID NO: 6253 - DNA, 1228 bp, Glycine max
  misc_feature: Ceres CLONE ID no. 1121125
  misc_feature: Ceres CDNA ID no. 25446806
  CDS (104)..(946): REFERENCED BY SEQ ID NO: 6254
aaaagattggaaacagctgaaaagaatagcgtgacaatcagcaaaggcagaaagagctgaaggtgtgacacaaaagtagcaaatttcagcattagcgtagaaaatggagttcgttcctgaagaaggcaagcaccttcacgaggattgctccactctgattttgcctgctctgtcaattggcaatgtggggcagctggttgcagatcttttgatttcatcaatgggatcagagagagttgggtatttggatgatcctaacgttttgccctgtgttggcaatgatgcttatggaccctttcctcaaggagaccttgcacttcctcttgaagcttatgattccctttctaatgctctcactatcatccaacagagatcaccggtggttaagggtatgatgattgagtttgcaaaaaatatggctgattttcttgctggtagtggaaagaagcatattattgttctctccagcttagattttggaaaatggcaaaaagttgacatgtcaagtggtttgcagattcattacctttctagtgccaacagcaatgggacagatgaaaactgtgaacagcttgggtggaagaaacttcaggagtatgacccttctcaaaagcattggaaacatcttagtgatttagctgaaggaaatgtaactctggaagatattacttctgtagaagatgagctagaagaagaaaattattatgctagcttgccttttgctgcacttttttcttttctcaaggctaaaggtttgaaggtcacatgcttgttatgttattgctcagaaggggacaacatatcagatgcttttcaattaggcgatgcagtatgtaaacttctccagctgaatcatcctattactggaattgaaagtggcaaatggagagttccactttcttggatgactgtgtatggaccacccctagatgtgtccatcttctaaggttggattgatgttctaatttgtaaaattaaatggtggctgaagataaaaattatggttttagaattttctctcttttttggaatcaaacacgatatgtgttatgatgtgatgtgcgtttagaagtgaaggatcaaggatcctttgattcgcaaaattgtaggaaacagcacaggatagaacaaatgcttcaaattttgttactcacagtaacatggaataattttaggttccaaatacaaagtactaaaagacactcatattctaaaaaaaaaaaaaaaa

SEQ ID NO: 6254 - protein, 280 aa, Glycine max
  misc_feature: Ceres CLONE ID no. 1121125
  misc_feature: Ceres CDNA ID no. 25446806
  misc_feature: Homolog of GI Number: 50736543 NR Desc:  similar to tumor necrosis factor superfamily
  misc_feature: Homolog of GI Number: 32484314 NR Desc: Clast3
  misc_feature: Homolog of GI Number: 37589726 NR Desc: Tumor necrosis factor superfamily
  misc_feature: Homolog of GI Number: 68392604 NR Desc:  similar to Tumor necrosis factor superfamily
  misc_feature: Homolog of GI Number: 22726189 NR Desc: tumor necrosis factor superfamily
  misc_feature: Homolog of GI Number: 7634785 NR Desc: HDCMC29P
  misc_feature: Homolog of GI Number: 24647855 NR Desc: CG12321
  misc_feature: Homolog of GI Number: 54639711 NR Desc: GA11555
  misc_feature: Useful for accelerating crop development and harvest
  misc_feature: Useful for sterility
MEFVPEEGKHLHEDCSTLILPALSIGNVGQLVADLLISSMGSERVGYLDDPNVLPCVGNDAYGPFPQGDLALPLEAYDSLSNALTIIQQRSPVVKGMMIEFAKNMADFLAGSGKKHIIVLSSLDFGKWQKVDMSSGLQIHYLSSANSNGTDENCEQLGWKKLQEYDPSQKHWKHLSDLAEGNVTLEDITSVEDELEEENYYASLPFAALFSFLKAKGLKVTCLLCYCSEGDNISDAFQLGDAVCKLLQLNHPITGIESGKWRVPLSWMTVYGPPLDVSIF

SEQ ID NO: 6255 - DNA, 1210 bp, Glycine max
  misc_feature: Ceres CLONE ID no. 1121300
  misc_feature: Ceres CDNA ID no. 40351671
  CDS (173)..(961): REFERENCED BY SEQ ID NO: 6256
cacacacacaccattattttcctctccctcctcctgaccacccacccacctaccagccaccaaggcggccgatctcccctccccagccgcgccaccgccgacgccgcagctccggcagccgttcgtctcgagattgatctttggtgactgttagaagccacagacactgaagatggcgcagcctgctgagctttcccgcgaggagaatgtgtacatggccaagcttgcagagcaggctgagaggtacgaggagatggttgagttcatggagaaggtggccaagacagttgactccgaggagctcacagtcgaggagcgcaaccttctatcagttgcttacaagaatgttattggtgcccgccgtgcctcgtggcgcatcatttcctccattgagcagaaggaagagagccgtggcaatgaggaccgtgtcacactcatcaaggactaccgtggaaagattgaggttgagctcaccaagatctgtgatggtatcctcaagcttcttgattcccaccttgtcccctcatctactgctccagagtccaaggtcttctacctgaagatgaagggtgattactacaggtaccttgcggagttcaagagtggaactgagaggaaggatgctgctgagaacaccatggtcgcatacaaagctgctcaggagattgcacttgcagagctgcccccgactcatcctattaggcttgggctggcactcaacttctcagtgttctattatgagatcctcaactcgcctgaccgtgcttgcgaccttgccaagcaggcttttgatgaggccatctcggaactggactctctgagcgaggagtcgtacaaggacagcactttgatcatgcagcttctgcgtgataacctgacgctgtggacttctgacatctcggaggacgccgctgaagaaatgaaggatgctcccaagggtgaatctggagatggacagtaaacactgtctatgtgttcagaaacttgtctttctcgcttgttcagtgtagattgtaatgtcatcgtggttgctggtaattggaggctccaatttgtgttgtgatagggaagcttgtagctgccttgcttgctcgacagcctgattatcgggctgcactggttattgcctcttgttgaacctttgtgttactttggtggttttaaaatttttctgctgctcttgtttgtggcccccaaaaaaaaaaaaaaa

SEQ ID NO: 6256 - protein, 262 aa, Glycine max
  misc_feature: Ceres CLONE ID no. 1121300
  misc_feature: Ceres CDNA ID no. 40351671
  misc_feature: Useful for making plants with modulated growth and phenotype characteristics
  misc_feature: null
  misc_feature: The sequence is a functional homolog of  SEQ ID NO 2350 in the  10/374,780 US patent application
  misc_feature: The sequence is a functional homolog of  SEQ ID NO 342 in the  10/412,699 US patent application
  misc_feature: The sequence is a functional homolog of  SEQ ID NO 344 in the  10/412,699 US patent application
  misc_feature: The sequence is a functional homolog of  SEQ ID NO 782 in the  11/479,226 US patent application
  misc_feature: The sequence is a functional homolog of  SEQ ID NO 786 in the  11/479,226 US patent application
  misc_feature: The sequence is a functional homolog of  SEQ ID NO 789 in the  11/479,226 US patent application
  misc_feature: The sequence is a functional homolog of  SEQ ID NO 790 in the  10/225,066 US patent application
  misc_feature: The sequence is a functional homolog of  SEQ ID NO 797 in the  11/479,226 US patent application
  misc_feature: The sequence is a functional homolog of  SEQ ID NO 801 in the  11/479,226 US patent application
  misc_feature: The sequence is a functional homolog of  SEQ ID NO 805 in the  11/479,226 US patent application
  misc_feature: Useful for making plants with modulated drought sensitivity
  misc_feature (9)..(246): Pfam Name: 14 PFAM Desc: 14
MAQPAELSREENVYMAKLAEQAERYEEMVEFMEKVAKTVDSEELTVEERNLLSVAYKNVIGARRASWRIISSIEQKEESRGNEDRVTLIKDYRGKIEVELTKICDGILKLLDSHLVPSSTAPESKVFYLKMKGDYYRYLAEFKSGTERKDAAENTMVAYKAAQEIALAELPPTHPIRLGLALNFSVFYYEILNSPDRACDLAKQAFDEAISELDSLSEESYKDSTLIMQLLRDNLTLWTSDISEDAAEEMKDAPKGESGDGQ

SEQ ID NO: 6257 - DNA, 989 bp, Glycine max
  misc_feature: Ceres CLONE ID no. 1121348
  misc_feature: Ceres CDNA ID no. 36706690
  CDS (3)..(866): REFERENCED BY SEQ ID NO: 6258
accaagctcctcctcctccacaggaaaagcaacagcgcagcgcggcttcactggtttcgccctcaatttcgagagcgagtcttggaaggccttccatggctcagccgtcgctgctcctcggctctccggcatcgatcgtcctcctccttctctccttcttccaagggccggtagtgagcgccatcacgttcaccttcgccaaccggtgcacggacacggtgtggcccgggctgctctcgggctccacctcgccgccgctggaaaccaccggcttcgcgctctcgccgggccagtcgcgctcaatctacgggcccaccgggtggtcgggccgcttctgggcgcgctctggctgtaatttcaacggcggcaagggcacctgcgtcacgggggactgcggctccggcgagatagagtgccgcggcgccggggccaccccgcccgccacgctcgcggagttcaccctcgacggcgacggcgggaaggacttctacgacgtcagcctcgtcgacggctacaacctgcccatgctggtgcagccgtccgcgcctgggtgccccgacaccgggtgcctcgtcgacctcaacgagcgctgcccctcggagctccgctccggcggcggcctcgcctgccgcagcgcctgcgaggccttcggcaagcccgagttctgctgcaacggcgcctacgggaaccctgacacgtgccacccctcccagtactcgcagctcttcaagtcggcgtgccccaagtcctacagctacgcctacgacgacgccacctccaccttcacctgcaaccacaccgattacaccattaccttctgcccgcagtccaatccttacaggtacctacctctgaatagtttctgatgctatgacagtgcaatctagttgaaatcatagtgttgcagatctgaatctgattcaactcaacaatgatattttctctgggctagaaatataatgagattttgattaaaaaaaaaaaaaaaa

SEQ ID NO: 6258 - protein, 256 aa, Glycine max
  misc_feature: Ceres CLONE ID no. 1121348
  misc_feature: Ceres CDNA ID no. 36706690
  misc_feature (36)..(243): Pfam Name: Thaumatin PFAM Desc: Thaumatin family
  misc_feature: Homolog of GI Number: 50726592 NR Desc: putative thaumatin
  misc_feature: Homolog of GI Number: 7269268 NR Desc: thaumatin
  misc_feature: Homolog of GI Number: 21592749 NR Desc: putative thaumatin
  misc_feature: Homolog of GI Number: 20466021 NR Desc: putative thaumatin
  misc_feature: Homolog of GI Number: 7270849 NR Desc: putative thaumatin
  misc_feature: Homolog of GI Number: 2262099 NR Desc: thaumatin isolog
  misc_feature: Homolog of GI Number: 31430158 NR Desc: putative thaumatin
  misc_feature: Homolog of GI Number: 50726590 NR Desc: putative thaumatin
  misc_feature: Homolog of GI Number: 21280949 NR Desc: putative thaumatin protein
  misc_feature: Homolog of GI Number: 8778995 NR Desc: Contains similarity to SCUTL1 mRNA from Vitis vinifera gbAF195653
MAQPSLLLGSPASIVLLLLSFFQGPVVSAITFTFANRCTDTVWPGLLSGSTSPPLETTGFALSPGQSRSIYGPTGWSGRFWARSGCNFNGGKGTCVTGDCGSGEIECRGAGATPPATLAEFTLDGDGGKDFYDVSLVDGYNLPMLVQPSAPGCPDTGCLVDLNERCPSELRSGGGLACRSACEAFGKPEFCCNGAYGNPDTCHPSQYSQLFKSACPKSYSYAYDDATSTFTCNHTDYTITFCPQSNPYRYLPLNSF

SEQ ID NO: 6259 - DNA, 766 bp, Glycine max
  misc_feature: Ceres CLONE ID no. 1121409
  misc_feature: Ceres CDNA ID no. 25891124
  CDS (2)..(613): REFERENCED BY SEQ ID NO: 6260
tactcatcggcggagaggtcttttcacggcgttgctccctcttctcagcacgaaaatgggtgttttcaggtttcaccagtaccaggttgtgggaagagctctcccgacagagaaggaggtgcagcccaagatttacaggatgaagctctgggccacgaacgaggttcgtgccatgtccaagttctggtacttcttgaggaagcaggtgaagattaagaagagcaatggccagatgcttgccatcaacgagatctttgagaagaacccgaccacgatcaagaactttggaatctggctgaggtaccagagccgtacaggttaccacaacatgtacaaggagttccgtgacactactttgaacggagccgtggagcagatgtacaccgagatggcgtcgaggcacagagtcaggttcccttgcattcagatcatcaagacagctactgtcccggccgctttgtgcaagagagagagcacgaagcagttccacaatagcaagatcaagttccctttggtctacaggaaggttagacctcccaccaggaagctcaagactacctacaaggcctcaagcccaacttgttcatgtagagaagctctcttagggtattgaagttttatacttttgagagttttttccttctttaattttggggcttagaatcttggaagtattattatggactatgttattttctataccggataatttttgtttgtcgtttttagttggcagtgaggctttaaaacaaaaaaaaaaaaaaaa

SEQ ID NO: 6260 - protein, 185 aa, Glycine max
  misc_feature: Ceres CLONE ID no. 1121409
  misc_feature: Ceres CDNA ID no. 25891124
  misc_feature (5)..(178): Pfam Name: Ribosomal_L18ae PFAM Desc: Ribosomal L18ae protein family
  misc_feature: Homolog of GI Number: 30102898 NR Desc: At2g34480
  misc_feature: Homolog of GI Number: 23197702 NR Desc: 60S ribosomal protein L18A
  misc_feature: Homolog of GI Number: 20453309 NR Desc: AT3g14600/MIE1_10
  misc_feature: Homolog of GI Number: 21593925 NR Desc: putative 60S ribosomal protein L18A
  misc_feature: Homolog of GI Number: 34909590 NR Desc: putative ribosomal protein L18a
  misc_feature: Homolog of GI Number: 50511482 NR Desc: putative 60S ribosomal protein L18a
  misc_feature: Homolog of GI Number: 13430184 NR Desc: ribosomal protein L18a
  misc_feature: Homolog of GI Number: 25518134 NR Desc: probable 60S ribosomal protein L18A
  misc_feature: Useful for making ornamental plants with modified flowers
  misc_feature: Useful for making ornamental plants with modified leaves
  misc_feature: Useful for making plants with altered leaf shape eg curled leaves
  misc_feature: Useful for making shorter plants
MGVFRFHQYQVVGRALPTEKEVQPKIYRMKLWATNEVRAMSKFWYFLRKQVKIKKSNGQMLAINEIFEKNPTTIKNFGIWLRYQSRTGYHNMYKEFRDTTLNGAVEQMYTEMASRHRVRFPCIQIIKTATVPAALCKRESTKQFHNSKIKFPLVYRKVRPPTRKLKTTYKASSPTCSCREALLGY

SEQ ID NO: 6261 - DNA, 693 bp, Glycine max
  misc_feature: Ceres CLONE ID no. 1121428
  misc_feature: Ceres CDNA ID no. 40351672
  CDS (67)..(495): REFERENCED BY SEQ ID NO: 6262
aacaaatctctccttgctcggtcgttcaatcggaaagaagaagaagaacctcaaagcgtttaggagatggggaaagacgctaaagctggtgggaagggtaagggaaagcaagctggtggcagtgatgaagcctcctccaagggtaaaggcaaagctggaaaagctgctgatggtcttggaacatgcacttatgttaaagcgaggcatgttttgtgtgaaaagcaaggaaagatcaatgaggcatacaagaagttgcaggatggttggttgagcaatggagacaaagttcctcctgctgagtttgctaagattgcagcagagtactcggagtgcccatcagggaaaaaaggaggagatcttggatggttccctagaggaaagatggcaggtccattccaagatgtcgccttcaacacacctgttggtgtcactagtgcacctttcaaatctacgcatggataccacatcatcttgtcggaaggaaggaaaaactgacagattacatctctgttctgctctgctctactctagtcttgtggatgtcacttgctagttgttactgtaacttatatataaaaaacacagcctttgttgttctggccaaaatgtttgctacaagttgttaacaaatcttctctgttgttttgaataatgaatttctgaagactgtgtgattcaaaaaaaaaaaaaaaa

SEQ ID NO: 6262 - protein, 142 aa, Glycine max
  misc_feature: Ceres CLONE ID no. 1121428
  misc_feature: Ceres CDNA ID no. 40351672
  misc_feature (76)..(139): Pfam Name: Rotamase PFAM Desc: PPIC
MGKDAKAGGKGKGKQAGGSDEASSKGKGKAGKAADGLGTCTYVKARHVLCEKQGKINEAYKKLQDGWLSNGDKVPPAEFAKIAAEYSECPSGKKGGDLGWFPRGKMAGPFQDVAFNTPVGVTSAPFKSTHGYHIILSEGRKN

SEQ ID NO: 6263 - DNA, 732 bp, Glycine max
  misc_feature: Ceres CLONE ID no. 1121447
  misc_feature: Ceres CDNA ID no. 36706687
  CDS (50)..(460): REFERENCED BY SEQ ID NO: 6264
gaaacattcgattcattctcgcgatcctctctgattcgaagctcaagccatggctcgtacgaagcagactgctaggaaatccaccggaggaaaagctcccaggaagcaactcgccaccaaggcggcgaggaaatcagcgccgaccacgggaggagtcaagaagcctcaccgttaccgtcccggaaccgtcgctctccgtgagattcgtaagtaccagaagagcactgagttgttgatccgcaagcttccgtttcagcgtcttgttcgtgaaatcgcccaggatttcaagacggacctgaggttccagagccacgcagtgttggcgcttcaggaagctgcggaggcgtatctggttggtttgtttgaagacacgaatctctgtgccattcacgccaagagagtcaccatcatgcctaaagatattcaactggctaggcgtattcgtggagagcgtgcttagaagaatcacatctctcatcttgtgcttttgatttctttttgtttgtttgtttaaagcgtaatgctttggtgttataaagctctctttgaagcttaagaacatagatggattgagtattgatgttatgacaaactctatttgttaactcttgtttctctctctatgttgagtttattgtgtgacgccacaattccaaagtagaacaaactttgagttttgttgttattgagattttgtagtaatgaaattgctcaacaaaaaaaaaaaaaaaa

SEQ ID NO: 6264 - protein, 136 aa, Glycine max; identical to SEQ ID NO: 30
  misc_feature: Ceres CLONE ID no. 1121447
  misc_feature: Ceres CDNA ID no. 36706687
  misc_feature (58)..(134): Pfam Name: Histone PFAM Desc: Core histone H2A/H2B/H3/H4
  misc_feature: Homolog of GI Number: 37991915 NR Desc: histone H3.2 protein
  misc_feature: Homolog of GI Number: 18698662 NR Desc: disease
  misc_feature: Homolog of GI Number: 62642119 NR Desc: histone 3
  misc_feature: Homolog of GI Number: 73808026 NR Desc: histone H3
  misc_feature: Homolog of GI Number: 30061401 NR Desc: H3 histone
  misc_feature: Homolog of GI Number: 50960584 NR Desc: HIST2H3C protein
  misc_feature: Homolog of GI Number: 76612873 NR Desc:  similar to H3 histone
  misc_feature: Homolog of GI Number: 76612880 NR Desc:  similar to H3 histone
  misc_feature: Homolog of GI Number: 76732189 NR Desc:  similar to H3 histone
  misc_feature: Homolog of GI Number: 57098927 NR Desc:  similar to histone protein Hist2h3c1

SEQ ID NO: 6265 - DNA, 670 bp, Glycine max
  misc_feature: Ceres CLONE ID no. 1121535
  misc_feature: Ceres CDNA ID no. 29191731
  CDS (111)..(548): REFERENCED BY SEQ ID NO: 6266
atcgataaaaaggtctttcgcagccgcacggcttcagaaaaaacgtttgatccataaccaaagagaaacagaggaatctccgaatctaatcccagcccagagttaccaccatgccgaagaacaagggaaagggaggaaagaacaggaagagaggaaagaacgaagctgacgacgagaagcgcgagcttatcttcaaagaagacggacaagaatacgctcaagtccttcgcatgctcggcaacggaagatgcgagtgcatgtgcatcgacggcaccaagcgtctctgccacatccgcggcaagatgcacaagaaggtctggatcgcggcgggcgacatcatactcgttggtctgagagactaccaggacgacaaggctgacgtcatcctcaagtacatgtctgacgaggcgaggcttctcaaggcttacggtgagcttccggagaacactcgtctcaacgaaggtatcgttggtgatctcgaagaagatgatgaaaatgacgatcaagctcttgtccactttgaggatgaggatatcgataggatctaaggtgttgtttggtttttttcttttctggcttgtattgtcaatttgagacgcgtgactttttgagtttacagaagaaacaggtggtaatacattattgttggatactaaaaaaaaaaaaaaaa

SEQ ID NO: 6266 - protein, 145 aa, Glycine max
  misc_feature: Ceres CLONE ID no. 1121535
  misc_feature: Ceres CDNA ID no. 29191731
  misc_feature (13)..(113): Pfam Name: eIF PFAM Desc: Eukaryotic initiation factor 1A
  misc_feature: Homolog of GI Number: 21618180 NR Desc: putative translation initiation factor eIF
  misc_feature: Homolog of GI Number: 15450561 NR Desc: At2g04520/T1O3.7
  misc_feature: Homolog of GI Number: 81076307 NR Desc: putative translation initiation factor eIF
  misc_feature: Homolog of GI Number: 3024017 NR Desc: Eukaryotic translation initiation factor 1A
  misc_feature: Homolog of GI Number: 50907237 NR Desc: eukaryotic translation initiation factor 1A
  misc_feature: Homolog of GI Number: 1352427 NR Desc: Eukaryotic translation initiation factor 1A
  misc_feature: Homolog of GI Number: 17977975 NR Desc: translation initiation factor
  misc_feature: Homolog of GI Number: 31043871 NR Desc: eukaryotic translation initiation factor 1A
  misc_feature: Homolog of GI Number: 626041 NR Desc: translation initiation factor eIF
  misc_feature: Homolog of GI Number: 76659720 NR Desc:  eukaryotic translation initiation factor 1A
MPKNKGKGGKNRKRGKNEADDEKRELIFKEDGQEYAQVLRMLGNGRCECMCIDGTKRLCHIRGKMHKKVWIAAGDIILVGLRDYQDDKADVILKYMSDEARLLKAYGELPENTRLNEGIVGDLEEDDENDDQALVHFEDEDIDRI

SEQ ID NO: 6267 - DNA, 1077 bp, Glycine max
  misc_feature: Ceres CLONE ID no. 1121589
  misc_feature: Ceres CDNA ID no. 40351673
  CDS (382)..(801): REFERENCED BY SEQ ID NO: 6268
atccctctctctatgttgacgctagctagggtttctcttcctgctttgtaaatttcatcacgagtctctcatatttttaaaatgggactattctcccatcaattcgtttcacgaaattcaaatgtgtagtaggatacccagtgggttgttcttcaatcaaatgcaaactcgcggctagactcgctctaactcgtgattttatacagagttagccaattttccatcaaacacccaaaaatgtccaaaacgtcaccgtttcgctagggtttgtttgtccctttattttaggttttacgctctctccctttgtttgtcacgcacaccaacgagctcagttacatttcagcaagtcaaaatttcctccagaaagttgctcgtgtaatggatataatctctcagttacaagaacaagttaatttgatagcacatttggcttttaatacagttgggacattgcaaagggatgcccctcctaatcggctgtcgccaaattatcctgaaccacctgcgcatgctacagaggatgggtcaaatttttcagaacagccaaagctgatgagtactactttggtgaaggctgctaagcagtttgatgcattggttgcggcgcttccaatatccgagtcaggtgaagaagcacagcttaagaggatttcagaactacaagctgaaaatgatgcaataggcctagaacttcagaaacagttggaagctgcagagaaggaattgaatcaggttcaggagctgtttaggcaagcatcagataattgtttgaacttgaagaaaccagatgacagttagctatttgtgttccaggaaagctcagatgaattttgccacatgtatctcaacttgacaaaaagcagggacagctgcaggaggattttccttttctccttttaagtcttgattacctgaaatagttgtattctttcgtatgttgtgacttttgcctgacacgtgatgttttgcagaaattgatcatcagttgagatactggtaattatctttctttgctcccgagggaaaggcatatcggtgtttatattaaccatcttccttcaaaaaaaaaaaaaa

SEQ ID NO: 6268 - protein, 139 aa, Glycine max
  misc_feature: Ceres CLONE ID no. 1121589
  misc_feature: Ceres CDNA ID no. 40351673
MDIISQLQEQVNLIAHLAFNTVGTLQRDAPPNRLSPNYPEPPAHATEDGSNFSEQPKLMSTTLVKAAKQFDALVAALPISESGEEAQLKRISELQAENDAIGLELQKQLEAAEKELNQVQELFRQASDNCLNLKKPDDS

SEQ ID NO: 6269 - DNA, 645 bp, Glycine max
  misc_feature: Ceres CLONE ID no. 1121669
  misc_feature: Ceres CDNA ID no. 35383362
  CDS (28)..(435): REFERENCED BY SEQ ID NO: 6270
acttagcggcgataaagagaagaaaaaatggtgaagttcttgaagcagaacaaggccgtgatccttcttcaaggccggtacgccggaaagaaagccgtgatcatccgctccttcgacgacggaaaccgtgagcgtccttacggacactgcctcgtggccggactcaagaagtacccgagcaaggtcatccgcaaggactcggccaagaagacggcgaagaaatctcgggttaaatgtttcatcaaggtcgttaactaccagcatctgatgcctacccgttacaccctcgacgtggatctcaaggaagtcgctaccctcgaggctctttcttcaaaggacaagaaagtcgctgctctcaaggaggctaaggcgaagcttgaggaacgttttaagactggcaagaacaggtggttctttaccaagctcaggttctgaggacatttcgtatggagttttacagctttactttagtttccagggttcatttgttggacgacgtggatccccttttaatttgtgaaagactttttgttggaatttcgattctgaattttctatgttatgattatctaatgcagttttatttacgtcctcgtttcatttgaatgatatgcttatgttttatatctaaaaaaaaaaaaaaaa

SEQ ID NO: 6270 - protein, 135 aa, Glycine max
  misc_feature: Ceres CLONE ID no. 1121669
  misc_feature: Ceres CDNA ID no. 35383362
  misc_feature (5)..(40): Pfam Name: KOW PFAM Desc: KOW motif
  misc_feature (52)..(135): Pfam Name: Ribosomal_L27e PFAM Desc: Ribosomal L27e protein family
  misc_feature: Homolog of GI Number: 20466061 NR Desc: putative ribosomal protein
  misc_feature: Homolog of GI Number: 23198420 NR Desc: putative ribosomal protein L27
  misc_feature: Homolog of GI Number: 21554529 NR Desc: ribosomal protein L27
  misc_feature: Homolog of GI Number: 7441033 NR Desc: ribosomal protein L27
  misc_feature: Homolog of GI Number: 7441035 NR Desc: ribosomal protein L27
  misc_feature: Homolog of GI Number: 20768 NR Desc: ribosomal protein L27
  misc_feature: Homolog of GI Number: 4263697 NR Desc: 60S ribosomal protein L27
  misc_feature: Homolog of GI Number: 7441034 NR Desc: ribosomal protein L27
  misc_feature: Homolog of GI Number: 37536910 NR Desc: putative ribosomal protein L27
  misc_feature: Homolog of GI Number: 50906961 NR Desc: putative 60S ribosomal protein L27
  misc_feature: Useful for making bigger plants
  misc_feature: Useful for making taller plants and plants with longer inflorescences
  misc_feature: Useful for sterility
MVKFLKQNKAVILLQGRYAGKKAVIIRSFDDGNRERPYGHCLVAGLKKYPSKVIRKDSAKKTAKKSRVKCFIKVVNYQHLMPTRYTLDVDLKEVATLEALSSKDKKVAALKEAKAKLEERFKTGKNRWFFTKLRF

SEQ ID NO: 6271 - DNA, 1422 bp, Glycine max
  misc_feature: Ceres CLONE ID no. 1121718
  misc_feature: Ceres CDNA ID no. 40351674
  CDS (370)..(1125): REFERENCED BY SEQ ID NO: 6272
aagttcttcattttttctcattctgtctgtctgtctgtctctctctcactcactctttaagcactgagtaatttgtaatattattctgttcttgcttttgaggtcactgttctttctgcagttgctgcattagcattttgggaccattttgttctttaccactactttttctctgtgatgccattgttgtattgtactcttccttgtgctagatctgaagctgtgaggccagactctctcatttcatttccatcccgtgtttaaattggaagctggaacctagtttatgccctgcttgatttggttgctcttaacccttttcagaaatcaaaagcacttgtactatgctggtgttccctatagggaaagatgaaattgaagtctaagaaaggatggaaatctattgtaccacttcatttgaaaggaaaatcagcaagccgtttttctttatttcgcaaagtcaattctgctggctatggacctggcaaaacaccagtttatctgaatgtgtatgacttgacacccatgaatggttatgtgtattgggctggtcttggtatctatcactctggtgtagaagttcatggtgtagaatacgcgtttggagctcatgactacccaacaagtggtgttttcgaggttgaacctcgccaatgccctggcttcaagttcaggaagtcaatattcataggaatcacatctttggattctactcaggttagggagttcatggaacgccagtcagcaagatacaacggtgacacatatcacttaattgtcaagaactgcaaccacttctgcaaagacatctgttacaagctgacggggaaatcgattccaacatgggtaaatcgactggccagactaggttcaatttgcaattgcattcttcctgaagcactaaggatttctgctgtggcgcatgatcctaattatcagcctcatgatagtgaaaagagaaggcttcgaagtggcttcaattgcttgtcctcaatctcaatgcgtcaaaaacacctttccacatcttcactgtttctacagtcacccataagaggctgcttgtcgtcgtcatggccctcctcggaattgagaaaatccattaaccgttccttgaaagaaagataaccgaactttgagaaggtaggaaatgaatgattgtaagaatcttgtttatgtaagtaggatttggtttcatcacataacctcattttcttttatttttctttccttgtcttttgcagttaaacctgccctgttttattatttttttattgtggtgactaagaatgatcctttccaagcttagaagaaactttataaatgagcatcaccaccatctgctgtgtattattttaatttttgtacatacattagcatgtaaaatgatgcaccaacaacttcaatctaaaaaaaaaaaaaaaa

SEQ ID NO: 6272 - protein, 251 aa, Glycine max
  misc_feature: Ceres CLONE ID no. 1121718
  misc_feature: Ceres CDNA ID no. 40351674
MKLKSKKGWKSIVPLHLKGKSASRFSLFRKVNSAGYGPGKTPVYLNVYDLTPMNGYVYWAGLGIYHSGVEVHGVEYAFGAHDYPTSGVFEVEPRQCPGFKFRKSIFIGITSLDSTQVREFMERQSARYNGDTYHLIVKNCNHFCKDICYKLTGKSIPTWVNRLARLGSICNCILPEALRISAVAHDPNYQPHDSEKRRLRSGFNCLSSISMRQKHLSTSSLFLQSPIRGCLSSSWPSSELRKSINRSLKER

SEQ ID NO: 6273 - DNA, 678 bp, Glycine max
  misc_feature: Ceres CLONE ID no. 1121799
  misc_feature: Ceres CDNA ID no. 29191776
  CDS (58)..(522): REFERENCED BY SEQ ID NO: 6274
agggtttcagctgcttcacctctccagatcttgcgtcggaaaggatcgttcagagcaatgtctccggctaaagttgataccacgaagaaggccgacccaaaggccaaggccctgaaggctgcaaaggcagtgaagtctggtcaagccttcaagaagaaggacaaaaagatcaggactaaggtcaccttccacaggccaaagaccttgaccaaggctagagatcccaagtaccccaggatcagtgcaactcccaggaacaagttggaccattacggtatcctcaagtacccactcaccaccgagtctgccatgaagaaaattgaggacaacaacactcttgtcttcattgttgacattcgtgccgacaagaagaagatcaaagatgctgttaagaagatgtacgacatccagaccaagaaggttaacaccctcatcaggcctgatggaacgaagaaggcttacgttaggctcacaccggactatgatgcgttagatgttgctaacaagattggcatcatctaagtctatctacctcctgctattatatgaaacagacttgtgtttttgtcgcttgtagactcagttttgctttgagatattatctgccatcatctttttctacaaaacattcttgtttaatgttgaattcagtttcctctgttaaaaaaaaaaaaaaaa

SEQ ID NO: 6274 - protein, 154 aa, Glycine max
  misc_feature: Ceres CLONE ID no. 1121799
  misc_feature: Ceres CDNA ID no. 29191776
  misc_feature (12)..(66): Pfam Name: Ribosomal_L23eN PFAM Desc: Ribosomal protein L23
  misc_feature (72)..(151): Pfam Name: Ribosomal_L23 PFAM Desc: Ribosomal protein L23
  misc_feature: Homolog of GI Number: 3355475 NR Desc: 60S ribosomal protein L23A
  misc_feature: Homolog of GI Number: 2654122 NR Desc: ribosomal protein L23a
  misc_feature: Homolog of GI Number: 21592339 NR Desc: 60S ribosomal protein L23A
  misc_feature: Homolog of GI Number: 23308155 NR Desc: At3g55280/T26I12_160
  misc_feature: Homolog of GI Number: 13560777 NR Desc: ribosome protein L23a
  misc_feature: Homolog of GI Number: 1084424 NR Desc: ribosomal protein L23a
  misc_feature: Homolog of GI Number: 76573339 NR Desc: ribosomal protein L25
  misc_feature: Homolog of GI Number: 7711063 NR Desc: ribosomal protein L23
  misc_feature: Homolog of GI Number: 7340791 NR Desc: ribosomal protein L23
  misc_feature: Useful for making bigger plants
  misc_feature: Useful for making plants with increased biomass and foliage
  misc_feature: Useful for sterility
MSPAKVDTTKKADPKAKALKAAKAVKSGQAFKKKDKKIRTKVTFHRPKTLTKARDPKYPRISATPRNKLDHYGILKYPLTTESAMKKIEDNNTLVFIVDIRADKKKIKDAVKKMYDIQTKKVNTLIRPDGTKKAYVRLTPDYDALDVANKIGII

SEQ ID NO: 6275 - DNA, 689 bp, Glycine max
  misc_feature: Ceres CLONE ID no. 1121860
  misc_feature: Ceres CDNA ID no. 29191695
  CDS (75)..(521): REFERENCED BY SEQ ID NO: 6276
aatacaaatctccaatctccttccactataaccatcagtaatctttcagtcagcgcaaaccttcatcccgtgcaatggaaaccaccggaaaagtgaagaaggctttcggaggaagaaaggccggtggcccaaagaccaaatcggtttcgaaatcgatcaaagccggtctccagttcccggtcgggagaatcactcgtttcctgaggaagggacggtacgctcagagactcggtggtggagctccggtctacatggccgccgttctcgagtacctcgccgccgaagttctggagcttgctggtaacgcagcgagggacaacaagaagtcgaggatcattccgaggcatcttcttttggcgattaggaacgatgaggagttggggaagcttctgagtggtgtcacgatcgctcacggtggtgtgttgcctaacattaactctgttctcttgcctaagaagtctgctaaatcgactgaggaagttgcgtccaagtccccagctaaatctccgaagaaagcttaaaaatgttctcggcgttggtttcgttcaccagtttagttaatgtgttcgggtgttttatatgtagaaaatctatcttttttaattatgtatttcggatttgatttctcttcaggtccaactttcctctaagtaacgaattttaaaatatttgcaaaaaaaaaaaaaaaa

SEQ ID NO: 6276 - protein, 148 aa, Glycine max
  misc_feature: Ceres CLONE ID no. 1121860
  misc_feature: Ceres CDNA ID no. 29191695
  misc_feature (26)..(101): Pfam Name: Histone PFAM Desc: Core histone H2A/H2B/H3/H4
  misc_feature: Homolog of GI Number: 21554077 NR Desc: histone H2A
  misc_feature: Homolog of GI Number: 47026912 NR Desc: histone H2A
  misc_feature: Homolog of GI Number: 47026919 NR Desc: histone H2A
  misc_feature: Homolog of GI Number: 27529852 NR Desc: H2A histone
  misc_feature: Homolog of GI Number: 7649159 NR Desc: histone H2A
  misc_feature: Homolog of GI Number: 34914498 NR Desc: putative histone H2A
  misc_feature: Homolog of GI Number: 729671 NR Desc: Histone H2A
  misc_feature: Homolog of GI Number: 122003 NR Desc: Histone H2A
  misc_feature: Homolog of GI Number: 121982 NR Desc: Histone H2A.2.2
  misc_feature: Homolog of GI Number: 7106331 NR Desc: H2A histone family
METTGKVKKAFGGRKAGGPKTKSVSKSIKAGLQFPVGRITRFLRKGRYAQRLGGGAPVYMAAVLEYLAAEVLELAGNAARDNKKSRIIPRHLLLAIRNDEELGKLLSGVTIAHGGVLPNINSVLLPKKSAKSTEEVASKSPAKSPKKA

SEQ ID NO: 6277 - DNA, 689 bp, Glycine max
  misc_feature: Ceres CLONE ID no. 1121907
  misc_feature: Ceres CDNA ID no. 40351675
  CDS (51)..(479): REFERENCED BY SEQ ID NO: 6278
gaaacagatcggaattttcgagaaagcgcgagagagagagagacgaaacgatgtcgtatcttctaccgcatcttcactccggctgggctgtagatcaggcgattctagcagaggaagagcgtcttgtcgtcatacgtttcggccatgattgggatgagacttgtatgcagatggatgaggtgcttgcatctgttgctgagacgataaagaactttgcggtgatatatctggtggacatcaccgaggttccagacttcaacaccatgtacgagctctacgatccttcgacggtgatgttcttctttaggaacaagcacattatgatcgatcttgggactggtaacaacaacaagatcaattgggctatgaaggacaagcaggagttcatcgatatcattgagaccgtcttccgtggtgcaaggaaaggccgtgggctggtgattgctcctaaagattactccaccaaataccgctactaaccggacttggcaaaaacattaagatcaaaaaaactatgtctactgattctagtcagttgaaaaatatcctgtgaacttgtggcttatatgctttggtgatttgtgattctggtttgtttgctctttatcagctttttgccatttatgtgtaagtgcttcaaactttaattcagtgaaatgaatacttggaagctaaaaaaaaaaaaaaaa

SEQ ID NO: 6278 - protein, 142 aa, Glycine max
  misc_feature: Ceres CLONE ID no. 1121907
  misc_feature: Ceres CDNA ID no. 40351675
  misc_feature (4)..(136): Pfam Name: DIM1 PFAM Desc: Mitosis protein DIM1
MSYLLPHLHSGWAVDQAILAEEERLVVIRFGHDWDETCMQMDEVLASVAETIKNFAVIYLVDITEVPDFNTMYELYDPSTVMFFFRNKHIMIDLGTGNNNKINWAMKDKQEFIDIIETVFRGARKGRGLVIAPKDYSTKYRY

SEQ ID NO: 6279 - DNA, 766 bp, Glycine max
  misc_feature: Ceres CLONE ID no. 1121909
  misc_feature: Ceres CDNA ID no. 40351676
  CDS (33)..(554): REFERENCED BY SEQ ID NO: 6280
aagtgctcgtcgagagagagaaagagagaaaaatggtgagagaagtggcggagagctgtgtagacaccatgctaatggagatggtggcgatgtacagcggccgattctacgctaacaagccggaactcgccgctcggaggatcgaggccatcggttatcaggtcggccaccagctctccgagaggtacactatggaaagaccaaggttcagcgaccatctagaggcaatcaagtttatctgtaaagacttctggtctgaggtcttcaagaagcagattgataatctcaagactaatcaccggggtacttttgtattgcaagacaacaagttcagatggctatctcgtgtctcgatcgacccttcgactgagaaggaaactgaagatccgtctactccaggggaaagcaaagcggcacaagcggtgagcatgtacctgtatttcccatgtggaatcataagaggtgtcctctccaacttggggataccttgtgctgtctctgcggacatatccagccttcccacttgctctttcgtgattcgggtgaaggcttgattctggcattagctttgagtcctcctcctcgatttcagactccagctcggctttatggttttcaagaaagattagattctttgtgcccttacgcagacttcttaagctgcgacttctgtcaaaacacaacttttaaattctccaaaacttgctgtaaaacattatttgaatgccttaatgggcctatctctccctcaaaaaaaaaaaaaaaa

SEQ ID NO: 6280 - protein, 173 aa, Glycine max
  misc_feature: Ceres CLONE ID no. 1121909
  misc_feature: Ceres CDNA ID no. 40351676
  misc_feature (9)..(173): Pfam Name: TRAPP_Bet3 PFAM Desc: Transport protein particle
MVREVAESCVDTMLMEMVAMYSGRFYANKPELAARRIEAIGYQVGHQLSERYTMERPRFSDHLEAIKFICKDFWSEVFKKQIDNLKTNHRGTFVLQDNKFRWLSRVSIDPSTEKETEDPSTPGESKAAQAVSMYLYFPCGIIRGVLSNLGIPCAVSADISSLPTCSFVIRVKA

SEQ ID NO: 6281 - DNA, 1608 bp, Glycine max
  misc_feature: Ceres CLONE ID no. 1121918
  misc_feature: Ceres CDNA ID no. 25447152
  CDS (211)..(1278): REFERENCED BY SEQ ID NO: 6282
agccaggcataataaggcaatgcaaagaagaaaaagcggcgtacgaactctctgtcagactctcacgcactgaggcataactctatcatctttcattacttactcttcactctctcaaacatccaaagctccaaaccaaaacctgttttgttcccagtctctgaagacacacaagtgttagtgttacagacacaccatccatacaaacagatgttggaagccaagtgtctcaaaaaagcagtggttccttccactttgattcaagacccttctcctggaagccttcagtacacacgccttgctctccgtgttagcgaggaccaaagttcttgttttgtttacattgcctccggtccccacatttataggctccacattgctctgggagaatcttcaatcagcgaaggaaaagatagcctattgatacctgaacacactgagattattgcctcgtcgttactcagtcgatgccctcatcgttcagaaattcagagtattgctcttgctgaggtggagagctgtggctatgtaatgttgggaagtgtggattcatatggtcatctcattgtgtctaaactagatgcgtctggtgaagatgttgacaagctaacatattctgcattgcctcatgataatggtattggggaaggaagttggtcaggactctgcttttgtccaaatcaatggtctatgactgctgttgcccgtagtttttgcaaaaccattgatatttatgatcaagacatccacattcgcacattacgaccgctttggtaccctacttcattaaacttcttgcaagacggagttaatggaaatcaaagttctaccttagctattacagaaggaagccagctgacaatgtgggacttgagaatgaaagaaaatggtggttgtgtacatcggatttgtggcatccctggcgatatcttttatgctgtttgcagttcttccaatggtaatgttgctgtgggtggagctgatcgtactgtgactatttatgatcctcgcagatggtcggcactgtctagatgggtgcactgttcaaaatatgagataacaggactggctttctcaacaattgaccctgactgtatctatattcaaggggttgattatgaggtcttttgtggcaaatggaaagagagcaacaaaacattttcatttagaggagactcaaattggcttggctttagtaagtgctccgacaaagatgttttggctggatggtgtgattcaggcagcatatttatagctgatgttgcgagtgcaatttgataaagtggtgtctgtccagtaattttcccatctctgtagaaaattgtcacctcaatgtatgtatgtagccatggttgagtttcatgtttgaagggaaaaagaaaaaaaggtggatttagtgtgattaaactttatatgcagtacatgttataatgcatttctaatgcattatttttgtgcactgtattgattttgtgatgttcattttaagttcctattttgacaaattaattattgaaatatcaaggctaattgtatggtatacaaagaaggccattgttgtgttatatggcattgaacatgggcatatgaccaaaaaaaaaaaaaaaa

SEQ ID NO: 6282 - protein, 355 aa, Glycine max
  misc_feature: Ceres CLONE ID no. 1121918
  misc_feature: Ceres CDNA ID no. 25447152
  misc_feature: Homolog of GI Number: 34908606 NR Desc: P0505D12.31
  misc_feature: Homolog of GI Number: 34908604 NR Desc: P0505D12.30
MLEAKCLKKAVVPSTLIQDPSPGSLQYTRLALRVSEDQSSCFVYIASGPHIYRLHIALGESSISEGKDSLLIPEHTEIIASSLLSRCPHRSEIQSIALAEVESCGYVMLGSVDSYGHLIVSKLDASGEDVDKLTYSALPHDNGIGEGSWSGLCFCPNQWSMTAVARSFCKTIDIYDQDIHIRTLRPLWYPTSLNFLQDGVNGNQSSTLAITEGSQLTMWDLRMKENGGCVHRICGIPGDIFYAVCSSSNGNVAVGGADRTVTIYDPRRWSALSRWVHCSKYEITGLAFSTIDPDCIYIQGVDYEVFCGKWKESNKTFSFRGDSNWLGFSKCSDKDVLAGWCDSGSIFIADVASAI

SEQ ID NO: 6283 - DNA, 680 bp, Glycine max
  misc_feature: Ceres CLONE ID no. 1122042
  misc_feature: Ceres CDNA ID no. 40351677
  CDS (66)..(452): REFERENCED BY SEQ ID NO: 6284
aacaaaaactaaaaccctagcagctgcttcatctcatctcttctcttagaactctgcggcgaaagatgacggttgaagcagttaaccctaaggcctacccgttagctgattctcagctagcgataacaatcctcgatcttgtccagcaagctacgaactacaaacagctcaagaaaggagctaatgaagctaccaagacattgaaccgtggtatctctgagttcgttgttatggctgctgacgctgagcctctcgagatccttcttcatcttcctcttctcgctgaagacaagaatgtgccgtatgtgtttgtgccatcgaaacaagcacttggaagagcatgtggtgtaacaagacccgtgattgcttgctcggttacatcaaacgaggctagccagttgaaatctcagattcagcagcttaaggatgctattgagaagctcctcatctaaggatgtgttggtggagttatatgaatgatgggtctttctccattttatggaaaaggctttgactgaagtgtgtttgtgcgagttttagcttatgatgaaacgaaaccgtatctgtttttgaagtttgtaatgcttttatttcatgtttgtgttggtgcaaatgtagctttgaacaacgattatttatgaaacgagtgtcttagatttggtttaaaaaaaaaaaaaaaa

SEQ ID NO: 6284 - protein, 128 aa, Glycine max; identical to SEQ ID NO: 5994
  misc_feature: Ceres CLONE ID no. 1122042
  misc_feature: Ceres CDNA ID no. 40351677
  misc_feature (20)..(114): Pfam Name: Ribosomal_L7Ae PFAM Desc: Ribosomal protein L7Ae/L30e/S12e/Gadd45 family

SEQ ID NO: 6285 - DNA, 525 bp, Zea mays
  misc_feature: Ceres CLONE ID no. 1154601
  misc_feature: Ceres CDNA ID no. 36590645
  CDS (3)..(341): REFERENCED BY SEQ ID NO: 6286
ggtccgactcccagccgtcgtctgctgcggactccgcctccagtttggtctgtttcttgcaagttgatcttgtggtagttcccccaactgtcaccatgcagaacgaggagggtaagactgtggacctctatgtccccaggaagtgctcggccacaaacaggatcatcactgccaaggaccatgcctctgtccagatcaacattggccacttggatgcgaatggcctgtatgatggtcacttcacaacgtttgctctctctgggtttgtccgtgctcagggcgacgcagacagctccttggacaggctgtggcagaagaagaaggctgatatcaagcagtagattttacatctagtttaccaagaattggacactgccttagctatgttttgaattcatgtcactatatgcaatgttgtgatttcagctggtaccttaaatctgaagatttagtatctttgttgggttccttctgaaaaaaaaaaaaaaaaaaaaaaaaaaaaaaagaaaaaaaaaaaaaaaaaaa

SEQ ID NO: 6286 - protein, 81 aa, Zea mays
  misc_feature: Ceres CLONE ID no. 1154601
  misc_feature: Ceres CDNA ID no. 36590645
  misc_feature (1)..(81): Pfam Name: Ribosomal_S21e PFAM Desc: Ribosomal protein S21e
  misc_feature: Homolog of GI Number: 1419372 NR Desc: ribosomal protein S21
  misc_feature: Homolog of GI Number: 1707868 NR Desc: 40S ribosomal subunit protein S21
  misc_feature: Homolog of GI Number: 303839 NR Desc: 40S subunit ribosomal protein
  misc_feature: Homolog of GI Number: 50917601 NR Desc: 40S subunit ribosomal protein
  misc_feature: Homolog of GI Number: 53370646 NR Desc: 40S ribosomal protein S21
  misc_feature: Homolog of GI Number: 15241026 NR Desc: 40S ribosomal protein S21
  misc_feature: Homolog of GI Number: 20148437 NR Desc: 40S ribosomal protein S21 homolog
  misc_feature: Homolog of GI Number: 21554974 NR Desc: 40S ribosomal protein S21 homolog
  misc_feature: Homolog of GI Number: 6012958 NR Desc: 40S ribosomal protein S21
  misc_feature: Homolog of GI Number: 55653172 NR Desc:  similar to ribosomal protein S21
MQNEEGKTVDLYVPRKCSATNRIITAKDHASVQINIGHLDANGLYDGHFTTFALSGFVRAQGDADSSLDRLWQKKKADIKQ

SEQ ID NO: 6287 - DNA, 1554 bp, Zea mays
  misc_feature: Ceres CLONE ID no. 1155971
  misc_feature: Ceres CDNA ID no. 29191220
  CDS (82)..(1353): REFERENCED BY SEQ ID NO: 6288
gacaaagaagagtcgtgttggtgagctaactacccaacctgtgaagctacccccattctctctcaacgttttcgttttgaaatggcgaggaagaagatcagagagtatgactcaaagaggttggtgaaggaacatttcaaaaggctttctggcaaagagcttcctatcagatccgttcagattaatgaaacaactgatctaaatgagctagttgaaaaggaaccttggctctcgtctgagaagctggtggtgaaacctgacatgttgtttggaaagcgtggcaagagtggtttggttgccttgaaattagattttgctgatgttgccacttttgttaaagaacgtttgggaaaagaggtagagatgagtggatgcaaaggacccataacaacattcatagttgaaccatttgttccacacaatgaggagtattatctcaatgttgtctcggatcggcttggttgcagcataagcttttctgagtgtggaggaattgagatcgaggagaactgggacaaggtcaagacaatatttttaccaacaggtgcttccctgacacctgaaatatgtgcacctcttgtcgcaactcttcccttagagatcaaagctgaaattgaagaatttatcaaagtcattttcaccctattccaagatcttgatttcactttcttggagatgaatcctttcactctagtagatggaagtccttatcctctggatatgaggggtgagcttgatgatactgctgccttcaaaaactttaaaaaatggggcgacattgaatttcctctgccatttggaagagtaatgagtcctacagaaagctttatccacggactggatgagaagacaagtgcgtctttgaagtttaccgttctgaaccccaagggacggatttggacaatggtagctggtggaggagcaagtgtcatctatgcggatacggttggagatctcgggtatgcatctgaacttggcaactatgctgaatacagtggagcacccaaagaagatgaggttttgcagtacgccagagtcgttattgattgtgctacagcaaacccggatggaaaaagcagagcccttgtcatcggaggcggaattgccaacttcactgacgttgctgctactttcaatggcataatccgcgctcttaaagaaaaggaagcaaagctgaaagcagcaaggatgcatatatttgtgaggagaggaggaccaaactaccaaaagggacttgctaaaatgcgagcccttggagatgatatcggtgtccccatcgaggtctatggcccagaagcaaccatgacaggtatctgcaaggaggcaatccagtacatcacagcagcagcataagcttctctcagtaccttctatgaccaaaactttgtctgtgttttagagcctttatttactgtggttaagattactcaagctataagatacttgcaatttcttgaaaacttctgttgttcgattctctttcccctaacgttttcttcagattcaataaataatcgttacttaaaaaaaaaagaaaaaaaaaaaaaaaaaaaa

SEQ ID NO: 6288 - protein, 423 aa, Zea mays
  misc_feature: Ceres CLONE ID no. 1155971
  misc_feature: Ceres CDNA ID no. 29191220
  misc_feature: Homolog of GI Number: 15919089 NR Desc: ATP citrate lyase b
  misc_feature: Homolog of GI Number: 21593129 NR Desc: ATP citrate
  misc_feature: Homolog of GI Number: 3482918 NR Desc: Similar to ATP
  misc_feature: Homolog of GI Number: 21280803 NR Desc: putative ATP citrate
  misc_feature: Homolog of GI Number: 22136126 NR Desc: similar to ATP
  misc_feature: Homolog of GI Number: 58392375 NR Desc: ENSANGP00000012364
  misc_feature: Homolog of GI Number: 9229902 NR Desc: ATP citrate
  misc_feature: Homolog of GI Number: 24653990 NR Desc: CG8322
  misc_feature: Homolog of GI Number: 28372804 NR Desc: LD21334p
  misc_feature: Homolog of GI Number: 51092031 NR Desc: RE70805p
MARKKIREYDSKRLVKEHFKRLSGKELPIRSVQINETTDLNELVEKEPWLSSEKLVVKPDMLFGKRGKSGLVALKLDFADVATFVKERLGKEVEMSGCKGPITTFIVEPFVPHNEEYYLNVVSDRLGCSISFSECGGIEIEENWDKVKTIFLPTGASLTPEICAPLVATLPLEIKAEIEEFIKVIFTLFQDLDFTFLEMNPFTLVDGSPYPLDMRGELDDTAAFKNFKKWGDIEFPLPFGRVMSPTESFIHGLDEKTSASLKFTVLNPKGRIWTMVAGGGASVIYADTVGDLGYASELGNYAEYSGAPKEDEVLQYARVVIDCATANPDGKSRALVIGGGIANFTDVAATFNGIIRALKEKEAKLKAARMHIFVRRGGPNYQKGLAKMRALGDDIGVPIEVYGPEATMTGICKEAIQYITAAA

SEQ ID NO: 6289 - DNA, 2379 bp, Zea mays
  misc_feature: Ceres CLONE ID no. 1156528
  misc_feature: Ceres CDNA ID no. 36590707
  CDS (148)..(2103): REFERENCED BY SEQ ID NO: 6290
gcgctcccctctaccgcctccgcaccgcagagccgcagccaagcaagctgcgcccctggacttggcctcaccggtgaagcggagctcgaggataggcggtgctcgggagataccaagcggtcggccgcaggcgccacgtcggcggagatgacggacggtcaccacttcaacaacatcctcctcggagggcgcggcggcacaaaccctggtcagtttaaagtgcattctggtggacttgcatggaagagacaaggtggaggaaagaccattgagatcgacaaagctgatgtaaccgcagttacttggatgaaagtccccagagcatatcagcttggagtcaggattaaggctggcctgttctacagatttattggcttccgtgaacaggatgtaagcaacttgaccaacttcatacaaaagaatatgggtgtcacaccagatgaaaaacagctttctgttagtggccagaattggggagggattgatatagatggtttgacttcaatgtttgttactcttgcctctgtaggaaacatgctaacctttatggttggttcaaagcaagcatttgaggtgtccctaccagatgttgcacaaacccagatgcaaggaaaaacagatgttctcttagagcttcatgttgatgatactactggagccaatgagaaagactccctcatggatttgagttttcatgtgcctacttcgaatactcagtttgttggggatgagagtcgccctccggctcatattttatgggagaccatattgaaatttgctgatgttggttcttctgaagaaccagttgtcacatttgaaggaattgcgattcttacaccaagaggacgttatagtgttgaacttcatctgtcatttctgcgactccaaggacaagctaacgattttaaaatccaatacagcagtattgttcgcctctttcttttgccaaagtcaaacaatcctcatacatttgttgttatcactcttgacccaccaatccgtaaaggacaaacattgtatcctcacattgttattcagtttgagacagaggcagtagtggaaagagatctggcattgagtaaagagctgttggttgaaaaatacaaggacaggctcgaggaatcttacaagggtctaatacatgaggtatttaccaaagttcttcgtggtctatctggtgctaaagtcacaaggccaggttctttcagaagttgccaagatggatatgcagttaaatcatctctcaaagctgaagatggactgttgtatccacttgaaaagggtttctttttcctgccaaagccacctacactcattcttcatgaggagattgagtttgttgagtttgaacgtcatggtgctgggggtgccagtatatcatctcactattttgacctccttgtcaaactgaaaaatgaccaagagcatctcttcagaaacattcaaaggaatgaataccacaacctcttcaatttcatcaatggaaagaacattaaaataatgaaccttggaggagatggtcaaggtgcaagtggtgtagttacagatgttctacgagacactgatgatgatgctgttgatccacatctagagcgtattaagaatcaggccggggatgaggaaagcgatgaagaggatgaagattttgttgcagacaaggatgatagtggatctcctactgatgactcaggtgatgaggaatcagatgctagtgatagtggtggtgaaaaggagaaatcatccaagaaggaagcaagcagttcaaagccagttcagaaaagaaagcataaggccagggatgacgaaggacaagagaagaaaaagccaaagaagaaaaaagatccgaatgctccgaaacgagccatgaccccgttcatgtatttctcaatggctgagcgaggaaacatgaagagcagcaacccagatttgcctacgactgagatcgcaaagaagcttggggagatgtggcaaaagatgtcaggcgaagagaaacagccttacatccagcaggcccaggtcgacaagaaacgttatgaaaaagaatccgctgtctatcgcggtgaagctacagtcgatgtggattctgggaacgagtctgactagagatccaagctcttgggctggcatggtggcacgggatgaaagtctagtgccatgtgtgctattgttatgtcagcaactgttgccaacaacattgctgacagtaaagagagtttctctcgcagcgtacctctgcagggcaaaagaatgtacgagtgtagtctagtgattttgtgtaaaacaaccaacatacgtggttttcttagagatggtaagacgtcaatttaactgctgtcgattggctgttttgcctcaaaaaaaaaaaaaaaaaaaaaaaaa

SEQ ID NO: 6290 - protein, 651 aa, Zea mays
  misc_feature: Ceres CLONE ID no. 1156528
  misc_feature: Ceres CDNA ID no. 36590707
  misc_feature (230)..(447): Pfam Name: SSrecog PFAM Desc: Structure
  misc_feature (569)..(637): Pfam Name: HMG_box PFAM Desc: HMG
  misc_feature: Homolog of GI Number: 433872 NR Desc: HMG protein
  misc_feature: Homolog of GI Number: 8920409 NR Desc: SSRP1 protein
  misc_feature: Homolog of GI Number: 21314337 NR Desc: early drought induced protein
  misc_feature: Homolog of GI Number: 479831 NR Desc: high mobility group protein
  misc_feature: Homolog of GI Number: 217853 NR Desc: high mobility group protein
  misc_feature: Homolog of GI Number: 52353744 NR Desc: putative HMG
  misc_feature: Homolog of GI Number: 34906296 NR Desc: putative SSRP1 protein
  misc_feature: Homolog of GI Number: 11994780 NR Desc: structure
  misc_feature: Homolog of GI Number: 2104679 NR Desc: transcription factor
  misc_feature: Homolog of GI Number: 42733470 NR Desc: BRI1
MTDGHHFNNILLGGRGGTNPGQFKVHSGGLAWKRQGGGKTIEIDKADVTAVTWMKVPRAYQLGVRIKAGLFYRFIGFREQDVSNLTNFIQKNMGVTPDEKQLSVSGQNWGGIDIDGLTSMFVTLASVGNMLTFMVGSKQAFEVSLPDVAQTQMQGKTDVLLELHVDDTTGANEKDSLMDLSFHVPTSNTQFVGDESRPPAHILWETILKFADVGSSEEPVVTFEGIAILTPRGRYSVELHLSFLRLQGQANDFKIQYSSIVRLFLLPKSNNPHTFVVITLDPPIRKGQTLYPHIVIQFETEAVVERDLALSKELLVEKYKDRLEESYKGLIHEVFTKVLRGLSGAKVTRPGSFRSCQDGYAVKSSLKAEDGLLYPLEKGFFFLPKPPTLILHEEIEFVEFERHGAGGASISSHYFDLLVKLKNDQEHLFRNIQRNEYHNLFNFINGKNIKIMNLGGDGQGASGVVTDVLRDTDDDAVDPHLERIKNQAGDEESDEEDEDFVADKDDSGSPTDDSGDEESDASDSGGEKEKSSKKEASSSKPVQKRKHKARDDEGQEKKKPKKKKDPNAPKRAMTPFMYFSMAERGNMKSSNPDLPTTEIAKKLGEMWQKMSGEEKQPYIQQAQVDKKRYEKESAVYRGEATVDVDSGNESD

SEQ ID NO: 6291 - DNA, 1946 bp, Zea mays
  misc_feature: Ceres CLONE ID no. 1158508
  misc_feature: Ceres CDNA ID no. 25445678
  CDS (11)..(1528): REFERENCED BY SEQ ID NO: 6292
acggcgaccgatgccgctgctgctgcgcggcgcctccctcctccgcctctgccagtgtaccagtgggctctcaagtgtgaaatttagttcaagagtaacggtactagtgaatctcaacgccatgagggacggaatgcgggccacatattcacgtagagctgaggtcaagaaagatgagcagccactcacagagaaggaagatgctgctgaaagtgatttggagatggagcgagggaggagcagcagccctagccagctccaatcaatgactgtcaaggagctcagggagctcacgaggaggaggggtatttctgtgaaaggtaccaagaaagatttagtatcagcactgatgaattctatggccgtggaagcaaatggtgaagagggaaagtcatccgttgagctggttagccccttggaagtacctttgaaaagaaaaggtggtgcttctgttgtggttgaacaaaaactagaaagttctgagattatttctgaaacacctaacaagaaaagaagtagaacaaaacaaaaatcaagcaagaacaccacttgtcaggaaatttcggtgactaatgtcaagctaagtaagactgttgtccagaaggaaacagttgacggattaagtcctgatgatgattcagagccttggactatactcgtgcataagaaaccagaagccagctggattccatacaaccctaggactatgaggcctccacctcttagcaaggatacacgggctctgaagattatgtcatggaatgtcaatggattgaaagcattgctcaaatcaagaggcttctctgtgcagcagttagcacagagggaggactttgatgtgctttgcttacaagaaacaaaaatgcaggagaaggatattgaagttattaaggacactttgcttgatggctacacaaatagtttctggacttgcagtgtgtcaaagcttggctattctggcactgcaataatttcaagagtcaaaccactgtcgatcaagtatgggcttggtataccagaccatgatactgaagggagggttgtgactgtagagtttgatgacttctacctgttaactgcttatgtaccaaactctggtgatggtctaaaaagattgacttacagggtcacagagtgggatccatcccttggtaactacatgaaagaattggagaaatcgaagcctgtcatactaaccggtgatcttaattgtgcgcatcaggagattgatatacatgaccctgctggaaatcgtagaagtgctggcttcacaaacgaggaaagagaatcatttgggaccaattttttgtccaaagggttcgttgatacgtttcggaaacagcatcctaatgttgttgcctatagttactgggggtacagacataatgcccggaagacaaacaaaggttggcgcctggattactttcttgtgtccgaatcaatcgcagaaaaagtgcatgattcatatattcttccggacatctctgccagtgatcacagtccccttggtctcgtgctgaagctgtaggctgtatcacaggctatgccaaacattcagtctgaagcttgtgccatatttctcagacagcgatgcttattcctgatggtttctggttcgttcagattcctggcaggaacaaggacttttgtcagactattagtgaaacaaggctttgtaatgcactgagcagatttgagactattagtggacaacttactgttagcaaagctgcacctttgtaatgtaaatatgcggccatatcttgtgctgcacttgtgcagctcaatatgagcagcaggggaagctcattacctggtcatggaattatgatactgaccttaacctgttgaggtctttaaactatcttgtcatgtgctgtgccgctgatggcgtcagaaaataactgtgccatgcaatttcacgcaaaaaaaaaaaaaaaaaaaaa

SEQ ID NO: 6292 - protein, 505 aa, Zea mays
  misc_feature: Ceres CLONE ID no. 1158508
  misc_feature: Ceres CDNA ID no. 25445678
  misc_feature (247)..(267): Pfam Name: SAP PFAM Desc: SAP domain
  misc_feature: Homolog of GI Number: 472869 NR Desc: ARP protein
  misc_feature: Homolog of GI Number: 3241944 NR Desc: DNA
  misc_feature: Homolog of GI Number: 55297696 NR Desc: putative DNA
  misc_feature: Homolog of GI Number: 34908948 NR Desc: putative exodeoxyribonuclease
  misc_feature: Homolog of GI Number: 55297697 NR Desc: putative DNA
  misc_feature: Homolog of GI Number: 34908950 NR Desc: putative exodeoxyribonuclease
  misc_feature: Homolog of GI Number: 46908012 NR Desc: exodeoxyribonuclease
  misc_feature: Homolog of GI Number: 47097522 NR Desc: exodeoxyribonuclease
  misc_feature: Homolog of GI Number: 4106095 NR Desc: apurinic/apyrimidinic endonuclease
  misc_feature: Homolog of GI Number: 47937489 NR Desc: MGC78928 protein
MPLLLRGASLLRLCQCTSGLSSVKFSSRVTVLVNLNAMRDGMRATYSRRAEVKKDEQPLTEKEDAAESDLEMERGRSSSPSQLQSMTVKELRELTRRRGISVKGTKKDLVSALMNSMAVEANGEEGKSSVELVSPLEVPLKRKGGASVVVEQKLESSEIISETPNKKRSRTKQKSSKNTTCQEISVTNVKLSKTVVQKETVDGLSPDDDSEPWTILVHKKPEASWIPYNPRTMRPPPLSKDTRALKIMSWNVNGLKALLKSRGFSVQQLAQREDFDVLCLQETKMQEKDIEVIKDTLLDGYTNSFWTCSVSKLGYSGTAIISRVKPLSIKYGLGIPDHDTEGRVVTVEFDDFYLLTAYVPNSGDGLKRLTYRVTEWDPSLGNYMKELEKSKPVILTGDLNCAHQEIDIHDPAGNRRSAGFTNEERESFGTNFLSKGFVDTFRKQHPNVVAYSYWGYRHNARKTNKGWRLDYFLVSESIAEKVHDSYILPDISASDHSPLGLVLKL

SEQ ID NO: 6293 - DNA, 1745 bp, Zea mays
  misc_feature: Ceres CLONE ID no. 1163272
  misc_feature: Ceres CDNA ID no. 40351678
  CDS (199)..(1575): REFERENCED BY SEQ ID NO: 6294
gaggtccagcacacgatcctaaatcctgtgagcatcgtctccatcgctggtcttccattattgacgaatctctttgcctttttttcttccttcttaaacaaacccaattcgatttcaacgaacgcctcttctctctcactctctttcgatttgttctttgccggagctcgtagtgtaagcgtgatccgcggcggagagatggctcctaatgatcctaaaaaagccgttggtggcggcggaagtggtttcttcgcctctcttgcttcgtcgatctccaatttgggatctgctatgaccaaatcagttaatggtttggttccctatgagggacttgaagttatcaatcctgaaggaagtacagatgatgctgaggaggaagcaagcagaggaagatggaagcaagaggatcgagatggctattggaagatgatgcagaagtacataggatctgatgttacatcaatggtgacccttcctgtgattatttttgaaccaatgacaatgcttcagaaaatggcggagttgatggaatactcgcatctgctagacatggcagacaaaaccgaggacccttatttgcgcatggtgtatgcatcatcgtgggctatatccgtgtattatgctttccaacgtacctggaaaccattcaatccaatccttggtgagacttatgagatggctaattacaatggtgttaacttcatatctgaacaggtcagccatcacccaccaatgagtgctggtcatgctgaaaatgagcattttacgtatgattgtacttcaaaactgaaaacaaaatttttgggcaattccattgacgtttacccagtaggaaggacacgggtgacacttaaaagagatggagttgttcttgacttggtacctcctctgaccaaagttcacaacctaatctttggacgaacttgggtcgattcgcctggggaaatgatcatgacaaatcagaccaccggtgacaaagtcgtgctttactttcaaccatgtggctggttcggatctggtcgatatgaagtggatggatatgtctataacgcctctgaggagcctaagatactcatgactggcaaatggaacgagtccatgagttatcagccgtgtgatggtgaaggtgaacctctcccaggcaccgaactgaaagaggtatggaaactcgctgatgtgccaaaggatgacaaatatcaatacactcactttgctcacaagattaatagcttcgacactgccccgaaaaagctgttgccctctgattcacggttacgacctgatagatacgcacttgagatgggcgacatgtccaaatcaggctatgagaagagcagcatggaagagagacagagagctgaaaagagaacccgcgaagagaaaggccaagcctttactccaaaatggttcgatgtaacggaagaagtcactgctacaccatggggtgatctggaagtttaccaattcaatggaaagtactcggaacatcgtgcagctgcggataactctgaagataacaccgaccctaagtcgatccaattcaacccatggcaattccaagatctgtctacttaaatgtatcgctccaaaagacagaaaagatcaaatctttttggaaacaaatgtattcttattctctcgtagttacaaaaaactttgttctacatctgctagctttcccattgctttctctagtattagtgtacaacttctactgttttgtctaaaaaaaaaaaaaaaaaaaa

SEQ ID NO: 6294 - protein, 458 aa, Zea mays
  misc_feature: Ceres CLONE ID no. 1163272
  misc_feature: Ceres CDNA ID no. 40351678
  misc_feature (354)..(404): Pfam Name: Oxysterol_BP PFAM Desc: Oxysterol
MAPNDPKKAVGGGGSGFFASLASSISNLGSAMTKSVNGLVPYEGLEVINPEGSTDDAEEEASRGRWKQEDRDGYWKMMQKYIGSDVTSMVTLPVIIFEPMTMLQKMAELMEYSHLLDMADKTEDPYLRMVYASSWAISVYYAFQRTWKPFNPILGETYEMANYNGVNFISEQVSHHPPMSAGHAENEHFTYDCTSKLKTKFLGNSIDVYPVGRTRVTLKRDGVVLDLVPPLTKVHNLIFGRTWVDSPGEMIMTNQTTGDKVVLYFQPCGWFGSGRYEVDGYVYNASEEPKILMTGKWNESMSYQPCDGEGEPLPGTELKEVWKLADVPKDDKYQYTHFAHKINSFDTAPKKLLPSDSRLRPDRYALEMGDMSKSGYEKSSMEERQRAEKRTREEKGQAFTPKWFDVTEEVTATPWGDLEVYQFNGKYSEHRAAADNSEDNTDPKSIQFNPWQFQDLST

SEQ ID NO: 6295 - DNA, 1599 bp, Zea mays
  misc_feature: Ceres CLONE ID no. 1163710
  misc_feature: Ceres CDNA ID no. 36590570
  CDS (242)..(1315): REFERENCED BY SEQ ID NO: 6296
aataataagagccttgataagcacctttctgatatggctgcagcagttccagaaccacaagtgggtgatctcaccaatttgttcatttaaatgttcctatacagctgaatctcatggggttgagtggcatatcagatatgagataatcaaaggaatttgccatggtttgcattaccttcacacagattgccaaattgtccatttggacctaaagcctgagaatatattgctagatgacaacatggagccaaaaattacagattttggtatgtccaggctctttggtctacaacaatccaaaatcatcaccaaaacttgtggaggaacacttggatacatggcaccagaatacttactaaaagggttgatttcagtgaaggccgacatattcagtttgggcgttataatcatagaggtgatgaccggaggccggaattatcccacttgtgaaaaatcttgcgagcaattcgctgttgatgtggttggacgttggaggaagaggttattggaggaggcaggaaggtacacacccttggaaaaatacgttgagcaagtagagacatgcatcttgataggattgatgtgtgtcgatgatgatcctaacaaaaggcccacgacattggacattatcgaaaggcttaccaaagtagatgtcacgaacacggacagagggccacccaaaactctggaggccgcgacagggcttacaggccaccccaacctcgcaactagatcatttcttgacaggttccgccgaaccatcgtgatagggatgctgaagaaggccctgaaaatccaggacgtatcgcagttggagcagctcctggccaaggaggtgctgctggagctccacaaaatcggcacgaatgcaactggaaacagatcgttcctggagaggctccacgcaagcatcaccatggctacgctggttcaggcgctgcattccttggacttggatccatcggcggcgctgcgtatggaggtgctgttcttggcgctggagaatatgcgtggaaaaaacaactcaaggcgaagaagcgaggacgtccttgagctggaggagcggccagagcagatccggtcggtgctggaggctggcaccagggccaggctcagtgatgaggaacacatgccgtcggtgtctgtgcaggctgaagaccaggcctttcccaaaccgaagttggccaaagtacgcgccaccgccccggtgtgcgtgtcagcagtgtggttggcggccggcataggattcctgtgtggattcaccctaggagagatgaggggattaaggcggacgagggtccacgaacgcacgtgatgccaatgtgcccacatgacatggccagaaaatgtcactgcggtggaccatgcatgcacgaattaaggagcaccagttagaatacgtattctagattcattttacaaattctgtatttaaaaggaacttgtgcattgtgacagaggcggcggactggatcaggttgtattgtttctgctggtgtcctggcgtatgtataagccacggagtgtatcggatgaaattgaacagagaaatgtgcaatatagaaccgtgttgagggcaaaaaaaaaaaaaaaaaaaaa

SEQ ID NO: 6296 - protein, 357 aa, Zea mays
  misc_feature: Ceres CLONE ID no. 1163710
  misc_feature: Ceres CDNA ID no. 36590570
  misc_feature (4)..(64): Pfam Name: Pkinase_Tyr PFAM Desc: Protein tyrosine kinase
  misc_feature: Homolog of GI Number: 31430812 NR Desc: putative receptor
  misc_feature: Homolog of GI Number: 50923553 NR Desc: OSJNBa0016N04.14
  misc_feature: Homolog of GI Number: 78708027 NR Desc: Ubiquitin family
  misc_feature: Homolog of GI Number: 77551927 NR Desc: Protein kinase domain
  misc_feature: Homolog of GI Number: 77549408 NR Desc: stem rust resistance protein
  misc_feature: Homolog of GI Number: 77549419 NR Desc: stem rust resistance protein
  misc_feature: Homolog of GI Number: 77555746 NR Desc: stem rust resistance protein
  misc_feature: Homolog of GI Number: 60393199 NR Desc: serine/threonine protein kinase
  misc_feature: Homolog of GI Number: 62701789 NR Desc: Similar to stem rust resistance protein
  misc_feature: Homolog of GI Number: 77549326 NR Desc: stem rust resistance protein
MEPKITDFGMSRLFGLQQSKIITKTCGGTLGYMAPEYLLKGLISVKADIFSLGVIIIEVMTGGRNYPTCEKSCEQFAVDVVGRWRKRLLEEAGRYTPLEKYVEQVETCILIGLMCVDDDPNKRPTTLDIIERLTKVDVTNTDRGPPKTLEAATGLTGHPNLATRSFLDRFRRTIVIGMLKKALKIQDVSQLEQLLAKEVLLELHKIGTNATGNRSFLERLHASITMATLVQALHSLDLDPSAALRMEVLFLALENMRGKNNSRRRSEDVLELEERPEQIRSVLEAGTRARLSDEEHMPSVSVQAEDQAFPKPKLAKVRATAPVCVSAVWLAAGIGFLCGFTLGEMRGLRRTRVHERT

SEQ ID NO: 6297 - DNA, 660 bp, Glycine max
  misc_feature: Ceres CLONE ID no. 1168508
  misc_feature: Ceres CDNA ID no. 24726494
  CDS (94)..(390): REFERENCED BY SEQ ID NO: 6298
aattttcacttaaaaaaaaagaacaaacgtcccaagtatcgtttttccatatttgattacagcctcaactcaaccgtgtctgaagtcacttcaatggcggatagggaaccaaagcctaaagactcgccttcagaaaaagatgtgaaaagtccaaacatttttgagcgagctaaggaggagattgaggcagtgtttcatcatgacaaatcgcctcaccatcacaaagaaactcatgggacaagtgatgacattgacgagggaacttcacctgatgaaataaaagcgcctggtgtgtttgaacgggtgaaggaggagattgaagctgttgctgaggccattcatcccaagaaagaatctgaatccgacactcgtgatgtgtcaccaaagtgatggctaggatgtgcctttattttgtaacaaagagtgtgaagacttgtttcaatggtgttaaccatcaaaactaccttggctttgtccactgatctttctttcttttttttattttgttgttgttgttgtttcctttaagtagtaaatttctcttcttttttcaattgattatgtgaatgcttagtccttttgtcttcaaaaaaagaaagattatccctgaactggtacattatcaaaaaaaaaaaaaaaaaaaaaaaaaaaaaaaaaaaa

SEQ ID NO: 6298 - protein, 98 aa, Glycine max
  misc_feature: Ceres CLONE ID no. 1168508
  misc_feature: Ceres CDNA ID no. 24726494
MADREPKPKDSPSEKDVKSPNIFERAKEEIEAVFHHDKSPHHHKETHGTSDDIDEGTSPDEIKAPGVFERVKEEIEAVAEAIHPKKESESDTRDVSPK

SEQ ID NO: 6299 - DNA, 1446 bp, Glycine max
  misc_feature: Ceres CLONE ID no. 1168541
  misc_feature: Ceres CDNA ID no. 25892243
  CDS (17)..(1231): REFERENCED BY SEQ ID NO: 6300
gttttcacagaaaaggatgctactgggtgctgtcagagttcaacattttctgagttcactcactttttctcgctttcaaccttccttttctctgcgagcattttccgctatggccgaagaatttgtgaagggctctgttcatcaaaacggcgtcgctgtcataaccctcgatcgccccaaagctctcaacgccatgaacctagatatggatgtaaagtataaaagttatcttgatgaatgggaatctgacccaagggtcaaatgcgtactggttgatagcagctcgcctcgagccttttgcgctggtggtgatgtgaagcagataacaatcaaaaaccatctatcagatatgattgaggtcttcactgctgagtattctttgatatgcaaaatttctgattacaagaagccatatataagcttcatggatggaataactatgggttttggaattggtttatctggtcatggccgctatcgcatcataacagagagaactgttcttgcgatgccagaaaatggaattggtttgttcccagatgtaggttttgcttatatagcggctcaaagtccaggggaaggatccgttggtgcttatcttggattgactggaaagaggatttctactccctcagatgcaatatatgctggccttggaacacattatgtgccatctggaaagttaggttcattcaaggatgccctcttggccacaaacttttctcaggatccacatcaggacatcaaagtacttttagcaagatatgagtccaaccctgagtccgaggcacagttgaaattgcttttacctcagctagtttctacatttggaggaaataaatcagtcactgaaattattgaggagctaaaaaaacaccagtcaagcactgaccctaatgtcgtggagtgggctaatgaagctctccaaggcctcagaaaaggtgctcctttttcccttttcttgaccaacaagtacttctcttcggttgcctctgcagtggggaataatgacggtggactatccacgcttagtggcgtaatggaaactgagtatcgtattgccttgaggtcttcactacggcatgatttttcagaaggtgtccgagcagtgctggtggacaaggatcagaacccaaaatggaaaccatcaagcttggaggaaattgatccgagtgaagtggaagccgtctttaaacctttaggaccggaagttggggagttgagagtgtaattttagatggaaaatgtgcttttctcatttcttcaaatgcattacagaattgtaagcactgcataaaataaatagatggtgttttcattaggtctggcatccagtccaggtccagcgtgttgctagcactgttcaccatataataacatgaggtccacgtttttggaaaggtcaaaaaaaaaaaaaaaaaaaaaaaaagaaaaaaaaaaaaaaaa

SEQ ID NO: 6300 - protein, 373 aa, Glycine max
  misc_feature: Ceres CLONE ID no. 1168541
  misc_feature: Ceres CDNA ID no. 25892243
  misc_feature (16)..(188): Pfam Name: ECH PFAM Desc: Enoyl
  misc_feature: Homolog of GI Number: 11994698 NR Desc: 3
  misc_feature: Homolog of GI Number: 21536517 NR Desc: 3
  misc_feature: Homolog of GI Number: 79473201 NR Desc: catalytic
  misc_feature: Homolog of GI Number: 50725651 NR Desc: putative 3
  misc_feature: Homolog of GI Number: 46202084 NR Desc: COG1024: Enoyl
  misc_feature: Homolog of GI Number: 29655141 NR Desc: enoyl
  misc_feature: Homolog of GI Number: 69926900 NR Desc: Enoyl
  misc_feature: Homolog of GI Number: 78695778 NR Desc: enoyl
  misc_feature: Homolog of GI Number: 16125601 NR Desc: enoyl
  misc_feature: Homolog of GI Number: 13476928 NR Desc: 3
MAEEFVKGSVHQNGVAVITLDRPKALNAMNLDMDVKYKSYLDEWESDPRVKCVLVDSSSPRAFCAGGDVKQITIKNHLSDMIEVFTAEYSLICKISDYKKPYISFMDGITMGFGIGLSGHGRYRIITERTVLAMPENGIGLFPDVGFAYIAAQSPGEGSVGAYLGLTGKRISTPSDAIYAGLGTHYVPSGKLGSFKDALLATNFSQDPHQDIKVLLARYESNPESEAQLKLLLPQLVSTFGGNKSVTEIIEELKKHQSSTDPNVVEWANEALQGLRKGAPFSLFLTNKYFSSVASAVGNNDGGLSTLSGVMETEYRIALRSSLRHDFSEGVRAVLVDKDQNPKWKPSSLEEIDPSEVEAVFKPLGPEVGELRV

SEQ ID NO: 6301 - DNA, 1149 bp, Glycine max
  misc_feature: Ceres CLONE ID no. 1168607
  misc_feature: Ceres CDNA ID no. 25087656
  CDS (49)..(909): REFERENCED BY SEQ ID NO: 6302
atcatcatctgttttagcgtcgcctttgggatccaaactccaacaaaaatggacgtttccgagctcgccaagaagctcggtctctccgattccaaactcctcgtccggaaagctgccgagctccgtcgcctctgcgatgtccagttcgattcctccgtcattggagtcggtgaggttgcaaaatctctcatatgcttggaaatcgccgccactagactcggcgttctctttgaccgatcttctgctgtgaggctcagcggaatgtccgaaagagcttacatcagatcctacaattctctccacaacggccttggtgtcaagatgaaattagatgtgagggaattggcgattcagttcggctgcgttcgcattatccctttcgttcgtgacggtcttaaattatataaggatcggtttgtttcatcattgccggcttctcgccgtgcaagtgctgatttcactcgtccagtgttcaccgcggttgctttttatttatgtgctaagaaacacaagcttaaagtagataaacttaagttaattgagctctgtggtacatctgagtctgagttttctagtgtttctgctactatgaaggatttgtgccatgatgtttttggggttgcgaaggaaaagaaggatcctaaggaagtgcagtcaaatcgagatttgcttgatgttttgccaagtaaaaggaaagctgaggatggtggttattcatcggaggatggtccagagctttcaagctataaaaaagccaagaaaatggaaaaacatgattatgagaaatggaaatcttctgtgctttcatccaataaacaaaataagaaagcgccttgcaagcgaaccagacagactagtctcaactttctcaaggaaccttccgataatcaagagttagaggcaatttgagatggtattgctatgctttattatcaaagatgattttggaggaagttcaactcattaattatgaaaaaaaaaggatgaagtatgacatcaactgatattgttatagaatagaactcaattttgttagatgttgtcctttttggattttccaaaagtttacagcaagaactctctgtacagactggcattccttttattaactttgttggtatttatttagcttcaaaaaaaaaaaaaaaa

SEQ ID NO: 6302 - protein, 286 aa, Glycine max
  misc_feature: Ceres CLONE ID no. 1168607
  misc_feature: Ceres CDNA ID no. 25087656
  misc_feature (1)..(254): Pfam Name: ORC6 PFAM Desc: Origin recognition complex subunit 6
  misc_feature: Homolog of GI Number: 47900696 NR Desc: putative origin recognition complex subunit 6
  misc_feature: Homolog of GI Number: 53793723 NR Desc: putative origin recognition complex subunit 6
  misc_feature: Homolog of GI Number: 47824941 NR Desc: putative origin recognition complex subunit 6.
  misc_feature: Homolog of GI Number: 49659274 NR Desc: origin recognition complex 6 subunit
  misc_feature: Homolog of GI Number: 34913196 NR Desc: origin recognition complex subunit 6
  misc_feature: Homolog of GI Number: 15223373 NR Desc: origin recognition complex subunit 6 family protein
  misc_feature: Homolog of GI Number: 53689781 NR Desc: origin recognition complex subunit 6
  misc_feature: Homolog of GI Number: 4262173 NR Desc: 3975
  misc_feature: Homolog of GI Number: 71534964 NR Desc: putative origin recognition complex subunit 6
MDVSELAKKLGLSDSKLLVRKAAELRRLCDVQFDSSVIGVGEVAKSLICLEIAATRLGVLFDRSSAVRLSGMSERAYIRSYNSLHNGLGVKMKLDVRELAIQFGCVRIIPFVRDGLKLYKDRFVSSLPASRRASADFTRPVFTAVAFYLCAKKHKLKVDKLKLIELCGTSESEFSSVSATMKDLCHDVFGVAKEKKDPKEVQSNRDLLDVLPSKRKAEDGGYSSEDGPELSSYKKAKKMEKHDYEKWKSSVLSSNKQNKKAPCKRTRQTSLNFLKEPSDNQELEAI

SEQ ID NO: 6303 - DNA, 958 bp, Glycine max
  misc_feature: Ceres CLONE ID no. 1168654
  misc_feature: Ceres CDNA ID no. 35383363
  CDS (132)..(686): REFERENCED BY SEQ ID NO: 6304
aatccttccttccttcacattctattctatttaccctttgttggtccgcgaagtttcttgtttcctccaacatataatacctcatctttctctttcaatttctctcttcgcttttttttgattcacacacaatgggtctctgggattccttcctcaattggctccgcagcttgttttttaaacaggagatggaactttcacttgttggccttcagaatgctggcaagacttctcttgtcaatgcaattgctactgggggctacagtgaggacatgattccaactgttggtttcaacatgagaaaagtgactaagggaaatgtcacaataaagctttgggaccttgggggacagaggaggttccgatcaatgtgggagcgatactgtcggggtgtctctgctatcgtatatgttgtagatgccgctgatagagacagtgttccaatatctcgaagtgagttacatgatctattgacaaaaccttctttgagtgcgattcctttgcttgttcttggaaacaaaattgacaagtcagaagctctttctaagcaagcattggtagatcagctaggacttgagtcaattaaagacagagaggtctgctgctatatgatttcatgcaaggattctgttaacatagatgtagtcattgactggctaatcaaacactcaaacactgcaaagtgatccttggtttggccagtatttcatttttagtcaaagatacaaggcgttgaggaaattccttcttggtagaagaatacattttcattaatttagttgtggttcaagtttgtttgtatagtaatcaaaccaggtcagatcactcaaatattgcatgcagtgttcctatgtatcataaaccgattagttgatctcgtacattttattttttttggtttctatttttaataaaatacaagtccaacaagtttatttgtctaaaaaaaaaaaaaaaa

SEQ ID NO: 6304 - protein, 184 aa, Glycine max
  misc_feature: Ceres CLONE ID no. 1168654
  misc_feature: Ceres CDNA ID no. 35383363
  misc_feature: null
  misc_feature: Useful for making plants with altered terpenoid content
  misc_feature: Homolog of GI Number: 21553410 NR Desc: ADP
  misc_feature: Homolog of GI Number: 50912455 NR Desc: putative ADP
  misc_feature: Homolog of GI Number: 9757978 NR Desc: ADP
  misc_feature: Homolog of GI Number: 21593081 NR Desc: ADP
  misc_feature: Homolog of GI Number: 21389677 NR Desc: ADP
  misc_feature: Homolog of GI Number: 9757877 NR Desc: ADP
  misc_feature: Homolog of GI Number: 68369362 NR Desc:  similar to ADP
  misc_feature: Homolog of GI Number: 50754608 NR Desc:  similar to ADP
  misc_feature: Homolog of GI Number: 8922601 NR Desc: ADP
  misc_feature: Homolog of GI Number: 76648606 NR Desc:  similar to ADP
  misc_feature: Useful for increasing chlorophyll and photosynthetic capacity
  misc_feature: Useful for making plants with increased biomass and foliage
  misc_feature: Useful for making shorter plants
  misc_feature: Useful for making smaller plants
  misc_feature: Useful for making stronger plants
MGLWDSFLNWLRSLFFKQEMELSLVGLQNAGKTSLVNAIATGGYSEDMIPTVGFNMRKVTKGNVTIKLWDLGGQRRFRSMWERYCRGVSAIVYVVDAADRDSVPISRSELHDLLTKPSLSAIPLLVLGNKIDKSEALSKQALVDQLGLESIKDREVCCYMISCKDSVNIDVVIDWLIKHSNTAK

SEQ ID NO: 6305 - DNA, 600 bp, Glycine max
  misc_feature: Ceres CLONE ID no. 1168664
  misc_feature: Ceres CDNA ID no. 25891000
  CDS (79)..(507): REFERENCED BY SEQ ID NO: 6306
actcaacatcttcttccgcactcagactctctcactaactctcaattcgatttcttcaatttcgattcgaaagagacgatgagcaccggcgcagcaagcggcacgacgaaaggagggagaggaaagccaaaggccaccaagtccgtctctcgttcctccaaggccggtctccagttccccgtcgggagaatcgcgagattcctcaaggccggtaaatacgcagagcgtgtcggtgccggagctccggtttacctctccgccgttctagagtacctcgccgctgaggtgttggagctcgctggaaacgcggcgagggataacaagaagacgcgtattgtcccgaggcatattcagcttgcggtgaggaacgatgaggagctgagtaagcttctgggagctgtgacgattgctaacggaggagtgttgccgaatattcattcgaatcttttgccttccaaggttgggaagaacaaaggagatattggatctgcttctcaagagttttgagtttcattttatctcttgtttttttggatgtaactttagctaatatatgcttcttgattaatatcgtaaggtttgccaaaaaaaaaaaaaaaa

SEQ ID NO: 6306 - protein, 142 aa, Glycine max
  misc_feature: Ceres CLONE ID no. 1168664
  misc_feature: Ceres CDNA ID no. 25891000
  misc_feature (31)..(95): Pfam Name: CBFD_NFYB_HMF PFAM Desc: Histone
  misc_feature: Homolog of GI Number: 20334750 NR Desc: At1g08880/F7G19_24
  misc_feature: Homolog of GI Number: 21553797 NR Desc: histone H2A
  misc_feature: Homolog of GI Number: 21593507 NR Desc: putative histone H2A
  misc_feature: Homolog of GI Number: 3204129 NR Desc: histone H2A
  misc_feature: Homolog of GI Number: 297871 NR Desc: histone H2A
  misc_feature: Homolog of GI Number: 685035 NR Desc: histone H2A homolog
  misc_feature: Homolog of GI Number: 21593834 NR Desc: histone H2A
  misc_feature: Homolog of GI Number: 29824201 NR Desc: putative histone H2A
  misc_feature: Homolog of GI Number: 2317760 NR Desc: H2A homolog
  misc_feature: Homolog of GI Number: 42565387 NR Desc: histone H2A
MSTGAASGTTKGGRGKPKATKSVSRSSKAGLQFPVGRIARFLKAGKYAERVGAGAPVYLSAVLEYLAAEVLELAGNAARDNKKTRIVPRHIQLAVRNDEELSKLLGAVTIANGGVLPNIHSNLLPSKVGKNKGDIGSASQEF

SEQ ID NO: 6307 - DNA, 870 bp, Glycine max
  misc_feature: Ceres CLONE ID no. 1168678
  misc_feature: Ceres CDNA ID no. 40351679
  CDS (64)..(627): REFERENCED BY SEQ ID NO: 6308
aacacacacacaatatctcttccaattttctcctccaatttcaatttctcgtcgtccctcattatggctcgtctctcgatcgtcgccatcgtcgccgccgtgctcctcctggccctctccgccacccccgcgacggcgcgtccctgcaggagcttcataatctcctcctactccttccgcaaccctaactccaacacgttcgccaccatcaccgagatccgatccttcacccctctctacatcaccgacaaacccccctcctatgcccttttcttcccccacgcgactcagctccctcagcatgagagcgtgcgcccacgcgcccctctagggttcgcctccgcctacgatttctcttccctccgcgaccgcaccaaggacatcctcagcgtcgccctagccctcctcttcggcgtcggctgcggcgccctcaccgccgccaccatgtacctcgtctggtccgtcttctccacgcgccaccgcgcctcctccttcgacgacttctcctccgacgacgaagacgagatcgagagccccaagaagcttggctacgtcaagattccggccattgagaccactaccgccgtcgcccccgcagctccggctccagccaagggttcggtatgagaatgtctccgactccgtaacggtgtggcttatgtggattgttaataattattattataggtgaaattgaatagtgaaaatgtcaaatggtgcaaacttttgccctgtatttgtgtttatgtttactttcttaatttgatgtatttgcgtttatcttaattctaattgccaaaccctggcgcttattattattgtgttgattttctttgttgattgtttcaatgccgaaaaaaaaaaaaaaaa

SEQ ID NO: 6308 - protein, 187 aa, Glycine max
  misc_feature: Ceres CLONE ID no. 1168678
  misc_feature: Ceres CDNA ID no. 40351679
MARLSIVAIVAAVLLLALSATPATARPCRSFIISSYSFRNPNSNTFATITEIRSFTPLYITDKPPSYALFFPHATQLPQHESVRPRAPLGFASAYDFSSLRDRTKDILSVALALLFGVGCGALTAATMYLVWSVFSTRHRASSFDDFSSDDEDEIESPKKLGYVKIPAIETTTAVAPAAPAPAKGSV

SEQ ID NO: 6309 - DNA, 807 bp, Glycine max
  misc_feature: Ceres CLONE ID no. 1168749
  misc_feature: Ceres CDNA ID no. 40351680
  CDS (89)..(550): REFERENCED BY SEQ ID NO: 6310
aatttctgtctcactgagagaaactctctctctctctctctctctctctctagaaaccctattgcacgttttgcaatcgaactcgacaatggccaacagcaacctccctcgaagaatcatcaaggaaacgcagcgtttgctcagtgagccagcacctggtattagtgcctccccctctgaagagaatatgcgatatttcaatgtgatgatccttgggcctacccagtcgccttatgaaggaggcgttttcaagttagaactatttttgccagaagaatatccaatggctgctccaaaggttaggtttctaacaaaaatatatcatccgaacattgataagcttggcaggatatgtcttgatattctgaaagataagtggagtcctgcacttcagatacgcactgttctattaagcattcaagctctattgagtgcaccaaacccagatgatccactttctgagaacattgccaagcattggaaatctaatgaggccgaggctgtcgaaacagcgaaggaatggacccaattatatgctagtggcgcctgatgataggcttcaaacttatggctccaaaataacaattgtaaccattttatattggaaatctacaggaatttatgtatgaactattcgaattaatattcctagcagcttccagttacctgttaatttcttctcttggaagctgccttatgttggaacttgtatgaatatatgtgttgatcatttacctatctaacaatttagaacgtgcttcagtcgttgactgaagtaatttggtattcccaaaaaaaaaaaaaaaa

SEQ ID NO: 6310 - protein, 153 aa, Glycine max
  misc_feature: Ceres CLONE ID no. 1168749
  misc_feature: Ceres CDNA ID no. 40351680
  misc_feature (9)..(146): Pfam Name: UQ_con PFAM Desc: Ubiquitin
MANSNLPRRIIKETQRLLSEPAPGISASPSEENMRYFNVMILGPTQSPYEGGVFKLELFLPEEYPMAAPKVRFLTKIYHPNIDKLGRICLDILKDKWSPALQIRTVLLSIQALLSAPNPDDPLSENIAKHWKSNEAEAVETAKEWTQLYASGA

SEQ ID NO: 6311 - DNA, 1442 bp, Glycine max
  misc_feature: Ceres CLONE ID no. 1168753
  misc_feature: Ceres CDNA ID no. 40351681
  CDS (117)..(1253): REFERENCED BY SEQ ID NO: 6312
acacccttctttctctctcgtctgtctttttttctctttctctctctagattttctttcttcttcttctttatgagccctaactcggggccccatagtcgtcgctgctagctagccatgtcgctgaggaaggtcttccgctcccgcaagttctccaaatcgttcaaagaggtgctgccggcggagggcgccgccgtcgagggcggggtcgccggcaccgtcgaggaggcggcgaatgggaataataatgggtggtctagcatgctgccggagatcctcggcgagatcgtgcggcgcgtggacgccgccgaggagcagtggccgaaccgccaaaacgtcgtcgcctgcgcgtgcgtctgcaagaggtggcgtgacatcacgcgcgaggtcgtgcgtgtgccctcgcataccgggaaaatcactttcccttcgtgccttaaacagccaggaccacgtgacgttccccaccaatgtcttataaagcggaaccagaagacctcaacgttttatttatatcttgcccttacaccatcattcacagataaagggaagtttctgctagcagctaggagatataggtgtggtacccatactgagtatataatttcacttgatgctgatgacttatcccaaggaagcaatgcttatgttggaaagctaagctcggattttcttggcaccaacttcacaatttatgacagccagccaccccatagtggtgcaaaaccatcaagtggcagggccagccgtcggtttgccagcaagcagataagcccgcaagttcctgcaggtaattttgaggtggggcaggtctcctacaagttcaaccttttgaaatcaagagggccaaggagaatggtttgctcattgaagtgtcctgtaactcctgtctcaccaacgagtggaagttcagatagcacgcctgtcaatggccataagatgcacgataaagaacaagctgcatctggctacacaatcttgaagaataaagctccaaggtggcatgagcatttgcaatgttggtgcttgaatttccacggccgtgtgacggtggcctcggtgaagaactttcagctggttgcaacagtggaccaaagccaaccaggagggaaaggagatgaggaaacagttctcctccagtttggtaaagtaggggatgatacttttaccatggattatagacagcccctatctgctttccaggcttttgccatttgcttaactagctttggcactaaacttgcttgtgagtaatataattttggtgtcactgcttatttattccgtggatggatgttttaagtgaatagttgttttcttttttactcggctttaagtctacaatttgattgcaggaagcttgttgtaaatgttatatcatcaataggacatgacatcttccataaatcaaatatattgccttatccaaaaaaaaaaaaaaaa

SEQ ID NO: 6312 - protein, 378 aa, Glycine max
  misc_feature: Ceres CLONE ID no. 1168753
  misc_feature: Ceres CDNA ID no. 40351681
  misc_feature (110)..(378): Pfam Name: Tub PFAM Desc: Tub family
  misc_feature (46)..(99): Pfam Name: F PFAM Desc: F
MSLRKVFRSRKFSKSFKEVLPAEGAAVEGGVAGTVEEAANGNNNGWSSMLPEILGEIVRRVDAAEEQWPNRQNVVACACVCKRWRDITREVVRVPSHTGKITFPSCLKQPGPRDVPHQCLIKRNQKTSTFYLYLALTPSFTDKGKFLLAARRYRCGTHTEYIISLDADDLSQGSNAYVGKLSSDFLGTNFTIYDSQPPHSGAKPSSGRASRRFASKQISPQVPAGNFEVGQVSYKFNLLKSRGPRRMVCSLKCPVTPVSPTSGSSDSTPVNGHKMHDKEQAASGYTILKNKAPRWHEHLQCWCLNFHGRVTVASVKNFQLVATVDQSQPGGKGDEETVLLQFGKVGDDTFTMDYRQPLSAFQAFAICLTSFGTKLACE

SEQ ID NO: 6313 - DNA, 1904 bp, Glycine max
  misc_feature: Ceres CLONE ID no. 1168832
  misc_feature: Ceres CDNA ID no. 40041396
  CDS (443)..(1444): REFERENCED BY SEQ ID NO: 6314
agtccccctccattctatcagattcagcaaaaacgtcatttcttgtccaaacacagacccactgacaccatcatcaccaatgttctcatcgacacaacaattgtccttatcctctcctcccccattctccatccccaatttcctccatctcttctcccaccaccataaaaaatgagagaaatctgaaaaccaaattcgaacgcacgttaccatactagtttcatcaaaatgagaagaaactaaaattccaaaaccaaattcgaaagcacgagcacaaccaactttattataatcatatgagtcgataatcaaattgtaccatcgactatcgactataccaattgttatacaatctaggagtaaacaagtttcatcaaaatgaatagaaactgaaaatcccaaaccaaaccaaagcaaacatttctctcgttgtattgcactcatggtttcatctccattgctagtatccctcactcttttcctttctctccctctcttgttgtttctatctcctcatattttgtcccctcccgacgccgacgacctcaccctcttccgccgcgccgccgccccccacaccacctcccacctctccgccacccctaaaatcgccttcctcttcctcaccaattccaatctcaccttctcccccctctgggaaaaattcttctcttcctccgaccaccaccaccgcctcttcaacatctacatccacgcggatcccacccaaaacatcgctttccccggcggcggcgtcttccatcaccgctcccgcctcgtccccgcgaaacccaccgcccgcgcctccccctccctcatctccgccgcccgccgcctcctcgccgccgccctcctcgacgaccccctcaaccactacttcgcccttctctcccaacactgcatccctcttcactcccttcaattcactcacaactttctcttcaaaaaccccactcacccacataaaagcttcattgagattctctccaacgaacccaacctcttcgaccgctacaccgcgcgtggcgaacacgcgatgctcccagaagtacccttctcctccttccgcgtggggtcgcagttcttcatcctcactcgccgccacgcgcgcacggtggtgcgtgatataaagctttggaacaagtttcggcttccgtgtgtcacagaagaaccttgttaccccgaagagcattattttcccacccttttgtccatgcaggatccgaatgggtgtagcgggtttacactgacccgggtcaactggaccgggtgctgggacgggcacccgcatctgtacaccgctccggaggtgtctccggagctggttcgccgtctgagggaatcgaattcgagcagctacctgtatctcttcgcgaggaagttcgcgcctgagtgtcttcggccgttgatggagatcgccgatgacgtcattttccgggagtgagagtgagccgggcatctttgatgatgatattgggaagaggaaaccttgtgttgatgttcaatgcaaatgtgtacagaaattctgatttctttaattgtaaattttagtatgtagtacaaaagtcaaaggtggtttccaaaggaggccacaggtcgaatattgagaattgtagtttgaaaagtctcatgcaaaagttccactatgaagggagttgaaaagttgtaagatggataaatagattatgtatgatgtgctagccaaattttgagtgcaacacaaagaaaacaagcaatagtcaattttttttcccagttctttccctcttttttttcgtcttgtcttgaggactttcaacttcaatgtaattcccaaaaggtttgaaaaacaaaaaacatgcttggaaaacgaaaaatcatttatgcaaaatgcataaccagttcttgcaaaaaaaaaaaaaaaa

SEQ ID NO: 6314 - protein, 333 aa, Glycine max
  misc_feature: Ceres CLONE ID no. 1168832
  misc_feature: Ceres CDNA ID no. 40041396
  misc_feature: Homolog of GI Number: 50922289 NR Desc: OSJNBb0056F09.13
  misc_feature: Homolog of GI Number: 188864 NR Desc: mucin
  misc_feature: Homolog of GI Number: 186396 NR Desc: mucin
  misc_feature: Homolog of GI Number: 4505285 NR Desc: mucin 2
  misc_feature: Homolog of GI Number: 34911442 NR Desc: P0431H09.21
  misc_feature: Homolog of GI Number: 12018147 NR Desc: vegetative cell wall protein gp1
  misc_feature: Useful for making plants with altered leaf shape eg curled leaves
MVSSPLLVSLTLFLSLPLLLFLSPHILSPPDADDLTLFRRAAAPHTTSHLSATPKIAFLFLTNSNLTFSPLWEKFFSSSDHHHRLFNIYIHADPTQNIAFPGGGVFHHRSRLVPAKPTARASPSLISAARRLLAAALLDDPLNHYFALLSQHCIPLHSLQFTHNFLFKNPTHPHKSFIEILSNEPNLFDRYTARGEHAMLPEVPFSSFRVGSQFFILTRRHARTVVRDIKLWNKFRLPCVTEEPCYPEEHYFPTLLSMQDPNGCSGFTLTRVNWTGCWDGHPHLYTAPEVSPELVRRLRESNSSSYLYLFARKFAPECLRPLMEIADDVIFRE

SEQ ID NO: 6315 - DNA, 1227 bp, Glycine max
  misc_feature: Ceres CLONE ID no. 1168847
  misc_feature: Ceres CDNA ID no. 25446960
  CDS (60)..(1013): REFERENCED BY SEQ ID NO: 6316
gatttgattttgtttccgttgtataaaaagttgttctgagtgagagaaagagaagaaaaatgggaggaagaatgcacacgaaatcagactcggaggtgacgagcaacagcatggagcagtcgtcgccggcgcgttctcctccgcggcggccactctactacgtccagagtccttcaaaccacgacgtggagaaaatgtcctacggctcaagccccatgggttccccacaccaccatttccactactacctctcttcccccatccatcactctcgcgaatcctccacctctcgcttctccgcttccctcaaaaaccctcgcaacttctcctcctcctcctcctggaagaagctccaccctcaccccaaccccgacgttgaccccgacgaccatgacgacgccgaccaccacctcaagcagtcctcccgcaacctccgcttgtacttgtggttcttcctcctctttcttctccttttgaccctcttctctttcatcctctgggccgccagcaagacctacaagcctcgaatcattgtcaagagtatagtgttggagaacttgtatgttcagtcaggaaacgatggaactggggtaccaactgatatgttgtcgttgaactcaacggtcagaatattgtacagaaatcctgccactttcttcggcgttcatgtcacttctacccctcttctcattagctattaccagcttgcaattgcctctggccagatgcagaagttctatcaatcgaggaagagtcggcggagtttggctgtagtggtttcaggacaccagattcctctctatggtggcgtgtcagttttagggaatactaaagagcatttggagagtgttgcattgccactgaacctgacatttgtagtgagatcaagggccttcatcttgggaagattagttaagtctaaattctttcgaagaatcagatgttctgtcactttgcatggcaacaaacttggaaaacatcttaatttaacggattcctgtgtctacaagtgatatttattccctcatcccttaaatggctcagacgacatgctttcactttattacttgtaacgatagctggtacattttttggctcgttatttttagttttttgttacccatcatctagcagaacgaacttgtccaatgtccatttgtctccgtaaatatctgaacgccaattttaatgtaatatgtgttcattgcttcaaaaaaaaaaaaaaaa

SEQ ID NO: 6316 - protein, 313 aa, Glycine max
  misc_feature: Ceres CLONE ID no. 1168847
  misc_feature: Ceres CDNA ID no. 25446960
  misc_feature (143)..(291): Pfam Name: Hin1 PFAM Desc: Harpin
  misc_feature: Homolog of GI Number: 5777621 NR Desc: CAA30379.1 protein
  misc_feature: Homolog of GI Number: 50929865 NR Desc: OSJNBa0039K24.20
  misc_feature: Homolog of GI Number: 28416677 NR Desc: At5g42860
  misc_feature: Homolog of GI Number: 50924360 NR Desc: OSJNBa0084A10.1
  misc_feature: Homolog of GI Number: 34898370 NR Desc: ESTD24835
  misc_feature: Homolog of GI Number: 188864 NR Desc: mucin
  misc_feature: Homolog of GI Number: 186396 NR Desc: mucin
  misc_feature: Homolog of GI Number: 4505285 NR Desc: mucin 2
  misc_feature: Homolog of GI Number: 58381712 NR Desc: ENSANGP00000018591
  misc_feature: Homolog of GI Number: 2134574 NR Desc: mucin
MHTKSDSEVTSNSMEQSSPARSPPRRPLYYVQSPSNHDVEKMSYGSSPMGSPHHHFHYYLSSPIHHSRESSTSRFSASLKNPRNFSSSSSWKKLHPHPNPDVDPDDHDDADHHLKQSSRNLRLYLWFFLLFLLLLTLFSFILWAASKTYKPRIIVKSIVLENLYVQSGNDGTGVPTDMLSLNSTVRILYRNPATFFGVHVTSTPLLISYYQLAIASGQMQKFYQSRKSRRSLAVVVSGHQIPLYGGVSVLGNTKEHLESVALPLNLTFVVRSRAFILGRLVKSKFFRRIRCSVTLHGNKLGKHLNLTDSCVYK

SEQ ID NO: 6317 - DNA, 1228 bp, Glycine max
  misc_feature: Ceres CLONE ID no. 1168942
  misc_feature: Ceres CDNA ID no. 24726543
  CDS (326)..(898): REFERENCED BY SEQ ID NO: 6318
atgggcctcgttaggatcaacgccaccttctttcccatttgcgcttccaatccttctaccccctctcacgcttcagttgctttcctcaaccaagtgattactactggctttgtttgagaaaaaaggttgaataaaaagaagaaaaaagggttgaatggggaagtctcctgattggttgtatatagatcatgcaacgtgtggctcccctgcatggattggtaaaggactcacctgtgtttgcttcaagcgtaagggaaactgtcaacgaatctgcattagtttgacccctttacaggaggaaagactgagaagactaaagcgccggatgaaagtttattttgatgcttccaagcttgaacaccaggaagcgttgagagctctgtggtctgcttcgtttcctgatcaggagctccaaagcttgatttctgatcaatggaaagaaatgggatggcagggtagagatccatctactgatttcagaggagctggtttcatttcgttggagaacctactattctttgcgaagacattctccacttcttttcagcgcctattgaagaaacaaggaggaaaaggagctgtttgggagtatccctttgctgttgctggcgtcaatatcacatttatgattatgcaaatgctggaccttgatgccaccaaacccaggacttttgtaagagctgtttttctgcagatgctttcagaaaatgaatgggcatttgacttgctctactgtgcggcattcgtggttatggacaaactgtggctggagagaaatgctacatacatggaatttaatgatgtcttgaaatccacgcgagttcagctagagaaagagttgttgatggatgatgttctacggattgaagacatgccttcttacagtcttctttgttgacaactggctcaaaaaccctctcttccaacgaagcatagtttgtgtaatgtgtacatcctcgctcacttgcttataggtttaactttaattaatgtccattaactaggtctagcatatcttcttaatttatccccctttttattccttacatgatatgatagatctaaattaaaatgaactcgactccttgactaatgactagtgctaaagaaatttccacatttgctgggtggatttttatctttacattgcttccacgagattctcgtttggaagttttgactaattagtgattggattcctagattatgcgtaaaaaaaaaaaaaaaa

SEQ ID NO: 6318 - protein, 247 aa, Glycine max
  misc_feature: Ceres CLONE ID no. 1168942
  misc_feature: Ceres CDNA ID no. 24726543
  misc_feature (67)..(228): Pfam Name: ELMO_CED12 PFAM Desc: ELMO/CED
  misc_feature: Homolog of GI Number: 18408759 NR Desc: phagocytosis and cell motility protein ELMO1
  misc_feature: Homolog of GI Number: 17981659 NR Desc: At2g44770/F16B22.26
  misc_feature: Homolog of GI Number: 70663961 NR Desc: OSJNBa0079A21.3
  misc_feature: Homolog of GI Number: 24308456 NR Desc: ELMO domain containing 2
  misc_feature: Homolog of GI Number: 50927527 NR Desc: ELMO domain containing 2
  misc_feature: Homolog of GI Number: 54639490 NR Desc: GA10046
  misc_feature: Homolog of GI Number: 37590724 NR Desc: MGC69076 protein
  misc_feature: Homolog of GI Number: 55233897 NR Desc: ENSANGP00000011527
  misc_feature: Homolog of GI Number: 31242491 NR Desc: ENSANGP00000011527
MGKSPDWLYIDHATCGSPAWIGKGLTCVCFKRKGNCQRICISLTPLQEERLRRLKRRMKVYFDASKLEHQEALRALWSASFPDQELQSLISDQWKEMGWQGRDPSTDFRGAGFISLENLLFFAKTFSTSFQRLLKKQGGKGAVWEYPFAVAGVNITFMIMQMLDLDATKPRTFVRAVFLQMLSENEWAFDLLYCAAFVVMDKLWLERNATYMEFNDVLKSTRVQLEKELLMDDVLRIEDMPSYSLLC

SEQ ID NO: 6319 - DNA, 1205 bp, Glycine max
  misc_feature: Ceres CLONE ID no. 1168952
  misc_feature: Ceres CDNA ID no. 25447153
  CDS (371)..(1030): REFERENCED BY SEQ ID NO: 6320
acaactggatgttgctaaaatcatattcaaagtcatggtcatttaatgaagtgccccttctcggtttctgagatctagctgagaaaccctccactctcgagtccaaactctcctcctacccaaaatggatgcaagggcatcatcttcttcagcttcctcgattcttttccttgcagcaattgtagctgcttatttctattcatcagaagcagctgtgtccaaaggatcttttgaggacaatttcagcataatgtggtctgaggaccattttactacctctaaagatggacagatctggtatctctcactagacaaagacacaggatgtggatttcaaacaaaacaacgctacagatttgggtggttcagtatgaagctgaagttggtagcaggtgactctgctggtgttgtgacagcttattatatgtgctcagaaaatggtgcgggaccagaaagagatgagcttgattttgagtttttggggaacagaacaggagagccttatttgattcagactaatgtatacaagaatgggactggtgggcgtgaaatgaggcacatgctttggtttgaccccacagaggactaccacacctattccattctctggaacaactaccagatagtgttttttgtggatagagttcctgtgagggtgttcaagaacaatggggagccaaacaatttcttccccaatgagaagcccatgtacttgttctccagcatatggaatgcagatgactgggccacaagaggtgggcttgagaagacaaactggaaattagccccatttgtgtcatcctacaaggacttcagtgtggatggttgccaatgggaagacccataccctgcttgtgtctcaaccacaaccaaaaattggtgggatcagtatgatgcttggcacctctctgatgatcagaaaaaggattatgcttgggttcagaggaaccttgtgatctatgactactgccaggattctgaacgttatccaactaccccagaggagtgttcattgagtccatgggattaatatgcctagggggagaaatccttattcttttaaatctctcttttctgccttatcattttttagttactatgagaatgagaataatgtgcagttttgtatgttgtaagctttttaaagtttggcaattatatattgaaacatttattggattcgttacccaaaaaaaaaaaaaaaa

SEQ ID NO: 6320 - protein, 301 aa, Glycine max
  misc_feature: Ceres CLONE ID no. 1168952
  misc_feature: Ceres CDNA ID no. 25447153
  misc_feature: null
  misc_feature: Useful for making plants with altered cell wall content and/or composition
  misc_feature (244)..(295): Pfam Name: XET_C PFAM Desc: Xyloglucan endo
  misc_feature (36)..(220): Pfam Name: Glyco_hydro_16 PFAM Desc: Glycosyl hydrolases family 16
  misc_feature: Homolog of GI Number: 21595178 NR Desc: endo
  misc_feature: Homolog of GI Number: 18391291 NR Desc: xyloglucan:xyloglucosyl transferase
  misc_feature: Homolog of GI Number: 6554196 NR Desc: T23J18.21
  misc_feature: Homolog of GI Number: 50937973 NR Desc: putative endoxyloglucan transferase
  misc_feature: Homolog of GI Number: 10177653 NR Desc: endoxyloglucan transferase
  misc_feature: Homolog of GI Number: 53653786 NR Desc: xyloglucan endotransglycosylase hydrolase 1
  misc_feature: Homolog of GI Number: 5070246 NR Desc: xyloglucan endo
  misc_feature: Homolog of GI Number: 77551307 NR Desc: xyloglucan endotransglucosylase/hydrolase precursor
  misc_feature: Homolog of GI Number: 62149370 NR Desc: pollen major allergen No.121 isoform 2
  misc_feature: Homolog of GI Number: 7447418 NR Desc: probable endo
  misc_feature: Useful for making plants with increased biomass and foliage
MDARASSSSASSILFLAAIVAAYFYSSEAAVSKGSFEDNFSIMWSEDHFTTSKDGQIWYLSLDKDTGCGFQTKQRYRFGWFSMKLKLVAGDSAGVVTAYYMCSENGAGPERDELDFEFLGNRTGEPYLIQTNVYKNGTGGREMRHMLWFDPTEDYHTYSILWNNYQIVFFVDRVPVRVFKNNGEPNNFFPNEKPMYLFSSIWNADDWATRGGLEKTNWKLAPFVSSYKDFSVDGCQWEDPYPACVSTTTKNWWDQYDAWHLSDDQKKDYAWVQRNLVIYDYCQDSERYPTTPEECSLSPWD

SEQ ID NO: 6321 - DNA, 919 bp, Glycine max
  misc_feature: Ceres CLONE ID no. 1169018
  misc_feature: Ceres CDNA ID no. 25447293
  CDS (190)..(609): REFERENCED BY SEQ ID NO: 6322
gaactcttcattttccataatcactcatcacttaacttattctctttctcactccaaccacagcattttcaccaccaccaataacaagaaaatcaatataataaattttcttctctgtttcttttttttttttctcttccgacgacgttaataactaatccgtcgtgactaattctttcgatcttgaagatgaagcagctgatccgccggctctcgcgcgtggccgactcctccaactacacgctcctccgcgcggactccgccgcctcccagcgctgccaccaccgccgccgccgtgcggagtcctttcgcctcgccgctgcggcgaagatccgccgctcctccgcggtggtgccggaggggcacgtgccgatctacgtcggcgacgagatggagcgcttcgtcgtgtgcgccgagctcctcaaccaccccgtcttcgtgaagctcctcaacgaatcggcgcaggaatacggctacgaacagaaaggagttctccggctgccgtgccgcgtcttcgtcttcgagcgtgttctcgacgcgctccgtcttggactcgacgcgcgtgacgtggcggagctcgtaaatttctcgccggaagagttctcctgagaaacaaagaaaaagaagcaaaaaagcaaaaaaacacaaaaaaacaaaatacgaagatcgttgattagtgagaacttttgctggttttggtgctctgtaaatatactacattaggatcttgataaaaaaaaaaaatgaggcacataaatgttagggtttgcaatttctttttgtttggggttcttttttctgattgattgttgtagttgtagttcgatgctctctcgttgtaaaggtaaagatatttttcactttgttgttgcagaatgagaatctcttttgaattttccattcaaaaaaaaaaaaaaaa

SEQ ID NO: 6322 - protein, 139 aa, Glycine max
  misc_feature: Ceres CLONE ID no. 1169018
  misc_feature: Ceres CDNA ID no. 25447293
  misc_feature (19)..(119): Pfam Name: Auxin_inducible PFAM Desc: Auxin responsive protein
  misc_feature: Homolog of GI Number: 11994425 NR Desc: auxin
  misc_feature: Homolog of GI Number: 13194772 NR Desc: putative auxin
  misc_feature: Homolog of GI Number: 50917449 NR Desc: putative  auxin responsive protein
  misc_feature: Homolog of GI Number: 50905523 NR Desc: auxin responsive protein
  misc_feature: Homolog of GI Number: 52077231 NR Desc: auxin responsive protein
  misc_feature: Homolog of GI Number: 50928745 NR Desc: OSJNBa0093O08.8
  misc_feature: Homolog of GI Number: 48374990 NR Desc: putative auxin
  misc_feature: Homolog of GI Number: 5852079 NR Desc: zwh0002.1
  misc_feature: Homolog of GI Number: 50928599 NR Desc: OSJNBa0060N03.10
  misc_feature: Homolog of GI Number: 7270034 NR Desc: auxin induced like
MKQLIRRLSRVADSSNYTLLRADSAASQRCHHRRRRAESFRLAAAAKIRRSSAVVPEGHVPIYVGDEMERFVVCAELLNHPVFVKLLNESAQEYGYEQKGVLRLPCRVFVFERVLDALRLGLDARDVAELVNFSPEEFS

SEQ ID NO: 6323 - DNA, 1463 bp, Glycine max
  misc_feature: Ceres CLONE ID no. 1169093
  misc_feature: Ceres CDNA ID no. 29191385
  CDS (68)..(1207): REFERENCED BY SEQ ID NO: 6324
atctcatatttctcatcaagttactatctataattaattaaattcctcgtggaatattgaagaagccatgtctacagctgggcaggtcatcaagtgcagagctgcggtggcatgggaagcagggaagccactgtcaatagaaaccatagaagtggcaccaccccagaaaggtgaagtgcgtttgaggatcctcttcaactccctttgccgtagtgatgtttattggtgggatgctaaggaccagactcctctgtttcctcgtatcttaggccacgaagcttcagggattgtggagagcgtgggcgagggtgtgacacatctgaaaccaggtgaccatgcactcccaatattcactggggagtgtggtgaatgcacttattgtaagtctgaagagagcaacctgtgtgagctactcaggatcaacactgacaggggtgttatgctgagtgatggaaaaacaaggttctccaaaaatggccaacccatttaccacttcgttggaacctccactttcagtgaatacactgttctccatgaaggatgtgtagccaagattaaccctaatgccccacttgacaaagttgctattgtcagctgtggattctgcacaggttttggggctactgtgaatgttgcaaaaccaaagcctaataatactgttgctgtctttggcttaggagctgttggtcttgctgcctgtgaaggggcaagggtttctggtgcatctagaatcatcggggttgatttacttcccaatcgatttgaacaagccaaaaaatttggggtcactgattttgtaaacccgaaagatcacaacaaaccagtccaagaggtcattgctgaaatgactaatggaggagtagatcgtgctattgaatgcactggaagcatccaagcttcaatctcagcatttgaatgcactcatgatggttggggtactgctgtccttgttggtgtgccaaagaaggatgttgaattcaaaactaatcctatgaagttcatggaagggagaactcttaagggtaccttctatggtcactacagaccccgcactgacattcctggtgttgtggagaagtacctcaacaaggagttggaactagacaaatttatcactcactctgtgccattctcaaagatcaacactgcatttgatcttatgctgaaaggggagggcataaggtgcctcatctgcatggaagagtaaatcaatgatgaatgatgttccctgctgtgagaacaatgtttctgtgttatgtgaaaagagaattgaataaatttggcatgcaattcggttgttggattcatgctatatgagtgtgtaaagaggtaacggggggtgatgactttcttggtcattgtcgtggctttgtgacttctattgcaaatgttgtcttgtaactttgttgtattttcggcaatatatctatatgatatctatctttctaaaaaaaaaaaaaaaa

SEQ ID NO: 6324 - protein, 379 aa, Glycine max
  misc_feature: Ceres CLONE ID no. 1169093
  misc_feature: Ceres CDNA ID no. 29191385
  misc_feature (194)..(336): Pfam Name: ADH_zinc_N PFAM Desc: Zinc
  misc_feature: Homolog of GI Number: 22597178 NR Desc: alcohol dehydrogenase 1
  misc_feature: Homolog of GI Number: 29373061 NR Desc: alcohol dehydrogenase 1
  misc_feature: Homolog of GI Number: 1297359 NR Desc: alcohol dehydrogenase 2d
  misc_feature: Homolog of GI Number: 3694835 NR Desc: alcohol dehydrogenase Adh
  misc_feature: Homolog of GI Number: 33149683 NR Desc: alcohol dehydrogenase
  misc_feature: Homolog of GI Number: 51587338 NR Desc: alcohol dehydrogenase
  misc_feature: Homolog of GI Number: 20639 NR Desc: alcohol dehydrogenase
  misc_feature: Homolog of GI Number: 452767 NR Desc: alcohol dehydrogenase
  misc_feature: Homolog of GI Number: 452769 NR Desc: alcohol dehydrogenase
  misc_feature: Homolog of GI Number: 50915842 NR Desc: alcohol dehydrogenase class III
  misc_feature: Useful for sterility
MSTAGQVIKCRAAVAWEAGKPLSIETIEVAPPQKGEVRLRILFNSLCRSDVYWWDAKDQTPLFPRILGHEASGIVESVGEGVTHLKPGDHALPIFTGECGECTYCKSEESNLCELLRINTDRGVMLSDGKTRFSKNGQPIYHFVGTSTFSEYTVLHEGCVAKINPNAPLDKVAIVSCGFCTGFGATVNVAKPKPNNTVAVFGLGAVGLAACEGARVSGASRIIGVDLLPNRFEQAKKFGVTDFVNPKDHNKPVQEVIAEMTNGGVDRAIECTGSIQASISAFECTHDGWGTAVLVGVPKKDVEFKTNPMKFMEGRTLKGTFYGHYRPRTDIPGVVEKYLNKELELDKFITHSVPFSKINTAFDLMLKGEGIRCLICMEE

SEQ ID NO: 6325 - DNA, 960 bp, Glycine max
  misc_feature: Ceres CLONE ID no. 1169111
  misc_feature: Ceres CDNA ID no. 40351682
  CDS (324)..(704): REFERENCED BY SEQ ID NO: 6326
gaccccgggaaaaagaaaagaaaagaaactcacagctattgaatttcacttcacttcacttgcatgccaaatgaaaacaacctcttcccagaatcttgtcggtatttaactccctcgatttcacaacaccaataacaatgagagtttcaacagagacagagccggagactaaaaagataaaacgcattcgcggcggcggggactcgagcaagcaccctttgtaccgcggcgtgcggatgcggaactgggggaagtgggtgtcggaaatccgcgagccgaggaagaaatcgcggatatggctaggcacattccccacgccggaaatggcggcgagagcgcacgacgtcgccgctctcagcatcaaaggccccgccgccattctcaacttccctcacttggccaactcgctcccccgcccggcttcgctggcgccgcgcgacgttcaagctgcggcggcgaaggcggcgcacatggacccttcctccctctcctccttggtctccgcaatggacttgtcctctgcctctgacgagttgagccaaatcatagagcttccttctttggaaagcaccgatgatggctctgttgacttaaagaaggagtttgtttttgttgattcccttgatgcttggatgtatcagccaccctttggttttgacaccgaacaagacactggtttcgagggtttgatgtggaattactaggttcgatccaagtttctattctatgtcttgtgtttgtataaatttatatcgatctcttttatgttttggtttgtgtgtgtctataagcagtaagcagccacttgtggtttttctttcgggggctgccagtgctactgatcactctcgtattcatcatcatgtctctgtgtccttttcttaattcctctgattttaattgtaaatggctagatgaataaagtaagaggagaaattttctgtaaaaaaaaaaaaaaaa

SEQ ID NO: 6326 - protein, 188 aa, Glycine max
  misc_feature: Ceres CLONE ID no. 1169111
  misc_feature: Ceres CDNA ID no. 40351682
  misc_feature: The plant flowers significantly late compared to wild-type.
  misc_feature: The plant produces a reduced number of seeds.
  misc_feature: Useful for biocontainment applications
  misc_feature: Useful for making plants with modulated flowering time
  misc_feature (27)..(90): Pfam Name: AP2 PFAM Desc: AP2 domain
MRVSTETEPETKKIKRIRGGGDSSKHPLYRGVRMRNWGKWVSEIREPRKKSRIWLGTFPTPEMAARAHDVAALSIKGPAAILNFPHLANSLPRPASLAPRDVQAAAAKAAHMDPSSLSSLVSAMDLSSASDELSQIIELPSLESTDDGSVDLKKEFVFVDSLDAWMYQPPFGFDTEQDTGFEGLMWNY

SEQ ID NO: 6327 - DNA, 1411 bp, Glycine max
  misc_feature: Ceres CLONE ID no. 1169121
  misc_feature: Ceres CDNA ID no. 25446525
  CDS (153)..(1223): REFERENCED BY SEQ ID NO: 6328
accaccatcattatgtcacccttggtaagacctattcttcgcttattctcattcacactaagcatctgtcttattattttcattctgtccctgttgttctttctttttttagtaaaaacaagcaaaccctacttactctgaaagtggcgaagatgagtttgggaaccgcggaggacgaatccggttccgaaatccacatcccagccgaaatcgactggcacatgctggacaaatccaagttcttcttcctcggcgccgccttattctccggcgtgtcgtgcgcactctaccccatggtcgtgttgaagacgcgtcagcaagtttcctcctcacgcttctcctgcctcaacatctcctgcgccattctccgccacgagggcctccgcggcttctacaagggcttcggaacctccctcatgggaaccatccccgcacgtgcgctctacatggcctccctcgagatcaccaaaagcaacgtcgccaccgccttcctccaattcggcttctccgagaccaccgccgtggctgtggccaacgccgccgcgggcgtcacctccgccatggctgcccagctcgtgtggaccccaattgatgtcgtgagtcagcggctcatggttcaggggagtggcgggagtaaaaccacagtgctcgcgaatctcaattcggaaaattacagaaatgggtttgatgcttttaggaaaattatgtgtgctgatggagcgataggcttttatagaggctttgggatttctatattgacttatgcgccttccaatgcggtttggtggacttcttattccatggttcatagactcatttggggtgcttttggttcttacatgggaaataacaatggtagaaagggaaatgaaaagaatgatagtaataagtatagcaggcctgattcgaaggcaatggtggcggttcaagggttgagtgctgttatggcaagtggggtatctgcgattgtgacaatgccgcttgatacgataaagacgaggttgcaggtgttggatcttgaagaggggaatgggagaaggaggcctttgacttttgttcagacggtgaggaatttggtgaaggaaggtgggttgcttgcttgttacagaggattgggtccgagatgggcttccatgtccatgtctgccacaactatgattactacttatgagtttttgaaaagaatgtctaccaagaatcaagaggatttgactccatcataggccagccactcaaatattgttaggaattggagattaagaattaagaattaggatcaatcacttgtttctttgcttggatttttctttgtcatttctagcactctagtctacctcatctgacaccaaatacaatatgatgttgagattgtatatacaactcttgtttttttctaaaaaaaaaaaaaaaa

SEQ ID NO: 6328 - protein, 356 aa, Glycine max
  misc_feature: Ceres CLONE ID no. 1169121
  misc_feature: Ceres CDNA ID no. 25446525
  misc_feature (256)..(350): Pfam Name: Mito_carr PFAM Desc: Mitochondrial carrier protein
  misc_feature: Homolog of GI Number: 31431909 NR Desc: putative Tricarboxylate transport protein
  misc_feature: Homolog of GI Number: 21594326 NR Desc: mitochondrial carrier
  misc_feature: Homolog of GI Number: 23308179 NR Desc: At5g26200/T19G15_50
  misc_feature: Homolog of GI Number: 51536141 NR Desc: mitochondrial substrate carrier
  misc_feature: Homolog of GI Number: 21326111 NR Desc: putative mitochondrial carrier protein
  misc_feature: Homolog of GI Number: 37718799 NR Desc: putative mitochondrial carrier protein
  misc_feature: Homolog of GI Number: 38194914 NR Desc: mitochondrial carrier protein
  misc_feature: Homolog of GI Number: 18496651 NR Desc: putative mitochondrial carrier protein
  misc_feature: Homolog of GI Number: 72064597 NR Desc:  similar to CG5805
  misc_feature: Homolog of GI Number: 58257725 NR Desc: KIAA0446 protein
MSLGTAEDESGSEIHIPAEIDWHMLDKSKFFFLGAALFSGVSCALYPMVVLKTRQQVSSSRFSCLNISCAILRHEGLRGFYKGFGTSLMGTIPARALYMASLEITKSNVATAFLQFGFSETTAVAVANAAAGVTSAMAAQLVWTPIDVVSQRLMVQGSGGSKTTVLANLNSENYRNGFDAFRKIMCADGAIGFYRGFGISILTYAPSNAVWWTSYSMVHRLIWGAFGSYMGNNNGRKGNEKNDSNKYSRPDSKAMVAVQGLSAVMASGVSAIVTMPLDTIKTRLQVLDLEEGNGRRRPLTFVQTVRNLVKEGGLLACYRGLGPRWASMSMSATTMITTYEFLKRMSTKNQEDLTPS

SEQ ID NO: 6329 - DNA, 1431 bp, Glycine max
  misc_feature: Ceres CLONE ID no. 1169172
  misc_feature: Ceres CDNA ID no. 40351683
  CDS (67)..(984): REFERENCED BY SEQ ID NO: 6330
attgagttgtggtcaacagagagaaagtaggagagaaaaaaaaaaagcctcaccgacttcggcgaaatggatctgccgccggcaccgatccggtggcgcgcaaccgcaatcccattctttgtggcggttctctttgtatccaccatctccccttcgcgcgcaatctactgcgacgaagatgattgctacgatctacttggggtttctcaaagtgccaatgcttccgaaattaaaaaagcttactacaagctctccttgaagtatcacccagataaaaaccctgatccggaatcgcgaaagctgtttgtaaaagtcgccaatgcttatgagattttgaaggatgaggccacgcgagaacaatatgattatgcaattgcacatccggaggaggtgttttataatactgcacgctactatcgggcttactatggtcacaagacggatccccgtgctgtgttggttggccttcttcttattctttcaggttttcaatatctaaatcaatcaacaaggtataatcaggctgtagctatggtcaagaagacacctgcatataaaaataaactaagggcattggaacttgaacgcagtggaggggttacaaacaagaagaagagtcagaagaatatggacaagaaaacagaggaagaccttagtaaagaactcgatctgcagataaccggagctgaaatggcctctgtatggaaacttcttggcgtccgctttgttctattaccatataccttaggcaagctgctgttgtggactgcctgttggttttggagatacaaagtgaaaaagtacccttattcttgggaagatgcttcttatctgacacaaagatccctcagtattcctctcgataggtggagaaatatagatgaagcaacaaaggaagatcttgtgctcagacgcttgtgggagaaatcgaatctggagagctatgtagcagagatgcggaaagaatcgaagcgcagaagatagttgcattagtcgcctctgctgcttttaaagtactaaattttgttgcaaattgattttcggggtggccgtgatagaagcagaatcattcgtgtcaaccacaaaatcgtagaatcatatacaaagtttatttagtttacacatgctattgttgctctctaacagcctgtaaacaatgaacaccaaagaatactgctttagatattgcttttattctttcaatgaatcgggtacctgagcctcaatcttgctacaatcgcatgtttggtagtaattttgagtgcctctctagttcaataattttaaggataaagatgtatggataccctaatgttatttgacaccttgagagagatagaagagaaatataggtatgataagtgatgacttgaatgcagatgtacttgaaatatatatccttcgacttttcgtgtaaaaaaaaaaaaaaaa

SEQ ID NO: 6330 - protein, 305 aa, Glycine max
  misc_feature: Ceres CLONE ID no. 1169172
  misc_feature: Ceres CDNA ID no. 40351683
  misc_feature (39)..(103): Pfam Name: DnaJ PFAM Desc: DnaJ domain
MDLPPAPIRWRATAIPFFVAVLFVSTISPSRAIYCDEDDCYDLLGVSQSANASEIKKAYYKLSLKYHPDKNPDPESRKLFVKVANAYEILKDEATREQYDYAIAHPEEVFYNTARYYRAYYGHKTDPRAVLVGLLLILSGFQYLNQSTRYNQAVAMVKKTPAYKNKLRALELERSGGVTNKKKSQKNMDKKTEEDLSKELDLQITGAEMASVWKLLGVRFVLLPYTLGKLLLWTACWFWRYKVKKYPYSWEDASYLTQRSLSIPLDRWRNIDEATKEDLVLRRLWEKSNLESYVAEMRKESKRRR

SEQ ID NO: 6331 - DNA, 633 bp, Glycine max
  misc_feature: Ceres CLONE ID no. 1169186
  misc_feature: Ceres CDNA ID no. 29191185
  CDS (76)..(387): REFERENCED BY SEQ ID NO: 6332
ctatcaagttaatttgcgtctatattcattttggcatcgaggttgaatctcatcggagagagaaaaaccataaccatgtctggaagaggaaagggaggcaagggtctcggaaagggaggagcgaaacgacaccgtaaggttctgagggataacattcagggcataacgaagcccgcaattcgccgtctcgcgagacgtggcggcgtgaagcgtatcagtggtctcatctacgaagaaacccgcggtgttctcaagatcttcctcgagaacgtcattcgcgacgctgtcacctacactgagcacgctcgccgcaagaccgtcactgccatggacgttgtttacgccctcaagaggcagggcaggaccctctacggtttcggcggttagagaattaccgatttctgcattgcgtcgtggattagggtttcttatagtgtcagtcaatttcgctgttgatattatgcaacggttctttagctgtagcttgagatttaacgattgttctttgagtcgtagttatgagaatttttagtatgtcaatttgattatatttatgccttcttgttactcagcatgcaacgctaaactgaaatttatttgcaatgttcttatgccttaaaaaaaaaaaaaaaa

SEQ ID NO: 6332 - protein, 103 aa, Glycine max; identical to SEQ ID NO: 8
  misc_feature: Ceres CLONE ID no. 1169186
  misc_feature: Ceres CDNA ID no. 29191185
  misc_feature (66)..(92): Pfam Name: TAF PFAM Desc: TATA box binding protein associated factor
  misc_feature: Homolog of GI Number: 76651053 NR Desc:  similar to germinal histone H4 gene
  misc_feature: Homolog of GI Number: 57098917 NR Desc:  similar to germinal histone H4 gene
  misc_feature: Homolog of GI Number: 57110415 NR Desc:  similar to germinal histone H4 gene
  misc_feature: Homolog of GI Number: 55667113 NR Desc:  similar to germinal histone H4 gene
  misc_feature: Homolog of GI Number: 61835903 NR Desc:  similar to germinal histone H4 gene
  misc_feature: Homolog of GI Number: 76631272 NR Desc:  similar to germinal histone H4 gene
  misc_feature: Homolog of GI Number: 27692960 NR Desc: Hist1h4h protein
  misc_feature: Homolog of GI Number: 37590121 NR Desc: Hist1h4h protein
  misc_feature: Homolog of GI Number: 50729214 NR Desc:  similar to germinal histone H4 gene
  misc_feature: Homolog of GI Number: 61871726 NR Desc:  similar to germinal histone H4 gene

SEQ ID NO: 6333 - DNA, 729 bp, Glycine max
  misc_feature: Ceres CLONE ID no. 1169344
  misc_feature: Ceres CDNA ID no. 36701074
  CDS (79)..(489): REFERENCED BY SEQ ID NO: 6334
acacaatacttccaccctcaccatttgagttcatatcattcgtcttcttcttccaacgtgaagcaatctctgttcgaaatggctcgtacgaagcaaaccgcaaggaagtccaccggaggaaaagctccgaggaagcaactcgccacgaaagcagcacgcaagtccgctccggcgaccggcggcgtgaagaagccacaccgtttcaggccgggtacggtggcgctgagggagatccgaaaataccagaagagcaccgagcttctcataaggaagcttcctttccagagactcgtaagggaaatcgctcaggacttcaagaccgatctccgcttccagagcagcgctgtctccgctctgcaggaagccgcggaggcctaccttgttgggctgttcgaggacaccaacctctgcgccattcacgccaagagagttaccattatgcccaaggacattcagcttgctcgtaggattaggggcgagagggcttagggtttgttcgtgtgatgtacaaagctgtagtactttcttagtgttattgttttgtaatcgattatgaaacttctattttcactgtgactggattggaaaatcatttgtagtatggaaagtgtcagtggtgaatcttgagaattacatcgtctttggtctttaatctggtaatataatatcccttctagtaagattaattgggattttgaaagcaattaacagataaaaaaaaaaaaaaaa

SEQ ID NO: 6334 - protein, 136 aa, Glycine max; identical to SEQ ID NO: 588
  misc_feature: Ceres CLONE ID no. 1169344
  misc_feature: Ceres CDNA ID no. 36701074
  misc_feature (58)..(134): Pfam Name: Histone PFAM Desc: Core histone H2A/H2B/H3/H4
  misc_feature: Homolog of GI Number: 74004201 NR Desc:  similar to histone 1
  misc_feature: Homolog of GI Number: 59799581 NR Desc: Histone H3
  misc_feature: Homolog of GI Number: 30061401 NR Desc: H3 histone
  misc_feature: Homolog of GI Number: 166384 NR Desc: histone H3
  misc_feature: Homolog of GI Number: 72093532 NR Desc:  similar to H3 histone
  misc_feature: Homolog of GI Number: 57098927 NR Desc:  similar to histone protein Hist2h3c1
  misc_feature: Homolog of GI Number: 76612873 NR Desc:  similar to H3 histone
  misc_feature: Homolog of GI Number: 76612880 NR Desc:  similar to H3 histone
  misc_feature: Homolog of GI Number: 76732189 NR Desc:  similar to H3 histone
  misc_feature: Homolog of GI Number: 1362108 NR Desc: histone H3 homolog

SEQ ID NO: 6335 - DNA, 828 bp, Glycine max
  misc_feature: Ceres CLONE ID no. 1169453
  misc_feature: Ceres CDNA ID no. 24726495
  CDS (3)..(668): REFERENCED BY SEQ ID NO: 6336
agttttctgttggcgcaggtgaggtagaacccttccacggtggtgactgcgcgatgggtgcctacaagtatgtttcagagctatggcgcaagaagcagtctgatgtcatgcgcttcttgcagcgggtgaggtgctgggagtataggcagcaaccttccattgttcgcttgacaaggtcgacccgccctgacaaggctcgtcgcttgggcttcaaggctaagcagggctatgtgatataccgtgttcgtgttaggaggggtggccgaaagaggccagttcccaaaggtattgtttatgggaagcccacaaaccagggtgttacccaactgaaatttcagcgtagcaagaggtcagttgctgaggagcgagctggacggaagctgggtggacttagggtcctcaattcttactgggtgaatgaggactctacttataaatactttgaggtgattctggtggatgtggctcatgctgctattagaaatgatcccagaatcaattggctcgccaatccagtgcacaagcacagagagctgcgtgggctcacctctgctgggaaaagcaacaggggtttacgtggcagaggacatctgtaccacaaagcacgtccatctcgcagggcaacctggaagagaaacaacaccctgtctctccgccgttaccgctaatttctgctgttatcatcttatttttgcttcattttctggaatactattttgaggacataggtatttggtgttttgacttcgaaattcgagttttgaacgctttaatcatatctttttctatataatttgagttttgttattgttaaaaaaaaaaaaaaaa

SEQ ID NO: 6336 - protein, 204 aa, Glycine max; identical to SEQ ID NO: 5172
  misc_feature: Ceres CLONE ID no. 1169453
  misc_feature: Ceres CDNA ID no. 24726495
  misc_feature (2)..(193): Pfam Name: Ribosomal_L15e PFAM Desc: Ribosomal L15
  misc_feature: Homolog of GI Number: 34896990 NR Desc: ribosomal protein L15
  misc_feature: Homolog of GI Number: 23505795 NR Desc: At4g16720/dl4385c
  misc_feature: Homolog of GI Number: 3608479 NR Desc: ribosomal protein L15
  misc_feature: Homolog of GI Number: 2982318 NR Desc: probable 60S ribosomal protein L15
  misc_feature: Homolog of GI Number: 7268491 NR Desc: ribosomal protein
  misc_feature: Homolog of GI Number: 14585879 NR Desc: ribosomal protein L15
  misc_feature: Homolog of GI Number: 2982249 NR Desc: probable 60S ribosomal protein L15
  misc_feature: Homolog of GI Number: 48596903 NR Desc: ribosomal protein
  misc_feature: Homolog of GI Number: 50878349 NR Desc: putative 60s ribosomal protein L15
  misc_feature: Homolog of GI Number: 45643041 NR Desc: ribosomal protein L15
  misc_feature: Useful for decreasing plant size
  misc_feature: Useful for making plants with increased biomass
  misc_feature: Useful for making shorter plants
  misc_feature: Useful for sterility
  misc_feature: Useful for sterility

SEQ ID NO: 6337 - DNA, 752 bp, Glycine max
  misc_feature: Ceres CLONE ID no. 1169537
  misc_feature: Ceres CDNA ID no. 40351684
  CDS (73)..(531): REFERENCED BY SEQ ID NO: 6338
gttttatcgcctccaaagacttaaacgcagaccaatctccttgtaaccgtatcctttgctgagatctaaaacatggcggatgtggaaccagaggttgcagcggcaggagtcccgaagaagaggacgttcaagaagtttgccttcaaaggagtcgatctcgatgctcttctcgatatgtctactgatgaccttgtcaagctcttcccttctcgtattcgcagaaggttctctagaggtttgaccaggaagccaatggctctcattaagaagctgcgtaaggctaaaagggaggcaccacaaggtgagaagccagagccagtgagaacccacctgaggaacatgatcattgtcccagagatgatcggaagcatcattggagtgtacaacgggaagacctttaaccaggtcgagatcaagcccgagatgattggtcactacctggctgagttctccatctcgtacaagccggttaagcacggtaggcctggtgttggtgctacccactcctccaggttcattcccctcaagtgaagaagagcttgttgttatacttgggaaatgcgttccatctttttacatggtctcttgcctttggtttctcaaagtttgtttgaccctttttgttgtttctttatgatgaaaacttcattagatactatctcagctattatgtgatcaagatcttaaaaatcaaattgttttgagtttatttttaatttcactaggatttattatcaaaaaaaaaaaaaaaa

SEQ ID NO: 6338 - protein, 152 aa, Glycine max
  misc_feature: Ceres CLONE ID no. 1169537
  misc_feature: Ceres CDNA ID no. 40351684
  misc_feature (54)..(135): Pfam Name: Ribosomal_S19 PFAM Desc: Ribosomal protein S19
MADVEPEVAAAGVPKKRTFKKFAFKGVDLDALLDMSTDDLVKLFPSRIRRRFSRGLTRKPMALIKKLRKAKREAPQGEKPEPVRTHLRNMIIVPEMIGSIIGVYNGKTFNQVEIKPEMIGHYLAEFSISYKPVKHGRPGVGATHSSRFIPLK

SEQ ID NO: 6339 - DNA, 1183 bp, Glycine max
  misc_feature: Ceres CLONE ID no. 1169589
  misc_feature: Ceres CDNA ID no. 29191401
  CDS (62)..(997): REFERENCED BY SEQ ID NO: 6340
aaaaacttcccttccttctcttctcacacaacaaacatatctcttcctcttctgtccctcaatggaaggatcaggatccggtgtggttacagtctacggcaacggcgccatcaccgagaccaagaagtcccccttctccgtcaaagtcggcctagcccagatgctccgcggcggcgtcatcatggacgtcgtcgacgccgagcaggcccgcatcgcggaggaggccggtgcctgcgcggtgatggccctggagcgtgtccccgccgacatccgggcccagggcggcgtggcccgcatgagcgatccgcagctcatcaaggatatcaagcgggccgtcacgatccccgtgatggccaaggcccgcatcggccacttcgtcgaagcccagatcctcgaagccatcggcatcgactacgtcgacgagagcgaggtcctcaccctcgccgacgacgccaaccacatcaacaaacacaacttccgcatccccttcgtctgtggctgccgcaacctcggcgaggccctccgccgcatccgcgagggcgccgccatgatccgcaccaagggcgaggccggcaccggcaacatcatcgaggcctttcgccacgtccgctccgtcatgagcgacattagggttctccgcaacatggacgacgacgaggtcttcaccttcgccaagaacatcgctgcgccttatgacctcgtcatgcagaccaagcagcttggccgcctccccgttgtccacttcgccgccggcggagtcgccacccccgccgacgccgcgctcatgatgcagctcggctgcgacggcgtcttcgtcggctccggcgttttcaagagcggcgatcccgcgaagcgcgccagggcgattgttcaggccgtgactcactacagcgaccctgagattttggcggaggttagctgcggattgggtgaagccatggttggtatcaatttgaccgatgacaaggttgagaggttcgccaatcgctctgaatgaaatgaataataattctcagatttgtttctctgtggcgcttcaatttggactattaagggttttagttgcttcttatatattataataaggttatgtttttagttttcggtgttttgaaccgtgttaattggattttagaaaaaccaaaaagaaaaaatagattggtagccaaaaaaaaaaaaaaaa

SEQ ID NO: 6340 - protein, 311 aa, Glycine max
  misc_feature: Ceres CLONE ID no. 1169589
  misc_feature: Ceres CDNA ID no. 29191401
  misc_feature (25)..(230): Pfam Name: SOR_SNZ PFAM Desc: SOR/SNZ family
  misc_feature: Homolog of GI Number: 20453411 NR Desc: AT5g01410/T10O8_120
  misc_feature: Homolog of GI Number: 2501578 NR Desc: Probable pyridoxin biosynthesis protein ER1
  misc_feature: Homolog of GI Number: 45477167 NR Desc: Probable pyridoxin biosynthesis protein PDX1
  misc_feature: Homolog of GI Number: 45477162 NR Desc: Pyridoxin biosynthesis protein PDX1
  misc_feature: Homolog of GI Number: 17104657 NR Desc: putative SOR1 from the fungus Cercospora nicotianae protein
  misc_feature: Homolog of GI Number: 50933621 NR Desc: putative ethylene
  misc_feature: Homolog of GI Number: 46399271 NR Desc: putative pyridoxine biosynthesis protein isoform B
  misc_feature: Homolog of GI Number: 31429734 NR Desc: putative pyridoxine/pyridoxal 5
  misc_feature: Homolog of GI Number: 72256519 NR Desc: pyridoxine biosynthesis protein
  misc_feature: Homolog of GI Number: 21617922 NR Desc: pyridoxine biosynthesis protein
  misc_feature: Useful for increasing chlorophyll and photosynthetic capacity
  misc_feature: Useful for making ornamental plants with modified leaves
  misc_feature: Useful for making plants with altered leaf shape eg curled leaves
  misc_feature: Useful for making plants with altered leaf shape eg curled leaves
  misc_feature: Useful for making plants with increased biomass and foliage
  misc_feature: Useful for making shorter plants
  misc_feature: Utility: Mannitol Useful for making plants with enhanced tolerance to drought
MEGSGSGVVTVYGNGAITETKKSPFSVKVGLAQMLRGGVIMDVVDAEQARIAEEAGACAVMALERVPADIRAQGGVARMSDPQLIKDIKRAVTIPVMAKARIGHFVEAQILEAIGIDYVDESEVLTLADDANHINKHNFRIPFVCGCRNLGEALRRIREGAAMIRTKGEAGTGNIIEAFRHVRSVMSDIRVLRNMDDDEVFTFAKNIAAPYDLVMQTKQLGRLPVVHFAAGGVATPADAALMMQLGCDGVFVGSGVFKSGDPAKRARAIVQAVTHYSDPEILAEVSCGLGEAMVGINLTDDKVERFANRSE

SEQ ID NO: 6341 - DNA, 636 bp, Glycine max
  misc_feature: Ceres CLONE ID no. 1169632
  misc_feature: Ceres CDNA ID no. 29191634
  CDS (81)..(512): REFERENCED BY SEQ ID NO: 6342
aaaaaccctagtcttcgcggcgtgacgacggagagagagagagagattcagctctgcgttaaaggcaaaaatcttcagccatggcaactggtaaaactgtgaaagacgtctctccacatgacttcgtgaaggcttacgcttctcatctcaagcgatctggcaagatcgagcttccctcatggacagacattgtgaagaccggtaagctgaaggagcttgccccatacgatccagattggtactacatcagagctgcatctatggcaaggaaagtgtacctaaggggaggtcttggggttggtgctttccgtagaatctatggtggaagcaagagaaacggcagtcgcccaccacatttctgcaaaagcagcggtggcatcgcccgtcacattctccagcagttggagactatgaacattgttgagattgacaccaaaggaggaagaaggatcacttccagtgggcaaagggatttggaccaagtcgctggacgtattgcagttgaagtttgaagttttgaatgttgtttttacatcttttgaaaccagtgtcctgtttttagtgttaaatcttttttgtttgtgtctttagacatttaaagtctcatcttctttcaattcaaaaaaaaaaaaaaaa

SEQ ID NO: 6342 - protein, 143 aa, Glycine max
  misc_feature: Ceres CLONE ID no. 1169632
  misc_feature: Ceres CDNA ID no. 29191634
  misc_feature (6)..(142): Pfam Name: Ribosomal_S19e PFAM Desc: Ribosomal protein S19e
  misc_feature: Homolog of GI Number: 6513924 NR Desc: putative 40S ribosomal protein S19
  misc_feature: Homolog of GI Number: 21554401 NR Desc: 40S ribosomal protein S19
  misc_feature: Homolog of GI Number: 34365671 NR Desc: At5g61170
  misc_feature: Homolog of GI Number: 82623403 NR Desc: 40S ribosomal protein S19
  misc_feature: Homolog of GI Number: 50916719 NR Desc: putative ribosomal protein S19
  misc_feature: Homolog of GI Number: 57164477 NR Desc: putative ribosomal protein S19
  misc_feature: Homolog of GI Number: 74231114 NR Desc: 40S ribosomal protein S19
  misc_feature: Homolog of GI Number: 74231106 NR Desc: 40S ribosomal protein S19
  misc_feature: Homolog of GI Number: 74231018 NR Desc: 40S ribosomal protein S19
  misc_feature: Homolog of GI Number: 57164480 NR Desc: putative ribosomal protein S19
MATGKTVKDVSPHDFVKAYASHLKRSGKIELPSWTDIVKTGKLKELAPYDPDWYYIRAASMARKVYLRGGLGVGAFRRIYGGSKRNGSRPPHFCKSSGGIARHILQQLETMNIVEIDTKGGRRITSSGQRDLDQVAGRIAVEV

SEQ ID NO: 6343 - DNA, 1161 bp, Glycine max
  misc_feature: Ceres CLONE ID no. 1169753
  misc_feature: Ceres CDNA ID no. 25445900
  CDS (146)..(979): REFERENCED BY SEQ ID NO: 6344
tcatttgatttcactccgttaggaccgtcaccgtttaaccctagaattttggcctttcttctcttttcttcattttttcccccgaaaagcatttcacaaagagaagacacagtggatcgtggtttcacttcatttcagaccaaacatggtgcagtggcatagacacgtttttccctttcttcgccacattcacaagcgactgttggaaccccaggccactcattcagctccaagccttgtaatttctcgcttagcctcttctctttcacaaggtcagttggggaggagaacatggacaacaacaactttgccctgtttttcaagacccgtttttctcactttccaacatcagggaatatcaagttctgctcagttgctggcaaattcatctgaggaaacacctgttttgtcacctttagccccagtttcattattgagtagttcaaaaggtgaagaccagaagcagaaagttgttactaagccagaaaaagttcaagcgatattaaaggcaataaaacagagtccaaagaaggtcaacttggttgctgctctggttcgtggtatgcttgttaaagatgcattgatgcagttggaattgacaataaaacgagcagcaaaaactgtatatcaggttattcattcagcccgagcaaatgcctctcacaatcatgggttagatccagaacgtctcattgttgcggaagcatttgtaggaaaggggttttataaaaagagactttggccccatgccaaaggaaaatcatcgcttagagtaagaccagaatgcaggctaacagttgtagtaagagagataactgctgaagaagaggcagagattgctaggctgagggtccacaacttcaagagactcaccaagcgtcagaaacgacttgtgcctcatcagctcattgagtccaatcctatttggggccgcaaaaacaaatctagtggtcaaaacttgagtgctacacctgcatgagctgagcttttgcttgtttccaagtttccatgcttatggcatttttcgtgtaatagaagtttcttcttggccatcacataatatggaaacagttgagaaatatgtctgtcccttgttgcaaatgatagaattttgtactggatcatgcttagtattattctcatttaaaaaaaaaaaaaaaa

SEQ ID NO: 6344 - protein, 277 aa, Glycine max
  misc_feature: Ceres CLONE ID no. 1169753
  misc_feature: Ceres CDNA ID no. 25445900
  misc_feature (118)..(222): Pfam Name: Ribosomal_L22 PFAM Desc: Ribosomal protein L22p/L17e
  misc_feature: Homolog of GI Number: 22330190 NR Desc: ribosomal protein L22 family  protein
  misc_feature: Homolog of GI Number: 54290412 NR Desc: 50S ribosomal protein L22
  misc_feature: Homolog of GI Number: 34912678 NR Desc: P0686E09.8
  misc_feature: Homolog of GI Number: 7269690 NR Desc: copper
  misc_feature: Homolog of GI Number: 15965114 NR Desc: PROBABLE 50S RIBOSOMAL PROTEIN L22
  misc_feature: Homolog of GI Number: 15889237 NR Desc: AGR_C_3548p
  misc_feature: Homolog of GI Number: 45684882 NR Desc: COG0091: Ribosomal protein L22
  misc_feature: Homolog of GI Number: 72076367 NR Desc:  similar to mitochondrial ribosomal protein L22 isoform a
  misc_feature: Homolog of GI Number: 50754991 NR Desc:  similar to mitochondrial ribosomal protein L22
MVQWHRHVFPFLRHIHKRLLEPQATHSAPSLVISRLASSLSQGQLGRRTWTTTTLPCFSRPVFLTFQHQGISSSAQLLANSSEETPVLSPLAPVSLLSSSKGEDQKQKVVTKPEKVQAILKAIKQSPKKVNLVAALVRGMLVKDALMQLELTIKRAAKTVYQVIHSARANASHNHGLDPERLIVAEAFVGKGFYKKRLWPHAKGKSSLRVRPECRLTVVVREITAEEEAEIARLRVHNFKRLTKRQKRLVPHQLIESNPIWGRKNKSSGQNLSATPA

SEQ ID NO: 6345 - DNA, 903 bp, Glycine max
  misc_feature: Ceres CLONE ID no. 1169794
  misc_feature: Ceres CDNA ID no. 40351685
  CDS (151)..(762): REFERENCED BY SEQ ID NO: 6346
tcttgtttgcttgctttcagacaacgcttatggattcaaccaagggctttgctctctctccctctccctaatcctagtttctctcatgacccaacattccagcgactgatttctcactctccagcaactaggtttgattcactttattgcatggagtcatcagcagaaaagtatgctgcatttaaacagaaagttagtaggacagtgtacttggacaacatgtcaccacaagtcactgaatctgtgataagaactgctcttgaccagtttgcaactgtgaaaaatgtcaagtttattcccaactacatcggtccaagcaatcagccacagtgtgcattagtagaattagattctgccaaaaaggccaaggaaattttatcaatgatagcgggttatcctttcatgatgtctgggcagccacggcctgtgagggctcggcctgctgtgatggaaatgtttgatgatcaaccaataaagcctaacagaaagatcaagatccgttggttggagcctagtgatcctgattttgagctggcaaaggaagtaaagaatcttactcgcaaacatgctgcagaagtagaattccttgacaaactgctactagaagacgaagagaagctagcaaagcagcaggaagagacacttaaggtgcattacaaaaagtttaagatgatagagggcattatggctgacaaaactgctcatcgtttggcacgaaagtataatctacatgttgcagatgattgggctcgtttggattaacaacttatgtaaatagctttttagttttccttgctaggatttaaggtttgttgcttctttctactcccactactactactaaagaagctcagatcatacatgttatatgatatgctctttgatccaaaaaaaaaaaaaaaa

SEQ ID NO: 6346 - protein, 203 aa, Glycine max
  misc_feature: Ceres CLONE ID no. 1169794
  misc_feature: Ceres CDNA ID no. 40351685
MESSAEKYAAFKQKVSRTVYLDNMSPQVTESVIRTALDQFATVKNVKFIPNYIGPSNQPQCALVELDSAKKAKEILSMIAGYPFMMSGQPRPVRARPAVMEMFDDQPIKPNRKIKIRWLEPSDPDFELAKEVKNLTRKHAAEVEFLDKLLLEDEEKLAKQQEETLKVHYKKFKMIEGIMADKTAHRLARKYNLHVADDWARLD

SEQ ID NO: 6347 - DNA, 736 bp, Glycine max
  misc_feature: Ceres CLONE ID no. 1169831
  misc_feature: Ceres CDNA ID no. 25446005
  CDS (67)..(501): REFERENCED BY SEQ ID NO: 6348
ctgttctgtgttgtcttgttggtaaagaaagagaagaaaagagtggaatcgaagacgaagacgaagatggaggacgcatcagcatcaaagttcatcccacaccaaatcggaggggtccaaaacgacgtgcttcgatttggtctccatggagtcaagagcgacatcgttggttcccaccctcttcaatcttcactccaatctacaaggagaatggatgaagcgatgaagaagcaatgcaaagttaacctgtacggaactgcttttcccctgaaggaggagcttgacaggcaaatcctgtctaggttccagcggcctcctggaccaattccatcttcaatgctgggtttggagactgttacaggaagtgttgatcactttggttttgaggattgtctaaatgacccccgtgagtcagagactttccggccattggacatgcatcatgggatggaagttcgccttggtctgtctaagggaccagtgtacccaagtattatataattaaatttgactgttattctagtgccagaaaacagtattttgtgatcgaagtttcttgctattcgttaaaatgaaagtgtccaaggagttggcatattttgtgatcaaagcttcttgttttcctaatgctctggatgctagaaatgttattgatccatataaacagagcatgtctttcaaattaaagcagaatttatgcatgaggcatttgagttgagcaaaaaaaaaaaaaaaa

SEQ ID NO: 6348 - protein, 144 aa, Glycine max
  misc_feature: Ceres CLONE ID no. 1169831
  misc_feature: Ceres CDNA ID no. 25446005
  misc_feature (6)..(135): Pfam Name: UMP1 PFAM Desc: Proteasome maturation factor UMP1
  misc_feature: Homolog of GI Number: 9828633 NR Desc: F1N21.7
  misc_feature: Homolog of GI Number: 51090706 NR Desc: proteasome maturation factor
  misc_feature: Homolog of GI Number: 50901266 NR Desc: putative proteasome maturation factor
  misc_feature: Homolog of GI Number: 50726392 NR Desc: proteasome maturation factor
  misc_feature: Homolog of GI Number: 51010931 NR Desc: zgc:92775
MEDASASKFIPHQIGGVQNDVLRFGLHGVKSDIVGSHPLQSSLQSTRRMDEAMKKQCKVNLYGTAFPLKEELDRQILSRFQRPPGPIPSSMLGLETVTGSVDHFGFEDCLNDPRESETFRPLDMHHGMEVRLGLSKGPVYPSII

SEQ ID NO: 6349 - DNA, 889 bp, Glycine max
  misc_feature: Ceres CLONE ID no. 1170000
  misc_feature: Ceres CDNA ID no. 40351686
  CDS (96)..(683): REFERENCED BY SEQ ID NO: 6350
actacaaatcctcttcgtctttttctgttttggttttttctttttgtatagataatagttactttttttttctttcttttctgcagcttaatggcatgagactgcaagcgtggcagaaattgggtgctatgcctcctgaagatgcaatgcagaagtacattgatattgtgaccgagatctatcctacttggcttgatggttcatctttgaggaataaaagcggcgacagtggtggacatggttcagaggctaagggaccaatgggccccgtattcagcacttttgtttatgaagaggaatatggcagtgactcacaaatggaagccattcatggatttgccagggaaggagatatggctaatctgctcaagtgtattgaaaatggtgtttcaatgaatttaaaggacagtgagggccggacaccattacactgggctgtggatcgtggccaccttaatgtcacagagttgcttgttggcaagaatgctgatgtgaatgccaaggacaatgatggacaaactcccttgcattacgctgttacatgtgagagggaagccatagctgagtatttagtgaagcataatgcagacatatattcaaaagataatgatgggagttcaccacgtgacatctgtgagtcaaactggccatgcatgcagcatgtgggggaagaagtaaattgattgattgattgtttgcttgttgcagcttctggccaatacaaccttttagccaaatcccaagaggatgttcgtgtctatataacttgattttttttgtccttactcatgatggtgtatacacccttttcagtctagtgtacgcctatgcaccgcttaggtaatggttagttaattaggttgtattctgtccaaaaaaaaaaaaaaaa

SEQ ID NO: 6350 - protein, 195 aa, Glycine max
  misc_feature: Ceres CLONE ID no. 1170000
  misc_feature: Ceres CDNA ID no. 40351686
  misc_feature (106)..(138): Pfam Name: Ank PFAM Desc: Ankyrin repeat
MRLQAWQKLGAMPPEDAMQKYIDIVTEIYPTWLDGSSLRNKSGDSGGHGSEAKGPMGPVFSTFVYEEEYGSDSQMEAIHGFAREGDMANLLKCIENGVSMNLKDSEGRTPLHWAVDRGHLNVTELLVGKNADVNAKDNDGQTPLHYAVTCEREAIAEYLVKHNADIYSKDNDGSSPRDICESNWPCMQHVGEEVN

SEQ ID NO: 6351 - DNA, 1252 bp, Glycine max
  misc_feature: Ceres CLONE ID no. 1170042
  misc_feature: Ceres CDNA ID no. 40351687
  CDS (154)..(960): REFERENCED BY SEQ ID NO: 6352
aaaatatttgtttctggtctgcaacctaaaattctatgtgagtgaattgggaggatgctgtgtctgggtcgattcggcggggtctctcactacccaatcaaatccggttggagtcggagggactacaccaataacaggcccagatggtgtttgatggccgcccaggaatccgactcttcttttgcaccctctcttgactccgacaaaaccgcctctgctggattctgcatcattgaaggcccagaaacggtacaggattttgccaagatggaacttcaagaaattcaggacaacattcgaagtcggaggaacaaaatcttcttacacatggaagaggttcgtaggcttaggatacagcaaagaattaaaagtgccgaacttggaattttaaacgaagagcaagagaatgaactccctaacttcccatcattcattcctttcttgcctcctttgacttcagcaaatctcaagcaatattatgcaacctgtttttctcttattgccgggataattctttttggtggtctccttgcacctagtttggagcttaagcttggactagggggcacatcttatgcagattttattgaaagtttacatcttcctatgcaactgagtcaggttgatcccatagtggcatcattctctggaggagcagttggagtaatctcggcattaatggtggttgagataaacaatgtaaaacagcaggagcagaaaagatgcaaatactgtcttggtactggatatcttgcatgtgctcgctgttcaagcacaggagcacttgttctgattgaaccagtatccacagtcaaaggtggagataagcctctttcaccaccaaaaactgagagatgttcaaattgctctggatctggcaaggttatgtgtccaacatgtctttgcactggaatggccatggcaagcgaacatgatccacgaattgatccatttgattagaggttcagtaattatagttatcccgagcagttataagaaaaatctggtattttttgttgaagtggtttttatttccgagcaggttcaataatttggaagtggtattcgtttccgtggcggagaaatggattttctgtaaatatgtataaacacttacatgaaaaagaaaattgttaaaaatatatagacagtttccctttatttttgaggattgaaagtggtgcagatataaagttcaccaagtggttggagaagggagaaggaattttgggttcgaaaaaaaaaaaaaaaa

SEQ ID NO: 6352 - protein, 230 aa, Glycine max
  misc_feature: Ceres CLONE ID no. 1170042
  misc_feature: Ceres CDNA ID no. 40351687
MELQEIQDNIRSRRNKIFLHMEEVRRLRIQQRIKSAELGILNEEQENELPNFPSFIPFLPPLTSANLKQYYATCFSLIAGIILFGGLLAPSLELKLGLGGTSYADFIESLHLPMQLSQVDPIVASFSGGAVGVISALMVVEINNVKQQEQKRCKYCLGTGYLACARCSSTGALVLIEPVSTVKGGDKPLSPPKTERCSNCSGSGKVMCPTCLCTGMAMASEHDPRIDPFD

SEQ ID NO: 6353 - DNA, 1128 bp, Glycine max
  misc_feature: Ceres CLONE ID no. 1170091
  misc_feature: Ceres CDNA ID no. 25892083
  CDS (99)..(929): REFERENCED BY SEQ ID NO: 6354
gaaattagggtttcaactattacataaggagtttccaccgtttagctcacactgttcttcttcttcgtcttccatttccaattctctgtgtagaagccatgtcaaagggtcctggtctctactctgacattggcaagaaagcccgagatctcctcttcaaggactaccacagtgaccagaagttcaccatcactacctactcacccactggagttgctataacatcctcagggaccaagaaaggtgatctttttgtggctgatgttaacacccagttgaagaacaagaacatcaccactgatatcaaattagacactaattccaatcttctcacaactatcactgtcaatgagcctgctcctggtctcaagactatttttagcttcagagttcctgatcaaaggtctggaaaggtggaagttcagtacttgcatgactatgctggaataagcaccagtgttgggttaacagcaaacccaattgtcaacttctctggcgttgtaggaactaatgtacttgcccttggtactgatgtttcttttgacaccaaaattggggagttaactaaattcaatgctggactgaacttcaccaaagacgatttggttgcctcattgactgtgaatgacaaaggggatgccttgaatgcttcatactaccatgcagtcaatcgcttgaccaacacggctgttggtgctgaggtaactcacagattctcaaccaatgagaacaccctcacacttggcacccagcatgcattggatccattgaccaccatgaaggctcgtgtcaacaactttggcaaggcaaacgctctcatccagcacgagtggcgccccaaatccttcttcaccatttctggggaggttgacactaaggccattgagaagagtgcaaaggttggattgggtttggccctcaaaccctaaagaattttgagctattctgacaagagcattgaggtagtaggcattaggaaagcacatagttgtctgttagactgaattgtttgttcaaggttgattgtcttggacggaagtgttcatggtattttgatgcattgagcaattcaaggttgtattgtataaataagtgatatagactatttctataaaaaaaaaaaaaaaa

SEQ ID NO: 6354 - protein, 276 aa, Glycine max
  misc_feature: Ceres CLONE ID no. 1170091
  misc_feature: Ceres CDNA ID no. 25892083
  misc_feature (4)..(269): Pfam Name: Porin_3 PFAM Desc: Eukaryotic porin
  misc_feature: Homolog of GI Number: 36957170 NR Desc: VDAC1.1
  misc_feature: Homolog of GI Number: 36957183 NR Desc: VDAC1.2
  misc_feature: Homolog of GI Number: 67848430 NR Desc: mitochrondrial voltage
  misc_feature: Homolog of GI Number: 1724100 NR Desc: porin
  misc_feature: Homolog of GI Number: 396819 NR Desc: Porin
  misc_feature: Homolog of GI Number: 516166 NR Desc: 34 kDA porin
  misc_feature: Homolog of GI Number: 83283993 NR Desc: 34 kDa outer mitochondrial membrane protein porin
  misc_feature: Homolog of GI Number: 515360 NR Desc: 36kDA porin II
  misc_feature: Homolog of GI Number: 5031279 NR Desc: porin
  misc_feature: Homolog of GI Number: 7442952 NR Desc: voltage
  misc_feature: Useful for making plants with altered leaf shape eg curled leaves
  misc_feature: Useful for making plants with increased biomass
  misc_feature: Useful for making plants with increased biomass and foliage
  misc_feature: Useful for making plants with increased biomass and foliage
MSKGPGLYSDIGKKARDLLFKDYHSDQKFTITTYSPTGVAITSSGTKKGDLFVADVNTQLKNKNITTDIKLDTNSNLLTTITVNEPAPGLKTIFSFRVPDQRSGKVEVQYLHDYAGISTSVGLTANPIVNFSGVVGTNVLALGTDVSFDTKIGELTKFNAGLNFTKDDLVASLTVNDKGDALNASYYHAVNRLTNTAVGAEVTHRFSTNENTLTLGTQHALDPLTTMKARVNNFGKANALIQHEWRPKSFFTISGEVDTKAIEKSAKVGLGLALKP

SEQ ID NO: 6355 - DNA, 1495 bp, Glycine max
  misc_feature: Ceres CLONE ID no. 1170122
  misc_feature: Ceres CDNA ID no. 25445924
  CDS (348)..(1001): REFERENCED BY SEQ ID NO: 6356
attttcatggctgagaggttcactcgttgttgcacttgagcccatccccatcccatattccatacagaaaaaaatcttccattttgtttcttttttcttatttcctccgaaaaagaacaactttttttttaaagaagaagaagaagaaaaacaaataaaacatgtcccactttgatccgaaactcagccgttcctccaccctccggcgacggttccaccaccgcgtttccctgctccagcggtgcctcctccgcgtcctccaccgtatcctcctctgctccggaagcaagcccaccaatgccacgtacagcatgctgccgccggcattgccctctccgccgccgccgatgggatccgacggcgagcttggtcgtgaagagatggaccttacttcgtcggcggtgtttcatacacatgacttggactctgatttggtttccttgaagatcagcttgttgggagattgccaaattggaaaaaccagctttctggagaaatatgttggggatgaaaaagatcagcagcaagggaaccagagggaagggttaaatcagatggacaaaactttggttgttgaaggggcacgtatatcgtattgtatctgggaagtacaaggtgatggaaaatcagaagaccaactcccaatggcttgtatggactccgtggcaattttgattatgtttgatctaacaagtcgatgcacattaaacagtgtcgtgggatggtacaaagaagccaggaaatggaatcagacggcaatcccagtgttgattggaaccaagtttgatgatttcattcagctccctattgatttgcaatggaccatagccaatgaggcaagaaaatatgcaaaggccctcaatgccaccttgttcttttcaagtgcaacctacaacatcaatgtgaacaagatcttcaagttcgtcactgctaaactctttgacctaccatggacagtggagaggaatctaactgttggggaacccatcattgacttctaaaactgtaaattacagagttttgaagttaagtgatatatcaaagtcaaccggctccagtagggggtgtcatgagtcaaaatctcactcactcttgggacaatagagttgttaggtttagacacatgtcaattcctatggaagttacaaggttcttcaatcgtcaccaccaacaataaggttttacaagggagaggaataaagggcaagggagaaataaaagaaattgaaacaaaggagaggactataatggttttgtagcataacaagagaagggaactaatgcattattgagtacaatttagtcaatggtgctcttgtcttgatactgaggaacgtgacctgtgagttactgtcaaaggcacatagaaaatgagattaggatgttccaaatctccttttgtttcatttttatttctcatccagttttgaataagttctggtaatccaaagcttcttctgaataaatagatcatttcataaaaaaaaaaaaaaaa

SEQ ID NO: 6356 - protein, 279 aa, Glycine max
  misc_feature: Ceres CLONE ID no. 1170122
  misc_feature: Ceres CDNA ID no. 25445924
  misc_feature (166)..(209): Pfam Name: Ras PFAM Desc: Ras family
  misc_feature: Homolog of GI Number: 50937849 NR Desc: putative Septum
  misc_feature: Homolog of GI Number: 9758264 NR Desc: SGP1 monomeric G
  misc_feature: Homolog of GI Number: 2408103 NR Desc: sid3
  misc_feature: Homolog of GI Number: 19114197 NR Desc: sid3 protein
  misc_feature: Homolog of GI Number: 66848554 NR Desc: GTP binding protein
  misc_feature: Homolog of GI Number: 62646464 NR Desc:  similar to RAB22A
  misc_feature: Homolog of GI Number: 23481886 NR Desc: Rab6
  misc_feature: Homolog of GI Number: 66772429 NR Desc: IP08719p
  misc_feature: Homolog of GI Number: 66772349 NR Desc: IP08619p
  misc_feature: Homolog of GI Number: 24668006 NR Desc: CG7605
MSHFDPKLSRSSTLRRRFHHRVSLLQRCLLRVLHRILLCSGSKPTNATYSMLPPALPSPPPPMGSDGELGREEMDLTSSAVFHTHDLDSDLVSLKISLLGDCQIGKTSFLEKYVGDEKDQQQGNQREGLNQMDKTLVVEGARISYCIWEVQGDGKSEDQLPMACMDSVAILIMFDLTSRCTLNSVVGWYKEARKWNQTAIPVLIGTKFDDFIQLPIDLQWTIANEARKYAKALNATLFFSSATYNINVNKIFKFVTAKLFDLPWTVERNLTVGEPIIDF

SEQ ID NO: 6357 - DNA, 1096 bp, Glycine max
  misc_feature: Ceres CLONE ID no. 1170126
  misc_feature: Ceres CDNA ID no. 29191837
  CDS (184)..(963): REFERENCED BY SEQ ID NO: 6358
agttccagtttccagtttcccaccgtcacttttccttaacggcgaagctatcgccgaagggcacaaccgtcattcccactccaaaccgtttcttctatcctccactctccccatcccaataacaaagagaggaatcgaagtctgttccgttctgatcagaaagggaataacggtaacggagatatggggcttctgtctaacagagtaactagagagagcctgaaaccaggggatcacatctactcttggaggactgcttacatatacgctcatcacggcatttatgtcggcgatgacaaagtcattcacttcactagacatgggcaagaagtaggaaccggtactgcactagatcttctcctcatcagttcaggaccagccaagcctcgagaaagttgcccaacttgtacagcaccccaagaggaacacggggttatctcctcatgcatgaactgcttcctagctggtggcgttctgtatcggttcgagtatgccgttaccccagccctcttccttgcgaaagcccgcggtggaacgtgtactcttgctgtctctgatgacgatgatattgtcgtccatcgggcaaaatatctgctcgaaaatggctttgggtgctacaatgttttcaagaaaaactgtgaagactttgctatctattgcaaaaccgggctcctagaaattggacaaagtggccaagcagtttccatcatagggggacctcttgctgctgctctatcctcgcccctccgtatggttactactaacgtctacggaatggcagcgacggctgttggagtctactgtgctagtaggtatatggcagacattggaatgaggcctaatgcggtgaaggtaccggttgaagagttaacctcaaggttggccactggcttgctgcaagtggttgaaccccaaattccaaccaatattgctcgtcaatctcctcagcttgttactcaatgaataagaattgtctttgttcaaacatatgtgagtcccatgctctttttttttttttttaatctgggtgtgtaagagatataaaatctatatgaatggtacaatggatttgcataatttaaaaaaaaaaaaaaaa

SEQ ID NO: 6358 - protein, 259 aa, Glycine max
  misc_feature: Ceres CLONE ID no. 1170126
  misc_feature: Ceres CDNA ID no. 29191837
  misc_feature (128)..(172): Pfam Name: NC PFAM Desc: NC domain
  misc_feature: Homolog of GI Number: 15809734 NR Desc: AT5g06370/MHF15_11
  misc_feature: Homolog of GI Number: 18378812 NR Desc: NC domain
MGLLSNRVTRESLKPGDHIYSWRTAYIYAHHGIYVGDDKVIHFTRHGQEVGTGTALDLLLISSGPAKPRESCPTCTAPQEEHGVISSCMNCFLAGGVLYRFEYAVTPALFLAKARGGTCTLAVSDDDDIVVHRAKYLLENGFGCYNVFKKNCEDFAIYCKTGLLEIGQSGQAVSIIGGPLAAALSSPLRMVTTNVYGMAATAVGVYCASRYMADIGMRPNAVKVPVEELTSRLATGLLQVVEPQIPTNIARQSPQLVTQ

SEQ ID NO: 6359 - DNA, 1306 bp, Glycine max
  misc_feature: Ceres CLONE ID no. 1170263
  misc_feature: Ceres CDNA ID no. 40351688
  CDS (98)..(1045): REFERENCED BY SEQ ID NO: 6360
attttctgaaggtgtggttgggtgataatgcggatcactactacgctctctccggatttttgctcagcataatgctaacggtagccaagttttgcggatggagctggatatccagaggttcctgagtaatgcagattatcagcattttgagtttcaacatttcccttcttcctatctcagactggccgcacatcgtgttgctcaacactatggtatgcaaacaatggttcaagataatggcttagatggccagggaaccagaattatggtaagaaagatggcggaaagcaggtatcccatggttcgcttatctgaaatacctgctaaacagttggaaaatgataaacctgagaagataaaaattgccataaggcctaggcctaacaaaatcagtttaaatgaagccaatgaagctggaaggaaaagcaatcctcctagaagtgtggaagagagaaaggtggaatatgatcgggcacgagcacgcatttttagtagctccagaagttgtgattcagatgatactctgtcccagacttcaactgatgagaaaaattctcttataaacaaggatgagaatgaaactagcaagacccctgtggtttattcagaacaatgctctattggtagggatattaattctactcgagttgccatcttgagagatagggaaaaggatcgcagtgatccagattatgatcgtaactatgaaaggtatgctaggagtattccaacttcttctgttaacttgatgccttttaatttgcaacaagttcgacatccatttgtgcagtatgataatgcttttaatcagttgagtcagatgtcacaaaatcaagcttcacttggctatggacctcaaccaagccctatgatgaatccttttggtgtcacagggttgaatcaggtgcctagggatgctgcttatgtacagtggccaagtgctgcagtaatgtatgcacattcatatgaccaatttagacaagctgttttccaggctccatttggtcaacgcccattgagtttcgattattcgcagaattactagatgacgtttgggaagcagttttccatttggctgcataagttattttagctattaaggatttcagagttagatataatttttctgtactgttatagatccttgtttcctattctggtttttaagttttgatggtggtagcaagtatttggcgtttttggtatttcctggcgacatttttatacaggactgtagtgaaagtacttggatttgaagtatatgaagagttatatgtgattaccttgtctaaaaaaaaaaaaaaaa

SEQ ID NO: 6360 - protein, 315 aa, Glycine max
  misc_feature: Ceres CLONE ID no. 1170263
  misc_feature: Ceres CDNA ID no. 40351688
MELDIQRFLSNADYQHFEFQHFPSSYLRLAAHRVAQHYGMQTMVQDNGLDGQGTRIMVRKMAESRYPMVRLSEIPAKQLENDKPEKIKIAIRPRPNKISLNEANEAGRKSNPPRSVEERKVEYDRARARIFSSSRSCDSDDTLSQTSTDEKNSLINKDENETSKTPVVYSEQCSIGRDINSTRVAILRDREKDRSDPDYDRNYERYARSIPTSSVNLMPFNLQQVRHPFVQYDNAFNQLSQMSQNQASLGYGPQPSPMMNPFGVTGLNQVPRDAAYVQWPSAAVMYAHSYDQFRQAVFQAPFGQRPLSFDYSQNY

SEQ ID NO: 6361 - DNA, 516 bp, Glycine max
  misc_feature: Ceres CLONE ID no. 1170297
  misc_feature: Ceres CDNA ID no. 36703446
  CDS (51)..(362): REFERENCED BY SEQ ID NO: 6362
aaaatcacaatccctaattccccaaaattttctctgaagaagaagcaacaatgtctggtcgcggaaagggaggcaagggtttgggaaagggtggagcgaagaggcatcgcaaggtgctccgcgacaacatccagggaatcacgaaacccgcgattcggaggctagccagaagaggcggcgtgaaaagaatcagcggcttgatctacgaggaaaccaggggtgtgctcaagatcttcctcgagaacgtcattcgcgacgccgtcacctacaccgagcacgctaggagaaagaccgtcacggccatggacgtcgtttacgcgctcaagaggcagggaagaaccctctacggtttcggaggctgagggcttgggctttttctgggcctggatttgttcttcgctgggctttaaaatgttgttgggaatttgtgttttgtttaatggttatgtatattatcttctgctcggtaatgcaagacttactcaagtttcttctattaaaaaaaaaaaaaaaaaa

SEQ ID NO: 6362 - protein, 103 aa, Glycine max; identical to SEQ ID NO: 8
  misc_feature: Ceres CLONE ID no. 1170297
  misc_feature: Ceres CDNA ID no. 36703446
  misc_feature (66)..(92): Pfam Name: TAF PFAM Desc: TATA box binding protein associated factor
  misc_feature: Homolog of GI Number: 62663604 NR Desc:  similar to Histone H2B 291B
  misc_feature: Homolog of GI Number: 74004215 NR Desc:  similar to germinal histone H4 gene
  misc_feature: Homolog of GI Number: 76651053 NR Desc:  similar to germinal histone H4 gene
  misc_feature: Homolog of GI Number: 74004256 NR Desc:  similar to germinal histone H4 gene
  misc_feature: Homolog of GI Number: 27692960 NR Desc: Hist1h4h protein
  misc_feature: Homolog of GI Number: 37590121 NR Desc: Hist1h4h protein
  misc_feature: Homolog of GI Number: 74004178 NR Desc:  similar to germinal histone H4 gene
  misc_feature: Homolog of GI Number: 68441417 NR Desc:  similar to germinal histone H4 gene
  misc_feature: Homolog of GI Number: 61835903 NR Desc:  similar to germinal histone H4 gene
  misc_feature: Homolog of GI Number: 61871726 NR Desc:  similar to germinal histone H4 gene

SEQ ID NO: 6363 - DNA, 747 bp, Glycine max
  misc_feature: Ceres CLONE ID no. 1170325
  misc_feature: Ceres CDNA ID no. 29191402
  CDS (67)..(510): REFERENCED BY SEQ ID NO: 6364
tatcacactaatcactcactcttcactcaaaactcttctctttcattttcataattcccacacattatggctgagcttcactaccaaccacaacaccaataccccctccgctaccctaacgatccacaccaacaaacccgttcctccacccaccaggtcgtcaaggccgccaccgccgtcacagcgggcggctccctcttgatcctcgcctcgttgatcctcgccgccaccgtcattgccctcaccatcgtcaccccgctgttcgtcattttcagtccggttctcgtccccgccgtaatcaccgttgcgctcctgagcctggggttcctcgcctcgagtgggttcggtgtggcggcgatcacggtgctggcgtggatctacaggtacgtcaccggcaagcaaccacctggcgcggatcagttagacagcgcgcgtcacaagatcatggacaaggcgcgtgagatcaaggactacggacagcaacaaatcagcggggtccaggcttcttaattctgcactcgcacgcacatgatcgtatccatctcgtggaatatttctctctttgtctagttagtttatatttaccatttatgaatgaatgaatgcatgattgagcgttaaagttgaatttgaatctctcttttctttgtattttcgtttattgtgggtgttcgctcatcatcacttgttgtaatgtcttaattttgtgtgcatgctgcgactattcaaggaaaaaaaaaaaaaaaa

SEQ ID NO: 6364 - protein, 147 aa, Glycine max
  misc_feature: Ceres CLONE ID no. 1170325
  misc_feature: Ceres CDNA ID no. 29191402
  misc_feature (27)..(137): Pfam Name: Oleosin PFAM Desc: Oleosin
  misc_feature: Homolog of GI Number: 71040657 NR Desc: oleosin 2
  misc_feature: Homolog of GI Number: 71040655 NR Desc: oleosin 1
  misc_feature: Homolog of GI Number: 460803 NR Desc: oleosin
  misc_feature: Homolog of GI Number: 2119749 NR Desc: oleosin
  misc_feature: Homolog of GI Number: 29170509 NR Desc: oleosin
  misc_feature: Homolog of GI Number: 683553 NR Desc: oleosin
  misc_feature: Homolog of GI Number: 5381321 NR Desc: 15 kDa oleosin
  misc_feature: Homolog of GI Number: 61658200 NR Desc: OLE
  misc_feature: Homolog of GI Number: 33589784 NR Desc: At4g25140
  misc_feature: Homolog of GI Number: 228416 NR Desc: oleosin
MAELHYQPQHQYPLRYPNDPHQQTRSSTHQVVKAATAVTAGGSLLILASLILAATVIALTIVTPLFVIFSPVLVPAVITVALLSLGFLASSGFGVAAITVLAWIYRYVTGKQPPGADQLDSARHKIMDKAREIKDYGQQQISGVQAS

SEQ ID NO: 6365 - DNA, 1298 bp, Glycine max
  misc_feature: Ceres CLONE ID no. 1170336
  misc_feature: Ceres CDNA ID no. 24726560
  CDS (519)..(1067): REFERENCED BY SEQ ID NO: 6366
gaaattcttttaacattgaattacctagctgagaatccagagaccacttgggtaactgaaatggaataaaaagggagtcgagtttcattagcgatagcatgagccagtctagttagccacatggggatggtagatcggcaagagcaacatattcagttcctccttaacattcttcatcccacccaaatccctaaaaattgtcacatccttccccttaacctcaacaccaccacagactgaacccttccgaagctgaaccagaagggcctcctccactcgacgccgccggagcaccggccttctcccgttcctactgaacccagcaatgagacccagctgtgcctgagcctgtcccacaaaaacaattaccaaaaaactaggctagaaaaaaaaaaaagataacttctcaatctgtttttctaaactgtttttattttaaaaaatatattttctcttgagaaacaaattttattgaatacacttatcttaaaattgattttttcctctttgttctcaagatgtcctcacccgaaacccttacattcatggagctcgccatacaacaggcaaagttagctttggatgttcttgaagtgcctgttggatgtgtaattgttgaggatggcaaggttatagcctcaggcaggaatcgaactacccagacacgaaatgctacaaggcatgcagaaatggaagctgtagatgtgcttctcgggcagtggcagaaacatggactttcaatgtctgaagtttctgaaaaattctcaaactgcagcctttatgttacctgtgaaccatgcataatgtgtgcatctgctttatcaattttaggtataaaggaagtattttatggctgttcaaatgataaatttggaggctgtggatcgatactgtcattgcatttaagtaacaccacaccgctcaataatgaagttccacccggaaagtgtttcaaatgtactggaggtataatggcatcagaagctgttcttctctttcgaacattctatgagcaaggaaatcccaatgctccaaagccacacaggcctctagcacgtcaggcatgaagtttaatttgtatataaccagttactgatatggttatcagtcatggcctgaggatctgtgctaccgtagcattttgggcaggttgaagctgttattgaatgccatacagggctttttaattcgaaaaatcaacttcatgtattgattattaatgtatgatttgaaagatgaatcaggggttgccgtttgaaatgaatcttactggattaagttcaaaaaaaaaaaaaaaa

SEQ ID NO: 6366 - protein, 182 aa, Glycine max
  misc_feature: Ceres CLONE ID no. 1170336
  misc_feature: Ceres CDNA ID no. 24726560
  misc_feature (5)..(113): Pfam Name: dCMP_cyt_deam PFAM Desc: Cytidine and deoxycytidylate deaminase zinc
  misc_feature: Homolog of GI Number: 50198832 NR Desc: At1g48175
  misc_feature: Homolog of GI Number: 8778532 NR Desc: F21D18.9
  misc_feature: Homolog of GI Number: 59858211 NR Desc: deaminase domain containing 1
  misc_feature: Homolog of GI Number: 31652308 NR Desc: dJ20N2.1.1
  misc_feature: Homolog of GI Number: 50742655 NR Desc:  similar to dJ20N2.1.1
  misc_feature: Homolog of GI Number: 23273707 NR Desc: DEADC1 protein
  misc_feature: Homolog of GI Number: 31206173 NR Desc: ENSANGP00000018657
  misc_feature: Homolog of GI Number: 23619417 NR Desc: cytidine and deoxycytidylate deaminase family
MSSPETLTFMELAIQQAKLALDVLEVPVGCVIVEDGKVIASGRNRTTQTRNATRHAEMEAVDVLLGQWQKHGLSMSEVSEKFSNCSLYVTCEPCIMCASALSILGIKEVFYGCSNDKFGGCGSILSLHLSNTTPLNNEVPPGKCFKCTGGIMASEAVLLFRTFYEQGNPNAPKPHRPLARQA

SEQ ID NO: 6367 - DNA, 894 bp, Glycine max
  misc_feature: Ceres CLONE ID no. 1170406
  misc_feature: Ceres CDNA ID no. 40351689
  CDS (264)..(698): REFERENCED BY SEQ ID NO: 6368
actttgtctacttaattaataaaggtttcaactttgaggataaacctcaccggttgtcacagggtttatcgtttaacggttgaaacgaagcgaaacttccaacttcatcttcaaccctgcgcttcttttgaactggtaaaaacttcgatcattttttgctctttagtcggtgttcatttcaactcagaagtcagaacatcggagctcatcaaatttgtgctagtttgcaagggaagttgattgattgtaaactgttaacaggcatggcaagctctttgacaacattagccattacctattctcctgtcaacaatggttccaggggtttcagaaagtctgttaatgcttctaaaggaaggtgttgcataaaagcaatgaggatagagaaatccttggaggaattgtacaatgtgaaggtggaaagaaaagttcctcctgagagactagccgagcttggagtttcaaaatggtcagtgtggaagactgggaaaagcaggttaccttgggactggcaggtagaccaactggtgtacgtagaagaaggggaagtgagagttgtgcctgaaggaagcaagcgtttcatgcaatttgtggccggagacttggtccggtacccaaagtggtttgaagctgacctatggttcaatggtccatatcaagaacgttatagtttcagagcatatggtgatgatcattgatgagaagatgatgcttggtaaccacataaaagtcacatgcacatcttatttggatgttttatgtaatggatgtttttcaaaagttatagttttccagttctaaatgtattaccaatatttttgaatgtttgtgatactttgccatcatttaaaagaaatagtcctaaatgcttctgttgtaaaaaaaaaaaaaaaa

SEQ ID NO: 6368 - protein, 144 aa, Glycine max
  misc_feature: Ceres CLONE ID no. 1170406
  misc_feature: Ceres CDNA ID no. 40351689
MASSLTTLAITYSPVNNGSRGFRKSVNASKGRCCIKAMRIEKSLEELYNVKVERKVPPERLAELGVSKWSVWKTGKSRLPWDWQVDQLVYVEEGEVRVVPEGSKRFMQFVAGDLVRYPKWFEADLWFNGPYQERYSFRAYGDDH

SEQ ID NO: 6369 - DNA, 1420 bp, Glycine max
  misc_feature: Ceres CLONE ID no. 1170699
  misc_feature: Ceres CDNA ID no. 40041397
  CDS (243)..(1232): REFERENCED BY SEQ ID NO: 6370
acacactgcgaccccactctccctggcaaccctagctcccactctcttgcccgcgaccctagctctcccactctcgctcgacgctggttccgcttgcaacccttgctcgcggtggttcagagcaatctctctcgcacgcacggtggtcataattgtttagtttgttcccggtggggcaattcacacgctacccatgaatcccattttgatttgcttgttggaggcggagaattgagaagaaaatgagagcagtgtccctttggcttcggcgcaaacaccaattgccgttggcattggcatttcgcagattctcgacatctaattcgaaggtgaaaatctttgatcgcgagttgaagcgcacacaacgtgaccgagccgcatggttgactccctcacacgaccctcttcttcacaccgtcgctcaaaatctcttggaccgcttgcaggactgtaagaagacttttccaactgcgctatgcttaggaggctcattacaacctatcacgcgctctctttctgctcctcctggtggcgtggaaaagcttattgtcatggatgcctcctatgatatgcttcaagcctgtaaaaatgctcaccacaatgccaccgttgagacccactttcttgttgctgacgaagagtttcttcctatcaaagaaagctctgtggatttggttgttagttgcttgggactacactggactaatgatctgcctggagcaatgatacagtctagattggcattgaagcctgatggcttatttttagcagctattcttggtggagaaacattaaaggagctcagaatagcttgtacgttggcacaaatggagcgtgaaggagggatcagtccccgagtatcacctttggcacaggttcgagatgctgggaatcttttgactagggcaggtttcacccttccaggggttgatgttgatgagtatgtagttaaatatgaaagtgctctggagcttatagaacatctccgtgcaatgggtgaaacaaatgctctttatcaaatgaacaatatcctaaagagggacacagcgttagcaactgcagctatttatgattcaatgttttctgcagaagacggcactgtacctgcaacattccaggttatatacatgacggggtggagagaacatccttctcagcagaaagcaaaaagaaggggatcagccactatatctttcaacgatattcagaagcaatttggaagccaaaattgattgtccttccccttatttttcactctgcatattttagtttaattaatatacttggcgcattgtatgtgtgggtatactcttaaatggttgacttcatgtaaaatatgagtttgacattatgaaatattattttcttttgatttaattactatatagtttagatattaagaaataaaaaaaaaaaaaaa

SEQ ID NO: 6370 - protein, 329 aa, Glycine max
  misc_feature: Ceres CLONE ID no. 1170699
  misc_feature: Ceres CDNA ID no. 40041397
  misc_feature: Homolog of GI Number: 77553306 NR Desc: 2310003L22Rik protein
  misc_feature: Homolog of GI Number: 62858439 NR Desc: LOC549152
  misc_feature: Homolog of GI Number: 82945545 NR Desc: SAM
  misc_feature: Homolog of GI Number: 40018642 NR Desc: chromosome 20 open reading frame 7 isoform 1
  misc_feature: Homolog of GI Number: 34858816 NR Desc: similar to dJ842G6.1.1
  misc_feature: Homolog of GI Number: 73991499 NR Desc:  similar to CG8067
  misc_feature: Homolog of GI Number: 48763021 NR Desc: COG0500: SAM
  misc_feature: Homolog of GI Number: 55651105 NR Desc:  similar to chromosome 20 open reading frame 7 isoform 1
  misc_feature: Homolog of GI Number: 66561251 NR Desc:  similar to ENSANGP00000001164
  misc_feature: Homolog of GI Number: 56203420 NR Desc: chromosome 20 open reading frame 7
  misc_feature: Useful for making ornamental plants with modified flowers
  misc_feature: Useful for making ornamental plants with modified leaves
  misc_feature: Useful for making plants with increased biomass and foliage
  misc_feature: Useful for making shorter plants
MRAVSLWLRRKHQLPLALAFRRFSTSNSKVKIFDRELKRTQRDRAAWLTPSHDPLLHTVAQNLLDRLQDCKKTFPTALCLGGSLQPITRSLSAPPGGVEKLIVMDASYDMLQACKNAHHNATVETHFLVADEEFLPIKESSVDLVVSCLGLHWTNDLPGAMIQSRLALKPDGLFLAAILGGETLKELRIACTLAQMEREGGISPRVSPLAQVRDAGNLLTRAGFTLPGVDVDEYVVKYESALELIEHLRAMGETNALYQMNNILKRDTALATAAIYDSMFSAEDGTVPATFQVIYMTGWREHPSQQKAKRRGSATISFNDIQKQFGSQN

SEQ ID NO: 6371 - DNA, 1262 bp, Glycine max
  misc_feature: Ceres CLONE ID no. 1170863
  misc_feature: Ceres CDNA ID no. 40351690
  CDS (140)..(859): REFERENCED BY SEQ ID NO: 6372
acttatacacattctattcttcaacaaacattgtagtttgatcaaattcccatggtctctctctctccaattaattcgatttagcttttccccaaatcccaaaccctttctttcgcttagatcccaatccaattgggttatggacatggcttccagtccccgcaccgttgaagagatcttcaaggattacggcgccagaagaactgccgttattcgcgctctcactcacgacgttgatgaattttacggcctctgtgatccagataaggataacctgtgcctctatggacatccaaatgaggcctgggaagtaactctgccagcggaggaagttccgccagagctccctgagcctgctcttggaatcaattttgctagggatggcatgaaccgcagggactggctttctcttgttgctgtgcacagtgattcgtggttggtttctgtggccttttacctcggggctcgtcttaaccgcaatgaaaggaaacgtttatttagcttgatcaatgatcttccatctgtttttgaagttgtgactgacaggaaaccagttaaggacaagccaactgcagatagtggaagcaagtctaggggaagtgccaagagatctagtgatgagcaagttaaaagcaacccaaagtttgtagatgagggttatgaggaggatgaagatgagcataatgaaacactttgtggaagctgtggcggaaattacaatgctgatgagttttggatttgctgtgacatatgtgagaggtggttccatgggaagtgtgttaagattacccctgcaaaggctgagagcataaagcaatataaatgtccatcatgcagcctgaggcggggcaggccatagactgaaggtgatggaatgggtacatgtgaggtgagtgttgtttcgtggttgacaagatactgtaactttgttacatcacttacagaagttcatgtaatgggcatagtattgatgcttaagggcaaatttatcagggattaagtttgtttttaccagatgaacgttgatggatgttacagagtatagaatagagcatggcaaattttaatttgatgattagtttatatttagttgaatatttgcttgaacttacatattgtaatttatttatttatttttaacattgtttaagaagacaaaaccttttcccctccacagattcttctaatcaaactttcattatgctgcttgatgggttaatgaaaagattatgtgagtggattcttgaaaaaaaaaaaaaaaa

SEQ ID NO: 6372 - protein, 239 aa, Glycine max
  misc_feature: Ceres CLONE ID no. 1170863
  misc_feature: Ceres CDNA ID no. 40351690
  misc_feature: Useful for making plants with modulated growth and phenotype characteristics
  misc_feature: null
  misc_feature: The sequence is a functional homolog of  SEQ ID NO 1611 in the  11/479,226 US patent application
  misc_feature: The sequence is a functional homolog of  SEQ ID NO 780 in the  10/412,699 US patent application
  misc_feature: Useful for making plants with altered Lignin content
  misc_feature: Useful for making plants with modulated flowering time
  misc_feature (185)..(235): Pfam Name: PHD PFAM Desc: PHD
MDMASSPRTVEEIFKDYGARRTAVIRALTHDVDEFYGLCDPDKDNLCLYGHPNEAWEVTLPAEEVPPELPEPALGINFARDGMNRRDWLSLVAVHSDSWLVSVAFYLGARLNRNERKRLFSLINDLPSVFEVVTDRKPVKDKPTADSGSKSRGSAKRSSDEQVKSNPKFVDEGYEEDEDEHNETLCGSCGGNYNADEFWICCDICERWFHGKCVKITPAKAESIKQYKCPSCSLRRGRP

SEQ ID NO: 6373 - DNA, 863 bp, Glycine max
  misc_feature: Ceres CLONE ID no. 1170886
  misc_feature: Ceres CDNA ID no. 24726561
  CDS (62)..(625): REFERENCED BY SEQ ID NO: 6374
agcatgctttattctcgcttggttgcagcttcagcagcagcggcaagcaactccatccgcaatgggaatcgatttgaaggcaggaggtaagtccaagaagaccaaacgtacagcccccaaatccaatgatatttacctcaagctcctcgtcaagctgtaccgttttcttgttcggaggactggtagtaacttcaatgccgtcatcctcaaacgccttttcatgagcaaggtcaacaagcccccgctatccctctctagattgattcgttacaccaagggaaaggaggataagatagctgtggtagtcggggccgtgaccgatgacattagggtgtatgaagtccctgctctgaaggtaactgccctgaggttcactgaaactgccagagctagaattgagaaggctggtggcgaatgcctcacctttgatcaactggctcttagagctccactcggccagaatacggttcttcttagaggtcccaagaatgcccgtgaggctgtcaagcactttggaccagctcctggtgtgccccatagccacaccaagccctatgtccgtgcaaagggaaggaaatttgagcgggctagaggaaaaaggaatagcagaggctttagagtttgagttctggagctcaaacatgaaggagttttcattttacctcatgatcattatgtattgttttcttgtgttttggaacaatttgttaattttggtttttatttttccttatctaagggaaaaaattgaaacgctttccccgaacaattttgttcttgcacacttttcagaggattaatgagtagctattgttctacttaagtcgtgattttgacaaaaaaaaataaaaaaaaaaaaaaaa

SEQ ID NO: 6374 - protein, 187 aa, Glycine max
  misc_feature: Ceres CLONE ID no. 1170886
  misc_feature: Ceres CDNA ID no. 24726561
  misc_feature (96)..(117): Pfam Name: L15 PFAM Desc: Ribosomal protein L15
  misc_feature: Homolog of GI Number: 6714451 NR Desc: putative 60S ribosomal protein L18
  misc_feature: Homolog of GI Number: 23397141 NR Desc: putative 60S ribosomal protein
  misc_feature: Homolog of GI Number: 606970 NR Desc: cytoplasmic ribosomal protein L18
  misc_feature: Homolog of GI Number: 3021348 NR Desc: ribosomal protein L18
  misc_feature: Homolog of GI Number: 50939929 NR Desc: putative cytoplasmic ribosomal protein L18
  misc_feature: Homolog of GI Number: 57471708 NR Desc: ribosomal protein L18
  misc_feature: Homolog of GI Number: 28798549 NR Desc: 60S ribosomal protein
  misc_feature: Homolog of GI Number: 25295214 NR Desc: 60S ribosomal protein L18
  misc_feature: Homolog of GI Number: 61654648 NR Desc: L18
  misc_feature: Homolog of GI Number: 48098918 NR Desc: similar to ribosomal protein L18
MGIDLKAGGKSKKTKRTAPKSNDIYLKLLVKLYRFLVRRTGSNFNAVILKRLFMSKVNKPPLSLSRLIRYTKGKEDKIAVVVGAVTDDIRVYEVPALKVTALRFTETARARIEKAGGECLTFDQLALRAPLGQNTVLLRGPKNAREAVKHFGPAPGVPHSHTKPYVRAKGRKFERARGKRNSRGFRV

SEQ ID NO: 6375 - DNA, 1754 bp, Glycine max
  misc_feature: Ceres CLONE ID no. 1170983
  misc_feature: Ceres CDNA ID no. 35383364
  CDS (251)..(1195): REFERENCED BY SEQ ID NO: 6376
ttgctgctagtttttaaaaagtgaacaaaacctgctgctagtttttaaaaagtgaacaaaagacagcgtagaattattaaattcaaccgccattacataacactacattttttttattcactcactccgttctctgctctttttcttcttctacccccacaccggaggagagaaaaccaatatcactcttcaccgttagggttagggtttcggtttccccctaatccaatcgcgcagcagcagcagcgagatgggcgccaattcgttgtcatcggcggaatcaaccctcgatctcgacgagcagatatcgcagctcatgcaatgcaagccactctccgaacaccaggttagagttttatgtgagaaggctaaggagattttgatggatgaaagtaatgtccagcctgtgaaaagccccgtgacaatttgtggtgatatccatgggcagtttcatgatcttgctgaactatttcgaattggagggaagtgtccagatactaattacttgtttatgggtgattatgtggaccggggttattattcagttgaaactgtaacacttcttgtgtcactgaaagtgcgatatcctcagcgaattactattcttagaggaaaccatgaaagccgtcagatcactcaagtatatggattttacgatgaatgcctcagaaaatatggtaatgctagtgtttggaagatctttactgacctttttgatttctttccgttgactgcattggttgagtccgaaatattttgtttgcatggtgggctttcaccttcaattgagactcttgataacataaggaacttcgatcgtgttcaagaggttcctcatgaagggcccatgtgcgatctgttgtggtctgatccagatgataggtgtggctggggaatttctcctcgtggtgctggatatacatttggccaggatatatccgaacaatttaatcacacaaacaagcttaagttaattgctagagctcatcagctggttatggatggatttaactgggctcatgaacaaaaggtggttaccatttttagtgcacctaactactgttatcgatgtgggaacatggcctccattttagaggttgataattccatgggccacacatttatccagtttgatcctgctcccaggagaggagaacctgatgtcacccgtagaacgcctgattacttcttatgatgttgctgctgctgcatatcatactggggtcgcagttacatctcattctgcacaaatttcaagtagtttgtgcatcctcatcctcgttgatgagattactgtaaggacttaaaatctttgggtatgcacaccaaacttttttggtgattgcccaataccgtactaatgtaaattaggcgagaaacattccagttttttgtgacgctcaagaacttgctggacaccctattggagaagtctcctagatgatggccatgtcagaatatgtattattccagtgacctgtggatatattttttgtgtttccccatctctagaagcaatgactgtgtttccccatctctagaagcaatgacttggattttatatttctgttgatgatttgctttgctatgttctatcaattttcagtaaaagttgcatgataatagtgattcagttttgttctttactaattatgttcaatttcattcctagagcttattggtggttatcaattggcttcagattgccagtgaaaagaatatatatactttagttggtaaaaaaaaaaaaaaaa

SEQ ID NO: 6376 - protein, 314 aa, Glycine max
  misc_feature: Ceres CLONE ID no. 1170983
  misc_feature: Ceres CDNA ID no. 35383364
  misc_feature (55)..(250): Pfam Name: Metallophos PFAM Desc: Calcineurin
  misc_feature: Homolog of GI Number: 33589738 NR Desc: At2g42500/F14N22.23
  misc_feature: Homolog of GI Number: 3255943 NR Desc: PP2A1 protein
  misc_feature: Homolog of GI Number: 49645498 NR Desc: YlPPH21
  misc_feature: Homolog of GI Number: 17848 NR Desc: phosphatase 2A
  misc_feature: Homolog of GI Number: 81694 NR Desc: phosphoprotein phosphatase
  misc_feature: Homolog of GI Number: 287811 NR Desc: phosphoprotein phosphatase type 2A
  misc_feature: Homolog of GI Number: 5419931 NR Desc: protein phosphatase 2A catalytic subunit
  misc_feature: Homolog of GI Number: 1929412 NR Desc: protein phosphatase type 2A
  misc_feature: Homolog of GI Number: 15810367 NR Desc: putative phosphoprotein phosphatase 2A isoform 4
  misc_feature: Homolog of GI Number: 14029406 NR Desc: serine/threonine phosphatase Pph21p
MGANSLSSAESTLDLDEQISQLMQCKPLSEHQVRVLCEKAKEILMDESNVQPVKSPVTICGDIHGQFHDLAELFRIGGKCPDTNYLFMGDYVDRGYYSVETVTLLVSLKVRYPQRITILRGNHESRQITQVYGFYDECLRKYGNASVWKIFTDLFDFFPLTALVESEIFCLHGGLSPSIETLDNIRNFDRVQEVPHEGPMCDLLWSDPDDRCGWGISPRGAGYTFGQDISEQFNHTNKLKLIARAHQLVMDGFNWAHEQKVVTIFSAPNYCYRCGNMASILEVDNSMGHTFIQFDPAPRRGEPDVTRRTPDYFL

SEQ ID NO: 6377 - DNA, 685 bp, Glycine max
  misc_feature: Ceres CLONE ID no. 1171016
  misc_feature: Ceres CDNA ID no. 35383365
  CDS (74)..(538): REFERENCED BY SEQ ID NO: 6378
ctctcaaactgatccaaagggttttcgtttcgccgctcagtttttttgtaggaaaggatctgacttttgagtaatggctccagctaaagttgatgtcactaagaaggctgacccaaaggccaaggccttgaaagctgcgaaagcggtgaagtcagggcaagtcatcaagaagaaggcgaagaagatcagaacgaaggtgacgttccacaggccaaagacattgacaaaggctagggaccctaagtacccacgcatcagtgcaactccaaggaacaagttggaccactacggaatcctcaagtacccactcaccaccgagtctgcaatgaagaagatcgaagacaacaacaccttggtcttcattgttgacatccgtgctgacaagaagaagatcaaagatgctgtcaagaagatgtatgacattcagaccaagaaagtcaataccctcatcaggcctgatggaacgaagaaggcgtacgtgagattgactcctgattatgatgctttggatgttgctaacaaaattggaatcatctaagctattatcatttgatttctgtcattttacttttggagttaaaaacagacttcttgtcttagtctcagttttgttagaaaagataatatctctgttgtgctttatcgttggattcgaagctttgttttggtaaaaaaaaaaaaaaaa

SEQ ID NO: 6378 - protein, 154 aa, Glycine max
  misc_feature: Ceres CLONE ID no. 1171016
  misc_feature: Ceres CDNA ID no. 35383365
  misc_feature (12)..(66): Pfam Name: Ribosomal_L23eN PFAM Desc: Ribosomal protein L23
  misc_feature (72)..(151): Pfam Name: Ribosomal_L23 PFAM Desc: Ribosomal protein L23
  misc_feature: Homolog of GI Number: 23308155 NR Desc: At3g55280/T26I12_160
  misc_feature: Homolog of GI Number: 21592339 NR Desc: 60S ribosomal protein L23A
  misc_feature: Homolog of GI Number: 3355475 NR Desc: 60S ribosomal protein L23A
  misc_feature: Homolog of GI Number: 2654122 NR Desc: ribosomal protein L23a
  misc_feature: Homolog of GI Number: 1084424 NR Desc: ribosomal protein L23a
  misc_feature: Homolog of GI Number: 13560777 NR Desc: ribosome protein L23a
  misc_feature: Homolog of GI Number: 7711063 NR Desc: ribosomal protein L23
  misc_feature: Homolog of GI Number: 7340791 NR Desc: ribosomal protein L23
  misc_feature: Homolog of GI Number: 76573339 NR Desc: ribosomal protein L25
  misc_feature: Useful for making bigger plants
  misc_feature: Useful for making plants with increased biomass and foliage
  misc_feature: Useful for sterility
MAPAKVDVTKKADPKAKALKAAKAVKSGQVIKKKAKKIRTKVTFHRPKTLTKARDPKYPRISATPRNKLDHYGILKYPLTTESAMKKIEDNNTLVFIVDIRADKKKIKDAVKKMYDIQTKKVNTLIRPDGTKKAYVRLTPDYDALDVANKIGII

SEQ ID NO: 6379 - DNA, 914 bp, Glycine max
  misc_feature: Ceres CLONE ID no. 1171212
  misc_feature: Ceres CDNA ID no. 24766216
  CDS (276)..(599): REFERENCED BY SEQ ID NO: 6380
aagacacaactccaacaaggcattgtttggtttggtttggttacttgaaaatctcgaatcgcttaattttgatttagttttccaccgcaacgcggaacctctttctcgaactggctaactctcaggcaagtggctcggacgctgattccagcaacacacggctggtggttgcactgtatgacgccctaaactccggcgactccaacgccgtcgtcaagatcgtcgccgccgacctcgagtggtggttccatggtccgccctctcaccagtttttgatgcgcatgctcaccggcgactccgccgccgacaactccttccgattcgttccgcagtccatcgccgccttcggctccaccgtcatcgtcgagggctgcgactccgcccgcaacattgcctgggtccacgcctggaccgtcactgatgggatgatcactcaaatcagagagtacttcaacaccgccctcaccgtcactcgcatccacgattccggcgagattgttccggccagatccggcgccggccgtttgccctgcgtctgggagagcagcgtctccggtcgggtcgggaaatccgtccccggtttggttctcgcaatataaaatataaaataagtaattagggaaggacgaggtcacgtgttgccgttgctataataattaaataagggacttgtgcacgtggcggtgactggatcgatcggtttcagggaacattgatactttgtgttagtattggaggttagggagatgtgagagctttgttgttattggtgtggtttgttttgtttgcttgtgtgtttttcaccactatgggcgtattcaggtggttgtatctttcttttgttatttggagtgttgatgatgatgcaataagaatatctatggactatgcttttaagaaaaaaaaaaaaaaaa

SEQ ID NO: 6380 - protein, 107 aa, Glycine max
  misc_feature: Ceres CLONE ID no. 1171212
  misc_feature: Ceres CDNA ID no. 24766216
  misc_feature (1)..(107): Pfam Name: WI12 PFAM Desc: Wound
  misc_feature: Homolog of GI Number: 4574320 NR Desc: wound
  misc_feature: Homolog of GI Number: 82293 NR Desc: wun1 protein
  misc_feature: Homolog of GI Number: 10241935 NR Desc: elicitor inducible protein
  misc_feature: Homolog of GI Number: 7441829 NR Desc: proline
  misc_feature: Homolog of GI Number: 7441828 NR Desc: extensin
  misc_feature: Homolog of GI Number: 12018147 NR Desc: vegetative cell wall protein gp1
  misc_feature: Homolog of GI Number: 477072 NR Desc: mucin 7 precursor
  misc_feature: Homolog of GI Number: 22748665 NR Desc: mucin 7
  misc_feature: Homolog of GI Number: 53718955 NR Desc: putative lipoprotein
MRMLTGDSAADNSFRFVPQSIAAFGSTVIVEGCDSARNIAWVHAWTVTDGMITQIREYFNTALTVTRIHDSGEIVPARSGAGRLPCVWESSVSGRVGKSVPGLVLAI

SEQ ID NO: 6381 - DNA, 1767 bp, Glycine max
  misc_feature: Ceres CLONE ID no. 1171650
  misc_feature: Ceres CDNA ID no. 35383366
  CDS (2)..(1399): REFERENCED BY SEQ ID NO: 6382
tatgcttccactgttactactgaatgtgattttgtgtttctacttttatttgtacctgccaatgaagcagctcggcgagaacgccgggaatttagaagcggccatagaacaattgctgaatgcggagaagcaagcgaggctcgccggcgacgtcgccgccaccagaaacgccgtcactgaaattttacggatgtgcttcgaagcgcgtgcctggaaaaccctcaatgaccagattgttctcttgtccaaacgccgtggccagcttaagcaggctgtgacagcaatggtccagcaggctatgcaatatattgatgagacaccagatcttgaaactcgtatagaactcatcaaaatcttgaacagtgtatctgcaggaaagatatacgttgagattgagagagctcggttgatcaagaaacttgcaaaaatcaaggaagaacaaggacttatagctgaagctgctgatttgatgcaagaaattgcggtggaaacttttggtgccatggctaaaactgagaaaatcgcattcattcttgaacaagttcgtttgtgtctagaccgccaggattatgttcgtgcacaaatactctcaagaaagattagtacgagagtgtttgatgctgatgtttcaaaggaaaagaaaaagcctaaagaaggtgataatgttgttgaagaagctcctgttgatataccatctctaccggagttgaagcgaatctactatgaactaatgattcggtattattcccataaaaatgattatcttgaaatttgccgatgctacaaggcaatatatgagattccatctgtcaaagaaaatcctgccgagtggattccaatcctgaggaaaatatgttggtatttggttctatcaccgcatgatccaatgcagtcaagccttctcaattctaccttggaggataagaatctgtctgagattccaaactttaagttactgttgaaacagttggtcactatggaggttatccagtggacaactctttgggattcatacaaggatgaatttgagaatgagagtaacttaggaaagaatttgggtgaaaaagcagctgaagatctgagggaaagagtaattgaacataatattattgttatatcaaaatactatggaaagattactttgaagagacttgcggagcttttgtgtctcagtgttcagaaagctgagaagcatctttcagatatggttgtgtctaaggcattggtggcgaagattgatagacccatgggaatagtttgtttccaaagagctaaggatagcaatgacgttcttaactcatgggcagcaaacttggagaggctgcttgatcttgtggagaagagctgccatcaaatacacaaggaaaccatggtgcataaagctgccttgaaggtttaagaagctccatatcactgttaaaagttacaggtgaaccccaatatagatgtgattttggactgaaggtgccgtaaaaggatgttaatttgaattattgctgattagattggtgaggtattggattaaaagacgatgctttctttttccattttagatactgtcaatgatgcaattagggtagagatggtatatgctttttagcgttgtatactaatggtgaataccttacctgttaccaccgacttatgacaggatcctaaacggtcttgtttgtagctcagtgggaagaaatcgagtgctctgatattctttgtctgattaatttttccgtatttattgggctcattattccaaaaaaaaaaaaaaaa

SEQ ID NO: 6382 - protein, 445 aa, Glycine max
  misc_feature: Ceres CLONE ID no. 1171650
  misc_feature: Ceres CDNA ID no. 35383366
  misc_feature (294)..(403): Pfam Name: PCI PFAM Desc: PCI domain
  misc_feature: Homolog of GI Number: 42573323 NR Desc: 26S proteasome regulatory subunit
  misc_feature: Homolog of GI Number: 72384444 NR Desc: 52O08_14
  misc_feature: Homolog of GI Number: 21700915 NR Desc: AT5g64760/MVP7_9
  misc_feature: Homolog of GI Number: 10177207 NR Desc: proteasome regulatory subunit
  misc_feature: Homolog of GI Number: 21280811 NR Desc: putative 26S proteasome p55 protein
  misc_feature: Homolog of GI Number: 50920117 NR Desc: putative proteasome regulatory non
  misc_feature: Homolog of GI Number: 17298157 NR Desc: 26S proteasome regulatory particle non
  misc_feature: Homolog of GI Number: 62858399 NR Desc: LOC548755
  misc_feature: Homolog of GI Number: 21357319 NR Desc: CG1100
  misc_feature: Homolog of GI Number: 17533097 NR Desc: proteasome Regulatory Particle
MKQLGENAGNLEAAIEQLLNAEKQARLAGDVAATRNAVTEILRMCFEARAWKTLNDQIVLLSKRRGQLKQAVTAMVQQAMQYIDETPDLETRIELIKILNSVSAGKIYVEIERARLIKKLAKIKEEQGLIAEAADLMQEIAVETFGAMAKTEKIAFILEQVRLCLDRQDYVRAQILSRKISTRVFDADVSKEKKKPKEGDNVVEEAPVDIPSLPELKRIYYELMIRYYSHKNDYLEICRCYKAIYEIPSVKENPAEWIPILRKICWYLVLSPHDPMQSSLLNSTLEDKNLSEIPNFKLLLKQLVTMEVIQWTTLWDSYKDEFENESNLGKNLGEKAAEDLRERVIEHNIIVISKYYGKITLKRLAELLCLSVQKAEKHLSDMVVSKALVAKIDRPMGIVCFQRAKDSNDVLNSWAANLERLLDLVEKSCHQIHKETMVHKAALKV

SEQ ID NO: 6383 - DNA, 1169 bp, Glycine max
  misc_feature: Ceres CLONE ID no. 1171788
  misc_feature: Ceres CDNA ID no. 25892531
  CDS (208)..(894): REFERENCED BY SEQ ID NO: 6384
agagagatcattctagagacagagagaaattagcttcagtagatattagtggtgggtatgtgtgtgtgtgggtttgggtttcaagagaggagacatgcttaacttcaacccaacacttcaagtacttgcttcttcatacccttaccagatcccaaaggtcacgatctaattttaagtgattagtctgatgagcattttgaaggttacatgaagcaatttctctttttgaatcttcctgacaccgagatcaattgttcacaagttgattgcaatcactcaatggctcattcttcttatccctacggcgatccaattcttgcttatggaccacaagctattagtcatccccaaatggtaccccagatgctgggactagcatccaccagagtggcattaccacttgatcttgctgaagatggaccgatttatgtcaacgcgaaacaataccatggtatactgagaaggcgacagtcacgagcaaaacttgaggctcagaacaaacttatcaaaagtcgtaagccatatcttcatgagtctcggcaccgccatgctttgaatagggttaggggatctgggggtcgatttctgagtaccaaacagcttgcacagtctaatgcagaatttgtcaccggtgcacattctggttctgaccctaccaacatatatcagaaagaacatccattagaggtggaaagtcattcctcaaaagatggagataatgcatcattcataacaacctactccgaccggccatgtttatctggcaacaacctcaattttcggcagcaggagtgcatgtttctggggaattctgcaaacatgagtggagcaccacagtgcagtgggggactcacctttggcggagcaaagcaacgcacttcagttgtccggtgagagaagaaactgatcgaaaccgacttcaccggtcaggcaaatcatccttggcttagtcacttttgtctgtgtcttaatgtgttcgtactaaatgatcattttgagagactcttcagtctgcattagcactaataagacctttccaattgctttggcatgtattttaaagttgctattgtactggattctgaactggattggaatagtctgtgcatggaactagtatgtttgtgttagttactgttgaatttccttctttaaaaaaaaaaaaaaaa

SEQ ID NO: 6384 - protein, 228 aa, Glycine max
  misc_feature: Ceres CLONE ID no. 1171788
  misc_feature: Ceres CDNA ID no. 25892531
  misc_feature (70)..(126): Pfam Name: CBFB_NFYA PFAM Desc: CCAAT
  misc_feature: Homolog of GI Number: 45861201 NR Desc: CCAAT
  misc_feature: Homolog of GI Number: 45861203 NR Desc: CCAAT
  misc_feature: Homolog of GI Number: 45861205 NR Desc: CCAAT
  misc_feature: Homolog of GI Number: 45861207 NR Desc: CCAAT
  misc_feature: Homolog of GI Number: 45861211 NR Desc: CCAAT
  misc_feature: Homolog of GI Number: 38640734 NR Desc: CCAAT
  misc_feature: Homolog of GI Number: 45861209 NR Desc: CCAAT
  misc_feature: Homolog of GI Number: 2826786 NR Desc: RAPB protein
  misc_feature: Homolog of GI Number: 45861217 NR Desc: CCAAT
  misc_feature: Homolog of GI Number: 45861221 NR Desc: CCAAT
MKQFLFLNLPDTEINCSQVDCNHSMAHSSYPYGDPILAYGPQAISHPQMVPQMLGLASTRVALPLDLAEDGPIYVNAKQYHGILRRRQSRAKLEAQNKLIKSRKPYLHESRHRHALNRVRGSGGRFLSTKQLAQSNAEFVTGAHSGSDPTNIYQKEHPLEVESHSSKDGDNASFITTYSDRPCLSGNNLNFRQQECMFLGNSANMSGAPQCSGGLTFGGAKQRTSVVR

SEQ ID NO: 6385 - DNA, 550 bp, Glycine max
  misc_feature: Ceres CLONE ID no. 1171819
  misc_feature: Ceres CDNA ID no. 25892492
  CDS (40)..(417): REFERENCED BY SEQ ID NO: 6386
aaggatctgttttgggatatatgggcataggaaaaagagatgacatggtgcaatgactcagatgaggagaggggaattgatcaactggttgcaccagctattactcctacttcaactaataacactactgttcttactcatgatcatcacagaaaaccaactgaaattcgcaccataacttgcccctcatgtggtcataacattgaattccaagatcagactggaatcaatgacttgccggggttaccagctggggtgaagtttgatccgaatgaccaggagatattagagcatttggaagcaaaggtattctctgatgtgccaaagcttcatccacttattgatgagttcataccaacgcttgaaggagagaatgggatctgttatactcatccagaaaagcttccaggtgtttgatattttatttttgctttcaattttttttattgttaatttcgtcatgcttttggtatttttggaaacgggttttagattacagttatgataataattggaaacttatcatctatctcgaaaaaaaaaaaaaaaa

SEQ ID NO: 6386 - protein, 125 aa, Glycine max
  misc_feature: Ceres CLONE ID no. 1171819
  misc_feature: Ceres CDNA ID no. 25892492
  misc_feature (69)..(123): Pfam Name: NAM PFAM Desc: No apical meristem
  misc_feature: Homolog of GI Number: 18396807 NR Desc: no apical meristem
  misc_feature: Homolog of GI Number: 21554371 NR Desc: NAM protein
  misc_feature: Homolog of GI Number: 56202085 NR Desc: no apical meristem
  misc_feature: Homolog of GI Number: 34911014 NR Desc: OJ1125_C04.12
  misc_feature: Homolog of GI Number: 6560767 NR Desc: F3M18.9
  misc_feature: Homolog of GI Number: 50910053 NR Desc: no apical meristem
  misc_feature: Homolog of GI Number: 34906416 NR Desc: P0710E05.22
  misc_feature: Homolog of GI Number: 50925141 NR Desc: OSJNBa0044K18.6
MTWCNDSDEERGIDQLVAPAITPTSTNNTTVLTHDHHRKPTEIRTITCPSCGHNIEFQDQTGINDLPGLPAGVKFDPNDQEILEHLEAKVFSDVPKLHPLIDEFIPTLEGENGICYTHPEKLPGV

SEQ ID NO: 6387 - DNA, 624 bp, Glycine max
  misc_feature: Ceres CLONE ID no. 1172022
  misc_feature: Ceres CDNA ID no. 25893160
  CDS (57)..(419): REFERENCED BY SEQ ID NO: 6388
ctcgctccgtcaagccaaaaaccctgagaggagagtgtgtgtgagaatcggagaaaatggtgcagcgtcttgtctaccgttcccgtcacagctacgccaccaaatccaaccagcacaggatcgtcaagaccccaggtggtaaattgacataccagaccactaagaagcgtgcaagtggacccaagtgccccgtcaccggcaagcgtattcagggtatccctcacttgaggcctgctgagtacaagagatcccgattgtccagaaacaggaggaccgtgaaccgtgcctatggtggtgtgttgtccgctcttgctgttagagaaagaatcgttcgtgctttccttgttgaggagcaaaagatagtgaagaaggtgttgaagcttcaaaaggccaaggaaaaggttgctcccaggagctagatcctctttagctttttttttaaaaaacattgtctacttgccaaattctaaaactttttgtattcgtttgcttgactttgtcgacatttctcaaaatgttttgttatggtttctctttcaaatgctgcgtttaacaattcacgttttctacttatttggtgtttacaatgtgatttacattactcggttaaaaaaaaaaaaaaaa

SEQ ID NO: 6388 - protein, 120 aa, Glycine max
  misc_feature: Ceres CLONE ID no. 1172022
  misc_feature: Ceres CDNA ID no. 25893160
  misc_feature (5)..(103): Pfam Name: Ribosomal_L34e PFAM Desc: Ribosomal protein L34e
  misc_feature: Homolog of GI Number: 13194822 NR Desc: putative 60S ribosomal protein L34
  misc_feature: Homolog of GI Number: 21436403 NR Desc: putative 60S ribosomal protein L34
  misc_feature: Homolog of GI Number: 20259165 NR Desc: putative 60S ribosomal protein L34
  misc_feature: Homolog of GI Number: 21594659 NR Desc: 60s ribosomal protein L34
  misc_feature: Homolog of GI Number: 1076636 NR Desc: ribosomal protein L34
  misc_feature: Homolog of GI Number: 47824936 NR Desc: Ribosomal protein L34e
  misc_feature: Homolog of GI Number: 2119150 NR Desc: ribosomal protein L34
  misc_feature: Homolog of GI Number: 50946109 NR Desc: putative ribosomal protein
  misc_feature: Homolog of GI Number: 50941301 NR Desc: putative ribosomal protein L34
  misc_feature: Homolog of GI Number: 57471712 NR Desc: ribosomal protein l34
MVQRLVYRSRHSYATKSNQHRIVKTPGGKLTYQTTKKRASGPKCPVTGKRIQGIPHLRPAEYKRSRLSRNRRTVNRAYGGVLSALAVRERIVRAFLVEEQKIVKKVLKLQKAKEKVAPRS

SEQ ID NO: 6389 - DNA, 1132 bp, Glycine max
  misc_feature: Ceres CLONE ID no. 1172126
  misc_feature: Ceres CDNA ID no. 25892493
  CDS (338)..(910): REFERENCED BY SEQ ID NO: 6390
attgggcagcccgtaacgcagcatttcacgtgttgtgacgctgcccgaactgcccgattattggccgagaaattacgagcattcggtctcagtacctgtgtgtttttccttctctctctctctttctctttctcactctcctctgatatttctatattttggtgctctgtgtctctacgatctggatccaacggtccaaaatgttcggagcttgtgctgcttgttttcccaggttttagagctccaaaccttcagatccacctcattcgtctccagatcttccttccttgataacgttttcgggttcgagaaggcacttgtttgtttgtcgtacgaaatggagactaaaccgagttcggtgatggttacgctcagttacggcgcgttgacgtgcgccgcggaagttctcgcgactttgctagcttctgctgtcgtcaaagccacgcttttggccccggatctctaccggctgctattgaccaacacgcctacaaccaaaggagagagaaaaactcagagtcaagacaagcaacgtgatgcagagggcgaagacggtaacgatgatgaaggggacgatgatgacgatggagatggtggatttggggagggtgaagaggagttgtcatctgaagatggaggtggatatggcaacaattccaacaacaagagcaactcaaagaaggcacccgaaggtggcgcaggtggagcagaagagaatggggaagaggatgaagacgaagatggtgatgatcaagatgatgatgaggatgacgacgatgacgatgatgacgaagaagatgagggaggtgaagaagaggatgaagatggtgctgaggacgaggagaatgaagaggatgaggaagacgaggaggaggaagcattgcagcccccaaagaaaagaaagaagtgaatttagtttagtcaagcctcccgtttgtattgttatgtacgaatttggcttctaacttgcatgtttttacttttttgggtactaaacttccatgttcttatttagtttataaggaggcttatgtaggacatgttttaattgatatctatgtttaccattgcgtaattagaatgctacattattgagcagtcaatgctaaatttaagaaaaaaaaaaaaaaaa

SEQ ID NO: 6390 - protein, 190 aa, Glycine max
  misc_feature: Ceres CLONE ID no. 1172126
  misc_feature: Ceres CDNA ID no. 25892493
  misc_feature: Homolog of GI Number: 50929027 NR Desc: OSJNBb0034I13.8
  misc_feature: Homolog of GI Number: 4106378 NR Desc: calcium
  misc_feature: Homolog of GI Number: 4587588 NR Desc: En/Spm
  misc_feature: Homolog of GI Number: 50905733 NR Desc: aspartic acid
  misc_feature: Homolog of GI Number: 51968339 NR Desc: aspartic acid
  misc_feature: Homolog of GI Number: 51968341 NR Desc: aspartic acid
  misc_feature: Homolog of GI Number: 35210494 NR Desc: aspartic acid
  misc_feature: Homolog of GI Number: 31621286 NR Desc: TPA: RTl1
  misc_feature: Homolog of GI Number: 24711753 NR Desc: larval allergen
METKPSSVMVTLSYGALTCAAEVLATLLASAVVKATLLAPDLYRLLLTNTPTTKGERKTQSQDKQRDAEGEDGNDDEGDDDDDGDGGFGEGEEELSSEDGGGYGNNSNNKSNSKKAPEGGAGGAEENGEEDEDEDGDDQDDDEDDDDDDDDEEDEGGEEEDEDGAEDEENEEDEEDEEEEALQPPKKRKK

SEQ ID NO: 6391 - DNA, 939 bp, Glycine max
  misc_feature: Ceres CLONE ID no. 1172267
  misc_feature: Ceres CDNA ID no. 25446993
  CDS (111)..(779): REFERENCED BY SEQ ID NO: 6392
tgcataaagtctctgacggaacaagagcttcactacacaactgagcccttcctcaacacgtcaaaaattcatctcatctatctgtagatcggagaaaccaaaaaaaaaaaatggagttcgacgagaagaaagcaatgatccgcgacgtggcgttacaagtcgttttcatctcgctcacgattttcagcttcctctggatgcacggcatccctcaaaacctctacgccaagctccgccaccgtcccccgaacccacgggccgtgcaagccaagcgccatttcgtcaaaggcgcgcagctcctcgcccaagccagaagatccaaaagcgcttcctccgcaacttccctcgccaaacaagccctagccgaggccgagaaggccatcgcgctcgaccccaaggacgccgcctcgcacctcctcaagtccatggcgctcgacctccagggcttccgcaccaacgcgctcgatgcgctcgacgccgcgttgtctccactcgcagcgggttcgctcgcggaggacgagagaggtgacgcgcttctgaagagggcggaactgaagatcgcgatgagcgagcggcgcggcgttgactcggtgctggctgatttgaccgagtcggtgaagctgagtccgcgaaacgcgaaggcgtggtgcatgttgggggaaacctacgaagggaacaagatgggagaggaagcgaagaaagcttataaagaggctttggagttggagccacagttgaatgtggctcaagaagcgctcagcaggttgggatcgtcgtaatttggtgttgagtgatgtgagctttaagatgtgatcgatcgctttggttattgtatgtttaatttataactgttgtttctaatcttcgattatggagagtaattgaatgttaagtttgagcaagcaataaaatgattttcgccgaaaaaaaaaaaaaaaa

SEQ ID NO: 6392 - protein, 214 aa, Glycine max
  misc_feature: Ceres CLONE ID no. 1172267
  misc_feature: Ceres CDNA ID no. 25446993
  misc_feature (168)..(201): Pfam Name: TPR_1 PFAM Desc: Tetratricopeptide repeat
  misc_feature (73)..(89): Pfam Name: TPR_2 PFAM Desc: Tetratricopeptide repeat
MIRDVALQVVFISLTIFSFLWMHGIPQNLYAKLRHRPPNPRAVQAKRHFVKGAQLLAQARRSKSASSATSLAKQALAEAEKAIALDPKDAASHLLKSMALDLQGFRTNALDALDAALSPLAAGSLAEDERGDALLKRAELKIAMSERRGVDSVLADLTESVKLSPRNAKAWCMLGETYEGNKMGEEAKKAYKEALELEPQLNVAQEALSRLGSS

SEQ ID NO: 6393 - DNA, 653 bp, Glycine max
  misc_feature: Ceres CLONE ID no. 1172406
  misc_feature: Ceres CDNA ID no. 25893161
  CDS (55)..(456): REFERENCED BY SEQ ID NO: 6394
ataatttttcgtacggttccctctacttcgctttcaaaactttcataaaacaaaatggcgggtcgtggaaaaactctcggatctggggttgctaagaaggcgacgtctcggagcagcaaggcgggtctccagttccccgtcggccgtatcgcccggttcttgaaaaacggcaagtacgccgaacgtgtcggcgccggagctccggtctacttggccgccgtactcgaatacctcgccgcagaggttttggaattggctgggaacgcggcgagggacaacaagaagacaagaatcgtgccgcgtcacattcaattggcggtgaggaacgacgaggagctgagcaagttgcttggagacgtgacgattgctaatggaggtgtgatgccgaacattcacaatcttcttcttcccaagaaggctggtggtgcttccaaaccttccggtgacgacgaatagatctcagtaatgaagtgtagatttagattagtcctgttttaaatcgatcttgtctgtaaacgtttgcagtgtgttacccttagattaaatatgtctggtcttaaaagatttgatcttgaacatcgtgaacttgaccaatgtttttctgttataatttgccaatgtgcaacggttaaatctgaaaaaaaaaaaaaaaa

SEQ ID NO: 6394 - protein, 133 aa, Glycine max; identical to SEQ ID NO: 5222
  misc_feature: Ceres CLONE ID no. 1172406
  misc_feature: Ceres CDNA ID no. 25893161
  misc_feature (25)..(89): Pfam Name: CBFD_NFYB_HMF PFAM Desc: Histone
  misc_feature: Homolog of GI Number: 19310641 NR Desc: putative histone H2A protein
  misc_feature: Homolog of GI Number: 17065594 NR Desc: putative histone H2A protein
  misc_feature: Homolog of GI Number: 21593834 NR Desc: histone H2A
  misc_feature: Homolog of GI Number: 29824201 NR Desc: putative histone H2A
  misc_feature: Homolog of GI Number: 21617982 NR Desc: histone H2A
  misc_feature: Homolog of GI Number: 50938211 NR Desc: putative histone H2A
  misc_feature: Homolog of GI Number: 50945929 NR Desc: putative histone H2A
  misc_feature: Homolog of GI Number: 536896 NR Desc: protein H2A
  misc_feature: Homolog of GI Number: 77555213 NR Desc: Core histone H2A/H2B/H3/H4
  misc_feature: Homolog of GI Number: 50938209 NR Desc: histone H2A

SEQ ID NO: 6395 - DNA, 587 bp, Glycine max
  misc_feature: Ceres CLONE ID no. 1172571
  misc_feature: Ceres CDNA ID no. 25446994
  CDS (140)..(430): REFERENCED BY SEQ ID NO: 6396
gtcgtccccctgttataatactaacccggcctgggtcacttgactccggcacaaggaaagctgcttcttctttgcaaaggcggcgaggcaccaacgctctctagctccggtctctttgtattttgaggtagataacacaatgtcgctgaggcgtttcttaggctattctgatggtgaggtcatgaggtctgatgcaaaaccttgttccaggctaatgaggcacacagctgcaatctttagtgttggtggagcattaggattttgggtcctttgccgaatgcactatggtcctcgaattacaaatcctaggagtcttcgttgggcagcatgtggagctgtaactgcgagctcaggcacggctttgctggttcgtttgtttagtcctgaatgtgagccccagaatatagctgcttatgacaataaaaactaactggtgttgtcaccccctttctttttcccctactgataacatcataatatacttgatgaggtaggttgcaattatctcgcatgtgtaagttttatggtatggatgacattttctggcacatcactaagggaaaatttggctaaaaaaaaaaaaaaaa

SEQ ID NO: 6396 - protein, 96 aa, Glycine max; identical to SEQ ID NO: 5246
  misc_feature: Ceres CLONE ID no. 1172571
  misc_feature: Ceres CDNA ID no. 25446994

SEQ ID NO: 6397 - DNA, 827 bp, Glycine max
  misc_feature: Ceres CLONE ID no. 1172639
  misc_feature: Ceres CDNA ID no. 35383368
  CDS (88)..(615): REFERENCED BY SEQ ID NO: 6398
ccgtttctctcttcactcttctttcgccacacactcactctctctctctctctctctctctctctctctgctcccattaatttcacgatggcaacactcttcgactctctcgccgtcgtgcgtctccccaccgccgccttctctcccgccgccgcccgccggacctccgttatgctcccgcactgcgctggcctcaggctcagacccgccgccgcttcgcgcctagttgcgtcccccgctcgcaggatcgcttctcgcgcagcgcgcgtcgcctgcgaggctcaggacaccgccgtggaagtggctcctattactgatgcaaactggcaatcccttgtccttgaatccgaatctgctgttttggttgaattctgggcgccatggtgtggtccctgccgaatgattcaccctataattgatgaacttgcaaagcaatatgctgggaagctcaagtgttacaaactcaacactgatgagagcccttcaaccgctactcggtatggaattcgaagcatcccaactgttatgatcttcaagagtggtgagaagaaagatacagttattggtgctgtgcccaagtcaacattgaccacgagcatagaaaaattcgtatgaggtggtaaataaagaaggcctttgctggaagtaaagcagtttttcctattagcttcttttcttctgagccccatgtctcaagtttcgatattttgtttacccaaatactcatttatgctcctgtacagtgatcagatgctacctaattttatgtttttagattattctagttaccaatatgctaagtgaattttccaaaaaaaaaaaaaaaa

SEQ ID NO: 6398 - protein, 175 aa, Glycine max
  misc_feature: Ceres CLONE ID no. 1172639
  misc_feature: Ceres CDNA ID no. 35383368
  misc_feature (71)..(173): Pfam Name: Thioredoxin PFAM Desc: Thioredoxin
  misc_feature: Homolog of GI Number: 15594012 NR Desc: putative thioredoxin m2
  misc_feature: Homolog of GI Number: 7021721 NR Desc: thioredoxin m4
  misc_feature: Homolog of GI Number: 6539614 NR Desc: thioredoxin m4
  misc_feature: Homolog of GI Number: 50926654 NR Desc: OSJNBa0074L08.22
  misc_feature: Homolog of GI Number: 62320065 NR Desc: putative M
  misc_feature: Homolog of GI Number: 28973241 NR Desc: putative thioredoxin
  misc_feature: Homolog of GI Number: 6539610 NR Desc: thioredoxin m2
  misc_feature: Homolog of GI Number: 50911078 NR Desc: putative Thioredoxin M
  misc_feature: Homolog of GI Number: 21618235 NR Desc: putative M
  misc_feature: Homolog of GI Number: 5566283 NR Desc: thioredoxin
  misc_feature: Useful for delaying flowering time
  misc_feature: Useful for increasing chlorophyll and photosynthetic capacity
  misc_feature: Useful for making ornamental plants with modified leaves
  misc_feature: Useful for making plants with altered leaf shape eg curled leaves
  misc_feature: Useful for making plants with increased biomass
  misc_feature: Useful for making plants with increased biomass and foliage
  misc_feature: Useful for making plants with increased biomass and foliage
  misc_feature: Useful for sterility
MATLFDSLAVVRLPTAAFSPAAARRTSVMLPHCAGLRLRPAAASRLVASPARRIASRAARVACEAQDTAVEVAPITDANWQSLVLESESAVLVEFWAPWCGPCRMIHPIIDELAKQYAGKLKCYKLNTDESPSTATRYGIRSIPTVMIFKSGEKKDTVIGAVPKSTLTTSIEKFV

SEQ ID NO: 6399 - DNA, 1399 bp, Glycine max
  misc_feature: Ceres CLONE ID no. 1172789
  misc_feature: Ceres CDNA ID no. 25446700
  CDS (149)..(1078): REFERENCED BY SEQ ID NO: 6400
acatcaaaccaaacactagctacgcttctctctctttccttcccagagcttcctgtggctgtggaatcatcgtatcttcttacgtccgaagcaagcctttgtcttgtgtgtgttcttcccccttccgtcagacttctaggaaaatcagatgcatcgtggtaaattttcccttacacccaagaatgaagtcaaggacttgacaggttcaagtttaaccagttacaaacatagcagtcttctggaccccatagatgtttcttcatcttcagatgatgaaaatgaccttcctaatgatgatgtgtctaatcaattagtcctttatgatcctgtggtgaatggaaacaatgcaattgaacttgcacctgatcctctccagtgtgaacatccattgcttccaagaagcaaaccttcacattcagttcctagagttttgccttcagttggtgctttcactgttcaatgtgcatcctgcttcaaatggaggttgattccaacaaaggaaaaatatgaagaaatacgtgagcatatccttgaacaaccttttgtttgtcaaaaagctcgtgagtggcgacctcatgtatcttgtgatgatccagaggatatttctcaggatggcagcagggtttgggctattgataagccaaacattgcacagcctccggctggatgggagcgactgctaaggatcagagctgaaggaagctccaaatttgcagatatatactatatagcaccatcaggcaagagattgcgttcaatggtagagatccagaagttcttgatggagcatcctgagtatacaagagatggggtaactctttcacagttctcatttcaaataccaaggccattacaagaaaactatgtgaggaagcgacctgctagacttacctcttcatatgaagtcagtgagcctgttgaacatgaacaagtgagtcctctagcatgggtagatccagaagggcatggtcgcagactggggcttcctgcccccccattcatggaatcccatgatattgaccctatcagtatcagccgtccttcaaagaggcaagcaactcataaaggtgccctgtagtaaggaccctcatcaaatcctttcgtgttatgtgcattgtgcagtcagtcagttgcatcttacttacaaatagagaaatagttcgtttatcctttttaatagggcattttaggtgtaatgagcttgcggggaaaagcagtgtagagacggttcacttgtcctcatgaggagatcattatcttggtattcctaataaaaatgtattttgcatctgggagaatcttttgtacaaaaaagggtgcctgtcccaagagaaacatgttagactcaagtaatattctgatatgaaaatatggtcattcagcaaaaaaaaaaaaaaaa

SEQ ID NO: 6400 - protein, 309 aa, Glycine max
  misc_feature: Ceres CLONE ID no. 1172789
  misc_feature: Ceres CDNA ID no. 25446700
  misc_feature (100)..(153): Pfam Name: zf PFAM Desc: CW
  misc_feature (160)..(237): Pfam Name: MBD PFAM Desc: Methyl
  misc_feature: Homolog of GI Number: 13936314 NR Desc: putative methyl
  misc_feature: Homolog of GI Number: 13936312 NR Desc: putative methyl
  misc_feature: Homolog of GI Number: 53792746 NR Desc: methyl
  misc_feature: Homolog of GI Number: 50878306 NR Desc: putative methyl
  misc_feature: Homolog of GI Number: 13936238 NR Desc: methyl
  misc_feature: Useful for increasing seed/fruit yield or modifying fruit content
  misc_feature: Useful for making plants with increased biomass
  misc_feature: Useful for making plants with modified flowers
MHRGKFSLTPKNEVKDLTGSSLTSYKHSSLLDPIDVSSSSDDENDLPNDDVSNQLVLYDPVVNGNNAIELAPDPLQCEHPLLPRSKPSHSVPRVLPSVGAFTVQCASCFKWRLIPTKEKYEEIREHILEQPFVCQKAREWRPHVSCDDPEDISQDGSRVWAIDKPNIAQPPAGWERLLRIRAEGSSKFADIYYIAPSGKRLRSMVEIQKFLMEHPEYTRDGVTLSQFSFQIPRPLQENYVRKRPARLTSSYEVSEPVEHEQVSPLAWVDPEGHGRRLGLPAPPFMESHDIDPISISRPSKRQATHKGAL

SEQ ID NO: 6401 - DNA, 1544 bp, Glycine max
  misc_feature: Ceres CLONE ID no. 1172790
  misc_feature: Ceres CDNA ID no. 24766217
  CDS (160)..(1320): REFERENCED BY SEQ ID NO: 6402
ttaccacttcccatcttcgcacacaacacagccatccctttctctcccttcttttgctctctgccctaaccagcctcaccagatcttttacctccatttccagtgcatcacaccttagcttcaagccatcacaagttgtagatacagttaatactcaatatggagctgagtactataaaagatgcttttgaccgtgttactaagaagcaaaagttatcttgttccaagactcaagaagcaattgatcagatcagacaggaaattgagagtgttttagacacactgcagtcagcgaataacactgaccatgaacttgattataaaactgtcctgaatgaacttaaggccagttttcttttaattgctccacttagtcaaatggaaggtacacagaaggagctaaatgtagcactcaccaagtatgggaagcttcttgagaaacatttcaaccctgatatatccaaggcttacagaaatatcgacattgatagacatacattaaaccaaataattgctaaccatttttatcaccagggcctttttgagataggggaccattttatgagtgtggttggagagcctgaatccgcagccattatgaaatttccgttcgtggaaatgtatcaaatacttgaagccatgcagaatcagaacctagagccagccctcaactgggcttccactaatggtgacaaacttgctcaaagtggatctgatattgtgttgaaacttcactcaatgcaatttgtgaaagtacttcaaaatggaagtagagaggaagctcttcattatgctcgaatgcacctttctccttttgctaccagtcacatgaccgatattcagaaacttatgggctgtcttctatggacgggaaagcttgatcgttctccttaccatgcattactatcaccatctaactgggataagttggctgaggaacttaaaaggcagttctgcaatcttttgggacagtcgtataatagtccattgagcgtgactgtagcagcaggggtccaggttttgccaccactcctcaaatttatgaatgtcatggcagggaagaagaatgaatggcagtctatgaaccagttaccggtgccggttgagttggaccgtgagttccagttccattctatttttgtttgtcctgtctccaaggaacaagcaaccgaggataaccctccgatgttaatgtcctgtggccatgtcctctgcaagcagtctatcttgaagatgtccaagaatagcacaaaagtgtttaagtgcccatattgtccctttgatattgatgcagcacagtgcaagcagctatatttctgatgttgatggatttgtatgaaactcctgtataaattcaatcctgtgttagcaataggtgtaaccacgtttgcaaaggcccatgccttgttgtgatctctgtgtatttcataaatttgttgtaaatagaaattctttttaatctggatatgactggcaagtccttcattatttgaataagttttgatacacttaaagctggtttttccccaaaaaaaaaaaaaaaa

SEQ ID NO: 6402 - protein, 386 aa, Glycine max
  misc_feature: Ceres CLONE ID no. 1172790
  misc_feature: Ceres CDNA ID no. 24766217
  misc_feature: Homolog of GI Number: 50725427 NR Desc: membrane protein
  misc_feature: Homolog of GI Number: 28829262 NR Desc: similar to Arabidopsis thaliana
  misc_feature: Homolog of GI Number: 66524943 NR Desc:  similar to ENSANGP00000021271
  misc_feature: Homolog of GI Number: 49258058 NR Desc: MGC84431 protein
  misc_feature: Homolog of GI Number: 55234793 NR Desc: ENSANGP00000021271
  misc_feature: Homolog of GI Number: 27670796 NR Desc: similar to RIKEN cDNA 0610039K22
  misc_feature: Homolog of GI Number: 54637081 NR Desc: GA17211
  misc_feature: Homolog of GI Number: 19112623 NR Desc: hypothetical zf
  misc_feature: Homolog of GI Number: 6320461 NR Desc: Cytosolic protein required for sporulation
MELSTIKDAFDRVTKKQKLSCSKTQEAIDQIRQEIESVLDTLQSANNTDHELDYKTVLNELKASFLLIAPLSQMEGTQKELNVALTKYGKLLEKHFNPDISKAYRNIDIDRHTLNQIIANHFYHQGLFEIGDHFMSVVGEPESAAIMKFPFVEMYQILEAMQNQNLEPALNWASTNGDKLAQSGSDIVLKLHSMQFVKVLQNGSREEALHYARMHLSPFATSHMTDIQKLMGCLLWTGKLDRSPYHALLSPSNWDKLAEELKRQFCNLLGQSYNSPLSVTVAAGVQVLPPLLKFMNVMAGKKNEWQSMNQLPVPVELDREFQFHSIFVCPVSKEQATEDNPPMLMSCGHVLCKQSILKMSKNSTKVFKCPYCPFDIDAAQCKQLYF

SEQ ID NO: 6403 - DNA, 1450 bp, Glycine max
  misc_feature: Ceres CLONE ID no. 1172869
  misc_feature: Ceres CDNA ID no. 40351691
  CDS (98)..(1228): REFERENCED BY SEQ ID NO: 6404
aaaagatttcattcttcctcttctaggttattacgcaccacccaccacgtatccctgaaaagagagaaaaacacactaagccaaagccaaagcagcaatggttaaagacacaaagcctttagcctatgctgctaataatggataccaaaaggaagcttttgatcccagtgctcctccaccgtttaagattgcagaaatcagagttgcaataccaaaacattgctgggtcaagaatccatggagatccctcagttatgttctcagggatgtgcttgtaattgctgcattgatggctgctgcaagtcacttcaacaactggcttctctggctaatctattggcccattcaaggaacaatgttctgggctctgtttgttcttggacatgattgtggccatggaagcttttcagacagcccttttctaaatagcctggtgggacacatcttgcattcctcaattcttgtgccataccatggatggagaattagccacagaactcaccatcaaaatcatggacacattgagaaggatgaatcctgggttccattaaccgagaagatttacaagaatctagacaacatgacaagacttgttagattcactgtgccatttccattgtttgtgtatccaatttatttgttctcaagaagccccggaaaggaaggttctcacttcaatccctacagcaatctgttcccacccagtgagagaaagggaatagcaatatcaacactgtgttgggttaccatgttttctatgcttatctatctctccttcataactagtccagttctattgctcaagctctatggaattccatattggatatttgttatgtggctggactttgtcacatacttgcatcaccatggtcatcatcagaaactgccttggtatcgcggcaaggaatggagttatttaagaggtggtctcacaactgtggatcgtgactatggttggatcaataacattcaccatgacattggcacccatgttattcaccatcttttccctcaaattcctcattatcacctcgttgaagcgacacaagcagcaaaatcagttcttggagagtattaccgtgagccagaaagatctgcaccattaccatttcatctaataaagtatttaattcagagtatgagacaagaccacttcgtaagtgacactggagatgtggtttattatcagactgattctctgcaccttcactcgcaccgagactgagtttcaatttttgggttatttattggattctagctactcaaattactttttttttaatgttacgtttttggagttttaacgttttctgaacaacttgcaaattacatgcatagagagacaggaattcatagtgggcctcaatggaatatttatttgaaattagtaaggtggtaattaataaatattgaattgtcagtttcatttgtaaaaaaaaaaaaaaaa

SEQ ID NO: 6404 - protein, 376 aa, Glycine max
  misc_feature: Ceres CLONE ID no. 1172869
  misc_feature: Ceres CDNA ID no. 40351691
  misc_feature (80)..(324): Pfam Name: FA_desaturase PFAM Desc: Fatty acid desaturase
MVKDTKPLAYAANNGYQKEAFDPSAPPPFKIAEIRVAIPKHCWVKNPWRSLSYVLRDVLVIAALMAAASHFNNWLLWLIYWPIQGTMFWALFVLGHDCGHGSFSDSPFLNSLVGHILHSSILVPYHGWRISHRTHHQNHGHIEKDESWVPLTEKIYKNLDNMTRLVRFTVPFPLFVYPIYLFSRSPGKEGSHFNPYSNLFPPSERKGIAISTLCWVTMFSMLIYLSFITSPVLLLKLYGIPYWIFVMWLDFVTYLHHHGHHQKLPWYRGKEWSYLRGGLTTVDRDYGWINNIHHDIGTHVIHHLFPQIPHYHLVEATQAAKSVLGEYYREPERSAPLPFHLIKYLIQSMRQDHFVSDTGDVVYYQTDSLHLHSHRD

SEQ ID NO: 6405 - DNA, 1395 bp, Glycine max
  misc_feature: Ceres CLONE ID no. 1173119
  misc_feature: Ceres CDNA ID no. 25402659
  CDS (301)..(1161): REFERENCED BY SEQ ID NO: 6406
acttttcctttatccattttccaagcaaaacttttcaaacccaaaaaaaatccaaaaaaagaaaaacaaaacgcttaacgcaatacaaaaaccacagtttcaatcacatctctctctctctttctcgcaaatttctactttctggtaagattttctctctcgttttctcgagaaaacctcgggatctgtgtttgcttgacgcgattccacgatttcccctaatttttcggtctgaaattgcgattttttgttcttcgtttttgtttcgttagggttttctatttgagattcgttgttccaatgagcgatcacttggtggtgttcgttgaccgtctcgcgcgccctgtccccgttgacccggtggcgcagccgccttccgagccgtctcctcctccggcccccgtgaatgctgacgcttccgggagctccggcaccgctccggtggaggattgtgacggagagggcggcggcgaggaggagccgctgatccagatggcggagtgccgcatctgccaggaggaggacggcgtttccaacttggagacgccctgcgcctgtagcggcagtcttaagtatgctcacagaaagtgtgtccagcattggtgtgatgagaaaggagacataacttgtgagatatgtcatcagccatatcaacctgggtatactgcccccccacctcgtcctaatcctgaagaaactactattgatataggaggtggctggacaatatctggcacacccttagacttgcgtgatcctcgactcttggcaattgcagaagcagaacgtcagttcttggatgctgaatatgatgagtatgctgcttccaacgccagtggagctgcattttgccgctcagctgctttaattttaatggcccttttactcctgcggcatgcactttctgtctcagatggtgataattctgatgatgatccatccagttttttctcccttttcttgcttcgtgctgctggatttctattaccttgctacatcatggcttgggcaatcagtattctgcagcgtcggcgacaaagacaagaggctgcagcactagcggcaacccaagttgcttttgttctacaatctggtcagcgtagaggtttacagtttgcaatagcaccaggaccacccacactacaccaggaacaagtataataatttgtatgcttttttatgtatgaatgaatattaagaaggctttgttgaaatgccgtgcatttttactctttactttcagctgtaacgttatgtacatgtacatacttagggggtgctaaaacgatgtacatgaatccattggtatccattcaattcatctatctatgaatgtaaccgaatccatccacttactatatattaagagatttatatgcaaaaaaaaaaaaaaaa

SEQ ID NO: 6406 - protein, 286 aa, Glycine max; identical to SEQ ID NO: 5206
  misc_feature: Ceres CLONE ID no. 1173119
  misc_feature: Ceres CDNA ID no. 25402659
  misc_feature (68)..(113): Pfam Name: zf PFAM Desc: Zinc finger
  misc_feature: Homolog of GI Number: 49533771 NR Desc: putative zinc finger protein
  misc_feature: Homolog of GI Number: 77551787 NR Desc: Zinc finger
  misc_feature: Homolog of GI Number: 50946099 NR Desc: zinc finger protein
  misc_feature: Homolog of GI Number: 21537046 NR Desc: nucleoside triphosphatase
  misc_feature: Homolog of GI Number: 15223693 NR Desc: zinc finger
  misc_feature: Homolog of GI Number: 30692888 NR Desc: zinc finger
  misc_feature: Homolog of GI Number: 7262667 NR Desc: Contains similarity to PIT1 from Arabidopsis thaliana gbAF130849
  misc_feature: Homolog of GI Number: 15217818 NR Desc: zinc finger
  misc_feature: Homolog of GI Number: 50750630 NR Desc:  similar to KIAA1399 protein
  misc_feature: Homolog of GI Number: 52076906 NR Desc: zinc finger

SEQ ID NO: 6407 - DNA, 1722 bp, Zea mays
  misc_feature: Ceres CLONE ID no. 1211021
  misc_feature: Ceres CDNA ID no. 36702618
  CDS (81)..(1430): REFERENCED BY SEQ ID NO: 6408
attccttgcttcatttttcgtcaccctagccgctttactctcttgcgatatctctgagatttgtttgacagtctctaaccatgggtaaagagaagtttcacatcaacattgtggtcattggccacgtcgattctggaaagtcgaccaccactggacacttgatctacaagttgggtggtattgacaagcgtgtcattgagaggttcgagaaggaggctgctgagatgaacaagaggtccttcaagtacgcatgggttttggacaaacttaaggctgagcgtgagcgtggtatcaccattgacattgctctctggaagttcgagaccaccaagtactactgcactgtcattgatgctcctggccatcgtgatttcatcaagaacatgatcactggtacctcccaggctgattgtgctgtccttatcatcgactccaccactggtggttttgaggctggtatctccaaggatggtcagacccgtgagcacgctctccttgctttcacccttggtgtcaaacagatgatctgctgttgtaacaagatggatgccactacccccaagtactccaaggccaggtacgatgaaattatcaaggaggtgtcttcctacttgaagaaggttggttacaaccccgacaaaatcccatttgtgcccatctctggattcgagggtgacaacatgattgagaggtccaccaacctagactggtacaagggaccaactcttcttgaggctcttgaccagatcaacgagcccaagaggccatcagacaagccccttcgtctcccacttcaggatgtctacaagattggtggtattggaacggtgccagtgggacgtgttgagactggtatgatcaagcctggtatggttgtgacctttgctcccacagggttgaccactgaggtcaagtctgttgagatgcaccacgagtctcttcttgaggcacttccaggtgacaacgttgggttcaatgttaagaatgttgctgtcaaggatcttaagagagggtacgtcgcatccaactccaaggatgaccctgccaagggtgctgctaacttcacctcccaggtcatcatcatgaaccaccctggtcagattggtaacggttacgccccagtcctggattgccacacctctcacattgcagtcaagttctctgagatcttgaccaagattgacaggcgttctggtaaggagattgagaaggagcccaagttcttgaagaatggtgatgctggtatggtgaagatgactccaaccaagcccatggttgtggagaccttctctgagtacccaccacttggacgtttcgctgtgagggacatgaggcagactgttgcagtcggtgttatcaagagtgttgacaagaaggacccaaccggagccaaggttaccaaggctgccgtcaagaagggtgcgaagtgaaccatcctcaaaactctatctgccgcaggtgaatcaaaggacagtgttagttttattacaatagtttggtatttggtcgcgtgtctgtgttcttgtttcgttttctccccgtcagagcgttgttctcgtaattgggttcttgatcggaggtggcggatctacacacacattcttcctgttttttgctttttatttgttttctcattttgaactgtttaaaatttctgttatatgaatgaatgttttccctgcggttattatcttctttactccaaaaaaaaaaaaaaaaaaa

SEQ ID NO: 6408 - protein, 449 aa, Zea mays
  misc_feature: Ceres CLONE ID no. 1211021
  misc_feature: Ceres CDNA ID no. 36702618
  misc_feature (248)..(315): Pfam Name: GTP_EFTU_D2 PFAM Desc: Elongation factor Tu domain 2
  misc_feature (322)..(430): Pfam Name: GTP_EFTU_D3 PFAM Desc: Elongation factor Tu C
  misc_feature: Homolog of GI Number: 15081765 NR Desc: At1g07930/T6D22_3
  misc_feature: Homolog of GI Number: 18086389 NR Desc: At1g07930/T6D22_3
  misc_feature: Homolog of GI Number: 13605682 NR Desc: At1g07930/T6D22_3
  misc_feature: Homolog of GI Number: 23308389 NR Desc: At1g07940/T6D22_14
  misc_feature: Homolog of GI Number: 8778823 NR Desc: T6D22.2
  misc_feature: Homolog of GI Number: 26324158 NR Desc: elongation factor 1 alpha
  misc_feature: Homolog of GI Number: 295789 NR Desc: elongation factor 1
  misc_feature: Homolog of GI Number: 21387133 NR Desc: putative elongation factor 1
  misc_feature: Homolog of GI Number: 23397097 NR Desc: putative translation elongation factor eEF
  misc_feature: Homolog of GI Number: 13430510 NR Desc: putative translation elongation factor eEF
MGKEKFHINIVVIGHVDSGKSTTTGHLIYKLGGIDKRVIERFEKEAAEMNKRSFKYAWVLDKLKAERERGITIDIALWKFETTKYYCTVIDAPGHRDFIKNMITGTSQADCAVLIIDSTTGGFEAGISKDGQTREHALLAFTLGVKQMICCCNKMDATTPKYSKARYDEIIKEVSSYLKKVGYNPDKIPFVPISGFEGDNMIERSTNLDWYKGPTLLEALDQINEPKRPSDKPLRLPLQDVYKIGGIGTVPVGRVETGMIKPGMVVTFAPTGLTTEVKSVEMHHESLLEALPGDNVGFNVKNVAVKDLKRGYVASNSKDDPAKGAANFTSQVIIMNHPGQIGNGYAPVLDCHTSHIAVKFSEILTKIDRRSGKEIEKEPKFLKNGDAGMVKMTPTKPMVVETFSEYPPLGRFAVRDMRQTVAVGVIKSVDKKDPTGAKVTKAAVKKGAK

SEQ ID NO: 6409 - DNA, 635 bp, Zea mays
  misc_feature: Ceres CLONE ID no. 1211666
  misc_feature: Ceres CDNA ID no. 14302176
  CDS (145)..(289): REFERENCED BY SEQ ID NO: 6410
actgagaagaaggagagctcagaaaccaaagaagctcggaagagcacgcagagtccagaaggcggcggcaaaggcgacgagggtccagacagcaaggcggagggcgagaaggaagcggccgttgttgaccttaggccactgacgatggaagacctgaggcaggcaaagaaccaggttgcagcgagcttcgccgccgagggtgccgtgatgaacgagctcaggcagtggaacgacctgtacggcgaaggggggtccaggaagaaacagcagctgacctacttcttgtagaggtgaagcatttggcaggtggtggagaggaacagagctgggcagacggtggacccatacttgatgaaccgagcatggtttcttcaagacgtgacgtgggcatgacgcatagtactagtctttgaggttccaggatccatgagatgagatgaggtcgatggtcaatttgtaggatcatgaactattattcttttacatgcatttgtacatgagcgctagactggttatgtatatctggattgattgaacagctcttgtgtttgagggtcattttagcttctcgtagactgctgtaattatatcatatatagtgagtatatatattcacaaaaaaaaaaaaaaaaaaa

SEQ ID NO: 6410 - protein, 47 aa, Zea mays
  misc_feature: Ceres CLONE ID no. 1211666
  misc_feature: Ceres CDNA ID no. 14302176
MEDLRQAKNQVAASFAAEGAVMNELRQWNDLYGEGGSRKKQQLTYFL

SEQ ID NO: 6411 - DNA, 1386 bp, Zea mays
  misc_feature: Ceres CLONE ID no. 1213577
  misc_feature: Ceres CDNA ID no. 25445671
  CDS (126)..(1157): REFERENCED BY SEQ ID NO: 6412
agccagaaaaccctaacttcccggccgccgctttcctttccctcgatccacagctcgcgccgttcctgcaagtgcgcacccatcgtcccgcctacgcactgccgcccaacgatctacgagctgccatggctaactcagcggcaccgggaggaatgaggtcgttcctgcaggccgtgtctacggtcaccgaggaggcgccgacgccactccgcgtcgtccagatggagggcctggctgtactgaagatcatcaagcactgtgaggagtttgcgccagctttagttacaggtcaattgcttggtttggatgttggtagtgttctggaagtgaccaactgttttccgttccctatcagggaagaggatgatgaagcagatgcagatggtgccaattatcagcttgagatgatgaggtgtttgagggaagttaatgttgacaacaatactattggatggtatcagtcttgcttgcttggatcttttcaaactgtggaactgattgaaacatttatgaactatcaggagagcatcaggagatgtgtgtgcattgtctatgacccatctagatctagtcaaggcgtgctagctctcaaagccttaaagcttacagactcgtttatggatctttaccgtaacaatggtttaactggggagaagttaagggagaagaaattgtcctgggttgatatttttgaggagataccaataaaagtttccaactcagcgcttgtcagtgcctttatgaaggagctggaacctgagtcacctgttacccagtgtgacctggaccgacttaaattgtcaaccgccccctttatggaaaggaacttggaatttctgattgggtgcatggatgatctttcatcagagcagaacaagttccaatattataaccgcaatctctcaagacaacagtcacagcagcaggcatggcttcaaaagagaaggcaggagaacatggcgaggaaagcagctggtgaggagccactaccagaagaagatccatccaatcctatatttaagcctattcctgagccctcacgattggagggctatctagtaactaatcagatctgcagttactgcaaccatatcaacggggttgctggtcagaatttcgacaggctatacctgatgaaggccttgcatgaggattagaagactgggctgtgatgaatgctgttagaattagcttgtgatactgctcaaaatcgtaattttgtgatgtacctttacatgggcgtgcctgtcctctacttaatgtttccatggaccagatggttagctcgtgatacttaatatacttgcatatgtatgcgttgccgtataaaccaattttctccattaaaaaaaaaaaaaaaaaaaaaaaaaaaaaaaaaaaaaaaaa

SEQ ID NO: 6412 - protein, 343 aa, Zea mays
  misc_feature: Ceres CLONE ID no. 1213577
  misc_feature: Ceres CDNA ID no. 25445671
  misc_feature: The plant is abnormally small.
  misc_feature: null
  misc_feature: Useful for making plants with altered alkaloid content
  misc_feature: Useful for making plants with modulated biomass
  misc_feature (26)..(134): Pfam Name: Mov34 PFAM Desc: Mov34/MPN/PAD
  misc_feature: Homolog of GI Number: 50923675 NR Desc: OSJNBb0006N15.13
  misc_feature: Homolog of GI Number: 12407660 NR Desc: eukaryotic initiation factor 3H1 subunit
  misc_feature: Homolog of GI Number: 42571435 NR Desc: eukaryotic translation initiation factor 3 subunit 3 / eIF
  misc_feature: Homolog of GI Number: 57095314 NR Desc:  similar to eukaryotic translation initiation factor 3
  misc_feature: Homolog of GI Number: 38454242 NR Desc: eukaryotic translation initiation factor 3
  misc_feature: Homolog of GI Number: 58760380 NR Desc: eukaryotic translation initiation factor 3 subunit 3 gamma
  misc_feature: Homolog of GI Number: 55631120 NR Desc:  similar to eukaryotic translation initiation factor 3
  misc_feature: Homolog of GI Number: 46229656 NR Desc: eIF3 gamma/P40 with JAB/PAD domains
  misc_feature: Useful for delaying flowering time
  misc_feature: Useful for increasing chlorophyll and photosynthetic capacity
  misc_feature: Useful for increasing seed/fruit yield or modifying fruit content
  misc_feature: Useful for making plants with increased biomass and foliage
  misc_feature: Useful for making plants with increased biomass and foliage
  misc_feature: Useful for making plants with increased biomass and foliage
  misc_feature: Useful for making shorter plants
  misc_feature: Useful for making shorter plants and plants with modified flowers
  misc_feature: Useful for sterility
MANSAAPGGMRSFLQAVSTVTEEAPTPLRVVQMEGLAVLKIIKHCEEFAPALVTGQLLGLDVGSVLEVTNCFPFPIREEDDEADADGANYQLEMMRCLREVNVDNNTIGWYQSCLLGSFQTVELIETFMNYQESIRRCVCIVYDPSRSSQGVLALKALKLTDSFMDLYRNNGLTGEKLREKKLSWVDIFEEIPIKVSNSALVSAFMKELEPESPVTQCDLDRLKLSTAPFMERNLEFLIGCMDDLSSEQNKFQYYNRNLSRQQSQQQAWLQKRRQENMARKAAGEEPLPEEDPSNPIFKPIPEPSRLEGYLVTNQICSYCNHINGVAGQNFDRLYLMKALHED

SEQ ID NO: 6413 - DNA, 1269 bp, Zea mays
  misc_feature: Ceres CLONE ID no. 1214718
  misc_feature: Ceres CDNA ID no. 36590392
  CDS (81)..(851): REFERENCED BY SEQ ID NO: 6414
aggcccaccgctagcatccgcagttcccccgcgcccgagacgcaaccccgcgccaggagtaagtttgttcttttatcgatatggcgagggaggagaatgtctacatggccaagctggctgagcaggccgaaaggtatgaagagatggttgagtatatggagaaggtggctaagactgtagatgtggaagagctcactgttgaggagcgtaacctcttgtcggtcgcatacaagaatgtgattggggctcgccgtgcttcatggcgcattgtctcttctattgaacagaaggaggagtcccgtaagaacgaagagcatgtgaaccttatcaaggaataccgtgcgaagatcgaggctgaactgagcaatatctgtgatggcatcctgaagctgcttgactcccacctagtgccttcttctactgctgctgaatcaaaggtcttctacctcaagatgaagggtgactatcacaggtatcttgcggaatttaagactggtcctgagaggaaggaatctgctgagagcacgatgatggcctacaaggctgctcaggacattgcgctggctgagctggaacctacccatccgataaggcttgggcttgctcttaacttctcagtgttctattatgagattctgaactccccagacaaagcttgcaaccttgcaaagcaggcgtttgatgaagctatctcccagttagacacccttggggaggagtcatacaaagatagcactctgatcatgcagctcctgagggacaacttgaccctttggacctctgacctcacggaggatggtgctgatgagggcaaagaagccccgaaaggtgaggctggtgacggacagtaagggacagtaatcttgggagagcgcatattgttcgagcccattgttttagatgctctatgctgtcgaagctgaagctgtgccgtgctattattgtagctgatttcctgttccctcactttttttttatattagtaggctggtagtgttcgaattagttccccattgctttgtgttgccgctagctgtcactaagtccgtgtggactggtattattcactggatttgagaagcatgtcagtggttgctctagcgttttattgagttttgaagtcatctccctcatttcggtttcaatcatttagcaaattgtgcatatggttgtgtaaaacacagttttgcacaattgcacaatttacatagtgtgatttgaaataagagtgagatattgctttgggctggaaaaaaaaaaaaaaaaaaa

SEQ ID NO: 6414 - protein, 256 aa, Zea mays
  misc_feature: Ceres CLONE ID no. 1214718
  misc_feature: Ceres CDNA ID no. 36590392
  misc_feature: Useful for making plants with modulated growth and phenotype characteristics
  misc_feature: null
  misc_feature: The sequence is a functional homolog of  SEQ ID NO 2350 in the  10/374,780 US patent application
  misc_feature: The sequence is a functional homolog of  SEQ ID NO 342 in the  10/412,699 US patent application
  misc_feature: The sequence is a functional homolog of  SEQ ID NO 344 in the  10/412,699 US patent application
  misc_feature: The sequence is a functional homolog of  SEQ ID NO 782 in the  11/479,226 US patent application
  misc_feature: The sequence is a functional homolog of  SEQ ID NO 786 in the  11/479,226 US patent application
  misc_feature: The sequence is a functional homolog of  SEQ ID NO 789 in the  11/479,226 US patent application
  misc_feature: The sequence is a functional homolog of  SEQ ID NO 790 in the  10/225,066 US patent application
  misc_feature: The sequence is a functional homolog of  SEQ ID NO 797 in the  11/479,226 US patent application
  misc_feature: The sequence is a functional homolog of  SEQ ID NO 801 in the  11/479,226 US patent application
  misc_feature: The sequence is a functional homolog of  SEQ ID NO 805 in the  11/479,226 US patent application
  misc_feature: Useful for making plants with modulated drought sensitivity
  misc_feature (3)..(240): Pfam Name: 14 PFAM Desc: 14
  misc_feature: Homolog of GI Number: 46946654 NR Desc: 14
  misc_feature: Homolog of GI Number: 37903393 NR Desc: 14
  misc_feature: Homolog of GI Number: 51964902 NR Desc: PREDICTED OJ1124_B05.7 gene product
  misc_feature: Homolog of GI Number: 53794211 NR Desc: putative 14
  misc_feature: Homolog of GI Number: 7271253 NR Desc: 14
  misc_feature: Homolog of GI Number: 2921512 NR Desc: GF14 protein
  misc_feature: Homolog of GI Number: 55375985 NR Desc: 14
  misc_feature: Homolog of GI Number: 44917163 NR Desc: 14
  misc_feature: Homolog of GI Number: 1070354 NR Desc: Hv14
  misc_feature: Homolog of GI Number: 44917165 NR Desc: 14
MAREENVYMAKLAEQAERYEEMVEYMEKVAKTVDVEELTVEERNLLSVAYKNVIGARRASWRIVSSIEQKEESRKNEEHVNLIKEYRAKIEAELSNICDGILKLLDSHLVPSSTAAESKVFYLKMKGDYHRYLAEFKTGPERKESAESTMMAYKAAQDIALAELEPTHPIRLGLALNFSVFYYEILNSPDKACNLAKQAFDEAISQLDTLGEESYKDSTLIMQLLRDNLTLWTSDLTEDGADEGKEAPKGEAGDGQ

SEQ ID NO: 6415 - DNA, 1732 bp, Zea mays
  misc_feature: Ceres CLONE ID no. 1221601
  misc_feature: Ceres CDNA ID no. 29191186
  CDS (287)..(1600): REFERENCED BY SEQ ID NO: 6416
gaatatcttcctttgtcaatctcttgagagtttttgcttcctcgtcttcttcgattcatcaaacagcgtgtgttttttgtttagagttggaagagacgaatcgaattttgaagctttcttttatgtctgacaagatatctccgttttgttgtcaatctggttgcttggaaaacacagtcctacatccagaattaaggactactactagttcctccatcactttagggtctcgcatcttcaaaccggagatccctcctctttctctccacttttttagctaagaagaatggcgctgcagaacattggtgcttccaaccgtaacgatgccttctacaggtacaagatgcctaagatggttaccaaaaccgaaggcaaaggtaatggcattaagaccaacattatcaacaatgttgagattgccaaagccttggctagaccgccttcttatacgaccaagtactttggttgtgagcttggagcgcagtctaagtttgatgagaagactgggacgtcgcttgtgaatggagctcacaacacgtctaagcttgctgggcttttggagaattttattaagaagtttgttcagtgttatggatgtggtaacccggagactgagattattattacgaagacgcagatggtgaatctcaagtgtgctgcttgtgggtttatctctgaggtcgacatgagggataagttgactaatttcattctcaagaacccacctgagcagaagaaggtgtcaaaggataagaaagcaatgaggaaagctgagaaggagaggcttaaagaaggcgagctagctgatgaggagcagagaaagctgaaagctaagaagaaagcattgtctaacggcaaggattctaagacgtctaagaaccattcttctgatgaggatataagcccgaagcatgatgagaatgctctagaggtggatgaggatgaagatgatgatgatggtgtcgagtggcaaactgatacttcccgagaagctgctgagaaaagaatgatggaacagttgagtgctaaaactgccgaaatggtgatgctctctgcaatggaagtagaagagaaaaaggcgcccaaaagcaaatctaacgggaacgttgtgaaaactgagaatcctcctccgcaagagaagaatctcgtgcaggatatgaaagagtatctgaagaaagggtcaccaataagcgcgctcaaaagtttcatctcgtctctctctgaacctcctcaagacatcatggacgcactcttcaatgctctctttgatggtgtgggaaagggattcgccaaagaagtgactaagaagaagaattacttagcggctgctgcaacaatgcaagaggatggatcacagatgcatctgctcaattcgattgggacattctgtggaaagaatggaaacgaagaagctttgaaagaggtggctctggttcttaaagcattgtacgaccaagacatcattgaggaagaggtagtgttggattggtacgaaaagggtctcaccggagctgacaaaagctcgccggtttggaagaatgttaagccttttgtggagtggcttcagagcgctgagtctgagtccgaagaggaggattgagtcacttttttcttccctcctaacttttctttgcggcatttcttataatacttcgtcagttttcagaattcttaaatctttttgctgtgttcttataaagaaacatcatctatcaaaaaaaaaaaaaaaaaa

SEQ ID NO: 6416 - protein, 437 aa, Zea mays
  misc_feature: Ceres CLONE ID no. 1221601
  misc_feature: Ceres CDNA ID no. 29191186
  misc_feature (1)..(131): Pfam Name: eIF PFAM Desc: Domain found in IF2B/IF5
  misc_feature (354)..(437): Pfam Name: W2 PFAM Desc: eIF4
  misc_feature: Homolog of GI Number: 15810339 NR Desc: putative eukaryotic translation initiation factor 5
  misc_feature: Homolog of GI Number: 21387159 NR Desc: putative eukaryotic translation initiation factor 5
  misc_feature: Homolog of GI Number: 20465815 NR Desc: putative eukaryotic translation initiation factor 5 protein
  misc_feature: Homolog of GI Number: 7488764 NR Desc: translation initiation factor eIF
  misc_feature: Homolog of GI Number: 50899512 NR Desc: putative eukaryotic translation initiation factor 5
  misc_feature: Homolog of GI Number: 53792080 NR Desc: putative eukaryotic translation initiation factor 5
  misc_feature: Homolog of GI Number: 4160402 NR Desc: eukaryotic translation initiation factor 5
  misc_feature: Homolog of GI Number: 1806575 NR Desc: Eukaryotic initiation factor
  misc_feature: Homolog of GI Number: 42733476 NR Desc: BRI1
  misc_feature: Homolog of GI Number: 50899514 NR Desc: putative eukaryotic translation initiation factor 5
  misc_feature: Useful for making ornamental plants with modified flowers
  misc_feature: Useful for making shorter plants
  misc_feature: Useful for sterility
MALQNIGASNRNDAFYRYKMPKMVTKTEGKGNGIKTNIINNVEIAKALARPPSYTTKYFGCELGAQSKFDEKTGTSLVNGAHNTSKLAGLLENFIKKFVQCYGCGNPETEIIITKTQMVNLKCAACGFISEVDMRDKLTNFILKNPPEQKKVSKDKKAMRKAEKERLKEGELADEEQRKLKAKKKALSNGKDSKTSKNHSSDEDISPKHDENALEVDEDEDDDDGVEWQTDTSREAAEKRMMEQLSAKTAEMVMLSAMEVEEKKAPKSKSNGNVVKTENPPPQEKNLVQDMKEYLKKGSPISALKSFISSLSEPPQDIMDALFNALFDGVGKGFAKEVTKKKNYLAAAATMQEDGSQMHLLNSIGTFCGKNGNEEALKEVALVLKALYDQDIIEEEVVLDWYEKGLTGADKSSPVWKNVKPFVEWLQSAESESEEED

SEQ ID NO: 6417 - DNA, 649 bp, Zea mays
  misc_feature: Ceres CLONE ID no. 1224087
  misc_feature: Ceres CDNA ID no. 36590593
  CDS (102)..(434): REFERENCED BY SEQ ID NO: 6418
aaccggataggtagcaccggagcaggtagaacgctgcacaatccccttcgccgccgccaagatggtaaccgccttcttccccgtctctctctgttgagtagatgagggttttcagattggtgaacgttcctaagaccaagaagacgtactgcaagaacaaagagtgcaagaagcacacactccacaaggtgactcagtataagaagggcaaggatagcctgtctgcccagggaaagcgccgttatgaccgcaagcagtcaggatatggtggtcagaccaagcctgtcttccacaagaaggccaagaccaccaagaagattgttctgaagctgcagtgccagagctgcaagcactactcacagcacgccatcaagagatgcaagcattttgagattggtggagacaagaagggcaagggcacatctcttttctaagcttctcgtccacctgtctggttgttgagttgaagctgtgggtctactactactgttataaaaacatgtcgccaaatttcaatgttaatgtagcaatgaaagcagaccatgctatgtatccaaattccaatgcctgacatttgttctggggtgttggtcgacttttggctaaatgaaagttttgtagcttgaatcaaaaaaaaaaaaaaaaaaaa

SEQ ID NO: 6418 - protein, 110 aa, Zea mays
  misc_feature: Ceres CLONE ID no. 1224087
  misc_feature: Ceres CDNA ID no. 36590593
  misc_feature (24)..(100): Pfam Name: Ribosomal_L44 PFAM Desc: Ribosomal protein L44
  misc_feature: Homolog of GI Number: 34901296 NR Desc: putative 60S ribosomal protein L44
  misc_feature: Homolog of GI Number: 41152660 NR Desc: 60S ribosomal protein L44
  misc_feature: Homolog of GI Number: 15281775 NR Desc: 60S ribosomal protein L144
  misc_feature: Homolog of GI Number: 170920 NR Desc: ribosomal protein L41
  misc_feature: Homolog of GI Number: 21553918 NR Desc: ribosomal protein
  misc_feature: Homolog of GI Number: 1553131 NR Desc: ribosomal protein L44 isoform b
  misc_feature: Homolog of GI Number: 82621114 NR Desc: ribosomal protein L41
  misc_feature: Homolog of GI Number: 3128243 NR Desc: ribosomal protein L41
  misc_feature: Homolog of GI Number: 12083868 NR Desc: ribosomal protein L41
  misc_feature: Homolog of GI Number: 47606054 NR Desc: 60S ribosomal protein L44
MRVFRLVNVPKTKKTYCKNKECKKHTLHKVTQYKKGKDSLSAQGKRRYDRKQSGYGGQTKPVFHKKAKTTKKIVLKLQCQSCKHYSQHAIKRCKHFEIGGDKKGKGTSLF

SEQ ID NO: 6419 - DNA, 1779 bp, Zea mays
  misc_feature: Ceres CLONE ID no. 1224322
  misc_feature: Ceres CDNA ID no. 29191187
  CDS (63)..(1451): REFERENCED BY SEQ ID NO: 6420
gacaaatctgaaatcacaaatctcatcatctccttcctcccttgcgagatctgatcgtatcaatggagatcttctacttcgtggttttcggtggcctggctgcgatcgtcgccggcttggagctgagcaaatcgaacaaagaccgcattaacacctcctccgccttcaactccttcaagaacaactatctcctcgtctactctctcatgatggctggggactggttgcagggtccgtatgtgtactatctctacagcacttatggcttcggaaagggagagatcggtcagctctttattgctggttttggatcttccatgttgtttggcaccattgttggatctcttgccgacaaacagggtcgcaagagagcttctatcacctattgtatcacctacattctcagctgtatcaccaaacattctccccagtacaaagttttgatggtcggtcgtgttcttggtggtatcgctacttctctccttttctctgccttcgaatcctggctcgtcgctgagcacaacaagagaggcttcgagcagcagtggctttctgtcactttctccaaggctattttcctcggtaatggattagtcgccatcattgctggcctctttggcaattaccttgtcgattctctctccctcggtcctgttgctcctttcgatgctgctgcttgcttccttgctattggtatggccgttattatctcatcttggtccgaaaactatggagatccatctgaaaacaaagaccttcttacccagttcaagaacgctgcatctgccattgcttctgatgagaagatcgctttgctcggtgctattcagtctctgtttgaagggtccatgtacacctttgtgtttctctggactcctgctttgagcccaaacgaagaggacattccacatggtttcatatttgcaactttcatgctggcttcgatgcttggtagctccattgcctctcgtctgttggcacattcgtctccaaaagtagagagctatatgcagatcgtatttgtgatatcttctgctgctctaatgcttcctgttgtaacaagcttcttggtggcgccctcaggtgtaaaaggtggaagcatatccttctctggatgcattcagttaatgggtttctgcacatttgaagcgtgtgtaggaatcttctggccatctataatgaagatgagatcgcaatacattccagaggaagctagaagcaccatcatgaattttttccgcatcccactcaacatctttgtctgccttgtattatacaatgttgacgcgtttccaatgaccgtgatgtttggaatatgctctgtattcctttttgtggcctctatattgcagaggaggttgatgaatgtagccgagatccacaagtcaagatcacaagagtggtcagcagaaaaggagatgacctcagaagctgaccctctaaacccataataaccaaatcaaccatgacataagaaaaaagaagaaacgccgttccgtttctcttgatgatttttctacttgtcttaatatgttcgttggtcataaagtctttccacttgtttagttatatttggattttgtgccttcaccagatgtagcaaacacaccctaatacctctgcacgtcagcttatttgggctttggccactattcttcttgaatctttcaactttttttttatgtgcgtcaaaaacaatctttataagtcgattttggccctaaaccataaaaatgtagtgttgttttaaaggaagctcaaaaaaaaaaaaaaaaaaaa

SEQ ID NO: 6420 - protein, 462 aa, Zea mays
  misc_feature: Ceres CLONE ID no. 1224322
  misc_feature: Ceres CDNA ID no. 29191187
  misc_feature: Homolog of GI Number: 6633826 NR Desc: F1N19.22
  misc_feature: Homolog of GI Number: 34902182 NR Desc: Putative transporter
  misc_feature: Homolog of GI Number: 21536852 NR Desc: putative transporter
  misc_feature: Homolog of GI Number: 37536124 NR Desc: putative transporter
  misc_feature: Homolog of GI Number: 78708918 NR Desc: transporter
  misc_feature: Homolog of GI Number: 72020323 NR Desc:  similar to transporter
  misc_feature: Homolog of GI Number: 50540496 NR Desc: zgc:91807
MEIFYFVVFGGLAAIVAGLELSKSNKDRINTSSAFNSFKNNYLLVYSLMMAGDWLQGPYVYYLYSTYGFGKGEIGQLFIAGFGSSMLFGTIVGSLADKQGRKRASITYCITYILSCITKHSPQYKVLMVGRVLGGIATSLLFSAFESWLVAEHNKRGFEQQWLSVTFSKAIFLGNGLVAIIAGLFGNYLVDSLSLGPVAPFDAAACFLAIGMAVIISSWSENYGDPSENKDLLTQFKNAASAIASDEKIALLGAIQSLFEGSMYTFVFLWTPALSPNEEDIPHGFIFATFMLASMLGSSIASRLLAHSSPKVESYMQIVFVISSAALMLPVVTSFLVAPSGVKGGSISFSGCIQLMGFCTFEACVGIFWPSIMKMRSQYIPEEARSTIMNFFRIPLNIFVCLVLYNVDAFPMTVMFGICSVFLFVASILQRRLMNVAEIHKSRSQEWSAEKEMTSEADPLNP

SEQ ID NO: 6421 - DNA, 887 bp, Zea mays
  misc_feature: Ceres CLONE ID no. 1226742
  misc_feature: Ceres CDNA ID no. 29191201
  CDS (97)..(672): REFERENCED BY SEQ ID NO: 6422
attttggtattgctgcttacgtcgtcagatctgctcgttttttcgctccatttttgggttaccattactcagcttccgttttaaatatcacattagatggacgaaagcggaggtgatagtggttcagtggccacacctgttcaacagcgagcacatgaggcatggaggatttaccaacactatcttgacaagactacacctcatgcaaattacagatggattggaactcttgtcgtcgctcttatctactgtttgagggtttactatattcagggtttctacatcatcgcctatggtcttggaatctaccttctcaatctgcttatcgggttcttgtcccctcttgttgatcctgaagctggtggggtctctgatgggccttctctgcctactagaggttctgatgagttcaagcctttcattcgccgtctccccgagttcaaattctggtactccatgacaaaggctttctgcatagctttcctcatgacattcttctcggtgtttgacgttcctgtgttttggccaattctgctgtgctattggatcgttctctttgttctcaccatgagacgccagatcgcccacatgatcaagtacaaatacatccctttcagcttcggcaaacagaaatatggtggacggagcagcagcggctcacgtgcggattgatctgaccaatttgctgaccattagctactttttttgtctttgcaaaagagaaagaaaaaattgttaagaatatcattttggaccatttttacattgacaaaactatgcagagctataaggaagaattataggcaggataaaaaaggatggaaactaaacttgatttagctcggaaaaaaaaaaaaaaaaaaaaagaaaaaaaaaaaaaaaaaaaa

SEQ ID NO: 6422 - protein, 191 aa, Zea mays
  misc_feature: Ceres CLONE ID no. 1226742
  misc_feature: Ceres CDNA ID no. 29191201
  misc_feature (2)..(183): Pfam Name: Rer1 PFAM Desc: Rer1 family
  misc_feature: Homolog of GI Number: 24030322 NR Desc: putative AtRer1A protein
  misc_feature: Homolog of GI Number: 21617987 NR Desc: AtRer1B
  misc_feature: Homolog of GI Number: 21360413 NR Desc: At2g21600/F2G1.13
  misc_feature: Homolog of GI Number: 53792604 NR Desc: putative endoplasmatic reticulum retrieval protein Rer1B
  misc_feature: Homolog of GI Number: 34894094 NR Desc: putative Rer1A protein
  misc_feature: Homolog of GI Number: 50508264 NR Desc: putative AtRer1A
  misc_feature: Homolog of GI Number: 21554351 NR Desc: putative integral membrane protein
  misc_feature: Homolog of GI Number: 30682033 NR Desc: RER1C protein
  misc_feature: Homolog of GI Number: 7488292 NR Desc: probable integral membrane protein At2g23310
  misc_feature: Homolog of GI Number: 25411844 NR Desc: probable integral membrane protein
MDESGGDSGSVATPVQQRAHEAWRIYQHYLDKTTPHANYRWIGTLVVALIYCLRVYYIQGFYIIAYGLGIYLLNLLIGFLSPLVDPEAGGVSDGPSLPTRGSDEFKPFIRRLPEFKFWYSMTKAFCIAFLMTFFSVFDVPVFWPILLCYWIVLFVLTMRRQIAHMIKYKYIPFSFGKQKYGGRSSSGSRAD

SEQ ID NO: 6423 - DNA, 1268 bp, Zea mays
  misc_feature: Ceres CLONE ID no. 1229179
  misc_feature: Ceres CDNA ID no. 40351693
  CDS (81)..(851): REFERENCED BY SEQ ID NO: 6424
aggcccaccgctagcatccgcagttcccccgcgcccgagacgcaaccccgcgccaggagtaagtttgttcttttatcgatatggcgagggaggagaatgtctacatggccaagctggctgagcaggccgaaaggtatgaagagatggttgagtatatggagaaggtggctaagactgtagatgtggaagagctcactgttgaggagcgtaacctcttgtcggtcgcatacaagaatgtgattggggctcgccgtgcttcatggcgcattgtctcttctattgaacagaaggaggagtcccgtaagaacgaagagcatgtgaaccttatcaaggaataccgtgcgaagatcgaggctgaactgagcaatatctgtgatggcatcctgaagctgcttgactcccacctagtgccttcttctactgctgctgaatcaaaggtcttctacctcaagatgaagggtgactatcacaggtatcttgcggaatttaagactggtcctgagaggaaggaatctgctgagagcacgatgatggcctacaaggctgctcaggacattgcgctggctgagctggaacctacccatccgataaggcttgggcttgctcttaacttctcagtgttctattatgagattctgaactccccagccaaagcttgcaaccttgcaaagcaggcgtttgatgaagctatctcccagttagacacccttggggaggagtcatacaaagatagcactctgatcatgcagctcctgagggacaacttgaccctttggacctctgacctcacggaggatggtgctgatgagggcaaagaagccccgaaaggtgaggctggtgacggacagtaagggacagtaatcttgggagagcgcatattgttcgagcccattgttttagatgctctatgctgtcgaagctgaagctgtgccgtgctattattgtagctgatttcctgttccctcactttttttttatattagtaggctggtagtgttcgaattagttccccattgctttgtgttgccgctagctgtcactaagtccgtgtggactggtattattcactggatttgagaagcatgtcagtggttgctctagcgttttattgagttttgaagtcatctccctcatttcggtttcaatcatttagcaaattgtgcatatggttgtgtaaaacacagttttgcacaattgcacaatttacatagtgtgatttgaaataagagtgagatattgctttgggctggaaaaaaaaaaaaaaaaaa

SEQ ID NO: 6424 - protein, 256 aa, Zea mays
  misc_feature: Ceres CLONE ID no. 1229179
  misc_feature: Ceres CDNA ID no. 40351693
  misc_feature: Useful for making plants with modulated growth and phenotype characteristics
  misc_feature: null
  misc_feature: The sequence is a functional homolog of  SEQ ID NO 2350 in the  10/374,780 US patent application
  misc_feature: The sequence is a functional homolog of  SEQ ID NO 342 in the  10/412,699 US patent application
  misc_feature: The sequence is a functional homolog of  SEQ ID NO 344 in the  10/412,699 US patent application
  misc_feature: The sequence is a functional homolog of  SEQ ID NO 782 in the  11/479,226 US patent application
  misc_feature: The sequence is a functional homolog of  SEQ ID NO 786 in the  11/479,226 US patent application
  misc_feature: The sequence is a functional homolog of  SEQ ID NO 789 in the  11/479,226 US patent application
  misc_feature: The sequence is a functional homolog of  SEQ ID NO 790 in the  10/225,066 US patent application
  misc_feature: The sequence is a functional homolog of  SEQ ID NO 797 in the  11/479,226 US patent application
  misc_feature: The sequence is a functional homolog of  SEQ ID NO 801 in the  11/479,226 US patent application
  misc_feature: The sequence is a functional homolog of  SEQ ID NO 805 in the  11/479,226 US patent application
  misc_feature: Useful for making plants with modulated drought sensitivity
  misc_feature (3)..(240): Pfam Name: 14 PFAM Desc: 14
MAREENVYMAKLAEQAERYEEMVEYMEKVAKTVDVEELTVEERNLLSVAYKNVIGARRASWRIVSSIEQKEESRKNEEHVNLIKEYRAKIEAELSNICDGILKLLDSHLVPSSTAAESKVFYLKMKGDYHRYLAEFKTGPERKESAESTMMAYKAAQDIALAELEPTHPIRLGLALNFSVFYYEILNSPAKACNLAKQAFDEAISQLDTLGEESYKDSTLIMQLLRDNLTLWTSDLTEDGADEGKEAPKGEAGDGQ

SEQ ID NO: 6425 - DNA, 449 bp, Zea mays
  misc_feature: Ceres CLONE ID no. 1231067
  misc_feature: Ceres CDNA ID no. 36590273
  CDS (115)..(312): REFERENCED BY SEQ ID NO: 6426
ggtaggcctagggtttccttcctcctccagtgctgtcatcgccgccgccgccgccccggtttccttcgtaagcccgccgtcctccgtccgcgactctgcgcgagaagcgagagtatggacacccaagtgaagcttgctgttgtggtgaaggtgatgggaaggaccggctccaggggtcaggttacccaggtcagagtgaagttcttggatgaccagaaccgtctcatcatgaggaacgtcaagggaccggttcgcgagggagacatcctcacactgctcgagtctgagagggaggctaggaggctgcgttgaggcgggatactgtctaggtagttttcgtatggagttggatgtcatctaattgtgctatgtttgtcaaactttggtatgacctttaaaacacctgccttgtatgattaaaaaaaaaagaaaaaaaaaaaaaaaaaaaa

SEQ ID NO: 6426 - protein, 65 aa, Zea mays; identical to SEQ ID NO: 54
  misc_feature: Ceres CLONE ID no. 1231067
  misc_feature: Ceres CDNA ID no. 36590273
  misc_feature (1)..(65): Pfam Name: Ribosomal_S28e PFAM Desc: Ribosomal protein S28e
  misc_feature: Homolog of GI Number: 32400865 NR Desc: S28 ribosomal protein
  misc_feature: Homolog of GI Number: 2739219 NR Desc: rpS28
  misc_feature: Homolog of GI Number: 557682 NR Desc: small subunit ribosomal protein S28
  misc_feature: Homolog of GI Number: 3947723 NR Desc: ribosomal protein S28
  misc_feature: Homolog of GI Number: 21902507 NR Desc: ribosomal protein small subunit 28
  misc_feature: Homolog of GI Number: 3947725 NR Desc: ribosomal protein S28
  misc_feature: Homolog of GI Number: 40287500 NR Desc: 28 kDa small subunit ribosomal protein
  misc_feature: Homolog of GI Number: 21593139 NR Desc: 40S ribosomal protein S28
  misc_feature: Homolog of GI Number: 38566518 NR Desc: At3g10090
  misc_feature: Homolog of GI Number: 51873955 NR Desc: MGC85550 protein

SEQ ID NO: 6427 - DNA, 448 bp, Zea mays
  misc_feature: Ceres CLONE ID no. 1231616
  misc_feature: Ceres CDNA ID no. 13635596
  CDS (115)..(313): REFERENCED BY SEQ ID NO: 6428
ggtaggcctagggtttccttcctcctccagtgctgtcatcgccgccgccgccgccccggtttccttcgtaagcccgccgtcctccgtccgcgactctgcgcgagaagcgagagtatggacacccaagtgaagcttgctgttgtggtgaaggtgatgggaaggaccggctccaggggtcaggttacccaggtcagagtgaagttcttggatgaccagaaccgtctcatcatgaggaacgtcaagggaccggttcgcgagggagacatcctcacactgctcgagtctgagagggaggctaggaggctgcgttgaggcgggatactgtctaggtagttttcgtatggagttggatgtcatctaattgtgctatgtttgtcaaactttggtatgacctttaaaacacctgccttgtatgattaaaaaaaaagaaaaaaaaaaaaaaaaaaaa

SEQ ID NO: 6428 - protein, 65 aa, Zea mays; identical to SEQ ID NO: 54
  misc_feature: Ceres CLONE ID no. 1231616
  misc_feature: Ceres CDNA ID no. 13635596
  misc_feature (1)..(65): Pfam Name: Ribosomal_S28e PFAM Desc: Ribosomal protein S28e

SEQ ID NO: 6429 - DNA, 723 bp, Zea mays; identical to SEQ ID NO: 2995
  misc_feature: Ceres CLONE ID no. 1234122
  misc_feature: Ceres CDNA ID no. 40351695
  CDS (93)..(524): REFERENCED BY SEQ ID NO: 6430

SEQ ID NO: 6430 - protein, 143 aa, Zea mays; identical to SEQ ID NO: 2996
  misc_feature: Ceres CLONE ID no. 1234122
  misc_feature: Ceres CDNA ID no. 40351695
  misc_feature: null
  misc_feature: Useful for making plants with modulated oxidative stress sensitivity
  misc_feature (2)..(143): Pfam Name: Clat_adaptor_s PFAM Desc: Clathrin adaptor complex small chain

SEQ ID NO: 6431 - DNA, 808 bp, Glycine max
  misc_feature: Ceres CLONE ID no. 1235619
  misc_feature: Ceres CDNA ID no. 25446727
  CDS (48)..(335): REFERENCED BY SEQ ID NO: 6432
acatcacttattaattgtgttaagaaatttaagtgaggagctagagaatgatgatgaagtctgctatgtgtgcagtggtggttgtagcacttcttcttctggcggaggtggggcccatggctgaggctgtgacatgcaccccaacagagttgagtccgtgtcttccagcaatcacttccggtgctaaaccttccaatgcttgttgcacgaagctgaagcagcaaaaaccatgcttatgtggctacctcaaaaacgctagcttgaagcagtatgttaactctcctaatgcccgaaaaaccgttgcttcttgtgggattccctttccaacttgttaattaattaagccttcttataattaaagtgtgggatatatatatatatatatatatatatatatatatataaacagtttaatttatacacactttgatcctacaaagcatcttgacacaagcattcaataggatttcaccactttatcgcaacattttaacatgatgcggtaataaagtaaattcttgttgaatatttggataacgatgttatatactcatagtttgtgtgtataaattaaacttatatttattatttactctatatatgtcactctacgtttgtgtgatatattatacagttaagtatttagctatctttgaatatgttaaaggatgatcatattctctagagttgaatatggtgtatacaccagtatacatgttgtatccagggaattatatgtgttaagagctataaataaataaataaataaataatgatgttctagagtgacgcaaaaaaaaaaaaaaaa

SEQ ID NO: 6432 - protein, 95 aa, Glycine max
  misc_feature: Ceres CLONE ID no. 1235619
  misc_feature: Ceres CDNA ID no. 25446727
  misc_feature (30)..(95): Pfam Name: Tryp_alpha_amyl PFAM Desc: Protease inhibitor/seed storage/LTP family
  misc_feature: Homolog of GI Number: 499034 NR Desc: lipid transfer like protein
  misc_feature: Homolog of GI Number: 9279661 NR Desc: lipid transfer protein
  misc_feature: Homolog of GI Number: 498036 NR Desc: lipid transfer protein
  misc_feature: Homolog of GI Number: 20258875 NR Desc: putative lipid transfer protein
  misc_feature: Homolog of GI Number: 24745959 NR Desc: putative lipid transfer protein
  misc_feature: Homolog of GI Number: 14423789 NR Desc: Nonspecific lipid
  misc_feature: Homolog of GI Number: 543650 NR Desc: P48h
  misc_feature: Homolog of GI Number: 493721 NR Desc: TED4
  misc_feature: Homolog of GI Number: 45925909 NR Desc: probable lipid transfer protein family protein
  misc_feature: Homolog of GI Number: 7488524 NR Desc: lipid transfer like protein
MMMKSAMCAVVVVALLLLAEVGPMAEAVTCTPTELSPCLPAITSGAKPSNACCTKLKQQKPCLCGYLKNASLKQYVNSPNARKTVASCGIPFPTC

SEQ ID NO: 6433 - DNA, 1351 bp, Glycine max
  misc_feature: Ceres CLONE ID no. 1236053
  misc_feature: Ceres CDNA ID no. 40041398
  CDS (130)..(1074): REFERENCED BY SEQ ID NO: 6434
agttttcccaaaaaaaaaaaaagaccgaaaaagagaatagatatttggttttgtttgtttctgtggtggatccgcgttctcacaccagttcggcattggttaggtcgatttcgtttttccggtttggatatggattcggaggatttccgatccattctggagagcgcgggcgtggacgtttgggccctcatggacgcggccatcgcggtggcctccgccgaccacgctcacgagttgaagcgccggagagatggaatcgttgagcgcctttacgcggccagttcaccgccgccgctgtgtcggaactgcgacgccggcgacgggggagaaatcaggacgcagagcagtccctccgcggaggaggaaaaggatccctacggaggcttgttcgacgacgagcaacggaagattctcgacattaaagagcaactcgaagaccctcaccagtccgaagattcgttggtggagttgttgcagaatctagcagacatggatattacatttcaagcgttagaagagactgacattgggaggcatgtgaatcggttgcggaagcattcgtctaatgatgttaagagattggtcaagttactcgtcaggaagtggaaggaaattgtagatgaatgggtgaagttgaaggccccgggagaaccgggtactgctgtcatggctgatgaggactcgcctcagcagagaatcctacaaaatgggcatcgtcagattcctgattttgcatactcaccaaatccacactatgggagttttgggtcagagcgcaacaatattgaagcagaacgaaaaccaaaagcaattcctcgcaaagaagctccttcaaaaccatcgccatcagtcactactcctgctcctcctactcaaaacagacagagagaaagcaattttgacccggatagatttgcttcagccagaaaacggcttcaagagaactacaaagatgctgcaaatgccaaaaagcaaagaacgattcaagtgatggatctccatgagttaccaaaacccaagaatgccttccttggaaaaaacaaaggcggcactggtcagggaaggcactggtgagtggtgacccgtaatgttcgtgccaaagttccttgtaaaaaggcttttttgtgggagagtgatgccgcatagtcctaaaaacccggttgattcctttacaattttactccccaacataaaaatccgtatggttttatgtttacttatttaatactatcaacaaccccctccccccccccccacacacacacacacacaaaaaagcataatattttatgtgccaaactatgatttttatgaaatgtgggttagttgcggagcaaaaaaaaaaaaaaaa

SEQ ID NO: 6434 - protein, 314 aa, Glycine max
  misc_feature: Ceres CLONE ID no. 1236053
  misc_feature: Ceres CDNA ID no. 40041398
  misc_feature: Homolog of GI Number: 20147241 NR Desc: AT5g09850/MYH9_6
  misc_feature: Homolog of GI Number: 18416107 NR Desc: transcription elongation factor
  misc_feature: Homolog of GI Number: 72384441 NR Desc: 52O08_11
  misc_feature: Homolog of GI Number: 31431177 NR Desc: putative transcription elongation factor
  misc_feature: Homolog of GI Number: 32492337 NR Desc: OSJNBa0006A01.23
MDSEDFRSILESAGVDVWALMDAAIAVASADHAHELKRRRDGIVERLYAASSPPPLCRNCDAGDGGEIRTQSSPSAEEEKDPYGGLFDDEQRKILDIKEQLEDPHQSEDSLVELLQNLADMDITFQALEETDIGRHVNRLRKHSSNDVKRLVKLLVRKWKEIVDEWVKLKAPGEPGTAVMADEDSPQQRILQNGHRQIPDFAYSPNPHYGSFGSERNNIEAERKPKAIPRKEAPSKPSPSVTTPAPPTQNRQRESNFDPDRFASARKRLQENYKDAANAKKQRTIQVMDLHELPKPKNAFLGKNKGGTGQGRHW

SEQ ID NO: 6435 - DNA, 667 bp, Glycine max
  misc_feature: Ceres CLONE ID no. 1236080
  misc_feature: Ceres CDNA ID no. 40351696
  CDS (84)..(494): REFERENCED BY SEQ ID NO: 6436
acaccttcgaattttcttttccttcactttcccgagaaaaaaaaaaccctctttcactttcttgactacggtctcacttcgacatggctcgaactaagcaaactgctcgcaagtccaccggcggcaaggcgccacgtaagcagttggcgaccaaggccgcccggaagtccgctcccgcgaccggaggagtgaagaagccccaccgcttcaggccgggaaccgtggcgctgagggaaatcagaaagtatcagaagagcaccgagcttctcatcaggaagcttccgtttcagagactcgtgagggaaatcgcgcaggacttcaagaccgatttgcgttttcagagtagcgccgtttctgcgcttcaggaagctgctgaggcctacctcgttgggttgttcgaggacactaacctttgcgcgattcatgcaaagagggttaccattatgcctaaggatattcagcttgctcgcaggatcagaggcgagagggcttaggttggttagggttctgattttgaaggaggcgagacggcttagaaaaagaatcatctatctatgtgtttatgtgggcatgtgaaacgtgaatctgtttgcttttgtaattatctcgtgtttcttagacaagttaattaaaatgctatgttggttctcggaaaaaaaaaaaaaaa

SEQ ID NO: 6436 - protein, 136 aa, Glycine max; identical to SEQ ID NO: 588
  misc_feature: Ceres CLONE ID no. 1236080
  misc_feature: Ceres CDNA ID no. 40351696
  misc_feature (58)..(134): Pfam Name: Histone PFAM Desc: Core histone H2A/H2B/H3/H4

SEQ ID NO: 6437 - DNA, 1391 bp, Glycine max
  misc_feature: Ceres CLONE ID no. 1236232
  misc_feature: Ceres CDNA ID no. 25446809
  CDS (142)..(1233): REFERENCED BY SEQ ID NO: 6438
accaggtctttaatccgctagaactagaatatgtgtttggcgccactagcctctgctgtcacttgtgagcggtgaatgcaaatttcagttctcaacaacgcactgaaagaagagagtgcgtattagcaccgtgacctaacaatggcggagacgaaccatcatatggacatcgacagcgacgaccacacttacaccgcgaggcccgacaaggctaaaagtgtcgtcgtcgccagcaaccctgccgccgccggcaaggccattccgtgggtcgaaaaatatcgccctctgtccctcgacgacgtcgccgctcatcgtgacattgtcgataccattgataggctgaccactgagaacagattgccccatcttctgttgtatggccctcctggcacgggcaaaacatcaacgattctcgctgtggcacgcaaactatatggttcacagtaccaaaatatgattttggagctcaatgcatcagatgatagaggaattgatgtcgtgcgacagcagattcaagattttgctagcactcagagcttatcatttggtgtcaagtcctctgtaaaacttgtattgttggatgaagcagatgccatgacaaaggatgcccaatttgcattacgtagagtgattgagaaatatacaaaaagcactaggtttgcacttatctgtaatcatgtaaacaagattattcccgcacttcaatcaagatgcactcggtttcggtttgcccctcttgatgccgtccatgtcactgaaagactgaaacatgttatcaaggctgaagggcttgatgttgaagacagtggcttagcagctcttgttcggcttagcaatggtgatatgagaaaggctttgaatattcttcagtcaacacatatggcttctcagcagataacagaagaaactgtttacctgtgcactggaaatccattgcccaaagacattgagcaaatatcttactggcttctaaatgaacaatttgcagatagctttaaaagaatagatgaaatgaagacaaggaaagggttggccctggttgatattgtcagagaagtgacattgtttgtttttaagattaagatgccttcagctgttcgagtacagttgatgaatgatttagcggatatagagtacagattaagttttgggtgcaacgataagcttcagctcggatcggttattgcttctttttcacgtgctagatctgcactggttgcggctgctacgtagcctacttctgaaaatttgctttcacatactactaggcctggcttgtcactactgagaatgggattgagaggatctcaatttgtgtaaagatagtaactgtgttaatcttttttaacttaagatgaattttaaactttcaagtaaaaaaaaaaaaaaaa

SEQ ID NO: 6438 - protein, 363 aa, Glycine max
  misc_feature: Ceres CLONE ID no. 1236232
  misc_feature: Ceres CDNA ID no. 25446809
  misc_feature (75)..(97): Pfam Name: AAA_3 PFAM Desc: ATPase family associated with various cellular activities
  misc_feature: Homolog of GI Number: 50913285 NR Desc: putative replication factor C 36kDa subunit
  misc_feature: Homolog of GI Number: 21436375 NR Desc: putative replication factor C
  misc_feature: Homolog of GI Number: 10798790 NR Desc: replication factor C 36kDa subunit
  misc_feature: Homolog of GI Number: 30913281 NR Desc: Activator 1 36 kDa subunit
  misc_feature: Homolog of GI Number: 51711348 NR Desc: replication factor C 5
  misc_feature: Homolog of GI Number: 6677723 NR Desc: replication factor C 5 isoform 1
  misc_feature: Homolog of GI Number: 62658979 NR Desc:  similar to Activator 1 36 kDa subunit
  misc_feature: Homolog of GI Number: 73995285 NR Desc:  similar to replication factor C 5 isoform 1
  misc_feature: Homolog of GI Number: 47115239 NR Desc: RFC5
  misc_feature: Homolog of GI Number: 49117945 NR Desc: MGC80325 protein
MAETNHHMDIDSDDHTYTARPDKAKSVVVASNPAAAGKAIPWVEKYRPLSLDDVAAHRDIVDTIDRLTTENRLPHLLLYGPPGTGKTSTILAVARKLYGSQYQNMILELNASDDRGIDVVRQQIQDFASTQSLSFGVKSSVKLVLLDEADAMTKDAQFALRRVIEKYTKSTRFALICNHVNKIIPALQSRCTRFRFAPLDAVHVTERLKHVIKAEGLDVEDSGLAALVRLSNGDMRKALNILQSTHMASQQITEETVYLCTGNPLPKDIEQISYWLLNEQFADSFKRIDEMKTRKGLALVDIVREVTLFVFKIKMPSAVRVQLMNDLADIEYRLSFGCNDKLQLGSVIASFSRARSALVAAAT

SEQ ID NO: 6439 - DNA, 1121 bp, Glycine max
  misc_feature: Ceres CLONE ID no. 1236734
  misc_feature: Ceres CDNA ID no. 25446526
  CDS (255)..(773): REFERENCED BY SEQ ID NO: 6440
agagcagcagaacgtgctagaactagcacgatatttacaaattacaacccctgcattttcattagtccagttcagttattcatcataattcattttaccatcaaaaatcaaattccattcagattcaattaaagcgaaaagtgtcagaaaaacgaacccttttttatttgatatgacacattaataattgttatagttaggatatagaaatagagaataataataaaagaaaaagaaaagaagagaaagatcatatgatggactcagaaatggtggaagcagaggcatcatcatcgcagcctcagccgcaggcatcgagttccggccagaacggcgtcgttcgcgatttgctcacattggctcgtcagctcatcactcaaggcaaaccttcccaggccctccaagctgtggttgtagcaatgaagactaaaggtggtgatgaagctgtttttcattccttgcatcgtgcccgcgaggtgtatagaagtagactgcaagagaatgctgcagttgatcaactggcttctctgtttgctgagtgtgccattgctgaagctgagcctgtagtgatcgaaccacctgccaataacattaccaccccctcaattagtccagaacctgatgctcatgggacttccatactggcagaaagtggcaggatgcaagtagtgttggatgcggtctctgatggaagcagcttcatctgtttgaagtgtggaggccttgttagtaaccatcgcaaagacgagcactatgcatactggtgttgttaaggttgcctatcttccatggtgatgctacgtttttatgtgcatcgttaagatggactgatggaatgagcgaacttcttagttctgtctgccttatactttgatctttggaaaaatcatgctactgtcatagtggaaagagctgccaaactttgtcaattgaagacttcaatgctgtaaaccataccaatcaatacagaattgtatgagtaacacttgggatgtctatgttgattccaatgtgttggttactatttgggccaacagtaccttatgtaatttttgggatattttttgcgtttcttttgagttgatatgtttaaataataaattacaaaaaaaaaaaaaaaa

SEQ ID NO: 6440 - protein, 172 aa, Glycine max
  misc_feature: Ceres CLONE ID no. 1236734
  misc_feature: Ceres CDNA ID no. 25446526
MMDSEMVEAEASSSQPQPQASSSGQNGVVRDLLTLARQLITQGKPSQALQAVVVAMKTKGGDEAVFHSLHRAREVYRSRLQENAAVDQLASLFAECAIAEAEPVVIEPPANNITTPSISPEPDAHGTSILAESGRMQVVLDAVSDGSSFICLKCGGLVSNHRKDEHYAYWCC

SEQ ID NO: 6441 - DNA, 1152 bp, Glycine max
  misc_feature: Ceres CLONE ID no. 1236745
  misc_feature: Ceres CDNA ID no. 25446874
  CDS (44)..(949): REFERENCED BY SEQ ID NO: 6442
atctgttactaatcatcaaacaagtgaagtgaagagaaaagaaatggggagtctggtgtaccaagtaatttcctccgcggcacttctgacgctgggcatgtaccatctgataagcaccacgcgcaactacctcaaatcgcctcacgcctacgccgccaaacccttccaccccttcccctacccccgccgcctcccgctctacctaatcatactctctctcctcctcgccatggcccaccaccttctcgtctccgccgacgccgatccccttgttcgcggcgccaccgccgtccaccgcatcacctccctccaatccgccgccacgctctttttattcctcctcctcgccttcgccctcctcatcgcggacgcctcccccgctctcctccccctctcccccgacctctccttcgccctcgcctccgtcctcttcctcctccacgccgccctcgcctccgcccgcgccgccctccagacctccgccatcgaggccaaatgcctctccgtctctgctaacctctcccacctctccgccctcctctgcctcctcctcgccgcgctcccgcgcctcttccccgccgacgccgccctctccgccaccttctgcctccgcgggctctgggctctccagagcggcctctccctctacgccgacgccttcatccccgagggctgccaccgcctcctcgacgtcaccagcggcgtcgagggctccacacagtgcgatctggacgagtccaagctccgcgccgtcgccatccttgatctcgcattcttgatccacgccatcatcgtggtcctaatcgtgctcctcacttatgccctcttcgccagaagcttcggcgggaggaggctcggatcctatgaggcgctccccaccgcggcttcccctacggaccccaaccacagccttattcagatgaaggccttgactggcacccaggcttgaatctttttttcgttcattatattatttatttatttagaatttttgttatctatcgttatgtgatcagaatgtagggacggactttgtgaatacaacatagtattcctgtttagttagtcagatgaatccttatgcagttccaattttgttttgttttgttttgtttgttactgctttgcattttcctaaaaaaaaaaaaaaaa

SEQ ID NO: 6442 - protein, 301 aa, Glycine max
  misc_feature: Ceres CLONE ID no. 1236745
  misc_feature: Ceres CDNA ID no. 25446874
  misc_feature: Homolog of GI Number: 12018147 NR Desc: vegetative cell wall protein gp1
  misc_feature: Homolog of GI Number: 25056007 NR Desc: extensin
  misc_feature: Homolog of GI Number: 60678627 NR Desc: plus agglutinin
  misc_feature: Homolog of GI Number: 188864 NR Desc: mucin
  misc_feature: Homolog of GI Number: 6523547 NR Desc: hydroxyproline
  misc_feature: Homolog of GI Number: 21992 NR Desc: extensin
  misc_feature: Homolog of GI Number: 41400384 NR Desc: plus agglutinin
MGSLVYQVISSAALLTLGMYHLISTTRNYLKSPHAYAAKPFHPFPYPRRLPLYLIILSLLLAMAHHLLVSADADPLVRGATAVHRITSLQSAATLFLFLLLAFALLIADASPALLPLSPDLSFALASVLFLLHAALASARAALQTSAIEAKCLSVSANLSHLSALLCLLLAALPRLFPADAALSATFCLRGLWALQSGLSLYADAFIPEGCHRLLDVTSGVEGSTQCDLDESKLRAVAILDLAFLIHAIIVVLIVLLTYALFARSFGGRRLGSYEALPTAASPTDPNHSLIQMKALTGTQA

SEQ ID NO: 6443 - DNA, 689 bp, Glycine max
  misc_feature: Ceres CLONE ID no. 1236967
  misc_feature: Ceres CDNA ID no. 25445485
  CDS (109)..(537): REFERENCED BY SEQ ID NO: 6444
acgacactccttttttagggttagggtattgcactgcggctgctacttcggctccatcttctccgatctcctcaaactctatcagcgcagaaccaagcctctatcaccatggggaagacacatggaatgggagctgcccgcaagctgaagtctcaccgtaggagacaaaggtgggctgacaagtcatacaaaaagtctcatctgggaaatgaatggaagaagccttttgctggttcatcccatgccaagggtattgttcttgaaaagattggtattgaggctaagcagcccaactctgccattcgaaaatgtgccagggttcaactcatcaaaaatgggaagaagattgctgcatttgtgccaaatgacggttgcttaaattatattgaagagaatgatgaagtcttgatagctggatttggacgaaaaggtcatgccgtgggtgatattcctggagtcaggttcaaggtcgtgaaggtttctggtgtgtctctcctggcccttttcaaggagaagaaggagaagcctaggtcttaagcttgtgggtcgtgtcctctctatagtctatccaaaaaattattatgaattttgcttcttgagactggatgagttctctgaacaattttgtatctctctaatagtaatttttctgaaacttaatttggttcgtcgcaaaaaaaaaaaaaaaa

SEQ ID NO: 6444 - protein, 142 aa, Glycine max; identical to SEQ ID NO: 3802
  misc_feature: Ceres CLONE ID no. 1236967
  misc_feature: Ceres CDNA ID no. 25445485
  misc_feature (9)..(141): Pfam Name: Ribosomal_S12 PFAM Desc: Ribosomal protein S12
  misc_feature: Homolog of GI Number: 6716785 NR Desc: 40s ribosomal protein S23
  misc_feature: Homolog of GI Number: 1362041 NR Desc: ribosomal protein S23.e
  misc_feature: Homolog of GI Number: 50919443 NR Desc: 40S ribosomal protein S23
  misc_feature: Homolog of GI Number: 21536723 NR Desc: putative 40S ribosomal protein S23
  misc_feature: Homolog of GI Number: 6682246 NR Desc: putative 40S ribosomal protein S23
  misc_feature: Homolog of GI Number: 11121260 NR Desc: 40S ribosomal protein S23
  misc_feature: Homolog of GI Number: 30025641 NR Desc: 40S ribosomal protein S23
  misc_feature: Homolog of GI Number: 55233795 NR Desc: ENSANGP00000012229
  misc_feature: Homolog of GI Number: 50344512 NR Desc: S23e ribosomal protein
  misc_feature: Useful for increasing chlorophyll and photosynthetic capacity
  misc_feature: Useful for making plants with altered leaf shape eg curled leaves
  misc_feature: Useful for making shorter plants
  misc_feature: Useful for sterility

SEQ ID NO: 6445 - DNA, 2109 bp, Glycine max
  misc_feature: Ceres CLONE ID no. 1237002
  misc_feature: Ceres CDNA ID no. 40041399
  CDS (3)..(1925): REFERENCED BY SEQ ID NO: 6446
atatgctgcgttacataaacaacatcatacaacattatattcagttgttctttctaatggaggtactagagcatcccttattggcagagatacccgtattagccgaaccatgcatggatcaaagcgtggacaaaaccaacaacgaggttggagtgttatccaaaacaagcatatcatctcatgacttttgcaaccactctgagtccttcaagaagctcgtggagatgggtttgccgtgtaatgaatcagttgaggaaaagctgcattggttgcggttacaaatcataggtaatgaagcagagttcgattccccatttggaaagcgaaaagttgtctatgctgatcacactgcttcaggccgcagccttcactacaatgagaatttcatcatcaaacaccttcttcctttctatggtaacacgcacacatgtgacagttatgtgggaagcaggacaacaaaaatggtacacgaagcaagtgagtacattaaaaagtgtttaggtggtggagaagatgatgcacttatattatgtggctcgggcacaactgcagctatcaagaggcttcaagaagtgatgggaatcgctgtgccatctgttttgagggaaagggttttgaagagccttagcacagaagaaagatgggtggtttttgttggacctcatgagcaccattcaaacctcctttcttggaggcaaagcttggctatggtggtagagattggtcttgatgataaagggttgcttgatatggatgctctaaagctacaacttgaggcctacaaagacaccaatcgacccatgttgggatctttctcagcttgtagcaatgtcacgggaatctactcagatacacgagcaattgctcagcttcttcatcggtacaaagcctttgcatgctttgatttcgcagcaagtggtccatatgtggagattgacgtgaggtcaggggagagtgatgggtatgatgcagtgttcctgagtccacataagtttcttggtggtcctgactctcctggtgtgctcctcatgaacaaggccctgtacctgctaggatcttcaccaccgtccacttgtggaggtggaaccgtgacttatgtcaatgccttcaatgaacaggatacattatacttggagaacatagaggaaagggaaactggggggacgcctccaataatccagacagtgagagcagcattggcattttgggtgaaggaatatataagctatgaagatattgaaaaacgggaacaactgtacattaacaaggcactcgagagacttggttcaaaccccaacattgaggttctaggaaacttaaaggccaagagacaagctatattgtcatttctgatatactctaccaccaccaattcttgctcagctggtgagtggagtgatggtaacaaagaaaatgaaggggagcttgatttgtgggcagaaacggggaaccaaagaggtaaaccacttcatggtccttttgttgcagcattgctcaatgacctctttggaattcaagctcgaggagggtgtgcttgtgctggaccttatggacacgaattgctccacatcaacaagtctcattcacttgccattagatcagcagttcaagagggctatattggagtaaagccagggtggactcgagtaagttttccatactacatgagtgaagaggattttgagtacattctgaaagccatagagtttatagctgtgtatggccaacgattcattcctctatatagtttcaatttgataaatggcagctggagattgaagacacagaaatttgaggcacaaaccaaggaaggcactgacaaatttgaggtggctaaatgtgttgctagtagcctccgcaaattcccttctcagggtatactccaggaggaagtggatcccaatatcttctgctttagaatttaaatttattgtcaataataccaaacaccatttgttccatgtacaaatatttcacgagactttccattgcttttacaccatgattgggatctacatttcctggcaccccttgctggtttctatactttaaaaaattaaaatagtgaatgactggtattggatttagaaatgaaaaaaaaaaaaaaaa

SEQ ID NO: 6446 - protein, 622 aa, Glycine max
  misc_feature: Ceres CLONE ID no. 1237002
  misc_feature: Ceres CDNA ID no. 40041399
  misc_feature: Homolog of GI Number: 77553238 NR Desc: phage head
  misc_feature: Homolog of GI Number: 34910830 NR Desc: putative aminotransferase
  misc_feature: Homolog of GI Number: 15805069 NR Desc: aminotransferase
  misc_feature: Homolog of GI Number: 71368898 NR Desc: aminotransferase
  misc_feature: Homolog of GI Number: 83859040 NR Desc: aminotransferase
  misc_feature: Homolog of GI Number: 66776891 NR Desc: aminotransferase
  misc_feature: Homolog of GI Number: 56420277 NR Desc: aminotransferase
  misc_feature: Homolog of GI Number: 72004445 NR Desc:  similar to putative cytoplasmic protein of ancient origin
  misc_feature: Homolog of GI Number: 72136101 NR Desc:  similar to putative cytoplasmic protein of ancient origin
  misc_feature: Homolog of GI Number: 72004449 NR Desc:  similar to putative cytoplasmic protein of ancient origin
MEVLEHPLLAEIPVLAEPCMDQSVDKTNNEVGVLSKTSISSHDFCNHSESFKKLVEMGLPCNESVEEKLHWLRLQIIGNEAEFDSPFGKRKVVYADHTASGRSLHYNENFIIKHLLPFYGNTHTCDSYVGSRTTKMVHEASEYIKKCLGGGEDDALILCGSGTTAAIKRLQEVMGIAVPSVLRERVLKSLSTEERWVVFVGPHEHHSNLLSWRQSLAMVVEIGLDDKGLLDMDALKLQLEAYKDTNRPMLGSFSACSNVTGIYSDTRAIAQLLHRYKAFACFDFAASGPYVEIDVRSGESDGYDAVFLSPHKFLGGPDSPGVLLMNKALYLLGSSPPSTCGGGTVTYVNAFNEQDTLYLENIEERETGGTPPIIQTVRAALAFWVKEYISYEDIEKREQLYINKALERLGSNPNIEVLGNLKAKRQAILSFLIYSTTTNSCSAGEWSDGNKENEGELDLWAETGNQRGKPLHGPFVAALLNDLFGIQARGGCACAGPYGHELLHINKSHSLAIRSAVQEGYIGVKPGWTRVSFPYYMSEEDFEYILKAIEFIAVYGQRFIPLYSFNLINGSWRLKTQKFEAQTKEGTDKFEVAKCVASSLRKFPSQGILQEEVDPNIFCFRI

SEQ ID NO: 6447 - DNA, 1113 bp, Glycine max
  misc_feature: Ceres CLONE ID no. 1237022
  misc_feature: Ceres CDNA ID no. 24726525
  CDS (72)..(941): REFERENCED BY SEQ ID NO: 6448
accatttctccaataattctcttctcttccctgcatgtctcaccctcttaaacactacttcttcctctttcatggctacccatttgcaggtatcagaaggtgcacccactgaagcattcgacccttctccttctcttgcaattggagaatacgacctcttaatcgttggtcctgggattcttggtcgtttggtcgctcacaattggcgccaggaatatcctggttgcaaagtttttggacaaacagcaaccactaatcatcatcaagagttaactgaaattggtatcaatccgtctttgaagtggaccaaagcctcctccttcaaatttccctatgtcattttctgtgctcccccttaccaatccccggactaccttggtgatcttaggctggctgcatcatgctggaatggtgaaggtgctttgctgtttacatcaagctctgctccttatgattgtaatgataatggattgtgtcatgaggataatccagtggtgccaatgggtaggagccccaggactgatgtccttctaaaagctgaaaagatagtgctggagtttggtggttctgttttaagactatctggactttataaagtagataaaggtgcacatgcttattggttagataaggggattgtcgaatctcgtcctgatcacatcctgaatcttatacactatgaggatgcggcttccctctctgttgcaattttgaagaaacaatttcatgggcggattttcttgggttgtgataatcatcccttatccaggcaagaagtgatggatttggtttacaaaagtgggaaatttagtaaaaagtttgagaaatttacaggaaccgatgatcctctaggcaagagattgaacaactctagaacatgccaggaagtagggtggcagcccaagtactctagctttgctcatttccttgagaccatctgattcactcagtattttgtccatgatgatcattaatcagttgttaaatgaaagcagaaacactaaattatcaataatattttttgcatgtaaatccatacttggcaagattttttagccttgctgtggtggggtaacaaaaatatgatgggttcgcagaaaaaaaaaaaaaaaa

SEQ ID NO: 6448 - protein, 289 aa, Glycine max
  misc_feature: Ceres CLONE ID no. 1237022
  misc_feature: Ceres CDNA ID no. 24726525
  misc_feature: Homolog of GI Number: 34914690 NR Desc: P0560B06.4
MATHLQVSEGAPTEAFDPSPSLAIGEYDLLIVGPGILGRLVAHNWRQEYPGCKVFGQTATTNHHQELTEIGINPSLKWTKASSFKFPYVIFCAPPYQSPDYLGDLRLAASCWNGEGALLFTSSSAPYDCNDNGLCHEDNPVVPMGRSPRTDVLLKAEKIVLEFGGSVLRLSGLYKVDKGAHAYWLDKGIVESRPDHILNLIHYEDAASLSVAILKKQFHGRIFLGCDNHPLSRQEVMDLVYKSGKFSKKFEKFTGTDDPLGKRLNNSRTCQEVGWQPKYSSFAHFLETI

SEQ ID NO: 6449 - DNA, 801 bp, Glycine max
  misc_feature: Ceres CLONE ID no. 1237333
  misc_feature: Ceres CDNA ID no. 36531879
  CDS (17)..(625): REFERENCED BY SEQ ID NO: 6450
gaaacaaaaggaaaggatgaagcaatcaaaggatccgttcgaagcagcgttcgaggaatcgccgccagaatccccaacggctacggagacagaggcagagacgcaaaaccctactcctcctcctcctcctcctcctcctccttcttctttttctggtgttgctgtagtagcactgaatccacaacagcctcagaatcagaaagtgaagaacaaagacaatgaggaagaggaggaggaggaggacaacatggacgtggagctcgccaagctcccttccaccggcgaccctcacaaaatggccaagatgcaggccattttgtcgcaattcaccgaagagcagatgagtcgatacgagtccttccggagggctggctttcagaaagccaacatgaaaaggttattggctagcatcactgggacccagaaaatttctgtgcccatgacgattgttgtatcgggcattgcaaaaatgtttgttggtgaagttgttgaaacagctagaatagttatgaaagagaggaaggaatctggaccaatccggccttgtcatctgagagaagcatatagacgactaaagcttgaaggaaaagtctttaagagatcatcctcgaggctcttccggtagatggaccaaatatgaatattgtgtgcatcagcatcactagtttgctatagtggcttgcgggtagattaaattttgtagtctgcaccttcttgttttcaacatcttgatgttcatttaactggagctagtgaatgtgaatcaatattagaagtaaattgggaaaaaaaaaaaaaaaa

SEQ ID NO: 6450 - protein, 202 aa, Glycine max
  misc_feature: Ceres CLONE ID no. 1237333
  misc_feature: Ceres CDNA ID no. 36531879
  misc_feature (97)..(186): Pfam Name: TAFII28 PFAM Desc: hTAFII28
  misc_feature: Homolog of GI Number: 56202287 NR Desc: transcription initiation factor IID p30 beta chain
  misc_feature: Homolog of GI Number: 34911174 NR Desc: B1144G04.34
  misc_feature: Homolog of GI Number: 8778998 NR Desc: Contains similarity to PRO2134 mRNA from Homo sapiens gbAF118094.
  misc_feature: Homolog of GI Number: 15223727 NR Desc: transcription initiation factor IID
  misc_feature: Homolog of GI Number: 66511593 NR Desc:  similar to ENSANGP00000021707
  misc_feature: Homolog of GI Number: 60470042 NR Desc: transcription initiation factor TFIID subunit
  misc_feature: Homolog of GI Number: 57094432 NR Desc:  similar to Transcription initiation factor TFIID subunit 11
  misc_feature: Homolog of GI Number: 73972618 NR Desc:  similar to Transcription initiation factor TFIID subunit 11
  misc_feature: Homolog of GI Number: 60827031 NR Desc: TAF11 RNA polymerase II TATA box
  misc_feature: Homolog of GI Number: 54695680 NR Desc: TAF11 RNA polymerase II
MKQSKDPFEAAFEESPPESPTATETEAETQNPTPPPPPPPPPSSFSGVAVVALNPQQPQNQKVKNKDNEEEEEEEDNMDVELAKLPSTGDPHKMAKMQAILSQFTEEQMSRYESFRRAGFQKANMKRLLASITGTQKISVPMTIVVSGIAKMFVGEVVETARIVMKERKESGPIRPCHLREAYRRLKLEGKVFKRSSSRLFR

SEQ ID NO: 6451 - DNA, 1043 bp, Glycine max
  misc_feature: Ceres CLONE ID no. 1237444
  misc_feature: Ceres CDNA ID no. 40351697
  CDS (353)..(868): REFERENCED BY SEQ ID NO: 6452
atattttcttgtgtcttgacgaacctaaacaaacacaaataccgtctcccatcattccttacagtttcaaacacttgtttttcttctctcttctccttttttttctgtgtggatctacacccactaagcatctatggataagatgagtggttgatgagctattatgattccacatcagctgagtatatgaccaaattatcctttataataactttgccactatagtggggctatagcgcttctgctgcattatggaatttcttggatctgcaattgtgactccgctgttgcggctgctatgggaatttcttggatctccaattgaactttgaatgttacccctattctgaaaatggaaaacaatcatagtgcagctggaacacaagatagttctatgatgaagtctgttgatcaaagagtacgttcaaaagcgcgtaatgacataatgactcgacgtctgaagaatcgagagagacaacgaagatatagggcacgtaagcgtctagaagccgaaacaaagaagtcatttgttgtagaagagacaccagctgtgcaagtagaactacaaccaaacaggaaccacaacaacaacaacaacttcgtcacccgtatctattgtaaacgagattggaaaaaggatgcaagacgagcccatgtttttaagcatcaacaaatgaatggatctattgatcctccaaccataattagtgtacctgaggtgacatgcttagccattggaaacaagccagaatcagttccagagagggaaattcagtctggatcttctggtgttgttagtactgatactcctagagtggtgctgggtcgaagagattggaaagcagaagctagaagaaagaaaaactagttgactcttcatttcttcttttaaaaaaagtatttatcccagtggactttctgttgtattatagacattatataatgtaaagaatgctggacaatcgctgtttcattacctggcaagctttgaaattataaacgcggaagaaaatctgtcccttttactaaaaaaaaaaaaaaaa

SEQ ID NO: 6452 - protein, 171 aa, Glycine max
  misc_feature: Ceres CLONE ID no. 1237444
  misc_feature: Ceres CDNA ID no. 40351697
MENNHSAAGTQDSSMMKSVDQRVRSKARNDIMTRRLKNRERQRRYRARKRLEAETKKSFVVEETPAVQVELQPNRNHNNNNNFVTRIYCKRDWKKDARRAHVFKHQQMNGSIDPPTIISVPEVTCLAIGNKPESVPEREIQSGSSGVVSTDTPRVVLGRRDWKAEARRKKN

SEQ ID NO: 6453 - DNA, 860 bp, Glycine max
  misc_feature: Ceres CLONE ID no. 1237446
  misc_feature: Ceres CDNA ID no. 25446728
  CDS (43)..(627): REFERENCED BY SEQ ID NO: 6454
ctaatctcagactgttacttgtttgtcgctggcaccaggtgaatggaaggaagtggcggtggcggtgcttcaccgtctgcaccggtgaagcagtatttgcacgatttctcgaagctgtttcagtactatctggataaatccactccacattccacgtacagatggattgggactttcgtgatagcatccatctacgttttgcgcgttgtttatgtgcagggtttttacattgtctcttatggactcggaatctaccttctgaatctcttgattggttttctctcccctttggttgatcctgagctcgatccctccgactcccctttgcttccaaccaaaggctccgatgagttcaaacccttcattcgccgccttccggagttcaagttctggtattctttcaccaaggctctctgcatagcgtttgtgatgacctttttttccctgtttgatgttcctgtcttttggcctatattactctgttactggtttgttctctttgtccttacaatgaggcgccaagttgctcacatgatcaaatacaaatatatccccttcaacttggggaagcagaagtatagcggtaataaatcttctgcaaggagcagtagctctcgtgcagactgaaacttgtctctcatgattggaagatctacttagttaggttttctgaacattcaggctagtcaatgccccccttttctatgaaagaatttgtattcatggtattatggatgtcagtatgcattatgctgttacggaaaatcttaatgtccactcgttttattatacatgaagacgtgctaatattgatagtgaatctcattgtcagtgcacgttattgaaaaaaaaaaaaaaaa

SEQ ID NO: 6454 - protein, 194 aa, Glycine max
  misc_feature: Ceres CLONE ID no. 1237446
  misc_feature: Ceres CDNA ID no. 25446728
  misc_feature (2)..(182): Pfam Name: Rer1 PFAM Desc: Rer1 family
  misc_feature: Homolog of GI Number: 21617987 NR Desc: AtRer1B
  misc_feature: Homolog of GI Number: 21360413 NR Desc: At2g21600/F2G1.13
  misc_feature: Homolog of GI Number: 24030322 NR Desc: putative AtRer1A protein
  misc_feature: Homolog of GI Number: 53792604 NR Desc: putative endoplasmatic reticulum retrieval protein Rer1B
  misc_feature: Homolog of GI Number: 34894094 NR Desc: putative Rer1A protein
  misc_feature: Homolog of GI Number: 50508264 NR Desc: putative AtRer1A
  misc_feature: Homolog of GI Number: 50943925 NR Desc: putative endoplasmatic reticulum retrieval protein Rer1B
  misc_feature: Homolog of GI Number: 21554351 NR Desc: putative integral membrane protein
  misc_feature: Homolog of GI Number: 30682033 NR Desc: RER1C protein
  misc_feature: Homolog of GI Number: 25411844 NR Desc: probable integral membrane protein
MEGSGGGGASPSAPVKQYLHDFSKLFQYYLDKSTPHSTYRWIGTFVIASIYVLRVVYVQGFYIVSYGLGIYLLNLLIGFLSPLVDPELDPSDSPLLPTKGSDEFKPFIRRLPEFKFWYSFTKALCIAFVMTFFSLFDVPVFWPILLCYWFVLFVLTMRRQVAHMIKYKYIPFNLGKQKYSGNKSSARSSSSRAD

SEQ ID NO: 6455 - DNA, 423 bp, Glycine max
  misc_feature: Ceres CLONE ID no. 1237449
  misc_feature: Ceres CDNA ID no. 36705144
  CDS (1)..(261): REFERENCED BY SEQ ID NO: 6456
agggtttggttattagggttttcgctcaccggtgtgcagtcgagcccccgaagaaaaagcgaaaatgccgtcgcacaagacattcagaatcaagaagaagttggcgaagaagatgaggcagaacaggcctatcccctactggatccgcatgaggaccgacaacaccatcaggtacaacgcgaagcgccgtcactggcgtcgcaccaagcttggattctgaggtgcttgctttgcctcggttctgtttatccaattaattagtgttttattttcttgagccaaaaacaatgctttggagattttaatattttgcattttgttccaagactatattgtgtaaggaacttattgtagttcagactaatggtggtgttggtcacctttttttaaaagtattttggaattccaaaaaaaaaaaaaaaa

SEQ ID NO: 6456 - protein, 51 aa, Glycine max; identical to SEQ ID NO: 2406
  misc_feature: Ceres CLONE ID no. 1237449
  misc_feature: Ceres CDNA ID no. 36705144
  misc_feature (9)..(51): Pfam Name: Ribosomal_L39 PFAM Desc: Ribosomal L39 protein
  misc_feature: Homolog of GI Number: 50915614 NR Desc: putative 60S ribosomal protein L39
  misc_feature: Homolog of GI Number: 50915618 NR Desc: 60S RIBOSOMAL PROTEIN L39
  misc_feature: Homolog of GI Number: 55773789 NR Desc: 60S ribosomal protein L39
  misc_feature: Homolog of GI Number: 57471714 NR Desc: ribosomal protein L39
  misc_feature: Homolog of GI Number: 21618028 NR Desc: putative ribosomal protein L39
  misc_feature: Homolog of GI Number: 24266968 NR Desc: ribosomal protein L39
  misc_feature: Homolog of GI Number: 66934980 NR Desc: ribosomal protein L39
  misc_feature: Homolog of GI Number: 67084113 NR Desc: ribosomal protein L39
  misc_feature: Homolog of GI Number: 55234875 NR Desc: ENSANGP00000020220
  misc_feature: Homolog of GI Number: 62087734 NR Desc: ribosomal protein L39 variant

SEQ ID NO: 6457 - DNA, 825 bp, Glycine max
  misc_feature: Ceres CLONE ID no. 1237452
  misc_feature: Ceres CDNA ID no. 29191403
  CDS (59)..(568): REFERENCED BY SEQ ID NO: 6458
taatcgaaaagttttgcatttgtcttctttaacttgtcactctctctctctctctctaatggcttcattttctatcacctcctcgcctcccacccttcacaaagccactatcaccgacccttcttcttcttcttcccacgccttccctcaccgttctcccttcgttttacgcatgccccaccaaccccatcgccctcaaactcctcttgttttgcccaagattcaatctttgcgcaacgaaactagagctattccagttaccaaagacctgtgggataattcaattctgaaaagtgaaatcccagtccttgttatattctatgcaaattggtgcggcccgtgcaggatggttcaccggataatagatgagatcgcaacagagtatgctgggaaactcaaatgttttatagtcaacacagacactgacatgcaaattgctgaggactatgaaattaaggctgtaccagtggttttgatgtttaaaaatggcaagaaatgtgattctgtaattggtaccatgccaaaggagttttatgtggctgctatagagggggtgctcaagccctaatcatggatcagtgcaggcattgatgagttcttgtacatattttgtttccttttttcccataataggcatggtcaagtgagactgcttctttcgtaatgaatgttccactttcaatagctatatttcctagggaaaatcttcttcagctatagagaatatcatagttgaaatttaagtgttcctttggtacttgattcgaacagttgttattcggaagctaagatttgatttaccttgtgctaaaaaaaaaaaaaaaa

SEQ ID NO: 6458 - protein, 169 aa, Glycine max
  misc_feature: Ceres CLONE ID no. 1237452
  misc_feature: Ceres CDNA ID no. 29191403
  misc_feature (63)..(168): Pfam Name: Thioredoxin PFAM Desc: Thioredoxin
  misc_feature: Homolog of GI Number: 4335723 NR Desc: putative thioredoxin M
  misc_feature: Homolog of GI Number: 51971765 NR Desc: putative thioredoxin M
  misc_feature: Homolog of GI Number: 6539612 NR Desc: thioredoxin m3
  misc_feature: Homolog of GI Number: 51969098 NR Desc: putative thioredoxin M
  misc_feature: Homolog of GI Number: 50924364 NR Desc: OSJNBa0084A10.3
  misc_feature: Homolog of GI Number: 4138290 NR Desc: thioredoxin M
  misc_feature: Homolog of GI Number: 68611219 NR Desc: OSJNBa0084A10.3
  misc_feature: Homolog of GI Number: 50926654 NR Desc: OSJNBa0074L08.22
  misc_feature: Homolog of GI Number: 840745 NR Desc: thioredoxin m
  misc_feature: Homolog of GI Number: 840747 NR Desc: thioredoxin m
MASFSITSSPPTLHKATITDPSSSSSHAFPHRSPFVLRMPHQPHRPQTPLVLPKIQSLRNETRAIPVTKDLWDNSILKSEIPVLVIFYANWCGPCRMVHRIIDEIATEYAGKLKCFIVNTDTDMQIAEDYEIKAVPVVLMFKNGKKCDSVIGTMPKEFYVAAIEGVLKP

SEQ ID NO: 6459 - DNA, 789 bp, Glycine max
  misc_feature: Ceres CLONE ID no. 1237514
  misc_feature: Ceres CDNA ID no. 29191404
  CDS (85)..(621): REFERENCED BY SEQ ID NO: 6460
gcaaacccaccactttgtgcttgtgtgtgcaagaaaggtaaaagctttcacacacccttttcacttctcaaaaaacaaaaggccatggctggttcctctgcttctcttttgttccttttccttctctttggattctcagcagctaaggagctattggttggaggcaaaatagatgcttggaagattccatcttctgaatcagataccctcaatcaatgggctgaaaggtctcgtttcagagtgggcgatcatctagtgtggaaatatgagagtgggaaggactcagtgttggaagtaacaagggaagattatgctaattgcagcacatccaaccccatcaaagagtacaatgatggaaacactaaggtgaagcttgaacatcctggtccattttacttcatcagtggatcaaaggggcactgtgagaaggggcaaaagttgattgtggtggtaatgtctccaaggcacacattcactgccattatttctccagcaccaacaccttctccagcagagttcgagggtcccgctgttgctcctactagcagtgccacaacgtttcaagttggccttctcactgctcttggagttttggctatttatgtgggttttctcatgtaaatgagactcacccccatctatgtatgtgtgttttctcatgtgaatgagatttacccccatctcatggtgaagaagttattgtgatttgtggatctattcttttgtgtagtgaatatataatatttttcaaataatcatatatcaaaaaaaagaaaaaaaaaaaaaaaa

SEQ ID NO: 6460 - protein, 178 aa, Glycine max
  misc_feature: Ceres CLONE ID no. 1237514
  misc_feature: Ceres CDNA ID no. 29191404
  misc_feature (32)..(117): Pfam Name: Cu_bind_like PFAM Desc: Plastocyanin
  misc_feature: Homolog of GI Number: 51971833 NR Desc: early nodulin
  misc_feature: Homolog of GI Number: 34146796 NR Desc: At2g25060
  misc_feature: Homolog of GI Number: 34395673 NR Desc: Early nodulin
  misc_feature: Homolog of GI Number: 21555085 NR Desc: phytocyanin
  misc_feature: Homolog of GI Number: 11399249 NR Desc: phytocyanin
  misc_feature: Homolog of GI Number: 6855476 NR Desc: phytocyanin
  misc_feature: Homolog of GI Number: 30102882 NR Desc: At5g57920
  misc_feature: Homolog of GI Number: 9758361 NR Desc: phytocyanin/early nodulin
  misc_feature: Homolog of GI Number: 218254 NR Desc: early nodulin
MAGSSASLLFLFLLFGFSAAKELLVGGKIDAWKIPSSESDTLNQWAERSRFRVGDHLVWKYESGKDSVLEVTREDYANCSTSNPIKEYNDGNTKVKLEHPGPFYFISGSKGHCEKGQKLIVVVMSPRHTFTAIISPAPTPSPAEFEGPAVAPTSSATTFQVGLLTALGVLAIYVGFLM

SEQ ID NO: 6461 - DNA, 842 bp, Glycine max
  misc_feature: Ceres CLONE ID no. 1238209
  misc_feature: Ceres CDNA ID no. 25446810
  CDS (109)..(750): REFERENCED BY SEQ ID NO: 6462
attttctcgtcactcctaaatttcagcgttgaagtgcgattagaacttagaagcatcaattcaagctccaatcttcgactctgtcacttaatacattgaaagcagagtatgccgagtaggaatagtgccaaaactccaaagaatgatggaaacaactcaaattccagtcttgcttctctagaaaataattgctatgaaggagaacgtctcaccagtctgctccaatcaatccgtagggggatccaatctgctagacatttggatggaagttccttgccagagaagatatggttaaagcaacaattttctattggggtcaacgatgtaactcgtgtccttgagcgcatgaaaccatgcacggagttagaaagctctactgaactcatctctttgagaagcaaccatacagcatcttcagttaagcttcaggctgtgcttgtagcttctgactgtaacccacgttggctgacgaaacatctcctaagtttggcttcatcaaggaatgtgcccctggtatttgttagagatactaaacaaggttctttgagactaggtgaacttgtgcaattaaaaacggccattgctatcggaattaaggttaaaggaagcaccataaataaaattattcagcaagttattcaaggcgatagatttgaactttcacctgaagggcaaaattcagcaagaatatttgatgcgcaaagtaactttcaggaccctgacaaaaaaatgctatcaaatgtaatttaatcaatatttcttgtttataaaattattgaccttgcattctaaggtgcagttctttttttcccttgggagaggggttaaaaaaaaaaaaaaaa

SEQ ID NO: 6462 - protein, 213 aa, Glycine max
  misc_feature: Ceres CLONE ID no. 1238209
  misc_feature: Ceres CDNA ID no. 25446810
  misc_feature (105)..(172): Pfam Name: Ribosomal_L7Ae PFAM Desc: Ribosomal protein L7Ae/L30e/S12e/Gadd45 family
  misc_feature: Homolog of GI Number: 7268222 NR Desc: putative RNaseP
  misc_feature: Homolog of GI Number: 50939451 NR Desc: RNaseP
MPSRNSAKTPKNDGNNSNSSLASLENNCYEGERLTSLLQSIRRGIQSARHLDGSSLPEKIWLKQQFSIGVNDVTRVLERMKPCTELESSTELISLRSNHTASSVKLQAVLVASDCNPRWLTKHLLSLASSRNVPLVFVRDTKQGSLRLGELVQLKTAIAIGIKVKGSTINKIIQQVIQGDRFELSPEGQNSARIFDAQSNFQDPDKKMLSNVI

SEQ ID NO: 6463 - DNA, 1189 bp, Glycine max
  misc_feature: Ceres CLONE ID no. 1238332
  misc_feature: Ceres CDNA ID no. 25892495
  CDS (83)..(982): REFERENCED BY SEQ ID NO: 6464
caaaaaaaaaaacgaaaccttgtgaccacaaacaaggttggttcaacttgtgagggggatcaaaacattcctagattggaatatggcaaaacttggttgttctagtcgtaggaaagcaattgaggagctccttagagggcgtgattgtgccaaacaacttaggagtgtcatcaatgggagttgtgaagatggatcatcaacaaccccatcatttgctgaacaacttgtgaaggaggtgctcatgtccttcaccaactccctctcgttcttgaagaacaaccccacttctgaatcccatgatgtttccaatgttcaagtttgtgaatctcccaagtctgaggactcccaagagagcaattgcaagagctccatcattaaggaacgtagagggtgctacaagagaagaagaactgaacaaacatgggagaaggaatctgaagctccaattgatgacggccatcagtggagaaagtatggccaaaaggagatcctgagtgccaaattcccaaggaactactataggtgcactcacaaatttgaccaaggttgccaagcaacaaaacaggtgcaaagagttcaagaggaaccaatcctatacaagaccacctactatggcctccacacttgcaagaacttggcaaaccctgagatcatacttgaccctatgtccccttcatcctcatccaagttccttagctttgacaactccttcccaaccccatcaaagcaagagtgcccctttctctcatcttctaatttgccatcatcagtgaaaggggagtgcaaggaggaggtccctccctcaacttcctccaatcattatctcatctcttctgacctcacttttgatagctcaccaaggcatcatgtcactctatcatcaacacttgactcagagtacaagagtgtggacatttcggatgtcttgtatgattctgctcagcttgatgatgcctttgaacccttccttgaatttagatgagcatgtccttgtttggtttgtgattttttttatataatttttactttagtgaaggcagtacaaaacaaaattgtctaatatttagtagtacttttcttagataaatgtaatatccgtgcttttattgtaaattttgtcattttcaatgaatgagaaatgatcataatgtttcaatgaaaaaaaaaaaaaagaaaaaaaaaaaaaaaa

SEQ ID NO: 6464 - protein, 299 aa, Glycine max
  misc_feature: Ceres CLONE ID no. 1238332
  misc_feature: Ceres CDNA ID no. 25892495
  misc_feature (122)..(184): Pfam Name: WRKY PFAM Desc: WRKY DNA
  misc_feature: Homolog of GI Number: 7406997 NR Desc: DNA
  misc_feature: Homolog of GI Number: 7406995 NR Desc: DNA
  misc_feature: Homolog of GI Number: 23296626 NR Desc: putative DNA
  misc_feature: Homolog of GI Number: 21592990 NR Desc: DNA
  misc_feature: Homolog of GI Number: 17385638 NR Desc: elicitor
  misc_feature: Homolog of GI Number: 40846374 NR Desc: putative WRKY transcription factor 30
  misc_feature: Homolog of GI Number: 28973481 NR Desc: putative WRKY family transcription factor
  misc_feature: Homolog of GI Number: 29839652 NR Desc: Probable WRKY transcription factor 62
  misc_feature: Homolog of GI Number: 13506735 NR Desc: WRKY DNA
  misc_feature: Homolog of GI Number: 46394344 NR Desc: TPA: WRKY transcription factor 45
MAKLGCSSRRKAIEELLRGRDCAKQLRSVINGSCEDGSSTTPSFAEQLVKEVLMSFTNSLSFLKNNPTSESHDVSNVQVCESPKSEDSQESNCKSSIIKERRGCYKRRRTEQTWEKESEAPIDDGHQWRKYGQKEILSAKFPRNYYRCTHKFDQGCQATKQVQRVQEEPILYKTTYYGLHTCKNLANPEIILDPMSPSSSSKFLSFDNSFPTPSKQECPFLSSSNLPSSVKGECKEEVPPSTSSNHYLISSDLTFDSSPRHHVTLSSTLDSEYKSVDISDVLYDSAQLDDAFEPFLEFR

SEQ ID NO: 6465 - DNA, 972 bp, Glycine max
  misc_feature: Ceres CLONE ID no. 1238668
  misc_feature: Ceres CDNA ID no. 36569760
  CDS (340)..(669): REFERENCED BY SEQ ID NO: 6466
ctgtggcctctgttttcaaaggaaacccttgttcttttccttgcctttctttcctagcactgtcttctaacttccaactcatataattcattttccctagtcttctttgttttcaccctttccttgtgaaatctgcaaaaccagctattcagtttggctatcaaaccaagccaaagctcttatattattttttatatataaataggcaccaaatacacatttatgatacaccaatttgaagcttgtccacacaagacaagattatcaccagcccctttccattcacaaacctgagagtaagaagcacttgtcagtgaccaacaaaccaaccaaccaaccatgatgcctgctcatggcctcatcatctctctcatttttgtgtccattttagccaatgaggcaagcttggtccatgaggcaaatgggtcatttccaatggtgcccttggtggaggctgggaagatggagatgatgatggtgatgaatgagagcagaaggaaacttggaagcttccagatatgtgccttgtgcacctgctgtggtggagcaaaagggatgtgcttgccctctccttgttgctatgccatcaattgcaacattcctcatagaccttttggcttttgctcattcacaccaaagacctgtaattgctttggatgccatctttagtcccctctccccctattatagtcttataataataattgaaaaaaaattgagggttatttttagttaattatgttgcaagtgtgaatgggaagtgaagtgaagaatatctgctcttggttagtctgtttattaattactattagttattattattatttggggattgttatttccaggaattattttttctttctgcagtgcttactgggatttgttaggggtgcctggagatatagcacattgtctgatttgtcagaatagcaatatatgatataattatatgtagtaaaaaaaaaaaaaaaa

SEQ ID NO: 6466 - protein, 109 aa, Glycine max
  misc_feature: Ceres CLONE ID no. 1238668
  misc_feature: Ceres CDNA ID no. 36569760
  misc_feature: Homolog of GI Number: 34906984 NR Desc: P0413C03.15
MMPAHGLIISLIFVSILANEASLVHEANGSFPMVPLVEAGKMEMMMVMNESRRKLGSFQICALCTCCGGAKGMCLPSPCCYAINCNIPHRPFGFCSFTPKTCNCFGCHL

SEQ ID NO: 6467 - DNA, 1427 bp, Glycine max
  misc_feature: Ceres CLONE ID no. 1238680
  misc_feature: Ceres CDNA ID no. 24766203
  CDS (61)..(1182): REFERENCED BY SEQ ID NO: 6468
tatatatgtatatatacattgcatagccttggggtattcaaaatcatcaattttcaattcatggcttccctcatgagcaccatcctcaagcaaaggtcttgttcttcttcttcacatgctgggaggctgttgttctccacaacaacagcagccattgttgattccccttcacttgctcagagaatcagagatttgcctaaggaccttcctggaaccaacatcaagaagcatgtttctcagctcattgggaggactccactggtttatcttaacaaagtcaccgaaggatgtggagcttatgttgctgtcaagcaagagatgatgcaacctactgccagcatcaaagacagaccagcatatgcaatgatcacagatgctgaggaaaagaatctgataactcctggaaagacaactttgatagagcctacatcaggcaatatgggtatcagcatggcatttatggccgccatgaagggatataagatggttttgaccatgccctcttacacaagcttggaaagaagggtgaccatgagagcgtttggagctgaattaatcctcactgatccagccaaaggaatgggaggaacagtaaagaaggcttatgaacttttggaaaacacaccaaatgctcacatgctgcaacaattttcaaaccctgccaatactcaggtgcattttgaaacaacaggtcctgagatatgggaggatacaaatggacaagttgacatatttgttatgggaataggtagtggaggcacagtctctggggttggacaatatcttaaatccaaaaatcctaatgttaagatatatggagtggagccaagtgaaagcaatgtgctgaatggtggtaaacctggtcctcatcatataactggcaatggggttggattcaaaccagacatattggacctggatgttatggaaaaagttcttgaagttagcagcgaagatgcagttaacatggctagggtgttggcattgaaggaaggactcatggtagggatatcatctggagctaacacagttgcagcactcagattggctcagctgcctgagaacaaaggcaaacttattgtgactgttcatccaagcttcggtgaacgatacctatcatctgttctgttccaagagcttcgtcaagaagctgaaaacatgcagccagtagcagttgattaattccatgcataagctttgttgtggagttacattacatggagcaacctagttattacaatcctgttgtagcaaaaattgttaacatcatcttacagttcggccatagcaaaaattgtcaaacaaagctgtgttaattgggaaaaggttttgatacagcttacaataagagctgtgttaatgttttgtattgttctttatttttcatttttaatcgaaaaaggtataaagcaaaaaaaaaaaaaaaa

SEQ ID NO: 6468 - protein, 369 aa, Glycine max
  misc_feature: Ceres CLONE ID no. 1238680
  misc_feature: Ceres CDNA ID no. 24766203
  misc_feature (54)..(343): Pfam Name: PALP PFAM Desc: Pyridoxal
  misc_feature: Homolog of GI Number: 30840956 NR Desc: beta
  misc_feature: Homolog of GI Number: 37719662 NR Desc: beta
  misc_feature: Homolog of GI Number: 37719666 NR Desc: beta
  misc_feature: Homolog of GI Number: 11559260 NR Desc: beta
  misc_feature: Homolog of GI Number: 11995005 NR Desc: beta
  misc_feature: Homolog of GI Number: 21592815 NR Desc: cysteine synthase AtcysC1
  misc_feature: Homolog of GI Number: 1066153 NR Desc: cysteine synthase
  misc_feature: Homolog of GI Number: 303902 NR Desc: cysteine synthase
  misc_feature: Homolog of GI Number: 59799343 NR Desc: chloroplast cysteine synthase GCS2
  misc_feature: Homolog of GI Number: 76556492 NR Desc: putative chloroplast cysteine synthase 1 precursor
  misc_feature: Useful for delaying senescence
  misc_feature: Useful for making plants with increased biomass and foliage
  misc_feature: Useful for making taller plants and plants with longer inflorescences
  misc_feature: Useful for sterility
MSTILKQRSCSSSSHAGRLLFSTTTAAIVDSPSLAQRIRDLPKDLPGTNIKKHVSQLIGRTPLVYLNKVTEGCGAYVAVKQEMMQPTASIKDRPAYAMITDAEEKNLITPGKTTLIEPTSGNMGISMAFMAAMKGYKMVLTMPSYTSLERRVTMRAFGAELILTDPAKGMGGTVKKAYELLENTPNAHMLQQFSNPANTQVHFETTGPEIWEDTNGQVDIFVMGIGSGGTVSGVGQYLKSKNPNVKIYGVEPSESNVLNGGKPGPHHITGNGVGFKPDILDLDVMEKVLEVSSEDAVNMARVLALKEGLMVGISSGANTVAALRLAQLPENKGKLIVTVHPSFGERYLSSVLFQELRQEAENMQPVAVD

SEQ ID NO: 6469 - DNA, 1279 bp, Glycine max
  misc_feature: Ceres CLONE ID no. 1238699
  misc_feature: Ceres CDNA ID no. 40351698
  CDS (46)..(1122): REFERENCED BY SEQ ID NO: 6470
ctagagccagtcttttataatattagagcatctagctcaaatagcatggcttccaatctgattagagtgagcacaagcttggttctagtagttttagtagctctcacagttcaaattttctacatttcacccatagatccagttttgctggatataaaacctgctccttcaaccaaagacaatcaattacagaatatcattaagcttggagaaggacttttgaaggaaccagaagatgttgttgtagataaagaagggactctctatacagctactcgagatggttggattaaaagattgcgcaggaataatggaaaatgggagaattggaagcatatagatagtcatactttgctaggaatcgcaacagcaaaagaaggtggtctcattgtttgtgatacttccaagggtttgctcaaggttacagaagaagatggttttagtgttcttgtttcacacgtaaatggttctcagttaaggtttgcagacgatgtgatagaaggctcaaacgggaatgtatattttagtgttgttagtacaaaatttgatcttcaagattggtatttggatgtgttagaggcaagacctcgtggacaagttctcaagtacaatcccacatcaaatgagactgttattgttcttgataatgttgcatttgccaacggcgttgcactctctaaggacgaagattatcttgtggtttgtgaaacttggaaatacaggtgtttgaggcattggttagaaggagcaaacaaaggcacaacagatattttcattgaaaaccttcctggtgcacctgataatatcaatcttgctcccgatggatccttctggatcgctttgattcagttgacttctgaaggatttgagtttgtccacaactacaagataactaagcacttggttgcatcgtttccaaggctaattaaccttgtcaatggctgcaagaagaaagcaacggtggtgaatgtggcaactaatggcaggataataagaaagcttgatgatagtgatgggaaggtgattaattttgtgacttcagctgtggagtttgaggaccacctttaccttggtagtcttaattccaactttgttggaaaattaccattgtatagtgcatagaatagtcaagtttagccctccttgaataaaggtgtgcctcagcttggatcaagcgaaagaagcatcccatgatggatatgtatgatttagaccaagcacatataggagaatattgttccataatgcatattctctgttcacaaaaaaaaaaaaaaaa

SEQ ID NO: 6470 - protein, 358 aa, Glycine max
  misc_feature: Ceres CLONE ID no. 1238699
  misc_feature: Ceres CDNA ID no. 40351698
  misc_feature (4)..(350): Pfam Name: Str_synth PFAM Desc: Strictosidine synthase
MASNLIRVSTSLVLVVLVALTVQIFYISPIDPVLLDIKPAPSTKDNQLQNIIKLGEGLLKEPEDVVVDKEGTLYTATRDGWIKRLRRNNGKWENWKHIDSHTLLGIATAKEGGLIVCDTSKGLLKVTEEDGFSVLVSHVNGSQLRFADDVIEGSNGNVYFSVVSTKFDLQDWYLDVLEARPRGQVLKYNPTSNETVIVLDNVAFANGVALSKDEDYLVVCETWKYRCLRHWLEGANKGTTDIFIENLPGAPDNINLAPDGSFWIALIQLTSEGFEFVHNYKITKHLVASFPRLINLVNGCKKKATVVNVATNGRIIRKLDDSDGKVINFVTSAVEFEDHLYLGSLNSNFVGKLPLYSA

SEQ ID NO: 6471 - DNA, 773 bp, Glycine max
  misc_feature: Ceres CLONE ID no. 1238720
  misc_feature: Ceres CDNA ID no. 40351699
  CDS (63)..(557): REFERENCED BY SEQ ID NO: 6472
aagaaaactaggcattggtttctctctctagcttggacgagtgaattagattcatcatcaagatgtcgtctctgatagcagaagatgtgaagagcagatcagaggtgtaccacggggacgaaatgtgccaagtgaagtccaaggagcttctcaaggaaatcgccctccccaacggccttcttcccctcaaggacatggaggagtgcggctacgacagacaaaccggcttcgtctggctcaaacaaaagaagagttacacccacaagttcgacaagatcggaaagcttgtctcctacgcgcccgaggtaactgctcatgtccaacaaggtaaaattaccaaactcaccggggttaagaccaaggagctcctctggatcacgctcagtgatatctatgttgatgaccctcccactggcaaaatcaccttcaagacccctgccggcctatttaggtcttttcctgtctccgctttcgagattcaggaggagcctgaggctaaggacactactaagcgcgtgccggataccgctgagcctgtgcaagtcaaggaactctgattttattctcaaacaaggtcgccgtggtggttagcgtgcaaaatatatttatatatatatatatgtttattaataagtttatttatgttaccttttatgttaagctttcagatattgtgcggctttattgctaattaaccatcatctccttgttctggctttgaaaagaaaatggattacgatattgttatttctttcataaaaaaaaaaaaaaaa

SEQ ID NO: 6472 - protein, 164 aa, Glycine max
  misc_feature: Ceres CLONE ID no. 1238720
  misc_feature: Ceres CDNA ID no. 40351699
MSSLIAEDVKSRSEVYHGDEMCQVKSKELLKEIALPNGLLPLKDMEECGYDRQTGFVWLKQKKSYTHKFDKIGKLVSYAPEVTAHVQQGKITKLTGVKTKELLWITLSDIYVDDPPTGKITFKTPAGLFRSFPVSAFEIQEEPEAKDTTKRVPDTAEPVQVKEL

SEQ ID NO: 6473 - DNA, 1403 bp, Glycine max
  misc_feature: Ceres CLONE ID no. 1238777
  misc_feature: Ceres CDNA ID no. 36582252
  CDS (81)..(893): REFERENCED BY SEQ ID NO: 6474
aaaagaattattagtaacctaatgaaggaggtttcctttccatcagtttcagttccaccaaaattcaaaaatctctcggcatggggtgcgtgtcttcgaatttgctgaaccaagacgaagacttcagcacccaacttggctcctccgcactgggccaccacatcgtgtccctcacctccaccacctacggcctcctcaccctcgaccctccttccacgcctccttcccgctttacccttggatctctcttcccctccgaaccagaggtcatcaactcatgggagctcatgtccggcctcgacaccgacagcttccgcttctctcctttacctttacccaaacccaaagaaaaccgcctcactcccccaaccggttccaaactcttattaaccccaactctggcggaccggttcgagaaaatatgcccccccaacggtgagaagcgcgtggtgatctatacgacgtcgttgcggggcgtgcggacgactttcgaggcctgcaacgcggttcgcgccgccttggagggattcggggtggtgatctgcgagcgtgacgtgtccatgcacagcggcttcagagaggagctcaggactctattgaaggggaagcaggtgatggtgcctccgagagtgttcgtgaaggggctctacatcggtggcgccgatgaaatgcttaaggtcgccgaagagggtctccttggagacttgcttgatggcttgcctagaaagaaggttggggctgtttgtgtgggttgtggggacttgaggttcttgccttgcttcaactgcaatgggagctgtaagactcttgttaaggaacaggggaggacggttgtggttaagtgtacccattgtaacgaaaatggcttagtcttgtgcccgctttgtacttgattactttttcacaatcatgtcatcactctcttcactgttcatattaacctgtattcctcctctcttctcttggtgatcttgtatcccgattcaccattttcaaatcagccttcattgttacagagcctgcaattgcgcacattagtatttatcaatggattttcattagtatcatcactcttgtgtggcgtgtaggctgtagcatatagcctataacttatttatcgtaatattaaagcttagaatttgttggactcactcagtcaagttacattgacaaactagaccttaaatatttgttgaaagaatcacaggatgagtctgtgttgattgtgaaatgtgccattcactcatgatagagattagagggtaaaaaggaaaatgaaactaggtatttgttaaaatgtgtagcccattgttcacaacaacacaagtgtatcgaataacttgctaaactgcacgaattgcacatgtttaagtgcgtgtttgctttaaaaaaaaaaaaaaaaa

SEQ ID NO: 6474 - protein, 270 aa, Glycine max
  misc_feature: Ceres CLONE ID no. 1238777
  misc_feature: Ceres CDNA ID no. 36582252
  misc_feature (122)..(210): Pfam Name: Glutaredoxin PFAM Desc: Glutaredoxin
  misc_feature: Homolog of GI Number: 60543345 NR Desc: At1g32760
  misc_feature: Homolog of GI Number: 50924087 NR Desc: OSJNBa0073L04.11
  misc_feature: Homolog of GI Number: 50929077 NR Desc: OSJNBb0079B02.8
  misc_feature: Homolog of GI Number: 10241626 NR Desc: Contains similarity to F1N 19.7
  misc_feature: Homolog of GI Number: 53370707 NR Desc: glutaredoxin domain containing protein
  misc_feature: Homolog of GI Number: 15810443 NR Desc: putative peptide transporter protein
  misc_feature: Homolog of GI Number: 17381052 NR Desc: putative peptide transporter protein
  misc_feature: Homolog of GI Number: 34899868 NR Desc: peptide transporter
  misc_feature: Homolog of GI Number: 50912785 NR Desc: glutaredoxin
  misc_feature: Homolog of GI Number: 50904589 NR Desc: peptide transporter protein
MGCVSSNLLNQDEDFSTQLGSSALGHHIVSLTSTTYGLLTLDPPSTPPSRFTLGSLFPSEPEVINSWELMSGLDTDSFRFSPLPLPKPKENRLTPPTGSKLLLTPTLADRFEKICPPNGEKRVVIYTTSLRGVRTTFEACNAVRAALEGFGVVICERDVSMHSGFREELRTLLKGKQVMVPPRVFVKGLYIGGADEMLKVAEEGLLGDLLDGLPRKKVGAVCVGCGDLRFLPCFNCNGSCKTLVKEQGRTVVVKCTHCNENGLVLCPLCT

SEQ ID NO: 6475 - DNA, 630 bp, Glycine max
  misc_feature: Ceres CLONE ID no. 1238801
  misc_feature: Ceres CDNA ID no. 25446995
  CDS (2)..(328): REFERENCED BY SEQ ID NO: 6476
aaaacatctttcttcaaccccaatcactcttctcatattcattccaatgtcaaatcctcaaacaaacaataaccgccgccagcccagccgcctgcagcggcgagccccctcctccctgcaaataaaccgcgccgtcgagtggaacgtcgccatccccctcctctcgccgttggcatcatctccgacgccgatcgagctaaaaccgccgcaagagccgccgcagagggagccggagaaggtcaccttgtcgttcaagaagtggcagcatcctgcggctcccttctgttacgagcccgctccaatggtgccgccctttgttcctgtgtagatgaacgaacgagagagttttaggatgctatctaatggttcatatttagagagaatgaagaagaagatataacgctgtatttttaattaattaattaatattgttcctttcttctttttgttggggagaggctttgccttattttgcacacgggggtatttatcaatacctgtgattgtgaatatacaccccctctgtgtttctttctctttttttagcttttcccccgtttttttttatgcctttttattatggggcttaaattaaactacttcattggaacgtcaaaaaaaaaaaaaaaa

SEQ ID NO: 6476 - protein, 93 aa, Glycine max
  misc_feature: Ceres CLONE ID no. 1238801
  misc_feature: Ceres CDNA ID no. 25446995
  misc_feature: Homolog of GI Number: 38603896 NR Desc: At4g14450
MSNPQTNNNRRQPSRLQRRAPSSLQINRAVEWNVAIPLLSPLASSPTPIELKPPQEPPQREPEKVTLSFKKWQHPAAPFCYEPAPMVPPFVPV

SEQ ID NO: 6477 - DNA, 1308 bp, Glycine max
  misc_feature: Ceres CLONE ID no. 1238823
  misc_feature: Ceres CDNA ID no. 36582236
  CDS (50)..(988): REFERENCED BY SEQ ID NO: 6478
acacatagctgagagagaaaggaaaggttaactaagaagcaatacttcaatggccacccttgttgttcataaccaaacttcttctgctcaagatgctgaggctctccaacaggctttcaaaggatggggggctgatgacaaggccattatagcaatactgggtcacagaaatgttcatcagaggcaagaaatcagaaaagcttatgaggagatttaccaagaggatctcatcaaacgccttgagtccgagatctctggtgactttgagagagctatgtaccggtggatgttgcagcctgcggatcgtgatgctgttttggtgaatgtggcaatcaagaatggcaccaaagactaccatgtgattgcagagattgcttgtgtcctatcagctgaagagctcttggcagtgaggcgggcctaccaccgccgctacaagtgttccttggaggaagatgtggcagctaacaccaccggcaatcttcgccagcttttggttggattggtgacctcatataggtatgagggtgatgagatcaatgtaaaattttcacaaactgaagctaatgttcttcatgaatctgtcaaggagaagaaaggcaacagtgaagaagtcatcaggatccttactacaagaagcaaaactcaacttgtggcaactttcaaccgctacagagatgaacatggaatttccatcagtaagaaattgttggatcaaacatctgatgacttccacaaggtgttgcacactgctattcgctgcatcaatgaccataagaagtactatgagaaggttttgcgcaatgcagtcaagaagtttggaactgacgaggatggactaagccgtgtgattgttacaagggctgagaaggatctgaaggacatcaaagagctctactacaagagaaacagtgttcaccttgaggatgaagtgtccaaggaaacttctggggactacaagaagttcctcctcactctcttggggaaataagactaagttaagaacttgctctaagggcatcttagtaatgggtttttgttaattatgtcattggtttctggtttgtgcgatttcattatgttagttttccagtaagagtttgttatatctggttaagtttttgagacaacaagaactcgtgtcttgtttgagggcatgcgtgccatttcttagggttgtgttggtacttggcatgctcttattagaggacctctatgctgcgtgtttcctttggattatgctattacctcacctggtttgcttttaatgaaaggttgataacaaatttatatgtaaaaaaaaaaaaaaaa

SEQ ID NO: 6478 - protein, 312 aa, Glycine max
  misc_feature: Ceres CLONE ID no. 1238823
  misc_feature: Ceres CDNA ID no. 36582236
  misc_feature (85)..(151): Pfam Name: Annexin PFAM Desc: Annexin
  misc_feature: Homolog of GI Number: 3176098 NR Desc: annexin
  misc_feature: Homolog of GI Number: 6010777 NR Desc: annexin
  misc_feature: Homolog of GI Number: 643076 NR Desc: annexin
  misc_feature: Homolog of GI Number: 62255525 NR Desc: putative annexin
  misc_feature: Homolog of GI Number: 62255538 NR Desc: putative annexin
  misc_feature: Homolog of GI Number: 56202269 NR Desc: putative calcium
  misc_feature: Homolog of GI Number: 22326753 NR Desc: annexin
  misc_feature: Homolog of GI Number: 12083278 NR Desc: putative Ca2+
  misc_feature: Homolog of GI Number: 58177603 NR Desc: Chain B
  misc_feature: Homolog of GI Number: 1621539 NR Desc: annexin
MATLVVHNQTSSAQDAEALQQAFKGWGADDKAIIAILGHRNVHQRQEIRKAYEEIYQEDLIKRLESEISGDFERAMYRWMLQPADRDAVLVNVAIKNGTKDYHVIAEIACVLSAEELLAVRRAYHRRYKCSLEEDVAANTTGNLRQLLVGLVTSYRYEGDEINVKFSQTEANVLHESVKEKKGNSEEVIRILTTRSKTQLVATFNRYRDEHGISISKKLLDQTSDDFHKVLHTAIRCINDHKKYYEKVLRNAVKKFGTDEDGLSRVIVTRAEKDLKDIKELYYKRNSVHLEDEVSKETSGDYKKFLLTLLGK

SEQ ID NO: 6479 - DNA, 1054 bp, Glycine max
  misc_feature: Ceres CLONE ID no. 1238930
  misc_feature: Ceres CDNA ID no. 40351700
  CDS (35)..(865): REFERENCED BY SEQ ID NO: 6480
acaaattttccactcttcctcaccgattgctagaatggaatttcgatgctcagtcatctcttttaccattctcttctctcttgctcttgcaggagagagccatgtccatgcatcgctacctgaggaagattattgggaagctgtttggccaaacactcccattcccactgcactgcgagagcttctaaagcctctccctgcaggtgttgaaatcgatgaactccctaagcaaattgatgatacacagtacccaaaaacattcttctataaagaagaccttcatccaggcaaaacaatgaaagtacaattcaccaagcgtccctatgcacaaccttatggtgtatatacatggttaacggatattaaagacacctctaaagaaggatatagttttgaagagatatgcatcaagaaagaagcgtttgagggagaagagaagttttgtgcaaaatccttgggaacagtaattggttttgccatttcaaagctgggaaagaacattcaagtactttcaagttcctttgtcaataagcaagagcaatacactgtggaaggagtgcagaatcttggagacaaagcagtgatgtgtcatgggctaaatttcagaactgcagtattttactgccataaagtccgtgaaacaacagctttcatggttccattggtggctggtgatggaaccaaaactcaggcacttgctgtttgccactcagatacttctggaatgaatcatcacatgcttcatgaactcatgggagttgatcctggaactaaccctgtttgccatttccttggaagcaaggccattttatgggtacccaatttatctatggacactgcctatcagactaacgttgttgtttaattagtccatgcatctgcatcttgggcaccataagattgtatataaaataaattatggtgtgttgtgtatgttgtgcaagacctggaacttcacctttctacgtacgtgtgctgttaggatgcagtgtgctttgatgatgctttgatgaatatgcagtgtgcttttttaagtctaaaaaaaaaaaaaaaa

SEQ ID NO: 6480 - protein, 276 aa, Glycine max
  misc_feature: Ceres CLONE ID no. 1238930
  misc_feature: Ceres CDNA ID no. 40351700
  misc_feature (74)..(263): Pfam Name: BURP PFAM Desc: BURP domain
MEFRCSVISFTILFSLALAGESHVHASLPEEDYWEAVWPNTPIPTALRELLKPLPAGVEIDELPKQIDDTQYPKTFFYKEDLHPGKTMKVQFTKRPYAQPYGVYTWLTDIKDTSKEGYSFEEICIKKEAFEGEEKFCAKSLGTVIGFAISKLGKNIQVLSSSFVNKQEQYTVEGVQNLGDKAVMCHGLNFRTAVFYCHKVRETTAFMVPLVAGDGTKTQALAVCHSDTSGMNHHMLHELMGVDPGTNPVCHFLGSKAILWVPNLSMDTAYQTNVVV

SEQ ID NO: 6481 - DNA, 786 bp, Glycine max
  misc_feature: Ceres CLONE ID no. 1238953
  misc_feature: Ceres CDNA ID no. 25445486
  CDS (102)..(572): REFERENCED BY SEQ ID NO: 6482
gacttataaaaataaaatatcagtttcatttccttatacatgaccagaggaaaataatttcttttaataaaaaaaacttagaatcgaaacgaaaaatcgccatgaatcccaaaatcctcttcgtgtttgctctgcttctgaatctcgtatccaattcgttccaaaaccctaaccctaaaacccccaaatcaacgtcatcgcaggctcacgtggagctcatcaaccacggcttacccgccggtcttctccccgccaccaccgtcttgggctacgccgtgaaccgtacctccggtgactttaccgtcaagctcggcggcgcgtgcaagatcacgctcccgccggacaactacgtcgccacctattccgacaccatcacagggaagatcgtgaaggggaaaatcgctgaactcgaggggattagggttcgcgcgttcttcaagtggtggtccatcaccggaatccgctcctccggcgatgatatcgtcttcgaggtcggtatggtcacggcgaagtatccatcgaagaatttcgacgatagccccgcgtgcgagggccagcactcttcttcgtgaaaagggtattagctacttattcgcagccttcgtgtgttatgtaatgatatagcatccatccagtgtccactaagtgcagattgtgtgtaatgtaatattacaaggatagtattacttttacatcatcgtatttatgccacgacgaatccactttaatgttcatattacccctgaataaggccactttggacgtttcttaaaaaaaaaaaaaaaa

SEQ ID NO: 6482 - protein, 156 aa, Glycine max
  misc_feature: Ceres CLONE ID no. 1238953
  misc_feature: Ceres CDNA ID no. 25445486
MNPKILFVFALLLNLVSNSFQNPNPKTPKSTSSQAHVELINHGLPAGLLPATTVLGYAVNRTSGDFTVKLGGACKITLPPDNYVATYSDTITGKIVKGKIAELEGIRVRAFFKWWSITGIRSSGDDIVFEVGMVTAKYPSKNFDDSPACEGQHSSS

SEQ ID NO: 6483 - DNA, 1098 bp, Glycine max
  misc_feature: Ceres CLONE ID no. 1238956
  misc_feature: Ceres CDNA ID no. 35389392
  CDS (3)..(881): REFERENCED BY SEQ ID NO: 6484
atggtggattggatatcattaataatcaagcagttcgttggcctcatagttcagccttagaaatttgtaaaccacagagcctctgtgctgctggtcctccaatcacactttctgtcgtaagcagaattaggaatggatctaatggttggagaagcacggtaaccggagctgctgcagctgcaacaaataggatgagttccctttctggggctattgcttcatctttccgtaactttaaagacagcagtaccttgtatgttaatgggaactattccaaggaaaagcatcatctgttggtcttttcacccaccagttctatgatacaatatgctctgcagacaattaacagtcaagactcaggtgttgtttctggagtaacacctgcttatgaatctgccccactgaccgatgcaagagtagttgttgagcctatcaagaaatggaatataagcctggcatatagttggagagagggagaagatactattgacatatatggagagaatggagtttcagacagcaataaattatattcagaggaagtgaagaaggataatatcattagccctaaaatgaagaatgtaactgtgaaatggaatccctgttctgagaaagagcatcagttttatatttcagaagctgaactgcaaatgcatcaagctaagacgccattgtggggaaagactgggatatattttcattcagtgggtaaagaggctactttgatgatggatgaagaagctgctctcggaggggaatttgagatcgaaaagattccaactcgtgtgatacaagctaggtcaaaagacttggttccaatttttgactatattcagacctcaaaatttcaacaaataaggtctgctttgatgactaactaattaacttactaattatctattaggtaggtcaaaagatttaggcttttgatattttgctattaatttttttgtcataatgacattacctcactttcgaaggctggagaataccaaaattgattatgttcatattgcatgtactctttgctgcatgcaaggagacagtttatttatgtgaatgaaaaactatggttttcacgcaaaaaaaaaaaaaaaa

SEQ ID NO: 6484 - protein, 229 aa, Glycine max
  misc_feature: Ceres CLONE ID no. 1238956
  misc_feature: Ceres CDNA ID no. 35389392
  misc_feature: Homolog of GI Number: 53792420 NR Desc: breast carcinoma amplified sequence 3
  misc_feature: Homolog of GI Number: 34908756 NR Desc: P0415A04.11
  misc_feature: Homolog of GI Number: 9280639 NR Desc: F21B7.1
MSSLSGAIASSFRNFKDSSTLYVNGNYSKEKHHLLVFSPTSSMIQYALQTINSQDSGVVSGVTPAYESAPLTDARVVVEPIKKWNISLAYSWREGEDTIDIYGENGVSDSNKLYSEEVKKDNIISPKMKNVTVKWNPCSEKEHQFYISEAELQMHQAKTPLWGKTGIYFHSVGKEATLMMDEEAALGGEFEIEKIPTRVIQARSKDLVPIFDYIQTSKFQQIRSALMTN

SEQ ID NO: 6485 - DNA, 877 bp, Glycine max
  misc_feature: Ceres CLONE ID no. 1238961
  misc_feature: Ceres CDNA ID no. 24766204
  CDS (80)..(634): REFERENCED BY SEQ ID NO: 6486
gccaagatttgttcattgttgggtcaattgaagtctaagaaagaaaacagagagcgaagaaggagaagagatcagaaaaatggcgtccaaagctccaaagaaggccaatctcctcgatcaccactccatcaagcacatcctcgacgagtcagtctccgaggtggtaacgagtcgtgggtttgtggaagacgtgagattgagcaatgtgaggcttctcattggggcaatcatcatcgtcattgctctcttcgcccaattctacaagaagaagttccctgaaaatagggattttctcatcgcctgcatcgccttgtatgtgatcttcaatgggttgttgcagctgatcatatacactaaggagaaaaatgccattctgttcacttatcctcctgttggatcctttactagtaccggtttggtggtttcctccaaattgcctaggttttctgacatgtacacactcactatagcaagcgcagatccaaaatcaatttctgcaaatgatcaagtacatttcaccaaaagtgtcactcagtggttcactaaggacggagtcttagttgagggcctgttctggaaggatgttgaagctttgatagttcaatatactaaagaaccaaagaagagcaagtaatatggagacatgaactttggttttgtggaaaactttttggatgagaaaacatatatttggatatggtttataattctatacttaagacatttaaaatagaactgagggaatcaagcttttaccagctttagagcacaatttattcccatatttcatcagcttatttcgtagaaaaggcttgaacctttattttcatttaattttctaaaaactattaatggttctcgaaaaaaaaaaaaaaaa

SEQ ID NO: 6486 - protein, 184 aa, Glycine max
  misc_feature: Ceres CLONE ID no. 1238961
  misc_feature: Ceres CDNA ID no. 24766204
  misc_feature (3)..(181): Pfam Name: SPC25 PFAM Desc: Microsomal signal peptidase 25 kDa subunit
  misc_feature: Homolog of GI Number: 28195697 NR Desc: signal peptidase 25 kDA subunit
  misc_feature: Homolog of GI Number: 72103997 NR Desc:  similar to signal peptidase complex subunit 2 homolog
  misc_feature: Homolog of GI Number: 55234833 NR Desc: ENSANGP00000021231
MASKAPKKANLLDHHSIKHILDESVSEVVTSRGFVEDVRLSNVRLLIGAIIIVIALFAQFYKKKFPENRDFLIACIALYVIFNGLLQLIIYTKEKNAILFTYPPVGSFTSTGLVVSSKLPRFSDMYTLTIASADPKSISANDQVHFTKSVTQWFTKDGVLVEGLFWKDVEALIVQYTKEPKKSK

SEQ ID NO: 6487 - DNA, 1225 bp, Glycine max
  misc_feature: Ceres CLONE ID no. 1239004
  misc_feature: Ceres CDNA ID no. 25446811
  CDS (170)..(1075): REFERENCED BY SEQ ID NO: 6488
atttttcagtttctcagtttcttattcgttaatcgttagatctcatcttacactcaccggcgagtccatctcgcgccaccgtcgactcagctccggccatcgccgttggttccctcactttctcactcttcttcttcttcttcttcttcttcttcttctcagcggaaatatgccttctcagaaggttgaaacgggtcatcaagacacggtccatgatgttgcaatggattactatggtaagaggctggccacggcttcatcagatcacacaatcaagataattggggtgagcaactcggcctctcagcatctagcaaccttgaccggtcaccaaggacctgtatggcaagtggtgtgggctcaccctaagtttggttctctacttgcgtcttgttcctatgatggccgtgtcattgtttggaaggagggcaaccaaaatgaatggactcaagctcatgtgtttgacgaccacaagtcatctgtgaattcggttgcttgggcgcctcatgagttgggtctctgcttggcttgtggctcgtctgatgggaatatatctgttttgactgcaagagcagatggtggctgggacactgcgagaattgatcaggctcatccagttggtgtcacttcggtgtcatgggcaccatcgatggcacccggagcccttgtcggtgcagggctgcttgatcctgtacagaagctgtgctctggtggttgtgataatactgtgaaggtatggaagctaaacaatggactctggaagatggactgcttccctgctcttcagatgcacacggattgggttcgagatgttgcttgggcacccaatttagggctccctaaatctaccattgctagcgcatcacaggacggtaaagtgattatatggaccgtggcgaaagagggggatcagtgggaaggcaaggttttgaatgatttcaacacccctgtttggagggtctcatggtcattgacaggaaacatattggctgtggctgatgggaacaacaatgtgacattgtggaaggaagcagttgatggggaatggcaacaggtgacaacagtggagccttagaatgtgatatttttccttttgaaaatggttagaattttcgttttgaaatatagttgacatcttgtttctttgcatattatacagttgattaattgtgcttcataatgcactaagttccttgaggtttgtgatccaaaaaaaaaaaaaaaa

SEQ ID NO: 6488 - protein, 301 aa, Glycine max
  misc_feature: Ceres CLONE ID no. 1239004
  misc_feature: Ceres CDNA ID no. 25446811
  misc_feature (249)..(286): Pfam Name: WD40 PFAM Desc: WD domain
  misc_feature: Homolog of GI Number: 51963858 NR Desc: PREDICTED OSJNBa0081C13.10 gene product
  misc_feature: Homolog of GI Number: 83283979 NR Desc: protein transport SEC13
  misc_feature: Homolog of GI Number: 21593236 NR Desc: transport protein SEC13
  misc_feature: Homolog of GI Number: 50935451 NR Desc: putative Sec13p
  misc_feature: Homolog of GI Number: 47086987 NR Desc: zgc:63980
  misc_feature: Homolog of GI Number: 34335136 NR Desc: SEC13
  misc_feature: Homolog of GI Number: 55619799 NR Desc:  similar to SEC13
  misc_feature: Homolog of GI Number: 57100900 NR Desc:  similar to Plasma membrane calcium
  misc_feature: Homolog of GI Number: 28317166 NR Desc: LD03471p
  misc_feature: Useful for making bigger plants
MPSQKVETGHQDTVHDVAMDYYGKRLATASSDHTIKIIGVSNSASQHLATLTGHQGPVWQVVWAHPKFGSLLASCSYDGRVIVWKEGNQNEWTQAHVFDDHKSSVNSVAWAPHELGLCLACGSSDGNISVLTARADGGWDTARIDQAHPVGVTSVSWAPSMAPGALVGAGLLDPVQKLCSGGCDNTVKVWKLNNGLWKMDCFPALQMHTDWVRDVAWAPNLGLPKSTIASASQDGKVIIWTVAKEGDQWEGKVLNDFNTPVWRVSWSLTGNILAVADGNNNVTLWKEAVDGEWQQVTTVEP

SEQ ID NO: 6489 - DNA, 1351 bp, Glycine max
  misc_feature: Ceres CLONE ID no. 1239009
  misc_feature: Ceres CDNA ID no. 24767078
  CDS (40)..(1152): REFERENCED BY SEQ ID NO: 6490
caacttcaatattcactgttgttgagtattctaattctaatgaggaacaggggtgtgtgggaagatgcaagcacagcaacagtgcttgtacttgtgctatgttcatcgtatggaattgcagaagtaaagtcacagtcacagaaggtatctggtttgtttgtttttggagattcattggttgaagtaggcaacaataacttcctaaacaccatagcaagggcaaattactttccttacggcatcgacttcggcaggggttccactggccgattttctaatggcaaatccctcattgacttcattggagacttgctgggcattccttctcctccaccttttgcagatccctccactgttggaaccagaatactttatggtgtcaattatgcatcagcttctgccggcattctggatgagtcagggagacactatggtgatcggtatagcctgagccagcaagtcctgaactttgagaacacactgaatcagtataggacaatgatgaatggaagtgcattgaatcagttcttagccaagtctatagcagttgtggtaactggaagcaatgactacatcaacaactacctcctgcctggcttatatggctccagtcgaaattatactgcccaagactttggcaatctacttgttaatagctatgtgcgacaaattttggcactacatagcgtaggattaaggaagttcttcctagcaggaattgggccactgggttgcatccctagtcttcgagccgctgctttagccccaacaggaagatgcgtggacttggttaatcagatggttggaacttttaatgaagggcttagatcaatggtggaccaactcaacagaaaccatcctaatgctatctttgtatacggtaacacttaccgtgtctttggtgatatcctaaataaccccgcggccttcgcgtttaatgttgtggatagagcatgttgtggaataggaaggaaccgaggtcaactaacatgcctcccattacaatttccatgcacaagcagaaaccagtatgtgttttgggatgccttccacccaacagaatctgcaacttatgtcttcgcatggagagttgttaatggagcgcccgatgatagttatccaattaatatgcaacaaatggctaccatttaatccactctatcttcctgtattctcctttcatttataaaccaaaaaagtgtaccaaaagtgaagccaaattctacatctattgttgggtataaaataattacttttgggctatttcatataattattctacatctttgaaatgtaatacctttttttgggtgataagtgtaataccttttgtctaaaaaaaaaaaaaaaa

SEQ ID NO: 6490 - protein, 370 aa, Glycine max
  misc_feature: Ceres CLONE ID no. 1239009
  misc_feature: Ceres CDNA ID no. 24767078
  misc_feature (39)..(351): Pfam Name: Lipase_GDSL PFAM Desc: GDSL
  misc_feature: Homolog of GI Number: 9759340 NR Desc: GDSL
  misc_feature: Homolog of GI Number: 18086455 NR Desc: At1g29670/F15D2_22
  misc_feature: Homolog of GI Number: 21592417 NR Desc: lipase/hydrolase
  misc_feature: Homolog of GI Number: 7239493 NR Desc: Strong similarity to the putative GDSL
  misc_feature: Homolog of GI Number: 51964624 NR Desc: PREDICTED P0498H04.26 gene product
  misc_feature: Homolog of GI Number: 21594055 NR Desc: lipase/hydrolase
  misc_feature: Homolog of GI Number: 50932391 NR Desc: putative GDSL
  misc_feature: Homolog of GI Number: 77554628 NR Desc: GDSL
  misc_feature: Homolog of GI Number: 21592773 NR Desc: Proline
  misc_feature: Useful for making stronger plants
  misc_feature: Useful for sterility
  misc_feature: Utility: Mannitol Useful for making plants with enhanced tolerance to drought
MRNRGVWEDASTATVLVLVLCSSYGIAEVKSQSQKVSGLFVFGDSLVEVGNNNFLNTIARANYFPYGIDFGRGSTGRFSNGKSLIDFIGDLLGIPSPPPFADPSTVGTRILYGVNYASASAGILDESGRHYGDRYSLSQQVLNFENTLNQYRTMMNGSALNQFLAKSIAVVVTGSNDYINNYLLPGLYGSSRNYTAQDFGNLLVNSYVRQILALHSVGLRKFFLAGIGPLGCIPSLRAAALAPTGRCVDLVNQMVGTFNEGLRSMVDQLNRNHPNAIFVYGNTYRVFGDILNNPAAFAFNVVDRACCGIGRNRGQLTCLPLQFPCTSRNQYVFWDAFHPTESATYVFAWRVVNGAPDDSYPINMQQMATI

SEQ ID NO: 6491 - DNA, 1213 bp, Glycine max
  misc_feature: Ceres CLONE ID no. 1239014
  misc_feature: Ceres CDNA ID no. 40351701
  CDS (56)..(937): REFERENCED BY SEQ ID NO: 6492
aacatttgttctagacaagatctccatatctgttcccaaaagcttgtttgtaagaatggcttccggtgaacagaaattccctcctcaacaacaacaaacacagcctgggaaggagcatgctatgactccagtaccccaattcactagccctgactacaagccttcaaataaacttcaagggaagattgcattagtcactgggggtgattctgggattggacgagcggtgtgtaacttgtttgccttagaaggtgctaccgtggccttcacgtatgtgaaggggcatgaggacaaggacgcgagggacacattggaaatgatcaagagagcaaagacttcggatgccaaggatccaatggcaataccatctgatttgggttacgatgagaactgcaagagggtggttgatgaggtcgtgagtgcttatggttgtattgacattctggtaaacaatgcagctgagcagtacgagtgtggaaccgtggaggacatagacgagcctaggcttgagagggtctttcgtacaaatatcttctcctatttcttcatggcgaggcatgccttgaagcacatgaaggaaggaagcagcattatcaacacgacatcagtgaatgcatacaagggacatgcgaaactattggactacacgtccaccaagggggcaattgtggcctatacaaggggtcttgcccttcagctggtgagtaagggaattcgggttaatggggtggctccagggcccatttggacccctttgataccagcctctttcaaggaggaagaaacggcccaatttggagcgcaggtcccaatgaagagagctggtcaacctattgaggttgctccttcctatgtttttcttgcttccaaccaatgctcctcttacataactggacaagtccttcaccccaatggtggaaccgttgtgaatggttaaaccgttggtgatgatgatattcgggatgaatatatgtggcgagagtagtaggccagtgttacgttttgtgtgaatgttttacgatgtgttttaatgcatggctaactcactcaggtcctctctgcactgttagaggtggggcttggaggattatccacttttgaatgtacgagttattagcctaagaaaatgtgtcttttgtagccaaatatatgtaaacaagtaaaagtatataataaagatcggtatgtataaggtttaaaaaaaaaaaaaaaa

SEQ ID NO: 6492 - protein, 293 aa, Glycine max
  misc_feature: Ceres CLONE ID no. 1239014
  misc_feature: Ceres CDNA ID no. 40351701
  misc_feature (43)..(216): Pfam Name: adh_short PFAM Desc: short chain dehydrogenase
MASGEQKFPPQQQQTQPGKEHAMTPVPQFTSPDYKPSNKLQGKIALVTGGDSGIGRAVCNLFALEGATVAFTYVKGHEDKDARDTLEMIKRAKTSDAKDPMAIPSDLGYDENCKRVVDEVVSAYGCIDILVNNAAEQYECGTVEDIDEPRLERVFRTNIFSYFFMARHALKHMKEGSSIINTTSVNAYKGHAKLLDYTSTKGAIVAYTRGLALQLVSKGIRVNGVAPGPIWTPLIPASFKEEETAQFGAQVPMKRAGQPIEVAPSYVFLASNQCSSYITGQVLHPNGGTVVNG

SEQ ID NO: 6493 - DNA, 1274 bp, Glycine max
  misc_feature: Ceres CLONE ID no. 1239021
  misc_feature: Ceres CDNA ID no. 36569761
  CDS (31)..(1059): REFERENCED BY SEQ ID NO: 6494
ataccacactttctaaccaaccaaccatcaatggcagatgtaaccacctacctccgccaccaccgcgaccccgaccccgaccccgacgacgacgaccaaaccctaattccattcccttattgggatttggactttgatttcgaccccgaattccccacaaacactttctccttcaccgaccgcgaaaaccagatcaatttcgtcatggatctcttccaccagcgcgtggagcagtctcaactcaccgatcccctctccaacgacgccgttttcggcgtcatcgacggaatcgacttaggtttccccgccgccgacgacttcttcatcggacggagattctccgtcggatccgacgaatccgacggaggacactctcactcgcacgcggggattgacgacggtgtcctggggttctgcgcgcattccgacgaagactacaacgaaaacgacgacgttgcgagcatccctctctgctgggacgcgcttcaattggaagacaacaacaacaactacgatgacttcgagtgggaggaagtgatagacgagagagacgttctcagcatgctcgacgacaccgtttccgttaacctcggaatcgaagcagaagcagcagcagcagcagcagaagaagaagaagcagaatcagaagccagcattttggagtggcaagttttattgaactccaacaatttggaaggaccaaattcggagccttatttcggagacaacgaggatttcgtttacaccgcggactacgagatgatgctcgggcaattcaacgacgatgcgtttaatgggaagcctccggcctccgcctccgtcgtgaggaatcttccgtcggtggttgtgaccgaagctgacgtcgtttgcgcggtttgtaaagacgagtttggcgttggggaaggggtgaaggtgttgccgtgttcgcatcgttaccatgaggactgcattgtgccgtggttggggataagaaacacgtgtcccgtttgtcgctatgagttccccactgatgatgctgattatgagcggaggaaggcgcagagatctgttgttatgtgataatcatgatcatggtgttattattagggtcagtttttttttcttactttcagtgatagggtataaaaagtatagatttttttttttgctgctgaagaaaattgtgcttgttgattttccgaaatttgagttttgggatgatgcttctcttcgaattgtacttttgggatacatcacagaaacgattcatttttccatcaaaaaaaaaaaaaaaa

SEQ ID NO: 6494 - protein, 342 aa, Glycine max
  misc_feature: Ceres CLONE ID no. 1239021
  misc_feature: Ceres CDNA ID no. 36569761
  misc_feature (280)..(320): Pfam Name: zf PFAM Desc: Zinc finger
  misc_feature: Homolog of GI Number: 23507797 NR Desc: At5g08140/T22D6_80
  misc_feature: Homolog of GI Number: 50912357 NR Desc: zinc finger
  misc_feature: Homolog of GI Number: 77552862 NR Desc: Zinc finger
  misc_feature: Homolog of GI Number: 77548392 NR Desc: Zinc finger
  misc_feature: Homolog of GI Number: 30017245 NR Desc: At3g02340
  misc_feature: Homolog of GI Number: 4651204 NR Desc: ring finger protein
  misc_feature: Homolog of GI Number: 50947067 NR Desc: zinc finger protein family
  misc_feature: Homolog of GI Number: 31432769 NR Desc: putative zinc finger protein
  misc_feature: Homolog of GI Number: 61211690 NR Desc: Ubiquitin ligase protein CIP8
  misc_feature: Homolog of GI Number: 23308365 NR Desc: At3g19950/MPN9_19
MADVTTYLRHHRDPDPDPDDDDQTLIPFPYWDLDFDFDPEFPTNTFSFTDRENQINFVMDLFHQRVEQSQLTDPLSNDAVFGVIDGIDLGFPAADDFFIGRRFSVGSDESDGGHSHSHAGIDDGVLGFCAHSDEDYNENDDVASIPLCWDALQLEDNNNNYDDFEWEEVIDERDVLSMLDDTVSVNLGIEAEAAAAAAEEEEAESEASILEWQVLLNSNNLEGPNSEPYFGDNEDFVYTADYEMMLGQFNDDAFNGKPPASASVVRNLPSVVVTEADVVCAVCKDEFGVGEGVKVLPCSHRYHEDCIVPWLGIRNTCPVCRYEFPTDDADYERRKAQRSVVM

SEQ ID NO: 6495 - DNA, 1287 bp, Glycine max
  misc_feature: Ceres CLONE ID no. 1239203
  misc_feature: Ceres CDNA ID no. 36569763
  CDS (88)..(990): REFERENCED BY SEQ ID NO: 6496
aacccacttctactctactcattccacacccaacttacaaaaacccattcttttgctcactcattttcttaacgtagattaatcattatgtgtggcggtgccatcatcgctgacttcataccccgccgtggaggccgccgcctcacggcctccgagctctggccaaactccttcgccaaagacgatgactttgacttggattactcccacatcgctacccaacaaccctccactctcaaaaggtcccaacctcccaaagttagcgagcaggttgagaataagccggtgaagaggcagaggaagaatctctacagagggattcggcagcgtccgtggggcaaatgggccgcggagattcgcgatcctagaaaaggggttcgtgtctggttgggcacctttaacaccgcagaagaagccgcgagagcctacgatcgtgaagctcgaaaaatccgaggcaaaaaggctaaggtgaatttccccaacgaggacgacgaatattccattcaagctcgtaatccaattccaccccttcctttcgctccacaacaccctcccctgtaccagcaacagtaccgttgcgatctcaacaatgcccctaaaaatctcaactttgagttcggttacgacctgaaccacgcggaggcgttcccatcccgcgtggacgccgtcaacgctgactcggtggttgtctccgttgatgaaaattcggggtcagcgtcgggttcagagggtgcttattcgacaacggagttcatggggtccgttcagaacgggaacggttatttgggtggcacggtaatggagaagaaggagaaagagacagaggttattgaagctgaagaagaaaagaacaaagtgctggagctttctgaggagctgatggcgtacgaaaattacatgaagttttatcagattccgtactatgatggacaatccacgacgaataatgttcaggaaagcttggttggggatctctggagtttcgattagcgaggaatatatcaaggatgttcttttcatgcatgtgttttgtttcttcgtcaatgctgtgaaagcttttgctttctccctccattctgctgactaaactaacatctctggcgttttggcagggatgcacaggaatttaaattgagtgcttcggtagaaatggtctcattagttagtgctatgctatcatctggttttgttgaattgtaattttttgttttggtggtatgttgaacagtaattttactggatatattcaagtctatttgaattccaattccaaaaaaaaaaaaaaaa

SEQ ID NO: 6496 - protein, 300 aa, Glycine max
  misc_feature: Ceres CLONE ID no. 1239203
  misc_feature: Ceres CDNA ID no. 36569763
  misc_feature: Useful for making plants with modulated growth and phenotype characteristics
  misc_feature: The sequence is a functional homolog of  SEQ ID NO 151 in the  11/479,226 US patent application
  misc_feature: The sequence is a functional homolog of  SEQ ID NO 32 in the  10/412,699 US patent application
  misc_feature (73)..(136): Pfam Name: AP2 PFAM Desc: AP2 domain
  misc_feature: Homolog of GI Number: 38257027 NR Desc: ERF
  misc_feature: Homolog of GI Number: 42561972 NR Desc: ethylene
  misc_feature: Homolog of GI Number: 28274830 NR Desc: ethylene response factor 2
  misc_feature: Homolog of GI Number: 40557189 NR Desc: ethylene
  misc_feature: Homolog of GI Number: 1688233 NR Desc: DNA binding protein homolog
  misc_feature: Homolog of GI Number: 41353548 NR Desc: ERF
  misc_feature: Homolog of GI Number: 59800341 NR Desc: ethylene
  misc_feature: Homolog of GI Number: 22074046 NR Desc: transcription factor JERF1
  misc_feature: Homolog of GI Number: 2529675 NR Desc: putative AP2 domain transcription factor
  misc_feature: Homolog of GI Number: 37954364 NR Desc: PF1
MCGGAIIADFIPRRGGRRLTASELWPNSFAKDDDFDLDYSHIATQQPSTLKRSQPPKVSEQVENKPVKRQRKNLYRGIRQRPWGKWAAEIRDPRKGVRVWLGTFNTAEEAARAYDREARKIRGKKAKVNFPNEDDEYSIQARNPIPPLPFAPQHPPLYQQQYRCDLNNAPKNLNFEFGYDLNHAEAFPSRVDAVNADSVVVSVDENSGSASGSEGAYSTTEFMGSVQNGNGYLGGTVMEKKEKETEVIEAEEEKNKVLELSEELMAYENYMKFYQIPYYDGQSTTNNVQESLVGDLWSFD

SEQ ID NO: 6497 - DNA, 803 bp, Glycine max
  misc_feature: Ceres CLONE ID no. 1239350
  misc_feature: Ceres CDNA ID no. 29191838
  CDS (42)..(605): REFERENCED BY SEQ ID NO: 6498
ataaatattaagtagtttgttttctgcatgttaggaataggatggagggggttgagagcaaagaaagagaagtgatggtggcaaaaccagttgcagtgagtgtcagtgatttgcttctgaggctgttggccttcacagtcactcttgtcgctgctatagtcattgcggtcgataagcagaccaaggttgttcccattcagctttcagattccttaccacctttggatgttcctctcactgctaagtggcatcaaatgtctgccattgtgtactttctggtgaccaatgcaatagcatgcacgtatgcagtcctgtctctactccttgccctcgtgaatagaggtaaaagcaaaggcttgtggacattgatcgctgtcctcgacgcattcatggtggctttgctcttttccggcaacggagccgccgcggcagttggtgtccttggctacaaaggaaactctcatgtgaattggaacaaggtgtgcaatgtctttgggaaattttgtgatcaaatggctgcttcaattggtgtgtcactgattggatcattagcattcctcttgctcgtgattattcctggggtgaggcttcatcggagaaattagttaataaattaataaacctagtgttattgattatccaatttaaagtttatcttgagatatttaattgttattgtaacatgtgtgagaacattaatcgttgtcgtgagtcctcaaatcaggttccagtctattatgtacaagacacgtgttttattccaaattaactatttagtgtgtgcggcaaaaaaaaaaaaaaaa

SEQ ID NO: 6498 - protein, 187 aa, Glycine max
  misc_feature: Ceres CLONE ID no. 1239350
  misc_feature: Ceres CDNA ID no. 29191838
  misc_feature: Homolog of GI Number: 50936677 NR Desc: integral membrane protein
  misc_feature: Homolog of GI Number: 50929767 NR Desc: OSJNBa0088H09.7
  misc_feature: Homolog of GI Number: 50906387 NR Desc: integral membrane family protein
  misc_feature: Homolog of GI Number: 50912685 NR Desc: integral membrane family protein
  misc_feature: Homolog of GI Number: 50922337 NR Desc: OSJNBa0071G03.1
MEGVESKEREVMVAKPVAVSVSDLLLRLLAFTVTLVAAIVIAVDKQTKVVPIQLSDSLPPLDVPLTAKWHQMSAIVYFLVTNAIACTYAVLSLLLALVNRGKSKGLWTLIAVLDAFMVALLFSGNGAAAAVGVLGYKGNSHVNWNKVCNVFGKFCDQMAASIGVSLIGSLAFLLLVIIPGVRLHRRN

SEQ ID NO: 6499 - DNA, 1422 bp, Glycine max
  misc_feature: Ceres CLONE ID no. 1239667
  misc_feature: Ceres CDNA ID no. 40351702
  CDS (88)..(1230): REFERENCED BY SEQ ID NO: 6500
ctattctaggtttttacgcaccacgtatccctgagaaaagagaggaaccacactctctaagccaaagcaaaagcagcagcagcagcaatggttaaagacacaaagcctttagcctatgctgccaataatggataccaacaaaagggttcttcttttgattttgatcctagcgctcctccaccgtttaagattgcagaaatcagagcttcaataccaaaacattgctgggtcaagaatccatggagatccctcagttatgttctcagggatgtgcttgtaattgctgcattggtggctgcagcaattcacttcgacaactggcttctctggctaatctattgccccattcaaggcacaatgttctgggctctctttgttcttggacatgattgtggccatggaagcttttcagatagccctttgctgaatagcctggtgggacacatcttgcattcctcaattcttgtgccataccatggatggagaattagccacagaactcaccatcaaaaccatggacacattgagaaggatgagtcatgggttccattaacagagaagatttacaagaatctagacagcatgacaagactcattagattcactgtgccatttccattgtttgtgtatccaatttatttgttttcaagaagccccggaaaggaaggctctcacttcaatccctacagcaatctgttcccacccagtgagagaaaaggaatagcaatatcaacactgtgttgggctaccatgttttctctgcttatctatctctcattcataactagtccacttctagtgctcaagctctatggaattccatattggatatttgttatgtggctggactttgtcacatacttgcatcaccatggtcaccaccagaaactgccttggtaccgcggcaaggaatggagttatttaagaggtggcctcaccactgtggatcgtgactatggttggatcaataacattcaccatgacattggcacccatgttatccaccatcttttcccccaaattcctcattatcacctcgttgaagcgacacaagcagcaaaaccagttcttggagattactaccgtgagccagaaagatctgcgccattaccatttcatctaataaagtatttaattcagagtatgagacaagaccacttcgtaagtgacactggagatgttgtttattatcagactgattctctgctcctccactcgcaacgagactgagtttcaaactttttgggttattatttattggattctagctactcaaattacttttttttaatgttatgttttttggagtttaacgttttctgaacaacttgcaaattacttgcatagagagacatggaatatttatttgaaattagtaaggtagtaataataaattttgaattgccaaaaaaaaaaaaaaaa

SEQ ID NO: 6500 - protein, 380 aa, Glycine max
  misc_feature: Ceres CLONE ID no. 1239667
  misc_feature: Ceres CDNA ID no. 40351702
  misc_feature (84)..(328): Pfam Name: FA_desaturase PFAM Desc: Fatty acid desaturase
MVKDTKPLAYAANNGYQQKGSSFDFDPSAPPPFKIAEIRASIPKHCWVKNPWRSLSYVLRDVLVIAALVAAAIHFDNWLLWLIYCPIQGTMFWALFVLGHDCGHGSFSDSPLLNSLVGHILHSSILVPYHGWRISHRTHHQNHGHIEKDESWVPLTEKIYKNLDSMTRLIRFTVPFPLFVYPIYLFSRSPGKEGSHFNPYSNLFPPSERKGIAISTLCWATMFSLLIYLSFITSPLLVLKLYGIPYWIFVMWLDFVTYLHHHGHHQKLPWYRGKEWSYLRGGLTTVDRDYGWINNIHHDIGTHVIHHLFPQIPHYHLVEATQAAKPVLGDYYREPERSAPLPFHLIKYLIQSMRQDHFVSDTGDVVYYQTDSLLLHSQRD

SEQ ID NO: 6501 - DNA, 1223 bp, Glycine max
  misc_feature: Ceres CLONE ID no. 1239996
  misc_feature: Ceres CDNA ID no. 40351703
  CDS (407)..(865): REFERENCED BY SEQ ID NO: 6502
ttcccagtttcaacttcatgcctcagtgaatttctctgcaattttgctcccaaaaatttcatctctcgccattgccgtaggagagcacttcaattttctctccaataagacaattcgttctttcccttctcaatttccggcgagttctcccaatcttcgattttgttctgcaacatttatcgcttccagaatccagatctggatggacatgaaccatcgtttgcatttggggcaaccttgatttgggttttgaagtgctttatggaaactggggtctctaaatttttaaatttttgtctaatgacgagtggcgtgcctagatttgagtaactgggtcgctgctacagttgtggaagtttgagaattgggcttcgatttgtttgaggaagtttgtcgggtcggcgtcatgttctatggttcggtggtatgggacccttggcttattgttgctcagattgtgtgtcttcaatgtttgtactatatcaccctggggttgttcttgtcgatacttgttggcacacgtgtgtctcggttgagtctcgtgtatttctttgactatgttgcgattactacctctaccgttactggttggtgtgttattgcttcgtttctgctcagctcagttgcaggggcggtatatgtgttttgtttgattgaaagatcaaagaagtgcttggatttttcagccacagtctacattgtccatctttttatatgcattgtgtatgggggttggccctcatctataacatggtggattgtgaatggtactggaattgcagtgatggctttgctcggtgaacgtctgtgcatgaagcgtgaactccaggagatatcattgacacgatttcggtcaaatgtttgattggtagaaggtacttttgaatacaagaaacaagtgctgcaggatggcaactacttttgcttctatatattggatgatcatgatcttcaagatgaagcccacgaagtgaatagttctattctgccattgaaagacctgcatttattttctattctttagttggaatagaattgaaacatatataaccagacgagactaagtatataattttacaggaatttccggaagtcttattgtaattttattctttttacccttttgtgagttttcggatctgtttacaatctcatatgttacctctttctatcccattacttttaatgaggttgttatatcaggtagcaaaaaaaaaaaaaaa

SEQ ID NO: 6502 - protein, 152 aa, Glycine max
  misc_feature: Ceres CLONE ID no. 1239996
  misc_feature: Ceres CDNA ID no. 40351703
MFYGSVVWDPWLIVAQIVCLQCLYYITLGLFLSILVGTRVSRLSLVYFFDYVAITTSTVTGWCVIASFLLSSVAGAVYVFCLIERSKKCLDFSATVYIVHLFICIVYGGWPSSITWWIVNGTGIAVMALLGERLCMKRELQEISLTRFRSNV

SEQ ID NO: 6503 - DNA, 907 bp, Glycine max
  misc_feature: Ceres CLONE ID no. 1240150
  misc_feature: Ceres CDNA ID no. 25445672
  CDS (54)..(647): REFERENCED BY SEQ ID NO: 6504
agctgcgaaatccttgtgcaccgtaagggttgtgaagcaggcagagaagagccatggtgcacgtttccttctaccgaaactatgggaaaaccttcaagaagcctcgtcgtccgtacgagaaggagcgtttggacgccgagttgaagctggtcggtgagtacggacttcgctgcaagagggagttgtggagggttcagtacgctctcagccgcatccgtaacaacgccagaaatcttttgaccctcgacgagaagaacccgcgccgtatcttcgagggagaagcccttctccgaagaatgttccgttacggacttctcgatgagactcagaacaagcttgattacgtgttggctctcaccgtcgagaactttctcgaacgccgcctccaaaccctcgttttcaagtctggcatggccaagtccatccaccacgccagagtcctcatcaggcagaggcacatcagggttgggagacaggtggtgaacatcccatcattcatggttagggttgattcgcagaagcacattgacttctcactgaccagtccacttggtggtggtcgtccaggacgtgtgaagagaaagaaccaaagggctgctgctaagaaggctgctggtggagatggagatgaggaggacgaagattaaattattaatggctactgatatttaggccttgcggttgttattttttttatattatctgtgttggtagacattttagatttttgaaatggtctgacttgttataattttgccatccttgtttcttgttttgaggtaaagctgtgcctgagatatcatggttttgaactgttctttctaaactattcaagttttgttccaatgcctgtggtgatcaatggtattcttgcaacttgattcaactgctaaaaaaaaaaaaaaaa

SEQ ID NO: 6504 - protein, 197 aa, Glycine max
  misc_feature: Ceres CLONE ID no. 1240150
  misc_feature: Ceres CDNA ID no. 25445672
  misc_feature (109)..(156): Pfam Name: S4 PFAM Desc: S4 domain
  misc_feature (7)..(108): Pfam Name: Ribosomal_S4 PFAM Desc: Ribosomal protein S4/S9 N
  misc_feature: Homolog of GI Number: 49524072 NR Desc: 40S ribosomal protein S9
  misc_feature: Homolog of GI Number: 53793731 NR Desc: putative ribosomal protein
  misc_feature: Homolog of GI Number: 21593688 NR Desc: 40S ribosomal protein S9
  misc_feature: Homolog of GI Number: 77551804 NR Desc: ribosomal protein S4
  misc_feature: Homolog of GI Number: 47027041 NR Desc: 40S ribosomal protein S9
  misc_feature: Homolog of GI Number: 38566648 NR Desc: At5g15200
  misc_feature: Homolog of GI Number: 77551805 NR Desc: ribosomal protein S4
  misc_feature: Homolog of GI Number: 6440857 NR Desc: 40S ribosomal protein S9
  misc_feature: Homolog of GI Number: 1321917 NR Desc: cytoplasmic ribosomal protein S7
MVHVSFYRNYGKTFKKPRRPYEKERLDAELKLVGEYGLRCKRELWRVQYALSRIRNNARNLLTLDEKNPRRIFEGEALLRRMFRYGLLDETQNKLDYVLALTVENFLERRLQTLVFKSGMAKSIHHARVLIRQRHIRVGRQVVNIPSFMVRVDSQKHIDFSLTSPLGGGRPGRVKRKNQRAAAKKAAGGDGDEEDED

SEQ ID NO: 6505 - DNA, 763 bp, Glycine max
  misc_feature: Ceres CLONE ID no. 1240157
  misc_feature: Ceres CDNA ID no. 36569751
  CDS (79)..(558): REFERENCED BY SEQ ID NO: 6506
gagagaagttattagggtttttgagtgcggcggtccaaacactcttctctgcagcttttgcctacaactcccttcaccatggctgaacaaaccgagaaagcttttctgaagcaaccaaaagtgtttctcagcacaaagaagactgggaagggaaagagacctggaaaaggtgggaaccgcttttggaagtccattgggcttggatttaagactcccagggaagccatcgaaggaacctatattgacaagaagtgccccttcactggcaatgtttccatccgtggccgtatcttggctggaacatgtcacagtgctaagatgaacaggactattattgttagaaggaattatctccattttatcaagaagtaccagaggtacgagaagaggcactcaaatattcctgctcatatatcacctgccttccgtgtgaaggaaggggatcacgttattattggtcaatgcaggcctctctctaagacagtgaggttcaatgtcttgaaagtgatcccagctggatcttctagtggtgcaaagaaggcttttactggaatgtgagcttcgatttccagtttttattgaagaaaaatgttaccttgttatttagtagatctgatttcttttctggaaggtgacatattaaaaccttatcaattttggattttctttgaggtttcgttctggctttatgtttaggattttgttatacattatgtttttcgaatactatttgccttttaatttttgaaaaaaaaaaaaaaaa

SEQ ID NO: 6506 - protein, 159 aa, Glycine max; identical to SEQ ID NO: 3436
  misc_feature: Ceres CLONE ID no. 1240157
  misc_feature: Ceres CDNA ID no. 36569751
  misc_feature (74)..(143): Pfam Name: Ribosomal_S17 PFAM Desc: Ribosomal protein S17
  misc_feature: Homolog of GI Number: 454848 NR Desc: ribosomal protein S11
  misc_feature: Homolog of GI Number: 62287477 NR Desc: 40S ribosomal protein S11
  misc_feature: Homolog of GI Number: 50938417 NR Desc: putative 40S ribosomal protein S11
  misc_feature: Homolog of GI Number: 22470 NR Desc: ribosomal protein S11
  misc_feature: Homolog of GI Number: 21593611 NR Desc: cytosolic ribosomal protein S11
  misc_feature: Homolog of GI Number: 166867 NR Desc: ribosomal protein S11
  misc_feature: Homolog of GI Number: 50928689 NR Desc: OSJNBa0070C17.20
  misc_feature: Homolog of GI Number: 20258899 NR Desc: putative ribosomal protein S11
  misc_feature: Homolog of GI Number: 17065614 NR Desc: putative 40S ribosomal protein S11
  misc_feature: Homolog of GI Number: 34899760 NR Desc: putative 40S ribosomal protein S11

SEQ ID NO: 6507 - DNA, 897 bp, Glycine max
  misc_feature: Ceres CLONE ID no. 1240158
  misc_feature: Ceres CDNA ID no. 24766059
  CDS (76)..(726): REFERENCED BY SEQ ID NO: 6508
tagctagggtttcagctgtctgctgttagatctgtacccgcctagccattgatttggaaaagtccaacttcaaggatgagtaagcttcagagtgatgctctaagagaagctatctcaggaatcatggctgattccaaggaaaagaacaggaaatttgtggagaccattgaactccaaattgggttgaaaaattatgatccccagaaggacaagcgtttcagtggctctgttaagttgcctcatattcctcgccccaagatgaagatttgtatgcttggagatgcccagcacgttgaggaggctgagaagataggattggactacatggatgttgaggccttgaagaagcttaacaaaaacaaaaagttggtgaaaaaactagccaaaaaatatcatgcctttttagcctctgaagcagtcatcaagcagattcctcgtctcttgggacctggtctcaacaaggcagggaagttccctacacttgtgactcaccaagaatctctcgagtcaaaggttaatgagaccaaggccatggtcaagttccagcttaagaaggttctctgcatgggagtagctgtggggaatgttagcatggaggaaaagcaaatcttccaaaatgtacaactgagtgttaacttccttgtctctttgctgaaaaagaattggcagaacgttcgctgcctatatctgaagagtaccatggggaaatcgtaccgtgtcttttgagtagtggttcttaaaattcagtgaatttctgattgcacttaatatattgtcatgataggttggacagaatttttcatcgttctacagttttgttggatgagtattttttggctagtatttcttgttattgacatttatgtttcaagtgctttgctaaaaaaaaaaaaaaaa

SEQ ID NO: 6508 - protein, 216 aa, Glycine max
  misc_feature: Ceres CLONE ID no. 1240158
  misc_feature: Ceres CDNA ID no. 24766059
  misc_feature (23)..(212): Pfam Name: Ribosomal_L1 PFAM Desc: Ribosomal protein L1p/L10e family
  misc_feature: Homolog of GI Number: 50252685 NR Desc: putative ribosomal protein L10a
  misc_feature: Homolog of GI Number: 50948455 NR Desc: putative 60S ribosomal protein L10A
  misc_feature: Homolog of GI Number: 20521241 NR Desc: putative 60S ribosomal protein
  misc_feature: Homolog of GI Number: 21386915 NR Desc: putative ribosomal protein L10
  misc_feature: Homolog of GI Number: 9757825 NR Desc: 60S ribosomal protein L10A
  misc_feature: Homolog of GI Number: 57471702 NR Desc: ribosomal protein L10A
  misc_feature: Homolog of GI Number: 25294932 NR Desc: 60S ribosomal protein L10A
  misc_feature: Homolog of GI Number: 47026982 NR Desc: 60S ribosomal protein L10A
  misc_feature: Homolog of GI Number: 6664304 NR Desc: T27G7.6
  misc_feature: Homolog of GI Number: 70909669 NR Desc: ribosomal protein L10Ae
MSKLQSDALREAISGIMADSKEKNRKFVETIELQIGLKNYDPQKDKRFSGSVKLPHIPRPKMKICMLGDAQHVEEAEKIGLDYMDVEALKKLNKNKKLVKKLAKKYHAFLASEAVIKQIPRLLGPGLNKAGKFPTLVTHQESLESKVNETKAMVKFQLKKVLCMGVAVGNVSMEEKQIFQNVQLSVNFLVSLLKKNWQNVRCLYLKSTMGKSYRVF

SEQ ID NO: 6509 - DNA, 830 bp, Glycine max
  misc_feature: Ceres CLONE ID no. 1240174
  misc_feature: Ceres CDNA ID no. 25446997
  CDS (73)..(693): REFERENCED BY SEQ ID NO: 6510
actttagggctaataagcttaaagggtagcgtgtgtgttcccattccctgtggtgaaaggctaaggaggaagatggtgctttcggaggaggaaatgggtcgtctgtaccgaataaggaagacggtgatgcaaatgcttcgggacaggggttttctggtgggtgacttcgagatcaacatgtcgaagcatgagttcaagtccaagtacggcgagcacatgaagcgcgaggacctggtcatcaacaagtccaagaaggacaactccggcgaccagatctacgtcttcttccccgacgagcccaaggtcggcgtcaagaccatgaagacctacaccaaccgcatgaactccgaaaacgtctatagagccatcctcgtcacccagaccaacctcacccccttcgcccgcacctgcatcagcgaaatctcctccaaattccacctcgaggtctttcaggaggccgaacttctcgttaacattaaagagcatgagcttgtccccgaacatcaggttctcactgacgccgagaagaaaaccttgcttgagagatacactgtcaaggaaactcagctacctaggattcaggtcacagatcctgttgcaagatattatggattgaagcgtggacaagttgtcaagattatccggccaagtgaaactgctggcagatatgtgacataccgatttgttgtataagaatttgctttaacatatttggttatactgtcatagtgatggatagggatataaagccttctttttgcaaggggggaactcttgatttacaaggaaatgaaatgtgtgtttgtttctgtttaaaaaaaaaaaaaaaa

SEQ ID NO: 6510 - protein, 206 aa, Glycine max; identical to SEQ ID NO: 4194
  misc_feature: Ceres CLONE ID no. 1240174
  misc_feature: Ceres CDNA ID no. 25446997
  misc_feature (133)..(206): Pfam Name: RNA_pol_Rpb5_C PFAM Desc: RNA polymerase Rpb5
  misc_feature (2)..(91): Pfam Name: RNA_pol_Rpb5_N PFAM Desc: RNA polymerase Rpb5
  misc_feature: Homolog of GI Number: 21554280 NR Desc: RNA polymerase I
  misc_feature: Homolog of GI Number: 55296830 NR Desc: putative DNA
  misc_feature: Homolog of GI Number: 50925339 NR Desc: OJ991113_30.8
  misc_feature: Homolog of GI Number: 48124579 NR Desc: similar to ENSANGP00000006082
  misc_feature: Homolog of GI Number: 50417194 NR Desc: Zgc:101098 protein
  misc_feature: Homolog of GI Number: 31235339 NR Desc: ENSANGP00000006082
  misc_feature: Homolog of GI Number: 1060912 NR Desc: RPB5
  misc_feature: Homolog of GI Number: 34862325 NR Desc: similar to Polr2e protein
  misc_feature: Homolog of GI Number: 46228002 NR Desc: putative DNA
  misc_feature: Useful for making plants that grow better in shade

SEQ ID NO: 6511 - DNA, 980 bp, Glycine max
  misc_feature: Ceres CLONE ID no. 1240300
  misc_feature: Ceres CDNA ID no. 25445487
  CDS (219)..(749): REFERENCED BY SEQ ID NO: 6512
ttttttctttttaattaaatctctttccattttttaatttatttatcttcctttaaattcaatcctcagatctttgtaagagtcatccatatcatacccttcactttcctgggaaaaaattggaacctgcctctgttaaagtttgtatttttctgagtgggtgggttgattgagagtgctgtgcaagctttggaactttttcccaacctgctacttcaatggccactgaagaggttaacaaacctcaatcacttcctccataccctgagatgatagtgaaaacacttgaagcactgaatgagccaaatggatcgaacaagtcagcaatatcaaagtacatagaaaccacctacggtgagttgccagacgcaaccgttttggggagtcaccttaacaagatgaaagacagtggagagctttctttcaaacagaacaattacatgaaagctgacccaaatgccccaccaaagaggggccgtggaaggccaccaaagccaaagactccattgccaccaggcactgttgtgtcccctccaaggccaaggggtcgtcccccaaaagaccctaatgcccctcctaagtctcccaaggctaaggccacccctggaagtggcaggccaagaggaaggcctaagaaggttcctcggtctccggccgtcgccgctccgaccgccgtctccagtggcaggcctcgaggtaggcctcccaaggtgaagcctcagttgacagaagtcagtgttgagtcatagaatgacttctttctttctaattgatgtcaaaagatgtagtgttctactcttgaagaagtgatgatgggtgtgatcttagattttgtgttgatgtaatttctttgtaaaattatgtagtggtagctaacttatcatgaggttctgtgttggtttttcttcctaaattattatcaaagtgaacagtgacttgaactaatgtgcatttagttttcaataaaaaaaaaaaaaaaa

SEQ ID NO: 6512 - protein, 176 aa, Glycine max
  misc_feature: Ceres CLONE ID no. 1240300
  misc_feature: Ceres CDNA ID no. 25445487
  misc_feature (106)..(118): Pfam Name: AT_hook PFAM Desc: AT hook motif
  misc_feature (11)..(78): Pfam Name: Linker_histone PFAM Desc: linker histone H1 and H5 family
  misc_feature: Homolog of GI Number: 18647 NR Desc: HMG
  misc_feature: Homolog of GI Number: 1181589 NR Desc: high mobility group protein
  misc_feature: Homolog of GI Number: 1181591 NR Desc: high mobility group protein
  misc_feature: Homolog of GI Number: 18649 NR Desc: HMG
  misc_feature: Homolog of GI Number: 1435175 NR Desc: HMG
  misc_feature: Homolog of GI Number: 50945947 NR Desc: putative high mobility group I/Y
  misc_feature: Homolog of GI Number: 28466927 NR Desc: At1g14900
  misc_feature: Homolog of GI Number: 1808590 NR Desc: HMG
  misc_feature: Homolog of GI Number: 47027043 NR Desc: high mobility group I/Y
  misc_feature: Homolog of GI Number: 6651027 NR Desc: high mobility group protein I/Y
  misc_feature: Useful for delaying flowering time
  misc_feature: Useful for sterility
MATEEVNKPQSLPPYPEMIVKTLEALNEPNGSNKSAISKYIETTYGELPDATVLGSHLNKMKDSGELSFKQNNYMKADPNAPPKRGRGRPPKPKTPLPPGTVVSPPRPRGRPPKDPNAPPKSPKAKATPGSGRPRGRPKKVPRSPAVAAPTAVSSGRPRGRPPKVKPQLTEVSVES

SEQ ID NO: 6513 - DNA, 1162 bp, Glycine max
  misc_feature: Ceres CLONE ID no. 1240371
  misc_feature: Ceres CDNA ID no. 36569758
  CDS (91)..(861): REFERENCED BY SEQ ID NO: 6514
aacttcaatacaaaaccaaaacagtaaagctaacttcaacacctttaattttctaaaagtaattcagcggctgaataccaagcggagaagatgagtcaggagcagccacggcgtcccaaaggccaaaaccccatcaaatacggcgacgtttttgtcgtctccggcgaccttgcacagaagcccgtcgcaccggaagatgctgccatgatgcaaagcgcggaaactcgagtgctcggacaaacccaacccggcggagcagcttccgtcatgcaatctgccgccaccaggaatgaacaggctggccttgtcggtcaccgggacgtcaccgacgttaccggcgaccgtggcgtcacagtcacagaaactaaagtccctggaagacgcattataaccgaggctgttggtggccaggttgtggagcagtatgtggaggcaactccggttgaggcagggcgaagcagtgcaattaaggagaatgccataacaataggagaggcattggaggcgacggcacagactgtgggtcagaaagcggtggatcagagtgacgcctccgcgattcaggcggcggaggtgagagcaacgggaagtaacgttataacgccgggtggacttgcggctatggctcaatcagctgctgcttataatgctgactgcaagcttgaccaggacaaggtcaagctcgccgacattttggccggagccacagccaagttgcccgcggacaaggccgccacactgcaagatgctgaaggtgtagcgtgtgctgaggtgaggaacaaccctgatgccaccgccactcccggtggcgtagccgcttctgttgcggctgctgctaggctcaatgaaaatgttaagtaacgagtcatgttatgtgtcttgataatcatacttttgtttcatgatgtgtggtgttgatgtgttatagtctatagtgtattaataagtgtaagtggtgcaacatcttgtttttctttcttgtactctttgtgagttatattaattactggttttaaggactctacttaaggtgatgtatgtatactatgcgctatatgcatttctgtggttatcagttaataatatgtgctccaatcttgtaaaaaaaaaaaaaaaaaaaaaaaaaaaaaaaaaaaaaaaaaaaataaaaaaaaaaaaaaaa

SEQ ID NO: 6514 - protein, 256 aa, Glycine max
  misc_feature: Ceres CLONE ID no. 1240371
  misc_feature: Ceres CDNA ID no. 36569758
  misc_feature (130)..(191): Pfam Name: SMP PFAM Desc: Seed maturation protein
  misc_feature: Homolog of GI Number: 6648966 NR Desc: seed maturation protein PM25
  misc_feature: Homolog of GI Number: 6648968 NR Desc: seed maturation protein PM26
  misc_feature: Homolog of GI Number: 6648964 NR Desc: seed maturation protein PM24
  misc_feature: Homolog of GI Number: 77997745 NR Desc: seed maturation protein
  misc_feature: Homolog of GI Number: 81554 NR Desc: embryonic abundant protein gD
  misc_feature: Homolog of GI Number: 28394023 NR Desc: putative LEA protein
  misc_feature: Homolog of GI Number: 23507757 NR Desc: At3g22500/F16J14_6
  misc_feature: Homolog of GI Number: 57506542 NR Desc: ECP31 protein
  misc_feature: Homolog of GI Number: 1526422 NR Desc: LEA protein in group 5
  misc_feature: Homolog of GI Number: 18337 NR Desc: embryonic cell protein
MSQEQPRRPKGQNPIKYGDVFVVSGDLAQKPVAPEDAAMMQSAETRVLGQTQPGGAASVMQSAATRNEQAGLVGHRDVTDVTGDRGVTVTETKVPGRRIITEAVGGQVVEQYVEATPVEAGRSSAIKENAITIGEALEATAQTVGQKAVDQSDASAIQAAEVRATGSNVITPGGLAAMAQSAAAYNADCKLDQDKVKLADILAGATAKLPADKAATLQDAEGVACAEVRNNPDATATPGGVAASVAAAARLNENVK

SEQ ID NO: 6515 - DNA, 1405 bp, Glycine max
  misc_feature: Ceres CLONE ID no. 1240447
  misc_feature: Ceres CDNA ID no. 25446812
  CDS (52)..(1131): REFERENCED BY SEQ ID NO: 6516
aatttcaattccatttgctctctggaccgagtcaggcggcggcgaatcggcatgactcggcgctgctcccactgcaccaacaacggccacaactcccggacatgcccgtcgcggggagggggcggcgtcaagctgttcggggtgaggctgacggatggatcaatcataaagaagagcgctagcatggggaaccttaacctctcctcctcctcctccgccgccgccgcacatctgcaattccgttcatctccttcttcttccaacctccccgcggcctcatcgcccaatccaagctccccgtgctccgacccgccccaaggctacttgtccgatgaccccgcccacgtctccaccttcgctaaccgccgcggtgatagaaaaaaaggtgtgccatggactgaagaagaacatcggctgttcttaattggtctccagaagctgggcaaaggagactggcgtgggatagcacgtaattttgttgtatcaagaacccctactcaagtagcaagtcatgcccaaaagtattttatccggcagagtcatgctaccaggagaaagagacgttccagcctttttgacatggttccagatatgtcttcagatcaaccttctgtgccagaagaacaagtgctgcttccacctcccgagaactcacaaccttgcaatgaaaaatcacagccctcattaaatctctccctcaaatcagaatttgaacctatggagactacttctcaagaaaatgtgcaacagaccaatgaacctatgatgggatcaaacagattgacaccaatggctcctcatggatgctttcccgcatatttacctgttccttttcccatgtggccatcaacttgggttcacccctttgaagaagttaagggaggagagacatgccaccatcagatccacaagccaatcccagtcattccaaaggaacctgttaatgttgacgaacttgtgggaatgtctcatctaagcattggggaagcacaggtacgtgatagagagccttcccctctttccataaagttgttaggagagccctcaaggcagtcagcattccatgcaaatgtcccggttggtagttcggatttaaacaatggcaaggacaacgcaattcaagctgtctgagcttgtaaggtctggtgaagacagcagcagtaattaagccttcttttgctcatcttttcatttgtaccattatatatcattttttttattcctgatccctagcatttaatcttccaattagtagcaagttatatggtggtatgtagatcaggttagatcaattcttggaaaatatttattctttctaactgtaaacaaatgaagcttaaataatcaaatagcaccaagaggttctgttctgttcctcttggtttggctaaaaaaaaaaaaaaaa

SEQ ID NO: 6516 - protein, 359 aa, Glycine max
  misc_feature: Ceres CLONE ID no. 1240447
  misc_feature: Ceres CDNA ID no. 25446812
  misc_feature (112)..(159): Pfam Name: Myb_DNA PFAM Desc: Myb
  misc_feature: Homolog of GI Number: 29028776 NR Desc: At3g16350
  misc_feature: Homolog of GI Number: 41618924 NR Desc: MYB transcription factor
  misc_feature: Homolog of GI Number: 9279717 NR Desc: Myb
  misc_feature: Homolog of GI Number: 7705206 NR Desc: MybSt1
  misc_feature: Homolog of GI Number: 55771338 NR Desc: putative MybSt1
  misc_feature: Homolog of GI Number: 1076660 NR Desc: D13F
  misc_feature: Homolog of GI Number: 24850307 NR Desc: transcription factor MYBS3
  misc_feature: Homolog of GI Number: 37536856 NR Desc: putative Myb
  misc_feature: Homolog of GI Number: 50941057 NR Desc: putative D13F protein
  misc_feature: Homolog of GI Number: 55773675 NR Desc: putative MCB2 protein
MTRRCSHCTNNGHNSRTCPSRGGGGVKLFGVRLTDGSIIKKSASMGNLNLSSSSSAAAAHLQFRSSPSSSNLPAASSPNPSSPCSDPPQGYLSDDPAHVSTFANRRGDRKKGVPWTEEEHRLFLIGLQKLGKGDWRGIARNFVVSRTPTQVASHAQKYFIRQSHATRRKRRSSLFDMVPDMSSDQPSVPEEQVLLPPPENSQPCNEKSQPSLNLSLKSEFEPMETTSQENVQQTNEPMMGSNRLTPMAPHGCFPAYLPVPFPMWPSTWVHPFEEVKGGETCHHQIHKPIPVIPKEPVNVDELVGMSHLSIGEAQVRDREPSPLSIKLLGEPSRQSAFHANVPVGSSDLNNGKDNAIQAV

SEQ ID NO: 6517 - DNA, 1066 bp, Glycine max
  misc_feature: Ceres CLONE ID no. 1240524
  misc_feature: Ceres CDNA ID no. 25446701
  CDS (123)..(731): REFERENCED BY SEQ ID NO: 6518
agaaagaaaagcgagagtaacttcgaatctgattttcatcccttaacaccaacgccaacgccaattccattcagatcacagtcccttcgattcctgctgcaacatactttcaaagccctaaaatggaggggactgtcttcactcctgcactgcaagaaattgagcatgtaaagtctgatcaaggagaaattctgagcaagcctttcttggatgcgtgcaaacacatattgcctgtaatagataagtttggagctgctatggcccttgttaaatctgacataggtggtaacatatcgagattggaaactatgtattcttccaatccaaccagatttaactacctgtacagtttggtacaggtagaggttaaaactaaaacagctaaatcatcatccagttgtaccaatggacttctttggctcacaagagcaatggatttcttggtggctttgttccgaaacttaatcgagcatgaagattggccaatgtcacaagcatgtacagattcgtataacaagactctgaagaagtggcatggctggcttgctagttcaagcttcacagtagtcatgaagcttgctcctgataggaagaagtttatggacgtgataggaggcactggcaatatcagtgctgacattgagaaattttgtacaaccttttctcctctccttgaagagaatcacaagtttttggctcgatttggcttagatgatatgaaggcatcatgaatcacagattcagaagttcccgatgagtagctcttgcatgctcacacccatttcatatctactttactagcatgataaataagcatcgactttcatattgtgcctctaagtactctattaagaacagtgtttctatggtatctcaaaatttgttacagttagtttattatgaaggttaatgctagtggagtttagtatcttcttgatgatttaccgattggctagaaccaaactcatccaactttggttcagtatatggatggctgcttggttgtataagtctgattcaattataaaatttataacaactgtttttatgaaaaaaaaaaaaaaaa

SEQ ID NO: 6518 - protein, 202 aa, Glycine max
  misc_feature: Ceres CLONE ID no. 1240524
  misc_feature: Ceres CDNA ID no. 25446701
  misc_feature: null
  misc_feature: Useful for making plants with modulated oxidative stress sensitivity
  misc_feature: Homolog of GI Number: 50910651 NR Desc: glycolipid transfer protein
  misc_feature: Homolog of GI Number: 50924476 NR Desc: OSJNBa0006B20.21
  misc_feature: Homolog of GI Number: 45773920 NR Desc: At1g21360
  misc_feature: Homolog of GI Number: 39545646 NR Desc: OJ000114_01.1
  misc_feature: Homolog of GI Number: 30686173 NR Desc: glycolipid transfer protein
  misc_feature: Homolog of GI Number: 72037348 NR Desc:  similar to pleckstrin homology domain containing
  misc_feature: Homolog of GI Number: 18402939 NR Desc: glycolipid transfer protein
  misc_feature: Homolog of GI Number: 55250041 NR Desc: Zgc:101886
  misc_feature: Homolog of GI Number: 73995333 NR Desc:  similar to Glycolipid transfer protein
  misc_feature: Homolog of GI Number: 30481662 NR Desc: Pleckstrin homology domain containing
MEGTVFTPALQEIEHVKSDQGEILSKPFLDACKHILPVIDKFGAAMALVKSDIGGNISRLETMYSSNPTRFNYLYSLVQVEVKTKTAKSSSSCTNGLLWLTRAMDFLVALFRNLIEHEDWPMSQACTDSYNKTLKKWHGWLASSSFTVVMKLAPDRKKFMDVIGGTGNISADIEKFCTTFSPLLEENHKFLARFGLDDMKAS

SEQ ID NO: 6519 - DNA, 1421 bp, Glycine max
  misc_feature: Ceres CLONE ID no. 1240604
  misc_feature: Ceres CDNA ID no. 25447047
  CDS (111)..(1325): REFERENCED BY SEQ ID NO: 6520
acaacaaatctaatgaagatcccaagcaactagttcccataaaggaaagccatcacttcacagttcactgtctttctctctctctccctctctgaagcatcaccatcaccatgagcacgcaaaccgcaaccccagtgatcaaaggggaagaagaaaaggaaggaacaaaggaagtggttcaagaagaagaagaagaagcagaagaagcgtctcacccttacgcctttcatgtttctggtcctcgcaatttggccaaccttaactggagagaccttatcagttctagctggaaggatgcaacttacaaaagaactgtcattgcttgttttatacaagcagtttacctgcttgaactagatagacaggagaaccgaatgcaagaaaacgctctagctccaaattggtggagtcccttcaagtacaagctcacacaaacattgattgatgaaagagatggatccatttttggtgcaattcttgaatgggacagatctgcagcaatggccgacttagtactaattagaccaagtggtgcccccaaagctgttttagctctaaggggaacgctactcaaaagccctacaatgcggagagacattgaagatgaccttcgttttcttgcctgggaatgcctgaagggctctgtcaggtttaaagtagctctggaggtactaaaatcggtttctgacacatacggaagcagcaatgtttgcattgcagggcattcattgggagccggtttcgctcttcaagtgggaaaggcattggcaaaagaaggcatttatgtggagacacatttgttcaatccaccttctgtttcactaggcatgagtctcagaaacattggagaaaaggctgacttggtttggaagagacttaagtctatgtttccttcttcgagtagtgaagaagctcaagccggcaacgatggagacaagactttgagcatgggactgaagagttggatacctcagttttctagcttcaagaatgccggtttcggggtcggaaaatgggttcctcatctgtatgtaaacaacagtgactacatatgttgctcttatacagaccccgaatgctcgggaggagaaaagaatgatgctgacaaggagaatattggtccaacaaatggacaagttgaggcaaaactgtttgttgtcaccaaggaaaagcagaagtttcatgaagctcatgccctggaacaatggtggtccagtgatgcacaacttcaacaggctaatagtaaactcataagcaggcagcttaaatctttgtatacaagtggtacttcttcacaagtaatgcaaggaaaattacctaggtaacaaatggtcttgctctgattgtttgtgaaatgagttgttttcattcttaattataatttgggttgtgttcatatcttgttaaaaaaaaaaaaaaaa

SEQ ID NO: 6520 - protein, 404 aa, Glycine max
  misc_feature: Ceres CLONE ID no. 1240604
  misc_feature: Ceres CDNA ID no. 25447047
  misc_feature: Homolog of GI Number: 34909578 NR Desc: P0046E05.21
  misc_feature: Homolog of GI Number: 34910916 NR Desc: OSJNBb0063G05.3
  misc_feature: Homolog of GI Number: 34904536 NR Desc: B1066G12.13
  misc_feature: Homolog of GI Number: 34901136 NR Desc: lipase
  misc_feature: Homolog of GI Number: 50906987 NR Desc: lipase class 3
  misc_feature: Homolog of GI Number: 50937935 NR Desc: lipase
  misc_feature: Homolog of GI Number: 34901546 NR Desc: lipase
  misc_feature: Homolog of GI Number: 50937927 NR Desc: lipase
MSTQTATPVIKGEEEKEGTKEVVQEEEEEAEEASHPYAFHVSGPRNLANLNWRDLISSSWKDATYKRTVIACFIQAVYLLELDRQENRMQENALAPNWWSPFKYKLTQTLIDERDGSIFGAILEWDRSAAMADLVLIRPSGAPKAVLALRGTLLKSPTMRRDIEDDLRFLAWECLKGSVRFKVALEVLKSVSDTYGSSNVCIAGHSLGAGFALQVGKALAKEGIYVETHLFNPPSVSLGMSLRNIGEKADLVWKRLKSMFPSSSSEEAQAGNDGDKTLSMGLKSWIPQFSSFKNAGFGVGKWVPHLYVNNSDYICCSYTDPECSGGEKNDADKENIGPTNGQVEAKLFVVTKEKQKFHEAHALEQWWSSDAQLQQANSKLISRQLKSLYTSGTSSQVMQGKLPR

SEQ ID NO: 6521 - DNA, 607 bp, Glycine max
  misc_feature: Ceres CLONE ID no. 1241045
  misc_feature: Ceres CDNA ID no. 29191635
  CDS (58)..(444): REFERENCED BY SEQ ID NO: 6522
cctaatccctctttctcctcgtcgtcgcttttctctctctgagctctaaggacgaagatgacggtggaagcagtgaaccctaaggcgtatccgttagctgattctcagttagcgataacgatcctggatctcgttcaacaggctacgaactacaagcagctcaagaagggagctaatgaagctaccaagacgttgaaccgtgggatctctgagttcgtcgttatggctgccgatgccgagccgcttgagattcttctccaccttcctcttcttgccgaagacaagaatgtgccttatgtgtttgtaccatcgaaacaagcgttgggaagagcatgcggagtgacaagacctgtgatcgcttgttcagttacatcaaacgaggcaagccagttgaagtcacagattcaacagctcaaggatgcaattgagaagctcctaatctaagtgattgggtgtcttggtatgaagagttccatttgtgtaatctctttgttgtaatttcgtctctatgttgaacgtttttcttcaagttttggatcttggtgcttggtttgtgttgaaacattaatgtcaaagagcttttctatggtcaaaaaaaaaaaaaaaa

SEQ ID NO: 6522 - protein, 128 aa, Glycine max; identical to SEQ ID NO: 5994
  misc_feature: Ceres CLONE ID no. 1241045
  misc_feature: Ceres CDNA ID no. 29191635
  misc_feature (20)..(114): Pfam Name: Ribosomal_L7Ae PFAM Desc: Ribosomal protein L7Ae/L30e/S12e/Gadd45 family
  misc_feature: Homolog of GI Number: 21592866 NR Desc: Ribosomal protein L7Ae
  misc_feature: Homolog of GI Number: 21592608 NR Desc: ribosomal protein L7Ae
  misc_feature: Homolog of GI Number: 21554922 NR Desc: Ribosomal protein L7Ae
  misc_feature: Homolog of GI Number: 13605585 NR Desc: AT4g12600/T1P17_190
  misc_feature: Homolog of GI Number: 30687670 NR Desc: ribosomal protein L7Ae/L30e/S12e/Gadd45 family protein
  misc_feature: Homolog of GI Number: 47027071 NR Desc: ribosomal protein L7
  misc_feature: Homolog of GI Number: 31429968 NR Desc: putative ribosomal protein L7Ae
  misc_feature: Homolog of GI Number: 7269084 NR Desc: Ribosomal protein L7Ae
  misc_feature: Homolog of GI Number: 63146623 NR Desc: snu13p
  misc_feature: Homolog of GI Number: 51764844 NR Desc: similar to NHP2
  misc_feature: Useful for making ornamental plants with modified flowers

SEQ ID NO: 6523 - DNA, 1098 bp, Glycine max
  misc_feature: Ceres CLONE ID no. 1241144
  misc_feature: Ceres CDNA ID no. 40351704
  CDS (201)..(869): REFERENCED BY SEQ ID NO: 6524
acaatacaactcaactctaaatccacttccccactctctctcctctttccatcgtccatggcctcactcatcgaatctggctgtacttgatcacacatttcagtgattttcaactggcgtgtttgggaagtttctttctacatgaaggtgttttcttcttgtctggacttcccttcatatggcttgagagggcagggtggatgagcaagtacaaaattcaggccaaaaataacacccctgctgctcaggagaaatgtattgttcgcctgttgctttaccattttggtgtcaatctacctgttatggttttttcatatcccgtcttcagatacatgggcatgcggagtagttttcccctaccgtcctggaaagtagttctaattcaaataatcttttacttcattttggaggactttatattctactggggacatagaatactgcacacaaaatggctatacaagcatgtgcacagtgttcatcatgagtatgctacaccgtttggtcttacttctgaatatgctcatcctgctgagatacttttccttgggtttgctaccatttttggtcccgccattactgggccccacttgataactctctggttatggatggttctgagagtcctagagacagttgaggctcactgtggttaccatttcccatggagtctttcgaacttccttccattgtatggaggagctgatttccacgactatcatcaccgtttattgtacaccaagtctgggaactattcatcaacttttacttacatggaccggatatttgggactgatataggctacagaaagttgaaagcattgaagagcataggagttgaagacaatagtgaacaaaagaaacaataagaacaagtttttgggaatatccaggaatgattagagagttgatatgcaacttgagggtatatttgaaaaatttcctatcaactccttatgtgttcttgtgtttgtgtagtggccggtgttgtctacaatgtgctgatggctgtttctggacattcatgccctgttaattagaaaaacttcattagtgacagtgatttcaatttttggatgtttaaaaaaaaaaaaaaaa

SEQ ID NO: 6524 - protein, 222 aa, Glycine max
  misc_feature: Ceres CLONE ID no. 1241144
  misc_feature: Ceres CDNA ID no. 40351704
  misc_feature: null
  misc_feature: Useful for making plants with altered sterol content
  misc_feature (1)..(178): Pfam Name: Sterol_desat PFAM Desc: Sterol desaturase
MSKYKIQAKNNTPAAQEKCIVRLLLYHFGVNLPVMVFSYPVFRYMGMRSSFPLPSWKVVLIQIIFYFILEDFIFYWGHRILHTKWLYKHVHSVHHEYATPFGLTSEYAHPAEILFLGFATIFGPAITGPHLITLWLWMVLRVLETVEAHCGYHFPWSLSNFLPLYGGADFHDYHHRLLYTKSGNYSSTFTYMDRIFGTDIGYRKLKALKSIGVEDNSEQKKQ

SEQ ID NO: 6525 - DNA, 886 bp, Glycine max
  misc_feature: Ceres CLONE ID no. 1241154
  misc_feature: Ceres CDNA ID no. 25447449
  CDS (143)..(415): REFERENCED BY SEQ ID NO: 6526
attcatcttcatctcatcaatcttttcaattctctatgcacacatcaaactcgacactaccttgttcttaaactcacaacaaaaactatttgcatcaccaactactttctagcttattatatattcaaaagttgtgaagaatatgagttcaacaagccgtgcttgggcttggaccgtggcagctggtgttggagtggtggaggccatgaaggatcagggtatctgcaggtggaacagtgtgatgagatcagcacaacaacatgctaaacataatatgaggtctttgtctcaaaccaagaagctttattctcaatcatctgttatggcttcagccaaattgaaagatgagaaagctaagcagtcagaagagtctctgagaaccgtcatgtacttgagttgctggggtcccaactaaacacagatgcatggattttatgcaattctggatttctttttttcttctcttcttggaatatgaattgcaggaagatgagaaatggaagactcaaaagatgcaccaatcagagaagattctcaagtaacatgttacatggatgctaatatgctatgcttgaacacctgttgatcagaccgaatcagaagctgaactgagaatatatagtctgaagcatgtcttctgctgctggggagagacgtatggattggatttggaagagtgcgccagtaccaattcatggcaatcgccttaatttgatcgataatcatctttggaatgatgaaatttgagacagcaattgctacatatgtatacgattttttacatgatgaacgggactatgtgttatgctgaataattgtaaagtgtaacttatatgcccaacaaatataaagaaatgacatgtttctctgaaaaaaaaaaaaaaaa

SEQ ID NO: 6526 - protein, 90 aa, Glycine max
  misc_feature: Ceres CLONE ID no. 1241154
  misc_feature: Ceres CDNA ID no. 25447449
  misc_feature: Homolog of GI Number: 6688818 NR Desc: putative wound
  misc_feature: Homolog of GI Number: 21553934 NR Desc: probable wound
  misc_feature: Homolog of GI Number: 19320 NR Desc: wound induced protein
  misc_feature: Homolog of GI Number: 50928991 NR Desc: OSJNBa0043L09.19
  misc_feature: Homolog of GI Number: 50928999 NR Desc: OSJNBa0043L09.23
  misc_feature: Homolog of GI Number: 50929003 NR Desc: OSJNBa0043L09.25
  misc_feature: Homolog of GI Number: 50929001 NR Desc: OSJNBa0043L09.24
  misc_feature: Homolog of GI Number: 50928989 NR Desc: OSJNBa0043L09.18
MSSTSRAWAWTVAAGVGVVEAMKDQGICRWNSVMRSAQQHAKHNMRSLSQTKKLYSQSSVMASAKLKDEKAKQSEESLRTVMYLSCWGPN

SEQ ID NO: 6527 - DNA, 657 bp, Glycine max
  misc_feature: Ceres CLONE ID no. 1241167
  misc_feature: Ceres CDNA ID no. 40041400
  CDS (58)..(462): REFERENCED BY SEQ ID NO: 6528
caaaatcacattgagacagcaagcctaaaggaaataaggaataatatttctatctaaatggtgaaccgcatctcaaactatgttcctctcttcatcattttgattgttttggtaacagtgcaaaaacaagtggaaggattgacatgttcgagatatttcggtttatgttccgacacgagaaattgtgatcttaggtgtaaagcccgcaataagcatgcagaggggcactgtgatgatgacttcaactgtacttgtatttacccttgtgactctcctcagccaaataaagacaccgagcctataaggaagtgcactagtggccttggactttgcagtgttgatcactgctatgatgattgttgcaattcaaaatgtgctaaacaattcaaagagggtataggacattgtgaaatagtgggttcgatgggtaccatcttgtgtacctgtgattatgtctgctgagtttataaaaaattatggcatattttatatctctaggttgagtatcgatctatttactatttacctctgggataaatatgtcatgaactgaaaacaaataaataaatccacattttttttggaaaaaaaaaaaaaaaaaaaaaaaaaaaaaaaaaaaaaaaaaaaaaaaaaaaaaaaaaaaaaaaaaaaaaaaaa

SEQ ID NO: 6528 - protein, 134 aa, Glycine max
  misc_feature: Ceres CLONE ID no. 1241167
  misc_feature: Ceres CDNA ID no. 40041400
  misc_feature (32)..(70): Pfam Name: Gamma PFAM Desc: Gamma
MVNRISNYVPLFIILIVLVTVQKQVEGLTCSRYFGLCSDTRNCDLRCKARNKHAEGHCDDDFNCTCIYPCDSPQPNKDTEPIRKCTSGLGLCSVDHCYDDCCNSKCAKQFKEGIGHCEIVGSMGTILCTCDYVC

SEQ ID NO: 6529 - DNA, 1332 bp, Glycine max
  misc_feature: Ceres CLONE ID no. 1241280
  misc_feature: Ceres CDNA ID no. 24766205
  CDS (101)..(1120): REFERENCED BY SEQ ID NO: 6530
atggttttgcaataatcgaaagcaattgaaattgtcctaaggtaaggtgtttgaatgcttacatacatagattaaggattttaggaccaaagagggagtcatgaatgtgacaaacaaaccaaacccatatggttccaccaatgggtttcagtctcagcttcaacaaaatgggtgggaacagggatcatctagactcagacccactaagctttaccctgcaccaacggctggctaccaggacattgttcgtgatgcaaacctcttctggggaacgcttcaagcttttcacaaaacacttggcaccaaatataagatttctactgtgggaggaacgccacttgatctacatcgtctttttgtcgaagttacatctcgcggtgggattgaaaaggtgattgttgatcgtaagtggaaggaagtgattctgaccttcaatttcaaagataccataaccaatgcatcatttatggtgcgcaaatcctacctctcgatgctttatcactttgagcaagtgtattattttgggaggcaaggcattcctcccacaacacctgatcttatgattagaggccaatcatgccaaccctatagctccacaaccattccagaagttgctgctgtgaatgattcacctgttcagagtactccagtacaggcacatgatgatatggtttctggaacaattgatgcgaaatttgatgttggatatgtagttacagtgactctaggttctgagcagctgcaaggtgtcctgtttcatgttcctgataacgtgtcccagagttctcatgccgaaggcacatctagttcacagaatcttggtgatgacacgtctaatttacagagtcgaaagagagcaaaatatgcaccacgtgatccatttcggccaaagtcaaacaggagcggttacaactttttctttgctgaaaattatgccaggctgaagccctcgtatcatgggcaggagagagcaattagtaagaggattgggtttctgtggaacaatctgtcagaagcagaaagacaggtttatcaagagaaagggataagagataaggaaagatacaggactgaactgatggagtacaaatccaataattcaactccaaatgctcaataggctgttttatgtaatccttagactgtcatttcatatgcttcatctgttgttcttttcatgcctttgctatagttaattttcttatccattctacagagaaacttagaagagtagctttgtgacaattctggtgtaaattatgctgaatggttttaataaacatcttgtagcggttaattcattgtagttactcttgaaaaaaaaaaaaaaaa

SEQ ID NO: 6530 - protein, 339 aa, Glycine max
  misc_feature: Ceres CLONE ID no. 1241280
  misc_feature: Ceres CDNA ID no. 24766205
  misc_feature (263)..(330): Pfam Name: HMG_box PFAM Desc: HMG
  misc_feature (46)..(156): Pfam Name: ARID PFAM Desc: ARID/BRIGHT DNA binding domain
  misc_feature: Homolog of GI Number: 50908159 NR Desc: glutathione S
  misc_feature: Homolog of GI Number: 50898814 NR Desc: glutathione S
  misc_feature: Homolog of GI Number: 15222755 NR Desc: high mobility group ARID/BRIGHT DNA
  misc_feature: Homolog of GI Number: 8778487 NR Desc: F20N2.8
  misc_feature: Homolog of GI Number: 51979304 NR Desc: ARID2
  misc_feature: Homolog of GI Number: 58012117 NR Desc: ARID2
  misc_feature: Homolog of GI Number: 62646742 NR Desc:  similar to high mobility group protein homolog HMG4
  misc_feature: Homolog of GI Number: 51471047 NR Desc:  AT rich interactive domain 2
  misc_feature: Homolog of GI Number: 27882654 NR Desc: Hmgb3
MNVTNKPNPYGSTNGFQSQLQQNGWEQGSSRLRPTKLYPAPTAGYQDIVRDANLFWGTLQAFHKTLGTKYKISTVGGTPLDLHRLFVEVTSRGGIEKVIVDRKWKEVILTFNFKDTITNASFMVRKSYLSMLYHFEQVYYFGRQGIPPTTPDLMIRGQSCQPYSSTTIPEVAAVNDSPVQSTPVQAHDDMVSGTIDAKFDVGYVVTVTLGSEQLQGVLFHVPDNVSQSSHAEGTSSSQNLGDDTSNLQSRKRAKYAPRDPFRPKSNRSGYNFFFAENYARLKPSYHGQERAISKRIGFLWNNLSEAERQVYQEKGIRDKERYRTELMEYKSNNSTPNAQ

SEQ ID NO: 6531 - DNA, 895 bp, Glycine max
  misc_feature: Ceres CLONE ID no. 1241519
  misc_feature: Ceres CDNA ID no. 24766206
  CDS (94)..(531): REFERENCED BY SEQ ID NO: 6532
aaaaaccccaggggctccacttagttgttcctctctggcctcttttctttctacttctcatcagggttttacttttagcttaaacccgcggccatggcgacgagagcagcagtggcggcgccgcgcgttttgcggcggtttttctgcacaaactcagcctcttcttctttccccttcgtttctacgctgcctcccggtgccacccccgccccaacccgacccacggcggagcccaacaccaacctcttcgtctctggtcttagtaaacgtactaatacagaaaggcttcgagaggagtttgcaaagttcggtgaagttgttcatgcgagggtggtaactgatcgagtctcaggttactctaaggggtttggttttgttcaatatgctacaatagaagatgctgcaaagggcattgaaggcatggatggcaagtttttggacggttgggttatatttgcagagtatgcgagaccaagaccaccaccaggccaacctctaaatagcaacagttctcagtatggccggcagtgattcctgttatttatctaaaacattcttatgcccattgaactggttgtctcaattagcaattgcaattcaaaaagtattatttattagggcatggatgctcgggtgatctttaattatctatagaagttctagattattgtaatggaaggataacttatgacattgttgtaatgcaagatttctcgttgatagtcttgcatattttgtggttatggttactccaaagtagcttcctgtttgtacttaagtatagattgatgccaatgtctggacacgatggggttatctggtctgataatcccttacccttatacttgaaacgagataaaaatgattattgtctacgataaaaaaaaaaaaaaaa

SEQ ID NO: 6532 - protein, 145 aa, Glycine max
  misc_feature: Ceres CLONE ID no. 1241519
  misc_feature: Ceres CDNA ID no. 24766206
  misc_feature (51)..(122): Pfam Name: RRM_1 PFAM Desc: RNA recognition motif.
  misc_feature: Homolog of GI Number: 50940959 NR Desc: putative RNA recognition motif
  misc_feature: Homolog of GI Number: 34898598 NR Desc: RNA recognition motif
  misc_feature: Homolog of GI Number: 21536972 NR Desc: putative RNA
  misc_feature: Homolog of GI Number: 25406274 NR Desc: probable RNA
  misc_feature: Homolog of GI Number: 34906972 NR Desc: putative glycine
  misc_feature: Homolog of GI Number: 1778374 NR Desc: glycine
  misc_feature: Homolog of GI Number: 7439995 NR Desc: RNA binding protein 3
  misc_feature: Homolog of GI Number: 21388662 NR Desc: glycine
  misc_feature: Homolog of GI Number: 7489099 NR Desc: RNA
  misc_feature: Homolog of GI Number: 21625 NR Desc: glycine
MATRAAVAAPRVLRRFFCTNSASSSFPFVSTLPPGATPAPTRPTAEPNTNLFVSGLSKRTNTERLREEFAKFGEVVHARVVTDRVSGYSKGFGFVQYATIEDAAKGIEGMDGKFLDGWVIFAEYARPRPPPGQPLNSNSSQYGRQ

SEQ ID NO: 6533 - DNA, 1409 bp, Glycine max
  misc_feature: Ceres CLONE ID no. 1241877
  misc_feature: Ceres CDNA ID no. 25447450
  CDS (325)..(1287): REFERENCED BY SEQ ID NO: 6534
aacaatttcgagattttcccaccaacccacccccgcaaagcacctggtcgcttcaaagattttatttttagttcttggggtggggtttccaccgttttttcctttcaccattggcatctgcagcatcgctcaattgcacaaacagaatggtcaacactttatggtcactttgtgtggtttgaactgtaaagtctctctttctctcactcacttttttctctctctatgttgcattcttttgtgtggcttagtctctggctgtgtctttcagtgttagattcttggtgggtttagtttaattttgactgaacgaatgagatcttgatgagggttggaaccagtttccttgcactgctctcattgttgccgttgcttctttctccgcaattttcaagtgctcagcttccacctgacactgacatctcatcacgcacccttgatgccattctccaagattgtgcctttaaggcatttttgaggccaaaaactggggtaccctatggtggccaagttcccagaagcctaaatggaattagagtttcagcaatgaggcttaggagtggtagtttgaggaccagaggtgttgaaaaatacaaagagtttcagatcccaattggggttgttgagcaaccttatgtggagaggcttgttttggtgtaccataacttaggcaattggtctgagaagttttaccctttgcctggttacacatatttggctcctgttttaggtctaatgccatatagtggtgccaatttgtctgcttctgagttgcctgaattggacataagagcttctgataagccaattttgatcaacttccctcatgtgaaatcagcaccattagggtcagtgcccaagtgtgtgtactttgatctacatggttcagtacaatttgacatcctattacatgggaatgtttgttcaacagtccaacaagggcacttctcaattgttgtggagtctaatgccccttccccagcacctgctgctgcggctgtggctgcggctgcggctgctgatgttaggaaaagtggtagtgggaggaacaagtccaaggtgtgggtaattgttgcatctttggttggtggatgcctcttgttgatcatgttgagtcttttggttgctaaagtgaggagaacaaaacaagggatgaagattcagcaattggaatgggcagctgagagcaatgaaactttgcagatagcatctattgggggcaccaaagcaccattggcagtagggactcgcacaagaccaacaattgaaaatgattacataccttagatttgagggattcttgtaggaccaatttttttcacttttttgttttcttgtttgttgttgtaatttttgtgttcataatgagttaaaaaaaatgctttccttgtctaaaaaaaaaaaaaaaa

SEQ ID NO: 6534 - protein, 320 aa, Glycine max
  misc_feature: Ceres CLONE ID no. 1241877
  misc_feature: Ceres CDNA ID no. 25447450
  misc_feature: Homolog of GI Number: 50928219 NR Desc: OSJNBa0064M23.10
MRVGTSFLALLSLLPLLLSPQFSSAQLPPDTDISSRTLDAILQDCAFKAFLRPKTGVPYGGQVPRSLNGIRVSAMRLRSGSLRTRGVEKYKEFQIPIGVVEQPYVERLVLVYHNLGNWSEKFYPLPGYTYLAPVLGLMPYSGANLSASELPELDIRASDKPILINFPHVKSAPLGSVPKCVYFDLHGSVQFDILLHGNVCSTVQQGHFSIVVESNAPSPAPAAAAVAAAAAADVRKSGSGRNKSKVWVIVASLVGGCLLLIMLSLLVAKVRRTKQGMKIQQLEWAAESNETLQIASIGGTKAPLAVGTRTRPTIENDYIP

SEQ ID NO: 6535 - DNA, 955 bp, Glycine max
  misc_feature: Ceres CLONE ID no. 1242663
  misc_feature: Ceres CDNA ID no. 25892496
  CDS (157)..(738): REFERENCED BY SEQ ID NO: 6536
atcagcttaagcacattcataaagagtttccatattacttgcaatagctactctaccatacacatacactcctcctcacgtttgagtttcagctacattatctaaagcacacttggcatttacatttagcgacagccacaaatatatagtaacatcatgggtttgaagaaccgtggcgttggtcatagagcatggagcctcctgcgggcgtcattgttgtgggcacgtaaaggtggcttgttaaggcgcagggttgccatggagctgcgtctggtaccaaagtacttgaagcgactcggccacactgcgccgccgccaagccacattcactactttgagcgcgagctctcgttcgacaagacccccatattccatgtcaagatgtaccgtccaacctccatgcgcttccacttgccgcacattccttgcataaagccacatgttgattttgactatgactttaatgatgatggcaatgttgaatatgatactggaagaaagagtgccctcatggatgcaggagacagcagagaccaggaattttgtcatgattattatgaaggatgccaagagatgatgggttgtggtgaggaagaggaagagcaacaagcagatgcacaggggatagataagcaagctgaggagttcattgctaaattctatcagcaaatgaggctgcagcgccagatttctctactagaatacaatgaaacacccagatcagacacaagttgttgagcatgcttctaatatatgcaacgtgcgggttcacttttttcttctttttctattgagttttgatgccattgtcaatggtaaaacattgtagttcacgaaatgagagagagagagatccatatgtactaccggatgctgtaaataccgggagctacccttgagttctagtatttacatattttcatagttataatttcaattaaaaaaaaaaaaaaaa

SEQ ID NO: 6536 - protein, 193 aa, Glycine max
  misc_feature: Ceres CLONE ID no. 1242663
  misc_feature: Ceres CDNA ID no. 25892496
  misc_feature: Homolog of GI Number: 16588985 NR Desc: long cell
  misc_feature: Homolog of GI Number: 40018852 NR Desc: disease resistance gene
MGLKNRGVGHRAWSLLRASLLWARKGGLLRRRVAMELRLVPKYLKRLGHTAPPPSHIHYFERELSFDKTPIFHVKMYRPTSMRFHLPHIPCIKPHVDFDYDFNDDGNVEYDTGRKSALMDAGDSRDQEFCHDYYEGCQEMMGCGEEEEEQQADAQGIDKQAEEFIAKFYQQMRLQRQISLLEYNETPRSDTSC

SEQ ID NO: 6537 - DNA, 1371 bp, Glycine max
  misc_feature: Ceres CLONE ID no. 1242944
  misc_feature: Ceres CDNA ID no. 35383369
  CDS (84)..(935): REFERENCED BY SEQ ID NO: 6538
aaaccaccacacaccatccataattttctaactgatacgtacctctatctctcccccccaaacccaccgttttattctctgaaatgggtcttgaccaggatgccaatagctcaggccttcacctcgttctagggctttctttgactgctactgtaaaggaaaccactcaatccaccaagcctgatgatgatcatcatctttgtgttattaagccaacgccaacgaaaccttatccccccaatgaaccgtctctaacgttgggcctgtccggtgagagttaccacgtgaccaagcaagtgcttagaaataacgtttattgtgaggaccctcttgagttgtctcgacagacatcacctcacagcgttgtttcgtctttctcaactgggagggtcgttaagagggagagagatcttagctgtgaagacatagaggtagaggcagaagagagggtttcttcaagagtcagcgacgaagacgaagatggaaccaatgctagaaagaagctcagactcaccaaagaacaatctgcactgctagaagagagcttcaaacaacacagcactctcaaccccaaacagaaacaagctttagccagacggttaaatctccggcctcgacaagttgaagtgtggttccagaatcggagagccagaacaaagctgaagcaaacggaggtggactgtgagttcttaaagaaatgctgtgaaacattgaaggacgaaaacaggaggttaaagaaggagctgcaagagctgaaggcactgaaactagctcaacccttgtacatgcctatgcctgctgccacactcaccatgtgcccttcttgcgacaggctcggtggcgttaacgataacggttcgaataaaagccccttctccatggctcccaagcctcacttctataaccccttcgccaatccttcagcagcatgttgattattgtggttaggttttcactattcattcggggcgaagaggttaaaaaggcaagagttatttcccacaaccattgtatttttttggttgagggcgatgcgtctagctagctagggaaaattaagctgtaattagctaatactgttgagaatagtaactgctgattgaaattatcttttgcttttttcttcatctattgtatgtttatataaaccgttacagaaggtgttcatctatgaaggaattagaattttttttcttttgtcgttcatttataaaattctcatggtaagtgtatatgtatatagatatagatacacatatgtcaatgttgtgaaacatccatttatccccctttcatagatagctggaggattgtgatttgtgggggctaatctgatttcttctccatttatctctaaaaaaaaaaaaaaaa

SEQ ID NO: 6538 - protein, 283 aa, Glycine max
  misc_feature: Ceres CLONE ID no. 1242944
  misc_feature: Ceres CDNA ID no. 35383369
  misc_feature: Useful for making plants with modulated growth and phenotype characteristics
  misc_feature: The sequence is a functional homolog of  SEQ ID NO 542 in the  11/479,226 US patent application
  misc_feature (139)..(193): Pfam Name: Homeobox PFAM Desc: Homeobox domain
  misc_feature (194)..(238): Pfam Name: HALZ PFAM Desc: Homeobox associated leucine zipper
  misc_feature: Homolog of GI Number: 21593156 NR Desc: homeobox protein HAT22
  misc_feature: Homolog of GI Number: 549893 NR Desc: homeobox protein
  misc_feature: Homolog of GI Number: 20197409 NR Desc: homeodomain transcription factor
  misc_feature: Homolog of GI Number: 20145865 NR Desc: homeodomain
  misc_feature: Homolog of GI Number: 3171739 NR Desc: homeodomain leucine zipper protein
  misc_feature: Homolog of GI Number: 7489329 NR Desc: homeobox protein
  misc_feature: Homolog of GI Number: 1149535 NR Desc: homeobox
  misc_feature: Homolog of GI Number: 50946605 NR Desc: putative homeobox
  misc_feature: Homolog of GI Number: 3868847 NR Desc: CRHB10
  misc_feature: Homolog of GI Number: 1165132 NR Desc: homeobox
MGLDQDANSSGLHLVLGLSLTATVKETTQSTKPDDDHHLCVIKPTPTKPYPPNEPSLTLGLSGESYHVTKQVLRNNVYCEDPLELSRQTSPHSVVSSFSTGRVVKRERDLSCEDIEVEAEERVSSRVSDEDEDGTNARKKLRLTKEQSALLEESFKQHSTLNPKQKQALARRLNLRPRQVEVWFQNRRARTKLKQTEVDCEFLKKCCETLKDENRRLKKELQELKALKLAQPLYMPMPAATLTMCPSCDRLGGVNDNGSNKSPFSMAPKPHFYNPFANPSAAC

SEQ ID NO: 6539 - DNA, 1349 bp, Glycine max
  misc_feature: Ceres CLONE ID no. 1243290
  misc_feature: Ceres CDNA ID no. 29191231
  CDS (57)..(1133): REFERENCED BY SEQ ID NO: 6540
atctctctcgtctgcctacttcctcaaaaactttctcgatctttccgtcaaaaaccatgtctgccttcaccagcaaattcgccgatgagttgatcgctaacgctgcatacatcggcacacctggaaaaggtattctcgccgccgatgagtccaccggtaccatcggaaagcgtctcgccagcatcaacgtcgagaacgttgagactaacagacgtgctctccgtgagcttctcttcaccgcccccggtgctctcccttgcctcagcggtgtcatcctcttcgaagagactctttaccaaaagagctccgatggcaagcttttcgttgatatcttgaaggaaggaggagtcctcccaggtatcaaagtcgacaagggtaccgttgagctagccggaaccaacggcgagaccaccacccaaggtctcgacggtctcggtgagcgttgcaagaagtactacgaagctggtgcacgtttcgccaaatggcgtgcggttctcaagatcggcgagaacgagccatcagagcattctatccacgagaacgcttacgggttggctagatacgctgtcatctgccaggagaacggtcttgtaccgatcgttgagcctgagatccttgtcgacggatcccacgacatccacaagtgtgctgccgtcaccgagcgtgtccttgcggcttgctacaaggctcttagcgaccaccacgttttgctagagggaactttgttgaagcctaacatggtgacgcctggatccgacagtgccaaggttgcacctgaggttatcgctgagcacaccgtccgtgctcttcagagaacggtaccagcagctgttccagctattgttttcttgtccggtggacagagcgaggaggaggcgactaagaacttgaacgcgatgaaccagttgaagaccaagaagccatggtcgttgtctttctcgttcggacgtgcgttgcaacagagcactttgaagacatgggcggggaaagaggagaatgttaaggctgctcaagaggcgttgtatgtgaggtgcaaggctaactctgaagccacacttggaacgtacaaaggtgatgctaagcttggtgatggagctgcagagagccttcacgtgaaggactacaagtactgagaatcgtctgtcaatggtttctgttgtcacgtcctcatcaacaccctcgatatttttctatgggtttattctactctttgcttgacattatcggcttttcgatttttgtttttcaatttcttttcggtttgtgttttgatttaagaatcatgagtgtttaaaaacgcccaaataaaatgccagctgaggttttttctgttaaaaaaaaaaaaaaaa

SEQ ID NO: 6540 - protein, 358 aa, Glycine max
  misc_feature: Ceres CLONE ID no. 1243290
  misc_feature: Ceres CDNA ID no. 29191231
  misc_feature: null
  misc_feature: Useful for making plants with modulated phosphate use efficiency
  misc_feature (11)..(358): Pfam Name: Glycolytic PFAM Desc: Fructose
  misc_feature: Homolog of GI Number: 10645188 NR Desc: cytosolic aldolase
  misc_feature: Homolog of GI Number: 3021338 NR Desc: cytosolic fructose
  misc_feature: Homolog of GI Number: 21592946 NR Desc: fructose bisphosphate aldolase
  misc_feature: Homolog of GI Number: 927505 NR Desc: fructose
  misc_feature: Homolog of GI Number: 10800924 NR Desc: fructose
  misc_feature: Homolog of GI Number: 18414312 NR Desc: fructose
  misc_feature: Homolog of GI Number: 21553388 NR Desc: fructose
  misc_feature: Homolog of GI Number: 20260022 NR Desc: fructose
  misc_feature: Homolog of GI Number: 7340654 NR Desc: fructose
  misc_feature: Homolog of GI Number: 17104659 NR Desc: putative fructose bisphosphate aldolase
MSAFTSKFADELIANAAYIGTPGKGILAADESTGTIGKRLASINVENVETNRRALRELLFTAPGALPCLSGVILFEETLYQKSSDGKLFVDILKEGGVLPGIKVDKGTVELAGTNGETTTQGLDGLGERCKKYYEAGARFAKWRAVLKIGENEPSEHSIHENAYGLARYAVICQENGLVPIVEPEILVDGSHDIHKCAAVTERVLAACYKALSDHHVLLEGTLLKPNMVTPGSDSAKVAPEVIAEHTVRALQRTVPAAVPAIVFLSGGQSEEEATKNLNAMNQLKTKKPWSLSFSFGRALQQSTLKTWAGKEENVKAAQEALYVRCKANSEATLGTYKGDAKLGDGAAESLHVKDYKY

SEQ ID NO: 6541 - DNA, 1315 bp, Glycine max
  misc_feature: Ceres CLONE ID no. 1243554
  misc_feature: Ceres CDNA ID no. 25446729
  CDS (211)..(1044): REFERENCED BY SEQ ID NO: 6542
actcatcaacacatatcgatatcttttgcttcgtctctttcatcgcctacgcttcatttgaatcaacactccttcctcttcctctttctcgtccattttagttcaatctttgaattctcctccttatcaagtcttcctcatcttccccacctttttgaaattttggtgtctaagaacataacctaaaagctcaaggtgagtgaaaagaagatgtcaggtgtgtctctagcagtgtctcatccaccggcatcagtgggagaacaaaacgtgcctcaagcaggcacaaagcctaaaccgcgaacagaacaggcaccaattggtggcatgatgggttcacttcgcgtgatagagcttcagcttgtcgctttcatcttggtgttctcagcaagtggccttgtcccactccttgacctagtgttccctgcacttgcctctgcatacatcttggcactctcgctattcgcatttccatcgtcatcttcttcttcaacgcgttcgttacacgactcggggactgagatcttcaaagggggcagattgttccgaatgtatgtcgttgttgggatcactgtgggactcttcttgccgctggcttacgtgcttggagggtttgcaagaggggatgagcatgctgttcgttctgccaccccgcacttgttcttgctgtcgtttcagatacttactgagaacatcatcggtgggttgtctatgttttccccaccggtgagggcgttggtgccgatgatctatacagtgcggaggatctttgtggatattgattggattcatgatgtctggctcaacaagactctgcctgtcaatgccacatttcaggacctggcatggtattggttcgggaagggtctggcagtggcaaatctggcttatttctccatcaatctgtttgggttcttgatacccaggttccttccaagagcttttgagaggtatttccaagacaagggagagatctatgctaagtctgcagaggataaaagacctgtggttgtcaacaaaactcaattatcagaaaagaaagattaattacagagctataaccaatgtgacttcacttacaatttgaaacactttcagcattctttttttcttttcttagaaaatggtaatgaatgtgtatgatgatggctctccgttacattatgaaactacatatggtttttggattagttttatgtgtcatacaggttaatttaaaatttggagatttcttcgactcttctcccctttgttcaatattaacaataaccatcttttataggataaaaaaaattcagtgccaaaaaaaaaaaaaaaa

SEQ ID NO: 6542 - protein, 277 aa, Glycine max
  misc_feature: Ceres CLONE ID no. 1243554
  misc_feature: Ceres CDNA ID no. 25446729
  misc_feature: Homolog of GI Number: 50923831 NR Desc: OSJNBa0044M19.10
  misc_feature: Homolog of GI Number: 19699160 NR Desc: AT5g52420/K24M7_17
MSGVSLAVSHPPASVGEQNVPQAGTKPKPRTEQAPIGGMMGSLRVIELQLVAFILVFSASGLVPLLDLVFPALASAYILALSLFAFPSSSSSSTRSLHDSGTEIFKGGRLFRMYVVVGITVGLFLPLAYVLGGFARGDEHAVRSATPHLFLLSFQILTENIIGGLSMFSPPVRALVPMIYTVRRIFVDIDWIHDVWLNKTLPVNATFQDLAWYWFGKGLAVANLAYFSINLFGFLIPRFLPRAFERYFQDKGEIYAKSAEDKRPVVVNKTQLSEKKD

SEQ ID NO: 6543 - DNA, 942 bp, Glycine max
  misc_feature: Ceres CLONE ID no. 1243577
  misc_feature: Ceres CDNA ID no. 40351705
  CDS (137)..(778): REFERENCED BY SEQ ID NO: 6544
aattatcggaagatgacaaagtacggatttctataataatacgctccgacgacagcagatcataagcgcagttcgttccacgttgttgttcgctctgtgtctctcactctctctatatttgcatcattcatcggaaatggctctcgaggttgctgttaaggctgctgttggggctccaaatgttctcggagattgtccattttcccaaagggtcctcttaactttggaggagaagaaaatcccttacaaactccacctcatcgatctcagtaacaaacccgaatggtttttgggtgtgaatcctgaagggaaggtgccagtggttctttttgatggcaaatgggtggctgattctgatgtaattgtggggatactagaggaaaagtacccagaaccctctctaatcactcctcctgaatttgcctccgtgggatcaaagatatttgggtcttttgtgagttttctgaagagcaaggatacaaacgatggaactgagcaagcattggttgctgaattgagtgccttggatgaacatctcaagacccatggtccatacattgctggggagaaagtcactgctgttgatctgagtttggcaccaaaactgtaccatcttgtggtagcactgggccacttcaagaattggaatattccagaaagtttggtacatgtgcacaattacactaagctgctgttctcccgagagtcatttgagaaaacaaagactccaaaggaggaatatgttattgctggatgggcgcctaaggtgaatgcttgaagtaattctaaattatgaggcatctgaacatcagatatgtgatgtactgtgactgaacctggttaagaataggatggcgaactcatgatgtttaagagtattgttacccttttaataatgaataaacatgtagtttgttggtgtttttaaaaaaaaaaaaaaaa

SEQ ID NO: 6544 - protein, 213 aa, Glycine max
  misc_feature: Ceres CLONE ID no. 1243577
  misc_feature: Ceres CDNA ID no. 40351705
  misc_feature (119)..(160): Pfam Name: GST_C PFAM Desc: Glutathione S
  misc_feature (20)..(82): Pfam Name: GST_N PFAM Desc: Glutathione S
MALEVAVKAAVGAPNVLGDCPFSQRVLLTLEEKKIPYKLHLIDLSNKPEWFLGVNPEGKVPVVLFDGKWVADSDVIVGILEEKYPEPSLITPPEFASVGSKIFGSFVSFLKSKDTNDGTEQALVAELSALDEHLKTHGPYIAGEKVTAVDLSLAPKLYHLVVALGHFKNWNIPESLVHVHNYTKLLFSRESFEKTKTPKEEYVIAGWAPKVNA

SEQ ID NO: 6545 - DNA, 600 bp, Glycine max; identical to SEQ ID NO: 6305
  misc_feature: Ceres CLONE ID no. 1244919
  misc_feature: Ceres CDNA ID no. 25891000
  CDS (79)..(507): REFERENCED BY SEQ ID NO: 6546

SEQ ID NO: 6546 - protein, 142 aa, Glycine max; identical to SEQ ID NO: 6306
  misc_feature: Ceres CLONE ID no. 1244919
  misc_feature: Ceres CDNA ID no. 25891000
  misc_feature (31)..(95): Pfam Name: CBFD_NFYB_HMF PFAM Desc: Histone
  misc_feature: Homolog of GI Number: 20334750 NR Desc: At1g08880/F7G19_24
  misc_feature: Homolog of GI Number: 21553797 NR Desc: histone H2A
  misc_feature: Homolog of GI Number: 21593507 NR Desc: putative histone H2A
  misc_feature: Homolog of GI Number: 3204129 NR Desc: histone H2A
  misc_feature: Homolog of GI Number: 297871 NR Desc: histone H2A
  misc_feature: Homolog of GI Number: 685035 NR Desc: histone H2A homolog
  misc_feature: Homolog of GI Number: 21593834 NR Desc: histone H2A
  misc_feature: Homolog of GI Number: 29824201 NR Desc: putative histone H2A
  misc_feature: Homolog of GI Number: 2317760 NR Desc: H2A homolog
  misc_feature: Homolog of GI Number: 42565387 NR Desc: histone H2A

SEQ ID NO: 6547 - DNA, 575 bp, Glycine max
  misc_feature: Ceres CLONE ID no. 1245212
  misc_feature: Ceres CDNA ID no. 29191232
  CDS (58)..(396): REFERENCED BY SEQ ID NO: 6548
aacagaaacaaaccctaaagagaagcgagttccgtcttaattttctccccagcgaaaatggcgtcgttcgatgaagcaccaccaggaaactccaaggccggtgagaagatcttcagaaccaagtgcgctcagtgtcacaccgtcgacaaaggcgccggtcacaaacaaggaccgaacctaaacgggctgtttggaaggcagtctggaacaacagccggttactcttactctgcggctaacaagaacaaggctgttgaatgggaagagaagaccttgtacgattacttgctcaatcccaagaagtacattcctggaacaaagatggtcttccctgggctcaagaagccacaagatcgcgctgatctcatcgcctacttgaaggaagctactgcttagtgaaatctatcaaccaatggtggtgtgggaacatcatgaattattattcttttgacaaataaaatctccaaaacttttgaatttttttttcacttttggaaattgtgtcttcttcaaatacgttttggtgagtaccaaatgtactcatgagtacttccattataaaaaaaaaaaaaaaa

SEQ ID NO: 6548 - protein, 112 aa, Glycine max
  misc_feature: Ceres CLONE ID no. 1245212
  misc_feature: Ceres CDNA ID no. 29191232
  misc_feature (13)..(111): Pfam Name: Cytochrom_C PFAM Desc: Cytochrome c
  misc_feature: Homolog of GI Number: 51317000 NR Desc: Cytochrome c
  misc_feature: Homolog of GI Number: 21592717 NR Desc: putative cytochrome C
  misc_feature: Homolog of GI Number: 117976 NR Desc: Cytochrome c
  misc_feature: Homolog of GI Number: 118013 NR Desc: Cytochrome c
  misc_feature: Homolog of GI Number: 19310747 NR Desc: putative cytochrome c protein
  misc_feature: Homolog of GI Number: 20137614 NR Desc: Cytochrome c
  misc_feature: Homolog of GI Number: 476418 NR Desc: cytochrome c
  misc_feature: Homolog of GI Number: 118018 NR Desc: Cytochrome c
  misc_feature: Homolog of GI Number: 117988 NR Desc: Cytochrome c
  misc_feature: Homolog of GI Number: 118016 NR Desc: Cytochrome c
MASFDEAPPGNSKAGEKIFRTKCAQCHTVDKGAGHKQGPNLNGLFGRQSGTTAGYSYSAANKNKAVEWEEKTLYDYLLNPKKYIPGTKMVFPGLKKPQDRADLIAYLKEATA

SEQ ID NO: 6549 - DNA, 1315 bp, Glycine max
  misc_feature: Ceres CLONE ID no. 1245257
  misc_feature: Ceres CDNA ID no. 25446876
  CDS (89)..(1114): REFERENCED BY SEQ ID NO: 6550
agaacatctttctccccagctttgcttacagttcctataattttttttctccattagattaccaagctctgcaactttgcttctcaacatggagtatcgtctcctacccatttttactttactcaatattgcactggtggcaacccatgctgctttaccccctgaagtttactggaagtcggtgcttcctactacgccaatgccaaaagccatcactgatatcctttactctgattgggtggaagagaaaagcagctcagtgcatgttggaggtggaggcgtgaacgtgcatacaggaaaaggaggtggcagtggcaccactgtcaacgttggtggaaaaggaggcggaggcgtaaacgtgcatgcaggccacaagggaaagccagtgcatgtttcagttggctcaaagtctccatttgattacgtctacgccgccacggaaactcaattacacgatgaccccaacgtggcactcttcttcttggaaaaggacttgcattctggaacaaagttggacttgcacttcaccaggagtacatctaatcaagccacgttcttgtcacgccaagttgcggattcgatacccttttcatccaacaaggtggactttatattcaacaagttttctgtcaaacccgggtcagaggaggctcagatcatgaagaatactattagtgagtgtgaagagggtggaatcaaaggagaggaaaagtactgtgccacttcgcttgaatccatggttgatttcagcacttccaagcttggaaataatgttgaggttgtgtccacagaagtggacaaggaaacgggattgcagaaatacaccgtagcaccgggagtgaagaagttatcaggggacaaggctgttgtgtgccataagcagaactacccttatgctgttttttactgtcacaaaaccgagaccaccagagcttactctgtgcctttggagggtactaatggggttagggttaaagcggtagcagtgtgccacactgacacatcagaatggaaccctaaacatttggcctttcaggtgctcaaagttaagccaggaactattcctgtctgccacttccttcctgaggatcatgttgtttgggttcccaagtagatttgcattcaagtcctttttccatatatgtccttgaataactagcttcaatagcatcagctacagaactcgatgcatgtatttgctcgtactatatagttctctagatatgtatacttttttgctgtttatttagatgctatgtgtggcttcctatgtataaaccatgatgcattaattatatgaaaaaaaaaaaaaaaa

SEQ ID NO: 6550 - protein, 341 aa, Glycine max
  misc_feature: Ceres CLONE ID no. 1245257
  misc_feature: Ceres CDNA ID no. 25446876
  misc_feature (128)..(341): Pfam Name: BURP PFAM Desc: BURP domain
  misc_feature: Homolog of GI Number: 18447761 NR Desc: dehydration
  misc_feature: Homolog of GI Number: 14422444 NR Desc: BURP domain
  misc_feature: Homolog of GI Number: 33578034 NR Desc: BURP domain
  misc_feature: Homolog of GI Number: 49615301 NR Desc: dehydration
  misc_feature: Homolog of GI Number: 14422446 NR Desc: BURP domain
  misc_feature: Homolog of GI Number: 54645911 NR Desc: RD22
  misc_feature: Homolog of GI Number: 14422448 NR Desc: BURP domain
  misc_feature: Homolog of GI Number: 49615303 NR Desc: dehydration
  misc_feature: Homolog of GI Number: 16588826 NR Desc: dehydration
  misc_feature: Homolog of GI Number: 14422442 NR Desc: BURP domain
MEYRLLPIFTLLNIALVATHAALPPEVYWKSVLPTTPMPKAITDILYSDWVEEKSSSVHVGGGGVNVHTGKGGGSGTTVNVGGKGGGGVNVHAGHKGKPVHVSVGSKSPFDYVYAATETQLHDDPNVALFFLEKDLHSGTKLDLHFTRSTSNQATFLSRQVADSIPFSSNKVDFIFNKFSVKPGSEEAQIMKNTISECEEGGIKGEEKYCATSLESMVDFSTSKLGNNVEVVSTEVDKETGLQKYTVAPGVKKLSGDKAVVCHKQNYPYAVFYCHKTETTRAYSVPLEGTNGVRVKAVAVCHTDTSEWNPKHLAFQVLKVKPGTIPVCHFLPEDHVVWVPK

SEQ ID NO: 6551 - DNA, 975 bp, Glycine max
  misc_feature: Ceres CLONE ID no. 1245285
  misc_feature: Ceres CDNA ID no. 25446813
  CDS (135)..(668): REFERENCED BY SEQ ID NO: 6552
acacacagagctgttctcatattttggagaatccgaaaaacacgttaaagaaagtcccattcccactaccgaagcaaattaagaagatgaagcagcagagagtggagtttatgggcctgggccttttggtggtgatgatggcatgtgggtcggcgagtggtgcggatgatttggcaaccaagtgttcagcggtgattcagaaggtaataccgtgtttggatttcgcgaaggggaaggaagaaacgccgaaaaagcaatgttgcgacgcagcaacgtccataaaggagagcaacccagagtgcctctgctacatcattgaagagacccacaagggtagcccacaggttaaaagcttgggcattcaagaggccaagctgcttcagctcccttctgtttgtaacgtcaaaaacgccagcatcaccaactgtcctaagcttttgggtctatctccaagttcccctgatgctgctatcttcacatcaaattcttcgaagacaactccttctgcacctgcaacctcaaactcacaaactacgaccccccagagccaaaacgcatcgtatggaagcatggttcaacccagtagtaccgttacctatgcgattgtgatggctttggccattgttctaattgctcttccaaccgaaattgtgagcatttacacatgatgatgatgatgatgatgcggcattgttgaatgaatgcttcttcatctacttacctcctgcagtgatgaagacagagagtagtagacagttggggttgtttcctgcttttgttatgcataggacttcttcgcagctttgaattaaatgaattgaattggtttgcatttgtggcctgtgatggtttctcgaattttgggacctcgctgtaatgtttggctttattgtggacttgtttcttttctgcttcccacaattaatattaaccgatagttggtgaaagttgagagacttaaaaaaaaaaaaaaaa

SEQ ID NO: 6552 - protein, 193 aa, Glycine max
  misc_feature: Ceres CLONE ID no. 1245285
  misc_feature: Ceres CDNA ID no. 25446813
  misc_feature (33)..(114): Pfam Name: Tryp_alpha_amyl PFAM Desc: Protease inhibitor/seed storage/LTP family
  misc_feature: Homolog of GI Number: 45720186 NR Desc: putative lipid transfer protein GPI
  misc_feature: Homolog of GI Number: 21553541 NR Desc: lipid transfer protein
  misc_feature: Homolog of GI Number: 22136068 NR Desc: lipid transfer protein
  misc_feature: Homolog of GI Number: 50947947 NR Desc: lipid transfer protein
  misc_feature: Homolog of GI Number: 50947945 NR Desc: lipid transfer protein
  misc_feature: Homolog of GI Number: 50919133 NR Desc: putative protease inhibitor
  misc_feature: Homolog of GI Number: 50934537 NR Desc: protease inhibitor
  misc_feature: Homolog of GI Number: 50934553 NR Desc: protease inhibitor
  misc_feature: Useful for making ornamental plants with modified leaves
MKQQRVEFMGLGLLVVMMACGSASGADDLATKCSAVIQKVIPCLDFAKGKEETPKKQCCDAATSIKESNPECLCYIIEETHKGSPQVKSLGIQEAKLLQLPSVCNVKNASITNCPKLLGLSPSSPDAAIFTSNSSKTTPSAPATSNSQTTTPQSQNASYGSMVQPSSTVTYAIVMALAIVLIALPTEIVSIYT

SEQ ID NO: 6553 - DNA, 691 bp, Glycine max
  misc_feature: Ceres CLONE ID no. 1245393
  misc_feature: Ceres CDNA ID no. 35383370
  CDS (83)..(421): REFERENCED BY SEQ ID NO: 6554
atccgcgcatattctcatttcaatttgcatttgcatttcatttggcgttttgtttctttctggaagcttcacttcggcatccatggcgtcgttcgaagaagctcctcccggaaactccaagaacggcgagaagatcttcaagaccaagtgcgctcagtgccacaccgtggacaaaggtgccggtcacaaacaaggacccaatctgaatggtttgtttggaaggcaatctggcacaactcctggatattcctattctactgctaacaaaaacatggctgtgatttgggaggaaaagaccttgtatgattacttgctcaaccccaaaaagtatattccagggacaaagatggtgtttcccggtcttaagaaacctcaggaacgtgcagatcttattgcatatcttaaagaatccactgcataatgattaaattttcatacatgcagttatgcactttactttcaaagttctggagatttaattttcagacattttattctgtggtgcagtaaatactgtatcaacaaataaagtagacttgattggtttgcaatgctattttgttcattttgcattgcttcttaagaggctgccatttattggctaatgttcaattaatttacctgttgagagttaaaacattgttattgatatatagttaagctggaagcacaattaaaaaaaaaaaaaaaa

SEQ ID NO: 6554 - protein, 112 aa, Glycine max
  misc_feature: Ceres CLONE ID no. 1245393
  misc_feature: Ceres CDNA ID no. 35383370
  misc_feature (13)..(111): Pfam Name: Cytochrom_C PFAM Desc: Cytochrome c
  misc_feature: Homolog of GI Number: 118013 NR Desc: Cytochrome c
  misc_feature: Homolog of GI Number: 53982673 NR Desc: putative cytochrome c
  misc_feature: Homolog of GI Number: 117976 NR Desc: Cytochrome c
  misc_feature: Homolog of GI Number: 229737 NR Desc: Cytochrome c
  misc_feature: Homolog of GI Number: 118022 NR Desc: Cytochrome c
  misc_feature: Homolog of GI Number: 19310747 NR Desc: putative cytochrome c protein
  misc_feature: Homolog of GI Number: 51317000 NR Desc: Cytochrome c
  misc_feature: Homolog of GI Number: 117952 NR Desc: Cytochrome c
  misc_feature: Homolog of GI Number: 476418 NR Desc: cytochrome c
  misc_feature: Homolog of GI Number: 118018 NR Desc: Cytochrome c
MASFEEAPPGNSKNGEKIFKTKCAQCHTVDKGAGHKQGPNLNGLFGRQSGTTPGYSYSTANKNMAVIWEEKTLYDYLLNPKKYIPGTKMVFPGLKKPQERADLIAYLKESTA

SEQ ID NO: 6555 - DNA, 1403 bp, Glycine max
  misc_feature: Ceres CLONE ID no. 1245506
  misc_feature: Ceres CDNA ID no. 35383371
  CDS (171)..(1115): REFERENCED BY SEQ ID NO: 6556
aatttccaactccgcctcttgttcagaagtcgcttctgtgtcgttacaggttcgttcgtatatctcttctcgttcgttcaatgttttactggtagtgctagctagcggaacatcaaacagcaacacaatcctcaactgtcattcttaaggtgacaatttctctgcacgacatgtctgatgaacgagctgtgcatcctgattgccggaatgctagtaacccttatcatgaatgcagtgattactgttttagagtaatagctgaagctaaaattaggtcacaacaacaggaatcagaagttggacaagctagtggtggaagcaactctaagcaagctatcccagatgaatcctatctcggtgaggaaatacacgacgacagacctgatcttgaagaaaactctgatagtgatcctgaccagcccgccctccaggaagcagagcaagaggaggttgattacacaaaactttctgcgagacagaaaaagtggatggagttgagagccaagatgcaagaagccaaaaagcgtaatcaaattgaaatagctgctgagaaaaagaggatggaagctccaactgagtctaggggtgtttctaaacagaaatggctcgaggataggaagaaaaagattggaaaacttctcgatgcaaatggattggatatgacaaaggcatatatgcttgacacacaggaggcagcagaagaaaaatacaagaaatgggagaaggatcctgctccattcgggtgggacgtctttaatcagaagacattatacaatgcatacaaaaagcggaccaagaatgttgaagtcgatgtagaagaatataatagaatgaaagaagctgatccagagttctaccgtgatgcttcaagtctccaatatggaaaggcaccaaaaatctcagaggagaagattgacaagatggttcaagagctaaagaatagggacgagaagcgcaactcatttagcaggagaagacgcttccatgaagagaaagatattgactcaatcaatgaccgtaatgagcatttcaacaagaagattgagcgagcctttggtaaatacacactggagattaaaaataatcttgagcgaggaactgcattgcctgactaaggtacttctgtggtggtgtgttattatttcacattgttctcatactgataagtttcagtggtggattgcactttttagagtgctttttgatcatgtaatattatagtcgaatattttgcaatgcacatatggagcattgcggagttattttgaacttcaaatattatatgcttgcttgggatattggttcttcttagtggactatttccaatcattatgtagatatgaaattaatttgtggagttttcaagggaatttatacctccctacgtaaaaaaaaaaaaaaaa

SEQ ID NO: 6556 - protein, 314 aa, Glycine max
  misc_feature: Ceres CLONE ID no. 1245506
  misc_feature: Ceres CDNA ID no. 35383371
  misc_feature: Homolog of GI Number: 53792876 NR Desc: GCIP
  misc_feature: Homolog of GI Number: 27371122 NR Desc: MGC53740 protein
  misc_feature: Homolog of GI Number: 51889790 NR Desc: GCIP
  misc_feature: Homolog of GI Number: 73950598 NR Desc:  similar to CCNDBP1 interactor isoform 1
  misc_feature: Homolog of GI Number: 82524827 NR Desc: LOC496706
  misc_feature: Homolog of GI Number: 72078047 NR Desc:  similar to CCNDBP1 interactor
  misc_feature: Homolog of GI Number: 19173786 NR Desc: GCIP
  misc_feature: Homolog of GI Number: 50759698 NR Desc:  similar to GCIP
MSDERAVHPDCRNASNPYHECSDYCFRVIAEAKIRSQQQESEVGQASGGSNSKQAIPDESYLGEEIHDDRPDLEENSDSDPDQPALQEAEQEEVDYTKLSARQKKWMELRAKMQEAKKRNQIEIAAEKKRMEAPTESRGVSKQKWLEDRKKKIGKLLDANGLDMTKAYMLDTQEAAEEKYKKWEKDPAPFGWDVFNQKTLYNAYKKRTKNVEVDVEEYNRMKEADPEFYRDASSLQYGKAPKISEEKIDKMVQELKNRDEKRNSFSRRRRFHEEKDIDSINDRNEHFNKKIERAFGKYTLEIKNNLERGTALPD

SEQ ID NO: 6557 - DNA, 1315 bp, Glycine max
  misc_feature: Ceres CLONE ID no. 1245513
  misc_feature: Ceres CDNA ID no. 25446814
  CDS (100)..(831): REFERENCED BY SEQ ID NO: 6558
atgaatgcgtttaaatcttccttattttcatgtgtgaaacggtagtcaagagagagagagagaaaaaaaaaaaactcgcatgcttctctaggtagggttatgattagctatgataatgcatcctggttgacactttctttaataagccatcttccattaataacccccacccccttcgtttggtttagtttcctttgcgtgcccatcatcaccctctccactcttcactaccctcaaaacccttttccctttcctcctcaccattacttctcatgtggccaccgtggcttaactcacccagccggttccgcaacactccaccgccgtcaccatccccgtcgcattctcgaactcgctccttcagcttctcctgttcctccttcaaagacatccagagcctcctccaagaaaaacccgaaccggccgctccgaaatctccgtctctcttccgccgcgtccggatctccaccgccgtgctccgcgcctggggcgcctcacgcgccgccgcccccgccgcactcccgcccggcctcgaccagggtgtcgtcgtctacttcacctccctccgcgtcgtccgccgcaccttcgacgactgccgcgccgtccgatccatcctccgcggcctccgcgttgccgtcgacgagcgcgacgtctccatcgacgaccgcttccgcgacgagctccacgccgtcctcggctgccgcggcaacctcgccctgccgcgtgtcttcgtcggcggcgtctacgtcggcggcgccgacgacgtccgccagctccacgagagcggcgagctccaccgcctcatcgaacgcctcccgcgctccaacctgaacgcctgcgactcctgcggaggcttccgattcgttgtgtgcgatgagtgcaatggaagccacaaagtgttcgctgagaaaaacggattcctatgctgttcttcttgcaatgccaacggcttgattcggtgccccgcatgcttcttcgtgctcccgcgccacaccagatagctacctacccctcagttagtaacagctcacagacaactcacggatgaaatttaattaatcatatttatgttgataaataaacactttctcactttcatttcgtttatgttactacattacatatattaattaataattaatcgtgtagtatctggagaatctcactgtatggatagtatcttattattattatatgttgttaggacttaggagctaggttttgattaattgttgtaatgtaatggcacttcaacattaatgattttcacatggagtaagccatgtactgacagcacacaaaaaaaaaaaaaaaa

SEQ ID NO: 6558 - protein, 242 aa, Glycine max
  misc_feature: Ceres CLONE ID no. 1245513
  misc_feature: Ceres CDNA ID no. 25446814
  misc_feature (90)..(178): Pfam Name: Glutaredoxin PFAM Desc: Glutaredoxin
  misc_feature: Homolog of GI Number: 34907946 NR Desc: B1088C09.21
  misc_feature: Homolog of GI Number: 50912785 NR Desc: glutaredoxin
  misc_feature: Homolog of GI Number: 50929077 NR Desc: OSJNBb0079B02.8
  misc_feature: Homolog of GI Number: 10241626 NR Desc: Contains similarity to F1N 19.7
  misc_feature: Homolog of GI Number: 53370707 NR Desc: glutaredoxin domain containing protein
  misc_feature: Homolog of GI Number: 50924087 NR Desc: OSJNBa0073L04.11
  misc_feature: Homolog of GI Number: 15810443 NR Desc: putative peptide transporter protein
  misc_feature: Homolog of GI Number: 17381052 NR Desc: putative peptide transporter protein
  misc_feature: Homolog of GI Number: 56461742 NR Desc: At1g32760
  misc_feature: Homolog of GI Number: 50904589 NR Desc: peptide transporter protein
MWPPWLNSPSRFRNTPPPSPSPSHSRTRSFSFSCSSFKDIQSLLQEKPEPAAPKSPSLFRRVRISTAVLRAWGASRAAAPAALPPGLDQGVVVYFTSLRVVRRTFDDCRAVRSILRGLRVAVDERDVSIDDRFRDELHAVLGCRGNLALPRVFVGGVYVGGADDVRQLHESGELHRLIERLPRSNLNACDSCGGFRFVVCDECNGSHKVFAEKNGFLCCSSCNANGLIRCPACFFVLPRHTR

SEQ ID NO: 6559 - DNA, 1619 bp, Glycine max
  misc_feature: Ceres CLONE ID no. 1245537
  misc_feature: Ceres CDNA ID no. 24766208
  CDS (18)..(1457): REFERENCED BY SEQ ID NO: 6560
taaacattggcattgccatggaagccaagctctggaactggaaccctctccttcttcctcctcgtttttcttcactcaaacatgcttttccatcaacaactactcgcctcgtagctcacaattcagtctcagaaaccgttcccattcataaggaaaaggaacaaaccctaccttctgtcaaacctacttactcccccactcctcccaatcgaggccttcgaacccctcacagcgggtaccattttgatgggactactcgcaaattcttcgagggttggtacttcaaagtctccattcccgaacggaagcagagcttttgctttatgtataccgtcgagagtcccctgtttcgtaaaccattgacgcagctcgaactggcccaatacgggcccaggtttactggtgtcggggcccaaattctcggtgctgatgacaaatatgtttgccaacactctccccaatcacattttttctggggaagcaggcatgaactaatgttggggaacacgttcgagcccaaccaaaattctaaacctccaaacaaggaggttcctcctcaggaatttaatgatagggtgctggaaggttttcaagtcacccccctttggcatcaaggttttattcgcgatgatggaaggtcaaattatgtagagacggtaaagacagctcgttgggagtatagtacacgtcctgtatatggttggggtgatgttggttctacgcagaagtctactgctgggtggcttgcagcttttcctgtttttgaaccacattggcaaatatgcatggctggtggactgtcaacaggttggatagagtgggatggcgagaggattgagtttgataatgctccatcttattcagaaaagaactggggtggaggattcccaagaaaatggttttgggttcaatgtaatgtttttgaaggtgctagtggagaaattgctcttacagcagctggtggattgaggcaaattcctggaataaccgagacctttgaaaatgctgcattgattggaattcattatggtggaaatttttatgaatttgtgccatggaatggtgttgttaactgggaagttactacttggggttattggtttatgtcagcagacaatggcaaatatgtggttgaattagaagcaacaacagaggatccaggtacaacattgcgtgctccaacagcagaagctggctttgcccctgcatgtaaagatacatgctttggaaatctaaaattacaaatgtgggaacgaagatatgatggcagcaaggggaagatcatattggacgtttcaagtaacatggcagcactagaagttggaggaggtccatggtttaacacttggaagggcaagacatcaactccagcagcccttagccgtgtccttgaattacccatagacgtagagggcattttcaatcctgttcctctatttaaaccgcctggcctgtagtcatttggtttggtattatcttcctttttttttagtttttaatctaatcatgcggcataatgcatggtttaatgttataaactttgtcatagtgcatgaaaggattcagagtttcaccataaggatagaaagggattcttgattacaaaaaaaaaaaaaaaa

SEQ ID NO: 6560 - protein, 479 aa, Glycine max
  misc_feature: Ceres CLONE ID no. 1245537
  misc_feature: Ceres CDNA ID no. 24766208
  misc_feature: Homolog of GI Number: 50906901 NR Desc: putative tocopherol cyclase
  misc_feature: Homolog of GI Number: 14334010 NR Desc: sucrose export defective 1
  misc_feature: Homolog of GI Number: 14334012 NR Desc: sucrose export defective 1 precursor
  misc_feature: Homolog of GI Number: 33188419 NR Desc: tocopherol cyclase
  misc_feature: Homolog of GI Number: 80971684 NR Desc: tocopherol cyclase
  misc_feature: Homolog of GI Number: 80971690 NR Desc: tocopherol cyclase
  misc_feature: Homolog of GI Number: 47078321 NR Desc: tocopherol cyclase
  misc_feature: Homolog of GI Number: 50906903 NR Desc: putative tocopherol cyclase
MEAKLWNWNPLLLPPRFSSLKHAFPSTTTRLVAHNSVSETVPIHKEKEQTLPSVKPTYSPTPPNRGLRTPHSGYHFDGTTRKFFEGWYFKVSIPERKQSFCFMYTVESPLFRKPLTQLELAQYGPRFTGVGAQILGADDKYVCQHSPQSHFFWGSRHELMLGNTFEPNQNSKPPNKEVPPQEFNDRVLEGFQVTPLWHQGFIRDDGRSNYVETVKTARWEYSTRPVYGWGDVGSTQKSTAGWLAAFPVFEPHWQICMAGGLSTGWIEWDGERIEFDNAPSYSEKNWGGGFPRKWFWVQCNVFEGASGEIALTAAGGLRQIPGITETFENAALIGIHYGGNFYEFVPWNGVVNWEVTTWGYWFMSADNGKYVVELEATTEDPGTTLRAPTAEAGFAPACKDTCFGNLKLQMWERRYDGSKGKIILDVSSNMAALEVGGGPWFNTWKGKTSTPAALSRVLELPIDVEGIFNPVPLFKPPGL

SEQ ID NO: 6561 - DNA, 1010 bp, Glycine max
  misc_feature: Ceres CLONE ID no. 1245569
  misc_feature: Ceres CDNA ID no. 40351706
  CDS (44)..(829): REFERENCED BY SEQ ID NO: 6562
cttccatcggcgcggcacacacagacacacacatttcgtcggaatgggaagggtgattcgcgcacagcgtaagggtgcggggtcggtgttcaagtcccacacccaccaccgcaagggtccggcgaggttccgcagcctcgacttcggcgagcgcaacggctacctcaaaggggtcgtcaccgatatcatccacgaccctggtcgcggtgctcctctagccaaggtggcgttccgccaccccttccgctacaagaagcagatggagctcttcgtcgccgccgagggcctctacaccggccagttcatctactgcggcaagaaggccaccctcgtcgtcggcaacgtcttgcccctccgatccatccccgaaggtgccgttatctgcaacgtcgagcaccacgttggcgaccgcggcgtcttcgccagagcctccggtgactatgccattgttatcagccacaaccctgataacgacacctctaggatcaagcttccttctgggtcaaagaagattgtgcctagtgggtgcagggcgatgattgggcaggttgcaggtggagggaggactgagaagcctcttctgaaagctggtaatgcttatcacaaattcagagtgaagaggaattgctggcctaaggtgcgtggtgtggcgatgaacccagttgagcatcctcatggaggaggtaatcaccagcatattggtcatgccagtaccgtcaggcgtgatgctcctcctggccagaaggttggtctcattgctgctaggaggactggtcgtcttagggggcaagctgctgctactgctgctaaagcggataagaccacctgaagagattgttagagttttttttttttttttataagttctcaaattttgtttctctgatagtctatgctcatctgtttgggttctattttgatcaccatttctgccataaatatgaaagcttgtaacaggcggtgttttacattggttttaagatctattcaatccaaaaaaaaaaaaaaaa

SEQ ID NO: 6562 - protein, 261 aa, Glycine max
  misc_feature: Ceres CLONE ID no. 1245569
  misc_feature: Ceres CDNA ID no. 40351706
  misc_feature (11)..(90): Pfam Name: Ribosomal_L2 PFAM Desc: Ribosomal Proteins L2
  misc_feature (96)..(231): Pfam Name: Ribosomal_L2_C PFAM Desc: Ribosomal Proteins L2
MGRVIRAQRKGAGSVFKSHTHHRKGPARFRSLDFGERNGYLKGVVTDIIHDPGRGAPLAKVAFRHPFRYKKQMELFVAAEGLYTGQFIYCGKKATLVVGNVLPLRSIPEGAVICNVEHHVGDRGVFARASGDYAIVISHNPDNDTSRIKLPSGSKKIVPSGCRAMIGQVAGGGRTEKPLLKAGNAYHKFRVKRNCWPKVRGVAMNPVEHPHGGGNHQHIGHASTVRRDAPPGQKVGLIAARRTGRLRGQAAATAAKADKTT

SEQ ID NO: 6563 - DNA, 735 bp, Glycine max
  misc_feature: Ceres CLONE ID no. 1245883
  misc_feature: Ceres CDNA ID no. 25446696
  CDS (90)..(521): REFERENCED BY SEQ ID NO: 6564
aaattctcgtcaaccttccacacttaataggaaaagaaaaaaaaaaaaaaaaagtaagcccagctttgttctgcttcaattctctaacaatggcgatggctttcaaaatggcgactactgggatgtgggttacggatgagtgcaagaactcattcatggaaatgaagtggaagaaggtgcacagatacatagtcttcaagatcgatgagaagtcaaggcttgtcaccgttgataaggtcggtggtcccggcgagagctatggtgatctcgctgcctccttgcccgacgatgattgcagatatgctgttttcgactttgattttgtcaccgttgataactgccgcaagagcaagatcttcttcattgcatggtctccaacagcatcaaggataagagcaaagatgctctacgcaacatcgaaggatgggctgagaagagctctggatggaataagctatgaagttcaggccactgatccaaccgagatgggattcgatgtaattcaagacagagccaaatagatggatgccccctttttttaaagtgggaatccaactccttatttatgtgctgagctaatcaattaatctgtcaatcttactctctctctctctttatttgctatatataaattaagtaaccatatatagtccaatgactgtatgacatgtgctatctcttcttctttcttgtttttatgctagtttaattgtgtttgatgtaaaaaaaaaaaaa

SEQ ID NO: 6564 - protein, 143 aa, Glycine max
  misc_feature: Ceres CLONE ID no. 1245883
  misc_feature: Ceres CDNA ID no. 25446696
  misc_feature (16)..(143): Pfam Name: Cofilin_ADF PFAM Desc: Cofilin/tropomyosin
  misc_feature: Homolog of GI Number: 15293263 NR Desc: putative actin depolymerizing factor 5
  misc_feature: Homolog of GI Number: 25295742 NR Desc: actin depolymerizing factor 5
  misc_feature: Homolog of GI Number: 7270448 NR Desc: actin depolymerizing factor
  misc_feature: Homolog of GI Number: 18874466 NR Desc: actin depolymerizing factor
  misc_feature: Homolog of GI Number: 7330254 NR Desc: actin depolymerizing factor
  misc_feature: Homolog of GI Number: 4566614 NR Desc: actin depolymerizing factor
  misc_feature: Homolog of GI Number: 24745620 NR Desc: actin depolymerizing factor 6
  misc_feature: Homolog of GI Number: 20197894 NR Desc: actin depolymerizing factor 6
  misc_feature: Homolog of GI Number: 14906219 NR Desc: actin
  misc_feature: Homolog of GI Number: 21554405 NR Desc: Actin
MAMAFKMATTGMWVTDECKNSFMEMKWKKVHRYIVFKIDEKSRLVTVDKVGGPGESYGDLAASLPDDDCRYAVFDFDFVTVDNCRKSKIFFIAWSPTASRIRAKMLYATSKDGLRRALDGISYEVQATDPTEMGFDVIQDRAK

SEQ ID NO: 6565 - DNA, 910 bp, Glycine max
  misc_feature: Ceres CLONE ID no. 1245990
  misc_feature: Ceres CDNA ID no. 24766209
  CDS (81)..(608): REFERENCED BY SEQ ID NO: 6566
taaaaaattgttcgtaggcaacttcaacctcaccaaaggaactaagaatttcattgaggctagagaaagtggtgatcaatatgtcaaagaatccaaaagttttctttgatattctaattggaaagatgaaagctggacgagtagtgatggagttgtttgccgatgcaaccccaaaaacagctgaaaacttcagggctctctgcactggggaaaaggggattggacgatctgggaaacctttacactacaaaggttctgtatttcatcgtattattccagaatttatgtgtcagggaggagatttcacaagagggaatgggaccgggggtgagtcaatctacggttccaaatttgaagatgagaatttcaatttgaggcataccggtcctggtattctctccatggcaaatgctggagctcatactaatggttctcagttcttcatatgtactacaaagacaccatggcttgatgggaaacatgttgtgtttggaaaagttgttgatggatacagcgttgtgcaggagatggagaaagtgggttcaggaagtggcaggacatctgaaccggtagtaatagaagattgtggccagattgtagagaagtgagtcttgatacaacgatgtttcgagacatgtttgttgctattcaatgcaaatcactagtattataataagtgatttgtgtaactaggagtcaattgtccagtattaatgtaactctcaaatttgtactcctaaatctgcttttacatttgttccaactaaaaatgcgtagctgtctgtagttggtcagagattacgttgatagaattgtggaagcaataggctcgaatatctgtagttgattggtaaattagaatgaataaggatgaagcactacatatttgcaattaaaaaaaaaaaaaaaa

SEQ ID NO: 6566 - protein, 175 aa, Glycine max
  misc_feature: Ceres CLONE ID no. 1245990
  misc_feature: Ceres CDNA ID no. 24766209
  misc_feature (6)..(172): Pfam Name: Pro_isomerase PFAM Desc: Cyclophilin type peptidyl
  misc_feature: Homolog of GI Number: 52076094 NR Desc: peptidylprolyl isomerase
  misc_feature: Homolog of GI Number: 1305457 NR Desc: cytosolic cyclophilin
  misc_feature: Homolog of GI Number: 20465725 NR Desc: putative peptidylprolyl isomerase
  misc_feature: Homolog of GI Number: 11270314 NR Desc: peptidylprolyl isomerase
  misc_feature: Homolog of GI Number: 38708272 NR Desc: cyclophilin
  misc_feature: Homolog of GI Number: 21592448 NR Desc: cytosolic cyclophilin ROC3
  misc_feature: Homolog of GI Number: 18146786 NR Desc: CYP1
  misc_feature: Homolog of GI Number: 17981611 NR Desc: cyclophilin
  misc_feature: Homolog of GI Number: 11270320 NR Desc: peptidylprolyl isomerase
  misc_feature: Homolog of GI Number: 2760537 NR Desc: cytosolic form of cyclophilin
  misc_feature: Useful for delaying flowering time
  misc_feature: Useful for making larger plants
  misc_feature: Useful for making lethal plants for genetic confinement systems
  misc_feature: Useful for making ornamental plants with modified leaves
  misc_feature: Useful for making plants with increased biomass and foliage
  misc_feature: Useful for making plants with increased biomass and foliage
  misc_feature: Useful for making plants with increased biomass and foliage
MSKNPKVFFDILIGKMKAGRVVMELFADATPKTAENFRALCTGEKGIGRSGKPLHYKGSVFHRIIPEFMCQGGDFTRGNGTGGESIYGSKFEDENFNLRHTGPGILSMANAGAHTNGSQFFICTTKTPWLDGKHVVFGKVVDGYSVVQEMEKVGSGSGRTSEPVVIEDCGQIVEK

SEQ ID NO: 6567 - DNA, 884 bp, Glycine max
  misc_feature: Ceres CLONE ID no. 1246109
  misc_feature: Ceres CDNA ID no. 35383372
  CDS (50)..(718): REFERENCED BY SEQ ID NO: 6568
acacagcctcaacaaccctaacgcgtgcagagcagagagagacgcagccatggggcgaagacccgcgaggtgttataggcaaattaagaacaaaccataccccaagtcacggttttgccgtggtgttcctgatcccaagatcaggatttacgatgttggtatgaagaagaagggtgttgatgaatttcctttctgtgtccatctggttagttgggagaaggaaaacgtttctagtgaggccctggaagctgctcgtattgcttgcaacaagtacatggccaaatttgctggaaaggatgctttccacttgagagtcagggtgcacccattccatgttcttaggatcaacaagatgctttcgtgtgccggagctgataggctccaaactggaatgagaggtgcttttggaaagccacagggtacttgtgctagagtggctattggacaggtccttctttctgtccgctgcaaggacagcaacagccatcatgcccaggaggcccttcgccgtgccaagttcaagttccctggtcgtcaaaagattattgttagcaggaaatggggcttcaccaagtttagccgttctgattatctcaagttcaagtcagagaatagaattgtgcccgatggtgtgaatgctaagcttcttggttgccatggaccattggccaaccgtgaacccggaagggcctttttggatactgctactggttcttagtctgtttgttaatttggaaatactagactttggattactttagttttgcaagagtgaatttgagttattgtcagaacattccaattacttaaattgtttgcgaacctcttcaatttggttattttaatgttatattttgttatgatgcacaaaaaaaaaaaaaaaa

SEQ ID NO: 6568 - protein, 222 aa, Glycine max; identical to SEQ ID NO: 2532
  misc_feature: Ceres CLONE ID no. 1246109
  misc_feature: Ceres CDNA ID no. 35383372
  misc_feature (1)..(176): Pfam Name: Ribosomal_L10e PFAM Desc: Ribosomal L10
  misc_feature: Homolog of GI Number: 5917743 NR Desc: 60S ribosomal protein L10
  misc_feature: Homolog of GI Number: 68449756 NR Desc: 60S ribosomal protein L10
  misc_feature: Homolog of GI Number: 77999313 NR Desc: 60S ribosomal protein L10
  misc_feature: Homolog of GI Number: 2500354 NR Desc: 60S ribosomal protein L10
  misc_feature: Homolog of GI Number: 6984130 NR Desc: 60S ribosomal protein L10
  misc_feature: Homolog of GI Number: 11036950 NR Desc: QM
  misc_feature: Homolog of GI Number: 50313215 NR Desc: QM family protein
  misc_feature: Homolog of GI Number: 49861132 NR Desc: QM
  misc_feature: Homolog of GI Number: 21592869 NR Desc: putative 60s ribosomal protein L10
  misc_feature: Homolog of GI Number: 23397080 NR Desc: putative tumor suppressor
  misc_feature: Useful for making shorter plants

SEQ ID NO: 6569 - DNA, 736 bp, Glycine max
  misc_feature: Ceres CLONE ID no. 1246164
  misc_feature: Ceres CDNA ID no. 36582242
  CDS (57)..(410): REFERENCED BY SEQ ID NO: 6570
ccccccattactcacttttcatccttcgatcatacacttagttgcttccaattaagatggttctgctagagaagctctgggatgatgttgtggctggccctcaacctgagcgtggccttggcaagctcagaaaactcaccaccctcaaaactattgatgaaggagaaagtagcaagctgcagaagacgttgtcgatgccgtcgacaccaacaaccccgatgactccgacgactccaacgacaccgggatcggcccgtaaagctgacaacgtttggaggagcgtcttccatcctgggagcaactccgccacaaagaccatcggtgctcagatgtttgacaaaccacttcccaacactcccactgtctatgactggctgtacagtggggagaccagaagcaggcaccgctgaagctgaagtctttagctaagatgaccgtgggttgcatgtaaatattgtcgtttttcgttaagcatctgccacgtttgcagctactattactattatgtgtcgggaatttattgctccgttgctgactcaaacataatattactagcgtgtttggtttttttgagcaagtgaatgtaaaaatgctaaataattcgttagtatgctaagttttgttaagccagatctgccttgaactttggcgattggttaatctttttctccctttgttaaatgattagtattaaaataaataaatttttgttaaaatcctaaaaaaaaaaaaaaaa

SEQ ID NO: 6570 - protein, 117 aa, Glycine max; identical to SEQ ID NO: 5322
  misc_feature: Ceres CLONE ID no. 1246164
  misc_feature: Ceres CDNA ID no. 36582242
  misc_feature (7)..(117): Pfam Name: Auxin_repressed PFAM Desc: Dormancy/auxin associated protein
  misc_feature: Homolog of GI Number: 11386111 NR Desc: auxin
  misc_feature: Homolog of GI Number: 62526583 NR Desc: auxin
  misc_feature: Homolog of GI Number: 71040687 NR Desc: auxin
  misc_feature: Homolog of GI Number: 2605887 NR Desc: dormancy
  misc_feature: Homolog of GI Number: 58700653 NR Desc: auxin
  misc_feature: Homolog of GI Number: 22573 NR Desc: 12.5 kDa protein
  misc_feature: Homolog of GI Number: 9795604 NR Desc: dormancy
  misc_feature: Homolog of GI Number: 7488618 NR Desc: dormancy
  misc_feature: Homolog of GI Number: 45758711 NR Desc: auxin

SEQ ID NO: 6571 - DNA, 1286 bp, Glycine max
  misc_feature: Ceres CLONE ID no. 1246168
  misc_feature: Ceres CDNA ID no. 25447453
  CDS (69)..(878): REFERENCED BY SEQ ID NO: 6572
aaaagagaagaaaggctcggcaaaaaagaaaaatataaaataaaaccgccacaaatttctccatagttatgggcacttccattctcgacgccctgaacgttcgcgtggaaggttccggcgacaagtaccttgtcctggcccacggcttcggcacggaccaatccgcgtggcagcgcgtgctcccttacttcacccgcaactacagcgtcattctctacgacctcgtctgcgccggcagcgtcaaccccgaccacttcgactaccgccgttataccaccctcgacgcctacgtcgacgacctcctcaacatcctcgacgccctccgcgtcccccgctgcgcctacgtcggccactccatctccgccatgatcggcatgctcgcctccatccgccgcccggacctcttctccaaactcatcctcatcggcgcctcccctaggtacaacaaattcctgaacgacaaggactaccacgggggatttgagcagggagaaatcgagcaggtgttttcggcaatggaggcgaactacgaggcgtgggtcaacggattcgctccgctggcggtcggggcggatgtaccggcggcggtgagggaattttcccggacgctgttcaacatgcgccctgacatctcgctcttcgtgtcgcggacggtgttcaacagcgacctgagggggattctgggcctggtgaacgtcccctgctgtattatgcagacggcacgtgacatgtccgtgccggccagcgtggctacctacatgagggaccacatcgccggaaagagcaccatccagtggctcgacacggaggggcacctcccccaccttagtgctccttcatacctagctcgccagctagagattgcgctctcgcagtagcgcgtgtaagtctaggcgcgtggctctggtggttaattaagtaattaactctactagtactattactaccagattaggctagaagctactgctacagaacaacaacaacaacaacaacaagtgtacgaaaggctccgaaactggacacctggcgaataacgtgtgggtgttggttctttgactgggatttttatttaaggataagaatctgcacgtggatttcacgtgatgcgtggccatttttagtattattaatcaactattattgctcttgtgcttctctccttttaaaggaaaaaaaaaagagaagaaattagagagacttgtttgttagtgtgattgtttgtttttattaatattattattattattatcacagaaggtcttggtttaaaaaaaaaaaaaaaa

SEQ ID NO: 6572 - protein, 269 aa, Glycine max
  misc_feature: Ceres CLONE ID no. 1246168
  misc_feature: Ceres CDNA ID no. 25447453
  misc_feature: Homolog of GI Number: 50916887 NR Desc: putative hydrolases
  misc_feature: Homolog of GI Number: 45656451 NR Desc: hydrolase
  misc_feature: Homolog of GI Number: 24216360 NR Desc: Predicted hydrolases or acyltransferases
  misc_feature: Homolog of GI Number: 53828585 NR Desc: At3g24420
  misc_feature: Homolog of GI Number: 47026958 NR Desc: esterase/lipase/thioesterase
  misc_feature: Homolog of GI Number: 34912326 NR Desc: P0451D05.26
  misc_feature: Homolog of GI Number: 67988424 NR Desc: Alpha/beta hydrolase fold
  misc_feature: Homolog of GI Number: 17384256 NR Desc: mucin 5
  misc_feature: Homolog of GI Number: 563375 NR Desc: mucin
MGTSILDALNVRVEGSGDKYLVLAHGFGTDQSAWQRVLPYFTRNYSVILYDLVCAGSVNPDHFDYRRYTTLDAYVDDLLNILDALRVPRCAYVGHSISAMIGMLASIRRPDLFSKLILIGASPRYNKFLNDKDYHGGFEQGEIEQVFSAMEANYEAWVNGFAPLAVGADVPAAVREFSRTLFNMRPDISLFVSRTVFNSDLRGILGLVNVPCCIMQTARDMSVPASVATYMRDHIAGKSTIQWLDTEGHLPHLSAPSYLARQLEIALSQ

SEQ ID NO: 6573 - DNA, 598 bp, Glycine max
  misc_feature: Ceres CLONE ID no. 1246230
  misc_feature: Ceres CDNA ID no. 36582149
  CDS (93)..(332): REFERENCED BY SEQ ID NO: 6574
gttctagtgtatgtgattgttgtgactcgttcttcttcgtcgttatcttcttcttttgttgtttgtgtgtttgttttttctctcacctgaaaatgtcttgctgcggtggtaactgtggttgcggaagcgcctgcaagtgcggcaacggctgcggaggctgcaagatgtacccagacttgagctacaccgagtcaaccaccaccgagaccttggtcatgggagtggcaccagttaaggctcaattcgagagtgctgaaatgggtgttcccgctgagaacgatggctgcaaatgtggagctaactgcacctgcaacccctgcacttgcaagtgaggtgttggagagctaaagcttcaagcagagatggcccttagaaataatgataaaaactatatgtagtttcaaaacttcaaaattatgtagtatgtattatgttgcactctggtgttttgtgtctaaacaaacacccttagaataaagtggtcatttcttgcccttgagcaagttcaagtgttttggacttgtgatgggtgtgttaaggtcatggttgccttttatatatatatatatataaatgtttggtaaaaaaaaaaaaaaaa

SEQ ID NO: 6574 - protein, 79 aa, Glycine max; identical to SEQ ID NO: 1962
  misc_feature: Ceres CLONE ID no. 1246230
  misc_feature: Ceres CDNA ID no. 36582149
  misc_feature (1)..(78): Pfam Name: Metallothio_2 PFAM Desc: Metallothionein
  misc_feature: Homolog of GI Number: 47076854 NR Desc: type 2 metallothionein
  misc_feature: Homolog of GI Number: 541943 NR Desc: metallothionein
  misc_feature: Homolog of GI Number: 47076858 NR Desc: type 2 metallothionein
  misc_feature: Homolog of GI Number: 47076850 NR Desc: type 2 metallothionein
  misc_feature: Homolog of GI Number: 71040685 NR Desc: metallothionein
  misc_feature: Homolog of GI Number: 2815246 NR Desc: class I type 2 metallothionein
  misc_feature: Homolog of GI Number: 71040683 NR Desc: type 2 metallothionein
  misc_feature: Homolog of GI Number: 74476676 NR Desc: type 2 metallothionein
  misc_feature: Homolog of GI Number: 47076870 NR Desc: type 2 metallothionein
  misc_feature: Homolog of GI Number: 747906 NR Desc: metallothionein

SEQ ID NO: 6575 - DNA, 646 bp, Glycine max
  misc_feature: Ceres CLONE ID no. 1247384
  misc_feature: Ceres CDNA ID no. 40351707
  CDS (46)..(429): REFERENCED BY SEQ ID NO: 6576
aggcagtgcaaaactcacaacacatctaaacaaatatcaagaacaatggcttatgctaggcttgctcctatggctgtcttcttgcttgccacttccaccataatgttcccaacgaagatagaagcagcagattgtaatggtgcatgttcacctttcgaggtgccaccgtgccgctcacgtgattgtcgttgtgtccctataggactatttgttggtttctgcatacatccaactggactttcatctgttgcgaagatgatcgacgaacatcccaacttatgtcaatctgatgatgaatgcatgaagaaaggaagtggcaatttttgcgctcgttaccctaataattatatcgattatggatggtgttttgactctgattctgaagcactgaaaggcttcttggccatgcctagggcaaccaccaagtaatatggtgggtatgccaaagtgggcatgcttgatgcatcttctactacttaaaaataaaagcttatgatgcatctactgctttaaacaaaagagtgctccactacgcaacttttgtttccaacttatagttggttacgttttatgtaaactcaacccatgtatgttttggagcattccagttaataaaaaatgtttctatacaaaaaaaaaaaaaaaa

SEQ ID NO: 6576 - protein, 119 aa, Glycine max
  misc_feature: Ceres CLONE ID no. 1247384
  misc_feature: Ceres CDNA ID no. 40351707
  misc_feature (1)..(119): Pfam Name: Albumin_I PFAM Desc: Albumin I
MAVFLLATSTIMFPTKIEAADCNGACSPFEVPPCRSRDCRCVPIGLFVGFCIHPTGLSSVAKMIDEHPNLCQSDDECMKKGSGNFCARYPNNYIDYGWCFDSDSEALKGFLAMPRATTK

SEQ ID NO: 6577 - DNA, 685 bp, Glycine max
  misc_feature: Ceres CLONE ID no. 1247392
  misc_feature: Ceres CDNA ID no. 35383373
  CDS (116)..(454): REFERENCED BY SEQ ID NO: 6578
aaaactcaatcaactcgatcaactcaacacaaaccaaaactcaagctaaaattctcactctctctctcatctcgagatcatagtatcatattcaatatcatttcataccaaacacatggctttggaagctctcaactcaccaacaacaaccgctccatcttttccctttgacgacccaactattccatgggcgaaacgaaaacgttcaaagcgttctcgcgaccatccttctgaagaagagtacctcgccctctgcctcatcatgctcgctcgcggcggcaccaccaccgtcaacaaccgccacgtcagccctccgccgccacagccacagccacagccgacaccagatccttccaccaagctcagttacaaatgctccgtttgcgacaagagcttggtggaaggatctgttgtcggcagtggtgtggcggttttgttgttttatttagtgtaggtatacgccatggtttaataattaaagtctgagagctgtttgttgccaaagggattgaacgatcttaaaaccaggtttaggatttggcattccattaataatggtcccttttaactgtatggtttcacttaatgtaattgcagggtgttgtaccctttattcacattttttctcacttaaatatgtttttgatttctgtgagtttgcatttttctaaaaaaaaaaaaaaaa

SEQ ID NO: 6578 - protein, 112 aa, Glycine max
  misc_feature: Ceres CLONE ID no. 1247392
  misc_feature: Ceres CDNA ID no. 35383373
  misc_feature: Homolog of GI Number: 7488707 NR Desc: probable zinc finger protein SCOF
  misc_feature: Homolog of GI Number: 32441471 NR Desc: zinc finger protein
  misc_feature: Homolog of GI Number: 4666360 NR Desc: zinc
  misc_feature: Homolog of GI Number: 33771374 NR Desc: zinc finger protein PIF1
  misc_feature: Homolog of GI Number: 7228329 NR Desc: putative TFIIIA
  misc_feature: Homolog of GI Number: 439493 NR Desc: zinc
  misc_feature: Homolog of GI Number: 71979887 NR Desc: Cys2
  misc_feature: Homolog of GI Number: 439489 NR Desc: zinc
  misc_feature: Homolog of GI Number: 33331578 NR Desc: zinc finger protein
  misc_feature: Homolog of GI Number: 439487 NR Desc: zinc
MALEALNSPTTTAPSFPFDDPTIPWAKRKRSKRSRDHPSEEEYLALCLIMLARGGTTTVNNRHVSPPPPQPQPQPTPDPSTKLSYKCSVCDKSLVEGSVVGSGVAVLLFYLV

SEQ ID NO: 6579 - DNA, 1282 bp, Glycine max
  misc_feature: Ceres CLONE ID no. 1247542
  misc_feature: Ceres CDNA ID no. 35383374
  CDS (61)..(945): REFERENCED BY SEQ ID NO: 6580
atagccacaatttgccaagtgataagagtaatagaaacctctcagcccctctccgatcaaatggccaccgtaatcgacggcaaagccgttgcgcaaaccatccgatctgaaatcgccgacgaggtgcgccagctctctcaaaaatacggcaaggttccgggattagcggtggtgatagtagggaacagaaaagattcacagagctatgttggaatgaagagaaaggcatgcgctgaattgggaatcaaatccttcgatgtggaccttcccgaacaagtctcccaagctgaactaatcaaacaagttcaccagttgaatgctaaccctgacgtacatggtatattggttcagctcccgttgcctaagcacataaatgaagaggaagttctgactgaaatcagccttgagaaggatgtagatggttttcatcctttgaacattggcaagcttgcaatgaaaggcagagaccccctgttccttccctgcactcccaaggcatgtattgaactattacaacgaagtggtgtaagtattaagggaaagaaagccgttgtggttggtagaagcaacatagttggattaccagcttcattgctgcttttgaaagcagatgccacagttactattattcattcacacacaagtcagccagaaagtatcatacgtgaagcagatattgttattgcagcagcaggacagccgatgatgatcaagggcagttggatcaaacctggagctgcagtgatagatgttggcacaaatgctgttgatgacccaacaaagaagtcaggttacaggcttgttggagatgtagattttggggaagcatctaaagttgctggttggattactccagttcctggtggtgtaggtccaatgacagtcacaatgttgctgaagaatactttggatggagccaagcgctacattgaacaaaataattgatcttcctttaatttgaataaataaaaggtatgtactattagtttgaaattctttgagaatcggttttatccacacttttgtttctgtttaggtagatgaatgtattctacaaaatcacaaggatcgctttcgatggataagtagaactggtccaatcgaaactatgtatttgccctttcactatctccgaagaaacattctcgatgtgggtactgaccatattttagattggatttagagcatagctattccttggtggtaagaaacgcttgtagccagtgtaagatcagttctaatgtaagaatcagttcttaaaaaaataaaaaaaaaaaaaaaa

SEQ ID NO: 6580 - protein, 294 aa, Glycine max
  misc_feature: Ceres CLONE ID no. 1247542
  misc_feature: Ceres CDNA ID no. 35383374
  misc_feature (123)..(290): Pfam Name: THF_DHG_CYH_C PFAM Desc: Tetrahydrofolate dehydrogenase/cyclohydrolase
  misc_feature (3)..(120): Pfam Name: THF_DHG_CYH PFAM Desc: Tetrahydrofolate dehydrogenase/cyclohydrolase
  misc_feature: Homolog of GI Number: 6002383 NR Desc: 5
  misc_feature: Homolog of GI Number: 21553669 NR Desc: 5
  misc_feature: Homolog of GI Number: 28416655 NR Desc: At3g12290
  misc_feature: Homolog of GI Number: 50949131 NR Desc: similar to Pisum sativum methylenetetrahydrofolate dehydrogenase
  misc_feature: Homolog of GI Number: 3786006 NR Desc: methylenetetrahydrofolate dehydrogenase
  misc_feature: Homolog of GI Number: 30687594 NR Desc: tetrahydrofolate dehydrogenase/cyclohydrolase
  misc_feature: Homolog of GI Number: 50899522 NR Desc: methylenetetrahydrofolate dehydrogenase
  misc_feature: Homolog of GI Number: 70870194 NR Desc: C
  misc_feature: Homolog of GI Number: 49649268 NR Desc: YlC1
  misc_feature: Homolog of GI Number: 45190781 NR Desc: AER178Wp
MATVIDGKAVAQTIRSEIADEVRQLSQKYGKVPGLAVVIVGNRKDSQSYVGMKRKACAELGIKSFDVDLPEQVSQAELIKQVHQLNANPDVHGILVQLPLPKHINEEEVLTEISLEKDVDGFHPLNIGKLAMKGRDPLFLPCTPKACIELLQRSGVSIKGKKAVVVGRSNIVGLPASLLLLKADATVTIIHSHTSQPESIIREADIVIAAAGQPMMIKGSWIKPGAAVIDVGTNAVDDPTKKSGYRLVGDVDFGEASKVAGWITPVPGGVGPMTVTMLLKNTLDGAKRYIEQNN

SEQ ID NO: 6581 - DNA, 866 bp, Glycine max
  misc_feature: Ceres CLONE ID no. 1247773
  misc_feature: Ceres CDNA ID no. 29191405
  CDS (103)..(675): REFERENCED BY SEQ ID NO: 6582
atccacacctctctctctctctcagaatttctatctatctcttgtttcaatttcaacaacggttactcctttttcgttttgagtttcaatcaagccatcatcatgtctaccgcatcgcaacccaaggccaagaaaacggcgtcgtccaagaagcccctctcccaccctcccttcgccgtgatgatagcagaggcgattgcgagtctgaaagagagaaccggttcgagccaatacgcgataaccaaatacatcgaagggaagcacaaggagttgcctgcaacctacaagaagcttgtcctcgttcatctcaagaaatctgttgctgctggcaagcttgttaaggtgaaaaactcctttaagctcgcaccgactaagcctgctccggttaaggccgctgctcccaaaaagccaaccaaagctgccactaagcccgcttccaagcccaaagctgctactcctaagaaaaaggctgttgccaagcccaaggccaaagctgcggccacgactgccaagcccaagtctaagcccgctaaggtcgcggccaagaaggtcgctgctaagccagctaagaagaagacacccgtaaaggccgtgaagaagcccaagagtgtcgtgaagaaacctaagagcgtgaaatcaccagcgaagaagactaaggctaaggctaagaagtgatgatttggattggggtttggttttggtttggcgttatagttttatgcattccgggttcattcgtagtagtataggtgaatatatttttagaagagtattgatgtaaattcctttttctagaaattcaacaagtgttcttgtttgcattgaatacaatttcgttttctttacgtccaaaaaaaaaaaaaaaa

SEQ ID NO: 6582 - protein, 190 aa, Glycine max; identical to SEQ ID NO: 3402
  misc_feature: Ceres CLONE ID no. 1247773
  misc_feature: Ceres CDNA ID no. 29191405
  misc_feature (20)..(89): Pfam Name: Linker_histone PFAM Desc: linker histone H1 and H5 family
  misc_feature: Homolog of GI Number: 73587458 NR Desc: histone H1 subtype 7
  misc_feature: Homolog of GI Number: 73587460 NR Desc: histone H1 subtype 7
  misc_feature: Homolog of GI Number: 73587462 NR Desc: histone H1 subtype 7
  misc_feature: Homolog of GI Number: 3204127 NR Desc: histone H1
  misc_feature: Homolog of GI Number: 2118974 NR Desc: histone H1.41
  misc_feature: Homolog of GI Number: 81176340 NR Desc: histone H1F
  misc_feature: Homolog of GI Number: 34897182 NR Desc: histone
  misc_feature: Homolog of GI Number: 18463959 NR Desc: histone H1
  misc_feature: Homolog of GI Number: 6752901 NR Desc: histone H1
  misc_feature: Homolog of GI Number: 629668 NR Desc: histone H1
  misc_feature: Useful for making bigger plants
  misc_feature: Useful for making ornamental plants with modified leaves
  misc_feature: Useful for making plants with increased biomass
  misc_feature: Useful for making plants with increased biomass and foliage

SEQ ID NO: 6583 - DNA, 563 bp, Glycine max
  misc_feature: Ceres CLONE ID no. 1248036
  misc_feature: Ceres CDNA ID no. 25445733
  CDS (76)..(402): REFERENCED BY SEQ ID NO: 6584
aggtttgtgattgtctttgcctcactttgctgccgtacctaatcggagagctcccgctgactgcgatcggatttcatggctcctaagaaagacaaggctcccccaccttcatccaagcccgccaagtctggtggtgggaagcagaagaagaagaagtggagcaagggaaagcaaaaggagaaggtgaataaccaggtgctgttcgatcaggctacctatgacaagctcctctccgaggcacccaaatacaaactcattactccttccattctctctgaccgtttgaggattaatggatcacttgcaaggaaggctattagggaattgatggccagaggttcaataaggatggtgtctgcccatgctagtcagcagatttacactagagcgacaaacacctagatgtactggttataatttatgtagtattgatgcaccgctgaagtgaaattttgtttttttctgtttgagacatacctcatgctagattgcatcagtttgacggttgctaaattcatgggttaaaaaaaaaaaaaaaaaaaaaaaaaaaaaaaaaaaaaaaa

SEQ ID NO: 6584 - protein, 108 aa, Glycine max
  misc_feature: Ceres CLONE ID no. 1248036
  misc_feature: Ceres CDNA ID no. 25445733
  misc_feature (1)..(106): Pfam Name: Ribosomal_S25 PFAM Desc: S25 ribosomal protein
  misc_feature: Homolog of GI Number: 435679 NR Desc: ribosomal protein S25
  misc_feature: Homolog of GI Number: 21617899 NR Desc: ribosomal protein S25
  misc_feature: Homolog of GI Number: 21553704 NR Desc: ribosomal protein S25
  misc_feature: Homolog of GI Number: 4567232 NR Desc: 40S ribosomal protein S25
  misc_feature: Homolog of GI Number: 51979721 NR Desc: PREDICTED P0562A06.14 gene product
  misc_feature: Homolog of GI Number: 79322680 NR Desc: structural constituent of ribosome
  misc_feature: Homolog of GI Number: 52077174 NR Desc: putative 40S ribosomal protein 25S
  misc_feature: Homolog of GI Number: 62701664 NR Desc: S25 ribosomal protein
  misc_feature: Homolog of GI Number: 33590374 NR Desc: 40S ribosomal protein S25
  misc_feature: Homolog of GI Number: 14276683 NR Desc: ribosomal protein S25
MAPKKDKAPPPSSKPAKSGGGKQKKKKWSKGKQKEKVNNQVLFDQATYDKLLSEAPKYKLITPSILSDRLRINGSLARKAIRELMARGSIRMVSAHASQQIYTRATNT

SEQ ID NO: 6585 - DNA, 1279 bp, Glycine max
  misc_feature: Ceres CLONE ID no. 1248062
  misc_feature: Ceres CDNA ID no. 25445631
  CDS (40)..(1041): REFERENCED BY SEQ ID NO: 6586
caaaaacctagctaaacgaagaaaatcattccaatacacatggcttccgaaaggcaagcgttaatgcttattctcttaacaacattcttcttcaccataaagccttcacaggccagtactactggtggcataacaatctactggggccaaaacattgacgacggcaccttgacttccacatgcgacactggaaacttcgagattgtcaacctagctttcctcaatgcgtttggttgcggcataactccatcatggaacttcgctggccactgtggggactggaacccttgttccatactagaaccccaaatacaatactgccagcagaaaggtgtcaaagtcttcctttccctcggtggtgctaaaggaacctactccctctgctcacccgaggacgcaaaagaagttgccaattacctttatcaaaacttcctcagtggcaaacccggtccacttggaagtgtaacattggaaggcatcgatttcgacattgaacttggttccaacctctattggggcgaccttgccaaggaactagatgctctcaggcaccaaaacgaccactacttctacttgtccgcagccccacaatgttttatgcctgattaccacctcgacaatgccatcaaaactggtcttttcgatcatgtaaacgttcagttctacaataaccctccatgccaatactcacctggcaatactcaattgctttttaattcatgggatgattggacttcaaatgttcttcccaataactctgttttctttggactaccagcatctcccgacgctgctccaagtggtggttatataccaccacaggtgctcatttctgaggtgcttccctatgtaaagcaagcttccaactatggaggagttatgctgtgggacaggtaccatgatgttttaaattatcacagcgatcagataaaggattatgttccaaaatatgcaatgcggtttgtgaccgcagtttccgacgctatttatgagagtgtctctgcagctacgcaccgcatcttacagaagaaaccatattagaaatatggggagccgtacgtgcaaactatttatcagctatctatgcatgtgtccgtctctgtaacgtttgtatggaaaaatggaaataagtaacaaattgttattagttgttacctttgtggcatctactccagctttgatttcctagctagttgttatgtaatgtaaccaatataatcgaagcatgttgagaataaaatactccctactcattccaacttcaaaaaaaaaaaaaaaa

SEQ ID NO: 6586 - protein, 333 aa, Glycine max
  misc_feature: Ceres CLONE ID no. 1248062
  misc_feature: Ceres CDNA ID no. 25445631
  misc_feature (29)..(288): Pfam Name: Glyco_hydro_18 PFAM Desc: Glycosyl hydrolases family 18
  misc_feature: Homolog of GI Number: 7451373 NR Desc: chitinase
  misc_feature: Homolog of GI Number: 2072742 NR Desc: chitinase homologue
  misc_feature: Homolog of GI Number: 22901738 NR Desc: high molecular weight root vegetative storage protein precursor
  misc_feature: Homolog of GI Number: 2293066 NR Desc: class III chitinase
  misc_feature: Homolog of GI Number: 7339660 NR Desc: yieldin precursor
  misc_feature: Homolog of GI Number: 4835586 NR Desc: acidic chitinase
  misc_feature: Homolog of GI Number: 4835584 NR Desc: acidic chitinase
  misc_feature: Homolog of GI Number: 3451147 NR Desc: chitinase
  misc_feature: Homolog of GI Number: 762879 NR Desc: chitinase
  misc_feature: Homolog of GI Number: 3452147 NR Desc: chitinase
MASERQALMLILLTTFFFTIKPSQASTTGGITIYWGQNIDDGTLTSTCDTGNFEIVNLAFLNAFGCGITPSWNFAGHCGDWNPCSILEPQIQYCQQKGVKVFLSLGGAKGTYSLCSPEDAKEVANYLYQNFLSGKPGPLGSVTLEGIDFDIELGSNLYWGDLAKELDALRHQNDHYFYLSAAPQCFMPDYHLDNAIKTGLFDHVNVQFYNNPPCQYSPGNTQLLFNSWDDWTSNVLPNNSVFFGLPASPDAAPSGGYIPPQVLISEVLPYVKQASNYGGVMLWDRYHDVLNYHSDQIKDYVPKYAMRFVTAVSDAIYESVSAATHRILQKKPY

SEQ ID NO: 6587 - DNA, 764 bp, Glycine max
  misc_feature: Ceres CLONE ID no. 1248063
  misc_feature: Ceres CDNA ID no. 25445777
  CDS (57)..(587): REFERENCED BY SEQ ID NO: 6588
gtatcactgataactgataaacattgtttccgtgatcatcctcatcactctcacccatggctgcctcatccaccatcaacaacttcctctctttcttcttacgcacaaaaccaccaccaccaccctctccaccgcagttcaaccccaccacttctcagaaccagaaaccctcctcctcacagcccctaattgcccaatacaaccctcctccttcaccctcttgcgcttcttcttctgagttgtcctctgttatatgcccatccatggcgtactccaacacgctcttcttccggtcgccgtacaacgtgcaggtggtggtggccgaggacgagtccgaggagaagctcctgggcaggttccgcagagaggtgatcaaggccggcatcgttcaggagtgtaggaggagacggtatttcgagaacaaacatgaagagaaaaaacgcaagtcgcgcgaggctgccagatgtaaccgcaaaaggcggcccatgtcaaaaactgtaggacagaagaagcaggatgtctcagcaaccaaaagagaagacgatgaggataactgggatctacctgaaggagacactctgtattaacccttcgattccctaagttctggttttctttgatttcactgcatataagttttgttaagtaagttgtgttccttacttggtgcattttcaactgtgtagaatttaatatgatgtaatttgcttgtttgtacatccatattttgttatgcccttggttctataaaaaaaaaaaaaaaa

SEQ ID NO: 6588 - protein, 176 aa, Glycine max
  misc_feature: Ceres CLONE ID no. 1248063
  misc_feature: Ceres CDNA ID no. 25445777
  misc_feature (84)..(141): Pfam Name: Ribosomal_S21 PFAM Desc: Ribosomal protein S21
  misc_feature: Homolog of GI Number: 17154781 NR Desc: ribosome
  misc_feature: Homolog of GI Number: 18655399 NR Desc: AT3g27160/MYF5_3
  misc_feature: Homolog of GI Number: 63147388 NR Desc: At5g63300
  misc_feature: Homolog of GI Number: 50905817 NR Desc: ribosomal protein S21
MAASSTINNFLSFFLRTKPPPPPSPPQFNPTTSQNQKPSSSQPLIAQYNPPPSPSCASSSELSSVICPSMAYSNTLFFRSPYNVQVVVAEDESEEKLLGRFRREVIKAGIVQECRRRRYFENKHEEKKRKSREAARCNRKRRPMSKTVGQKKQDVSATKREDDEDNWDLPEGDTLY

SEQ ID NO: 6589 - DNA, 1251 bp, Glycine max
  misc_feature: Ceres CLONE ID no. 1248135
  misc_feature: Ceres CDNA ID no. 35383375
  CDS (334)..(1053): REFERENCED BY SEQ ID NO: 6590
acagaaactgatatgcaacatccaaatccttatctttgcatccccaccagctcttaatcctcatccagacacttccttttctgtgttcaacagtttcttcccacattaaataccaactgtgtattgtactacaaatgttaactatgttcttcttctttttttgttctcatctccacaccatgtcctaatctttctacaccacatcgttcttcatttttggctttacaaaactaccgtgtctggtaaagggttcgttaacatttccagtgaaaaaagttgttagctaaaagaagaccaagtttttagtgttgtagaaggaagagaagagttaacatgaaaattcagtgtgatgtgtgtgagagagctccggcaacagtgatttgttgtgcggatgaggcagctttgtgtgccaaatgtgacgttgaagttcatgctgcaaacaagcttgcaagcaagcaccaaaggcttcttcttcaatgtctatcaagcaagcttccaagatgtgacatttgccaagacaagccagcattcatattttgtgttgaagacagagcactcttctgtcaggattgtgatgaaccaattcattcagccggaagcctttctgcgaaccaccagcgcttccttgctactggtatccgagtggcatcgagttctaattgcaccaaggacaatgaaaaaagtcacttggagcctcctactaggaatgcacaacaagtttctgcgaaaattcctcctcagcaagtgcctagcttcacttcctcttgggctgttgatgacttattggaactaacagcctttgaatcacctgagaaaaaggaatctctgcagtttggagagctggaatggcttacagatgtgggtatttttggtgaacaatttgctcaggaagccttggctgcagctgaagtacctcagcttccagtaactcataacagtagcagtgttgcttcatacagaacttccaaatcctacatgtcccacaaaaagcctaggattgaagtcctaaatgatgatgatgatgagtattttactgtgcctgatcttggctaagtgtgtggcttgccatatgggatggtgcatgcatgattggaaaagattaattatgggaaaataatttgttttttctttttttaaaagctatttagtaaattgtcgaaaaagattattgttttctcaaaaaactattccattcagacatgttgatatgttgtatattcaattattcatactccaaaaaaaaaaaaaaaa

SEQ ID NO: 6590 - protein, 239 aa, Glycine max
  misc_feature: Ceres CLONE ID no. 1248135
  misc_feature: Ceres CDNA ID no. 35383375
  misc_feature (54)..(99): Pfam Name: zf PFAM Desc: B
  misc_feature: Homolog of GI Number: 78173056 NR Desc: salt
  misc_feature: Homolog of GI Number: 76160970 NR Desc: fructokinase 2
  misc_feature: Homolog of GI Number: 45544865 NR Desc: CONSTANS interacting protein 1
  misc_feature: Homolog of GI Number: 19310755 NR Desc: putative salt
  misc_feature: Homolog of GI Number: 17104765 NR Desc: putative CONSTANS B
  misc_feature: Homolog of GI Number: 30679541 NR Desc: zinc finger
  misc_feature: Homolog of GI Number: 50925803 NR Desc: OJ990528_30.8
  misc_feature: Homolog of GI Number: 50910283 NR Desc: zinc finger protein
  misc_feature: Homolog of GI Number: 30023798 NR Desc: At1g78600
  misc_feature: Homolog of GI Number: 34903708 NR Desc: putative zinc
  misc_feature: Useful for making smaller plants
  misc_feature: Useful for sterility
MKIQCDVCERAPATVICCADEAALCAKCDVEVHAANKLASKHQRLLLQCLSSKLPRCDICQDKPAFIFCVEDRALFCQDCDEPIHSAGSLSANHQRFLATGIRVASSSNCTKDNEKSHLEPPTRNAQQVSAKIPPQQVPSFTSSWAVDDLLELTAFESPEKKESLQFGELEWLTDVGIFGEQFAQEALAAAEVPQLPVTHNSSSVASYRTSKSYMSHKKPRIEVLNDDDDEYFTVPDLG

SEQ ID NO: 6591 - DNA, 618 bp, Glycine max
  misc_feature: Ceres CLONE ID no. 1248138
  misc_feature: Ceres CDNA ID no. 29191406
  CDS (69)..(401): REFERENCED BY SEQ ID NO: 6592
agttgctgttctctctctcttccaccgcacactctctgctcctagggtttctccttcgagtgagggaaatggctcccaaaccgcctagtacgggtctgtttgttggactgaacaagggtcacgtcgtcaccaagaaggaattgcccccacgcccctcagatcgtaaggggaaaacaagcaagagggtgcactttgtgaggaacctcataagagaggttgctggttttgcaccctatgaaaagcgtataactgagttgctgaaggttgggaaggataagagggcactgaaggttgcaaagagaaagcttggaacccacaaacgtgcaaagaagaagcgtgaggaaatgtccagtgttctcaggaagatgagggctggtggtgctggagacaagaagaaataagtcttatttactcttttccagattcactagatggacctgtgtattgatggacgagctttcatatttttgctttggttcaattagtttatttcaagattttgtttgagaaatatgttttgcttaattgagacatgatttatggaagaagctagattggattattttctgttttgctagaaatgagagttataatcctttttcaaaaaaaaaaaaaaaa

SEQ ID NO: 6592 - protein, 110 aa, Glycine max; identical to SEQ ID NO: 4624
  misc_feature: Ceres CLONE ID no. 1248138
  misc_feature: Ceres CDNA ID no. 29191406
  misc_feature (5)..(103): Pfam Name: Ribosomal_L36e PFAM Desc: Ribosomal protein L36e
  misc_feature: Homolog of GI Number: 57471698 NR Desc: ribosomal protein L36
  misc_feature: Homolog of GI Number: 34908154 NR Desc: putative 60S RIBOSOMAL PROTEIN L36
  misc_feature: Homolog of GI Number: 50931673 NR Desc: putative 60S ribosomal protein L36
  misc_feature: Homolog of GI Number: 56182368 NR Desc: putative 60S ribosomal protein L36
  misc_feature: Homolog of GI Number: 12642884 NR Desc: putative 60S ribosomal protein
  misc_feature: Homolog of GI Number: 20148501 NR Desc: 60S ribosomal protein L36
  misc_feature: Homolog of GI Number: 21592383 NR Desc: 60S ribosomal protein L36
  misc_feature: Homolog of GI Number: 1276967 NR Desc: putative ribosomal protein
  misc_feature: Homolog of GI Number: 17865758 NR Desc: 60S ribosomal protein L36
  misc_feature: Homolog of GI Number: 21554932 NR Desc: 60S RIBOSOMAL PROTEIN L36 homolog

SEQ ID NO: 6593 - DNA, 1338 bp, Glycine max
  misc_feature: Ceres CLONE ID no. 1248496
  misc_feature: Ceres CDNA ID no. 36571711
  CDS (41)..(1180): REFERENCED BY SEQ ID NO: 6594
aatatcttaatttcaaatcataaaattcttccaccaagttatgggtttccttgtgttgcttcttttctccctcttaggtctctcttctagttccagcatatcaactcatcgttccatattggaccttgacctaaccaagtttaccacacagaaacaggtgtcttcactgttccaactatggaagagtgagcatggacgtgtctaccataaccacgaagaagaggcaaagagacttgagattttcaagaataacttgaactatatcagggacatgaatgcaaacagaaaatcaccccattctcatcgtttaggattgaacaagtttgctgacatcactcctcaagagttcagcaaaaagtacttgcaagctcccaaggatgtgtcgcagcaaatcaaaatggccaacaagaaaatgaagaaggaacaatattcttgtgaccatccacctgcatcatgggattggaggaaaaaaggtgtcatcacccaagtaaagtaccaagggggctgtggaagcggttgggcgttttctgccacgggagccatagaagcagcacatgcaatagcaacaggagaccttgttagcctttctgaacaagaactcgtagactgtgtggaagaaagcgaaggttgttacaatggatggcactatcaatcgttcgaatgggttttagaacatggtgggattgccactgatgatgattatccttacagagctaaagagggtagatgcaaagccaataagatacaagacaaggttacaattgacggatatgaaactctaataatgtcagatgagagtacagaatcagagacagagcaagcgttcttaagcgccatccttgagcaaccaattagtgtctccattgatgcaaaagattttcatttatacaccgggggaatttatgatggagaaaactgtacaagtccgtatgggattaatcactttgttttacttgtgggttatggttcagcggatggtgtagattactggatagcgaaaaattcatggggagaagattggggagaagatggttacatttggatccaaagaaacacgggtaatttattaggagtgtgtgggatgaattatttcgcttcatacccaaccaaagaggaatcagaaacactggtgtctgctcgcgttaaaggtcatcgaagagttgatcactctcctctttgagccgtaaaggttcaatacaacgagtgcttgttttcttagggacaagcattgtacttatgtatgattctgtgtaaccatgagtcttccacgttgtactaatgtgaagggcaaaaataaaacacagaacaagttcgtttttctcaaaaaaaaaaaaaaaa

SEQ ID NO: 6594 - protein, 379 aa, Glycine max; identical to SEQ ID NO: 5178
  misc_feature: Ceres CLONE ID no. 1248496
  misc_feature: Ceres CDNA ID no. 36571711
  misc_feature (135)..(356): Pfam Name: Peptidase_C1 PFAM Desc: Papain family cysteine protease
  misc_feature: Homolog of GI Number: 1199563 NR Desc: 34 kDa maturing seed vacuolar thiol protease precursor
  misc_feature: Homolog of GI Number: 3097321 NR Desc: Bd 30K
  misc_feature: Homolog of GI Number: 129353 NR Desc: P34 probable thiol protease precursor
  misc_feature: Homolog of GI Number: 73623011 NR Desc: papain
  misc_feature: Homolog of GI Number: 27728675 NR Desc: cysteine protease
  misc_feature: Homolog of GI Number: 33943511 NR Desc: 34 kDa maturing seed vacuolar thiol protease precursor
  misc_feature: Homolog of GI Number: 5853329 NR Desc: thiol protease
  misc_feature: Homolog of GI Number: 32396018 NR Desc: cysteine protease
  misc_feature: Homolog of GI Number: 30141019 NR Desc: cysteine protease
  misc_feature: Homolog of GI Number: 13897890 NR Desc: putative cysteine protease

SEQ ID NO: 6595 - DNA, 664 bp, Glycine max
  misc_feature: Ceres CLONE ID no. 1248535
  misc_feature: Ceres CDNA ID no. 29191233
  CDS (56)..(496): REFERENCED BY SEQ ID NO: 6596
tccacagaaaaaaaaccctaaagagaccttctccatttccaaaccggcggcgaaaatgaagtacaacccaagagtcacctcctcccgcaggaagaaccgcaaggctcacttcacagcctcctcaagcgagaggcgcgtcatcatgagctcccctctctccaccgaccttcgcgccaagtacaacgtcagatccatgcccatccgcaaggacgacgaggtccagatcgtccgcgggacctacaagggacgcgaaggaaaggtcgtgcaggtgtaccgtcgcaagtgggtgattcacatcgagaggatcacgagggagaaggtgaacggcaccaccgtgaacgtcggcgtgcagccgtcgaaggttgtgataacgaagctgaggttggataaggacaggaagtcgcttttggagaggaaggccaagggccgtgccgcggcggataaggacaaggggaccaagttcactgctgaggatgttatgcagaacgttgattaaacacaaggtttattatctttttagttttttattatcagcgagtactctcttggctttgagttttgttttgtcggatgttatatttatgtttcggacatgagaaggatcgtttcaatttcgattatgagtttgaagatttagccattttcttcaaaaaaaaaaaaaaaa

SEQ ID NO: 6596 - protein, 146 aa, Glycine max
  misc_feature: Ceres CLONE ID no. 1248535
  misc_feature: Ceres CDNA ID no. 29191233
  misc_feature: The plant is abnormally small.
  misc_feature: Useful for making plants with modulated biomass
  misc_feature (49)..(82): Pfam Name: KOW PFAM Desc: KOW motif
  misc_feature: Homolog of GI Number: 23397084 NR Desc: putative 60S ribosomal protein
  misc_feature: Homolog of GI Number: 3914740 NR Desc: 60S ribosomal protein L26
  misc_feature: Homolog of GI Number: 64420807 NR Desc: putative L24 ribosomal protein
  misc_feature: Homolog of GI Number: 21554514 NR Desc: 60S ribosomal protein L26
  misc_feature: Homolog of GI Number: 77553015 NR Desc: ribosomal protein L24
  misc_feature: Homolog of GI Number: 62732715 NR Desc: ribosomal protein L24
  misc_feature: Homolog of GI Number: 34895672 NR Desc: putative ribosomal protein L26
  misc_feature: Homolog of GI Number: 3747050 NR Desc: ribosomal protein L26
  misc_feature: Homolog of GI Number: 55646513 NR Desc:  similar to 60S ribosomal protein L26
  misc_feature: Homolog of GI Number: 62656273 NR Desc:  similar to 60S ribosomal protein L26
  misc_feature: Useful for increasing chlorophyll and photosynthetic capacity
  misc_feature: Useful for making ornamental plants with modified leaves
  misc_feature: Useful for making shorter plants
  misc_feature: Useful for sterility
MKYNPRVTSSRRKNRKAHFTASSSERRVIMSSPLSTDLRAKYNVRSMPIRKDDEVQIVRGTYKGREGKVVQVYRRKWVIHIERITREKVNGTTVNVGVQPSKVVITKLRLDKDRKSLLERKAKGRAAADKDKGTKFTAEDVMQNVD

SEQ ID NO: 6597 - DNA, 950 bp, Glycine max
  misc_feature: Ceres CLONE ID no. 1248559
  misc_feature: Ceres CDNA ID no. 36707170
  CDS (109)..(654): REFERENCED BY SEQ ID NO: 6598
attgtaaagcattcttcgcctttctctctcttctttttactctctctctgtctctctctacgctttctcgttcgagatccctcaagggatccactaactgaaggagaaatggggttgacattcaccaagcttttcagccggcttttcgccaagaaggaaatgcgaattctgatggtgggtctcgatgcagctggtaagaccaccatcctgtacaagctcaaacttggagagatcgttaccacaattcccaccattgggttcaatgtggagactgtggaatacaagaacattagtttcactgtctgggatgttggtggccaggacaagattcgtcccttgtggaggcactacttccaaaacacacagggtctcatttttgtggttgacagcaacgacagggacagagttgttgaggccagagatgagttgcacaggatgttgaatgaggatgaactgagagatgcagtattgctcgtatttgctaacaaacaagatcttcccaatgcaatgaatgctgctgaaattaccgacaagctgggtctccactctctcagacagcgccactggtacatccagagcacctgcgcaacctctggggagggtctttatgagggtttggactggctttccaacaacatagccaacaaggcttgatgctttttgggagtcttcttgtggattggtgattctggatgcaggggtgaatattatctagtttgtttttttggttctctcatgagacaaattggctttatgttaatgttttatggcttaggacatcttgatggctaaaattatagtaggaatttgtttcatgggatgtctaaatacttttgagttttttttttttttaattgagtttggattcaatgtttataactgtaattgataccaatcaatgcgccatcccattgagttatgattttattttgctaaaaaaaaaaaaaaaa

SEQ ID NO: 6598 - protein, 181 aa, Glycine max
  misc_feature: Ceres CLONE ID no. 1248559
  misc_feature: Ceres CDNA ID no. 36707170
  misc_feature: null
  misc_feature: Useful for making plants with altered Lignin content
  misc_feature: Useful for making plants with altered alkaloid content
  misc_feature (4)..(177): Pfam Name: Arf PFAM Desc: ADP
  misc_feature: Homolog of GI Number: 47026845 NR Desc: ADP
  misc_feature: Homolog of GI Number: 34909214 NR Desc: putative ADP
  misc_feature: Homolog of GI Number: 50511366 NR Desc: ADP
  misc_feature: Homolog of GI Number: 77812440 NR Desc: ADP ribosylation factor 002
  misc_feature: Homolog of GI Number: 39653273 NR Desc: ADP
  misc_feature: Homolog of GI Number: 55297503 NR Desc: ADP
  misc_feature: Homolog of GI Number: 37791223 NR Desc: ARF
  misc_feature: Homolog of GI Number: 29028258 NR Desc: ADP
  misc_feature: Homolog of GI Number: 11131026 NR Desc: ADP
MGLTFTKLFSRLFAKKEMRILMVGLDAAGKTTILYKLKLGEIVTTIPTIGFNVETVEYKNISFTVWDVGGQDKIRPLWRHYFQNTQGLIFVVDSNDRDRVVEARDELHRMLNEDELRDAVLLVFANKQDLPNAMNAAEITDKLGLHSLRQRHWYIQSTCATSGEGLYEGLDWLSNNIANKA

SEQ ID NO: 6599 - DNA, 571 bp, Glycine max
  misc_feature: Ceres CLONE ID no. 1248618
  misc_feature: Ceres CDNA ID no. 29191636
  CDS (54)..(464): REFERENCED BY SEQ ID NO: 6600
actcacaaaccagatctcaatcttctacctcttttctctcgaaaccaatcgcaatggctcgcaccaagcaaaccgcaaggaaatcaaccggaggcaaggctccaaggaagcagctagccacaaaagccgcaagaaaatcagctccagccaccggaggagtgaagaagccacacagattcagaccaggaaccgttgctctaagggagatcaggaagtaccagaagagcaccgagcttctcatccgcaagctcccgttccagaggctagtgagagagatcgctcaggatttcaagaccgatctccgtttccagagcagcgccgtcgccgctctccaggaagccgccgaggcgtacctcgtcggactgtttgaggacactaacctctgcgcgatccacgccaagagggtgacgatcatgcctaaggacatacagctcgctagaagaatcagaggcgagagggcttaagatctttgtctatggttgttgcatctgtttgaatgaatgagtgatgaattgtataacttcaagtttattataagaacattggatccggtttaaaaaaaaaaaaaaaa

SEQ ID NO: 6600 - protein, 136 aa, Glycine max; identical to SEQ ID NO: 358
  misc_feature: Ceres CLONE ID no. 1248618
  misc_feature: Ceres CDNA ID no. 29191636
  misc_feature (58)..(134): Pfam Name: Histone PFAM Desc: Core histone H2A/H2B/H3/H4
  misc_feature: Homolog of GI Number: 62286642 NR Desc: Histone H3
  misc_feature: Homolog of GI Number: 1362108 NR Desc: histone H3 homolog
  misc_feature: Homolog of GI Number: 55775689 NR Desc: histone 3
  misc_feature: Homolog of GI Number: 50728592 NR Desc:  similar to histone protein Hist2h3c1
  misc_feature: Homolog of GI Number: 166384 NR Desc: histone H3
  misc_feature: Homolog of GI Number: 50960584 NR Desc: HIST2H3C protein
  misc_feature: Homolog of GI Number: 122083 NR Desc: Histone H3
  misc_feature: Homolog of GI Number: 70753 NR Desc: histone H3
  misc_feature: Homolog of GI Number: 55626270 NR Desc:  similar to HIST1H3I protein
  misc_feature: Useful for delaying flowering time
  misc_feature: Useful for increasing chlorophyll and photosynthetic capacity
  misc_feature: Useful for making shorter plants

SEQ ID NO: 6601 - DNA, 1111 bp, Glycine max
  misc_feature: Ceres CLONE ID no. 1248623
  misc_feature: Ceres CDNA ID no. 25446697
  CDS (461)..(664): REFERENCED BY SEQ ID NO: 6602
attttttcattctttcacatttgtggttcagccattttattgtttgtctggtcattcctgcttggtgataattgatatatgtacagttataattaattacttcattcgttgttatgctgtataattgattatacacatataatcaattacagtattacacagcataactcaattgtcaggtcattcctgcctggtgataatagtgaatgcttaattccttcattcattgttctatacagcatgtataatcttgtgacttgggatatacaataaaacgttatatcttatcattgcaaccataacactactcactcctgcagcagaacattccaatcttaggagaagaaagaatgtgagcaagggagatgctgctaatgttcacctagaatctgagccagcagcaatttggccaggatacttgtctgcttctgttcttccatttgtgttacacttgggattcatggcatgcactgctttcttcatcatgcatgtacaggtttcaactcgtttcttgtctgccagccctccactttattggtttgcttcatatataatggcatatcctggaaaatactctagatggggatacgtgatgtgggcatactctatagcatatatttttcttggcagtttgctgttttcaaacttctatccttttacttaacgagaagaaaggtagatggttcttgaaagctgttggtcttcttattccatgcaatgcacaaaggcataactatccaccctgaagcgttgctgctgaatttcagatttctgctggttgctgtttgatctttacacgcctgagtagtggagaaaatgcccccttccctccctcaaattagcaatttttttttacgttggtcaaccgggattcttatcatctagatgagtaaactaatagaaatccttttcctttgttgtaattttcatttttgtctattatttttctttctgttcgatggctttagttgaagttcaagaccactttgtttccaatgagtgccaaagtgaatcggactctaggaaaagacaaataatccccctagagtaccttttccatatttgaatttatctagtttcaaattatcatctaacaaaaaaaaaaaaaaaa

SEQ ID NO: 6602 - protein, 67 aa, Glycine max
  misc_feature: Ceres CLONE ID no. 1248623
  misc_feature: Ceres CDNA ID no. 25446697
MACTAFFIMHVQVSTRFLSASPPLYWFASYIMAYPGKYSRWGYVMWAYSIAYIFLGSLLFSNFYPFT

SEQ ID NO: 6603 - DNA, 1246 bp, Glycine max
  misc_feature: Ceres CLONE ID no. 1248638
  misc_feature: Ceres CDNA ID no. 35383376
  CDS (1)..(687): REFERENCED BY SEQ ID NO: 6604
aacactaacgtgaaacgcgttgcgttgtcggaaaatcaccctcacctggtgatggccggttcagaacctgttagggcagagggagagactatggctgtggatgctgccccaaggaagccccggattctacttgctgctagtgggagtgttgctgctgtcaaatttgcaaatctttgtcactgtttctctgaatgggcagatgtaagagcagtttccacaagtgcatctttgcatttcattgatagagcagcaatgcccaaggatgtaattctatacacggatgacaatgaatggtctagttggaagaaattaggtgatagcgtgcttcacattgagcttcgcaaatgggctgatatcatggtcatcgctccattatcagcaaacacccttggcaagattgctggagggttgtgtgacaatctactgacatgcatcgttcgagcctgggactacagcaagccattctttgttgcaccagccatgaacacttttatgtggaacaatcctttcacagagcggcatctcatctccattgatgagcttggcatttctctcatcccacctgttacaaagaggttagcttgtggggattatggcaatggtgccatggctgaaccctctaccatttactcaactgtaaggctcttctatgagtcaaaggctcagcaaggtaatggtgatatctgacaatgttgacaatcagaaacaagtatgaatggtgtgctaggacttgtcttgatcccttgttttattgtatttgtatttctcttacatctagtctgataataggtggcatgttttatttaggacaaaatttagatgcagttgcttaggtgcttttggtgctgtgctctaattagaaatggagtttctcctttgtaatttgcaaaataaaggtttgtattaatacttatatcagcatagtttaaaactccaattataattggagaacaccaccaaaaacacctgaaaaactgcatctagatttttttcctgatatttattgtagagggaatgtgctgcagactcctttatgcctcgtagagtgatgcttgtatactttcattagtcaccggactagttggtgtaggatcttatacacccttggatatgtgcccatgtagcatcatttcatgtgcaattttagaaacactaaattgtttcgccatttgtagaatgaccttaaaaatacttgaaaagcatgattcgaatgaggatacggcattttacaaaaaaaaaaaaaaaa

SEQ ID NO: 6604 - protein, 211 aa, Glycine max; identical to SEQ ID NO: 5262
  misc_feature: Ceres CLONE ID no. 1248638
  misc_feature: Ceres CDNA ID no. 35383376
  misc_feature: The plant flowers significantly late compared to wild-type.
  misc_feature: Useful for making plants with modulated flowering time
  misc_feature (23)..(143): Pfam Name: Flavoprotein PFAM Desc: Flavoprotein
  misc_feature: Homolog of GI Number: 52218792 NR Desc: At3g18030
  misc_feature: Homolog of GI Number: 28948674 NR Desc: Chain A
  misc_feature: Homolog of GI Number: 8778701 NR Desc: T1N15.24
  misc_feature: Homolog of GI Number: 2047324 NR Desc: HAL3B protein
  misc_feature: Homolog of GI Number: 51090974 NR Desc: putative HAL3B
  misc_feature: Homolog of GI Number: 72089189 NR Desc:  similar to CG30290
  misc_feature: Homolog of GI Number: 12583571 NR Desc: putative halotolerance protein HAL3 homolog
  misc_feature: Homolog of GI Number: 45188030 NR Desc: ADR156Cp
  misc_feature: Homolog of GI Number: 19115217 NR Desc: thymidylate synthase

SEQ ID NO: 6605 - DNA, 806 bp, Glycine max
  misc_feature: Ceres CLONE ID no. 1248677
  misc_feature: Ceres CDNA ID no. 29191407
  CDS (251)..(649): REFERENCED BY SEQ ID NO: 6606
acaattcttgcgtactcttctcttctcttccccaccaaactaaaccttttctcaggtaaggttattatcaacgattcccttcttcttcttcttcgtgtcctttattcacgcaaatctaatgagattcatcttcaccgcttcaatttgacctttgcgtgatttcggtttgactgggtcgtttctcgagttttcgctttgacccatttatctggttgatcttcttcagtgtagaattttcagaatttgaggtatggggaggctgtttgtgacccatctggaggggcagatctatacctgcaaacactgccgcacccacctcgctctctatgaagacatcgtttccaaggctttccacagcagacatgggagagcttatctcttcagtaaggtcgtgaatgttactactggagaaaatgaggacagacagatggccactgggatgcatactgtggctgacattttctgtgtgggctgtggatcaattgtgggttggaaatatgagactgctcatgaaaaaagccagaagtacaaggaaggaaaatctgtaattgaacggtacaaggtgtcaggtcctgatggcaataacaataataattattgggtcggcaatgaagcacatgttggtggaagtgatgcagatgatgcttagtcatctgcctttgacaattcaattgtacattctttaatcccccttcttctgttgttcaatacatctgcgttttgcccaaaagacaatttaaatacattttattgttaattctgatgtaaaaaaactaatgttaaaacttctaaaaaaaaaaaaaaaa

SEQ ID NO: 6606 - protein, 132 aa, Glycine max
  misc_feature: Ceres CLONE ID no. 1248677
  misc_feature: Ceres CDNA ID no. 29191407
  misc_feature (1)..(108): Pfam Name: Yippee PFAM Desc: Yippee putative zinc
  misc_feature: Homolog of GI Number: 50917987 NR Desc: putative zinc binding protein
  misc_feature: Homolog of GI Number: 24745964 NR Desc: yippee
  misc_feature: Homolog of GI Number: 21617953 NR Desc: yippee
  misc_feature: Homolog of GI Number: 42571143 NR Desc: yippee family protein
  misc_feature: Homolog of GI Number: 42563852 NR Desc: yippee family protein
  misc_feature: Homolog of GI Number: 20259293 NR Desc: putative Yippee protein
  misc_feature: Homolog of GI Number: 5923664 NR Desc: Yippee
  misc_feature: Homolog of GI Number: 21554253 NR Desc: zinc
  misc_feature: Homolog of GI Number: 62641287 NR Desc:  similar to yippee
  misc_feature: Homolog of GI Number: 61866914 NR Desc:  similar to yippee
  misc_feature: Useful for delaying flowering time
  misc_feature: Useful for increasing chlorophyll and photosynthetic capacity
  misc_feature: Useful for making ornamental plants with modified leaves
  misc_feature: Useful for making plants with increased biomass and foliage
MGRLFVTHLEGQIYTCKHCRTHLALYEDIVSKAFHSRHGRAYLFSKVVNVTTGENEDRQMATGMHTVADIFCVGCGSIVGWKYETAHEKSQKYKEGKSVIERYKVSGPDGNNNNNYWVGNEAHVGGSDADDA

SEQ ID NO: 6607 - DNA, 1356 bp, Glycine max
  misc_feature: Ceres CLONE ID no. 1248695
  misc_feature: Ceres CDNA ID no. 25447457
  CDS (98)..(1168): REFERENCED BY SEQ ID NO: 6608
ctctccctgcgacgctctcactttctcctcaccaccaccatcattatgtcacccttgtaaaaacaagcaaaccctacttactctgaaagtggcgaagatgagtttaggaaccgcggaggacgaatccggttccgaaatccacatcccagccgaaatcgactggcacatgctggacaaatccaagttcttcttcctcggcgccgccttattctccggcgtgtcgtgcgcactctaccccatggtcgtgttgaagacgcgtcagcaagtttcctcctcacgcttctcctgcctcaacatctcctgcgccattctccgccacgagggcctccgcggcttctacaagggcttcggaacctccctcatgggaaccatccccgcacgtgcgctctacatggcctccctcgagatcaccaaaagcaacgtcgccaccgccttcctccaattcggcttctccgagaccaccgccgtggctgtggccaacgccgccgcgggcgtcacctccgccatggctgcccagctcgtgtggaccccaattgatgtcgtgagtcagcggctcatggttcaggggagtggcgggagtaaaaccacagtgctcgcgaatctcaattcggaaaattacagaaatgggtttgatgcttttaggaaaattatgtgtgctgatggagcgataggcttttatagaggctttgggatttctatattgacttatgcgccttccaatgcggtttggtggacttcttattccatggttcatagactcatttggggtgcttttggttcttacatgggaaataacaatggtagaaagggaaatgaaaagaatgatagtaataagtatagcaggcctgattcgaaggcaatggtggcggttcaagggttgagtgctgttatggcaagtggggtatctgcgattgtgacaatgccgcttgatacgataaagacgaggttgcaggtgttggatcttgaagaggggaatgggagaaggaggcctttgacttttgttcagacggtgaggaatttggtgaaggaaggtgggttgcttgcttgttacagaggattgggtccgagatgggcttccatgtccatgtctgccacaactatgattactacttatgagtttttgaaaagaatgtctaccaagaatcaagaggatttgactccatcataggccagccactcaaatattgttaggaattggagattaagaattaagaattaggatcaatcacttgtttctttgcttggatttttctttgtcatttctagcactctagtctacttcatctgacaccaaatacaatatgatgttgagattgtatatacaactcttgtttttttctaaaaaaaaaaaaaaaa

SEQ ID NO: 6608 - protein, 356 aa, Glycine max; identical to SEQ ID NO: 6328
  misc_feature: Ceres CLONE ID no. 1248695
  misc_feature: Ceres CDNA ID no. 25447457
  misc_feature (256)..(350): Pfam Name: Mito_carr PFAM Desc: Mitochondrial carrier protein
  misc_feature: Homolog of GI Number: 31431909 NR Desc: putative Tricarboxylate transport protein
  misc_feature: Homolog of GI Number: 21594326 NR Desc: mitochondrial carrier
  misc_feature: Homolog of GI Number: 23308179 NR Desc: At5g26200/T19G15_50
  misc_feature: Homolog of GI Number: 51536141 NR Desc: mitochondrial substrate carrier
  misc_feature: Homolog of GI Number: 21326111 NR Desc: putative mitochondrial carrier protein
  misc_feature: Homolog of GI Number: 37718799 NR Desc: putative mitochondrial carrier protein
  misc_feature: Homolog of GI Number: 38194914 NR Desc: mitochondrial carrier protein
  misc_feature: Homolog of GI Number: 18496651 NR Desc: putative mitochondrial carrier protein
  misc_feature: Homolog of GI Number: 72064597 NR Desc:  similar to CG5805
  misc_feature: Homolog of GI Number: 58257725 NR Desc: KIAA0446 protein

SEQ ID NO: 6609 - DNA, 938 bp, Glycine max
  misc_feature: Ceres CLONE ID no. 1248819
  misc_feature: Ceres CDNA ID no. 29191408
  CDS (53)..(676): REFERENCED BY SEQ ID NO: 6610
acatccttgtgtcgtcgagcttctgttttgcaaaggcagtggaaggaacacaatggcggtttctctatcggcgctcacaacctccctctcttcactctccttctcttcccacatttcccagagaccctgcactctctccttcgccagaaccgaatccctctctctctccgtctcccccttccccaaaaccccctcctccctcgtcgtcaccgccaccgcactcgccgaaccggaaactgaggacctgaagaagtacgtcaagtcgaggctcccaggtggattcgccgcgcagacaatcattggcaccggccgccgtaagagcgccatcgctcgcgtcgttcttcaggaaggaaccggcaaattcataatcaattaccgcgacgctaaggaatatcttcaaggaaatccattgtggcttcaatacattaaggtccccttaataactttgggatatgaaagtaattatgatgtttttgtcaaagctgagggtggtggcctgtctggtcaggctcaggcaatctctcttggcattgctcgtgccttgctgaaggtgagcgaagatcatagagcacctttgagacaggaaggacttcttaccagagattccagagtggttgagaggaagaaagttggtctcaagaaagctcgtaaagcccctcaatattccaaacgttgaggttgggatgttacatgtatggtctgtcttttctttcctcctggtgtctctggaaatgggttacatttggaactattgattgttttcatttgtagttgtaggcttccagttaggaaaagtaaaagagaaattgaaaaatatcccaaggcgtatgtattcagaatcctgctctctgttttcccatctcttgtttccttgatctgtatggaattgggaattgtaggtatgtaatatttgctttgtctcaaaaaaaaaaaaaaaa

SEQ ID NO: 6610 - protein, 207 aa, Glycine max
  misc_feature: Ceres CLONE ID no. 1248819
  misc_feature: Ceres CDNA ID no. 29191408
  misc_feature (86)..(207): Pfam Name: Ribosomal_S9 PFAM Desc: Ribosomal protein S9/S16
  misc_feature: Homolog of GI Number: 12744979 NR Desc: putative ribosomal protein S9
  misc_feature: Homolog of GI Number: 51971475 NR Desc: putative ribosomal protein S9
  misc_feature: Homolog of GI Number: 51969174 NR Desc: putative ribosomal protein S9
  misc_feature: Homolog of GI Number: 7578887 NR Desc: plastid ribosomal protein S9 precursor
  misc_feature: Homolog of GI Number: 13242064 NR Desc: 9S ribosomal protein
  misc_feature: Homolog of GI Number: 50872448 NR Desc: putative 9S ribosomal protein
  misc_feature: Homolog of GI Number: 12323890 NR Desc: putative ribosomal protein S9
  misc_feature: Homolog of GI Number: 22297653 NR Desc: 30S ribosomal protein S9
  misc_feature: Homolog of GI Number: 7259499 NR Desc: ribosomal protein S9
  misc_feature: Homolog of GI Number: 48374278 NR Desc: 30S ribosomal subunit S9
MAVSLSALTTSLSSLSFSSHISQRPCTLSFARTESLSLSVSPFPKTPSSLVVTATALAEPETEDLKKYVKSRLPGGFAAQTIIGTGRRKSAIARVVLQEGTGKFIINYRDAKEYLQGNPLWLQYIKVPLITLGYESNYDVFVKAEGGGLSGQAQAISLGIARALLKVSEDHRAPLRQEGLLTRDSRVVERKKVGLKKARKAPQYSKR

SEQ ID NO: 6611 - DNA, 525 bp, Glycine max
  misc_feature: Ceres CLONE ID no. 1249711
  misc_feature: Ceres CDNA ID no. 29191234
  CDS (166)..(342): REFERENCED BY SEQ ID NO: 6612
ctaatcattcaagttttttttccttaaaaaacaaaaagtaagaaacacaccttgatctttcccaaaagcctcttcgtgccttctgcttcccctcaccttcctcgtcggtgctttcggtcttgtgtcgatccaaacttcttcttcttcttcttccggtgtttgaaaatggattttgtcgttttgtgcctgatagtgctggtgagtgcgcaactgttctaccacttctacagcctcatcaacatcttcgtcacgcgtttcggtcgcaaccctcctcccaccaccgccaccgctaccgccaccaagtcctccgatcaagacgcgccttcctcaaaggactcttgaacaataatccaatcccaccactccggaaccgtcaagaagaccctctggggtagggtaaaaaaactagggatccaatccaacaatggttattgtttggtgtgtgatgttttaggttactacctacccattactgtaagggcttttatttttatgtgatctttgttactaaaaaaaaaaaaaaaa

SEQ ID NO: 6612 - protein, 58 aa, Glycine max
  misc_feature: Ceres CLONE ID no. 1249711
  misc_feature: Ceres CDNA ID no. 29191234
MDFVVLCLIVLVSAQLFYHFYSLINIFVTRFGRNPPPTTATATATKSSDQDAPSSKDS

SEQ ID NO: 6613 - DNA, 1183 bp, Glycine max
  misc_feature: Ceres CLONE ID no. 1249955
  misc_feature: Ceres CDNA ID no. 25400921
  CDS (412)..(666): REFERENCED BY SEQ ID NO: 6614
ctttcttttagatccttcacctcttgcttctgccaaaagatcttctgctgaagctcgtagagcttctgctgatctttgctcccaacgctgttgccgtcagcgtgattcagggcttttcttaaggagttttcaagaaccgtgagctcctccatttcgcggtagagtgttgccgtgaacgtcacgtaacgctccattttcttgagcttcgaatcggtttcttttgggccggagagggcccacccgttcgggtcgcggcccgagtccgcgaactcgaggaaggccaggtggaaggagcgcagggcggaatcctcgcagcgtgcgctgagccgcgtcaccgagttagcggcgactcggagcgactcggagaactcggcgcaggcgagtccgaggaggaacgactcgtcgttggagatgatcttccgaacgccctcgaggttcacggcgtcgtttcggacgcgcacgatggttgcgtcggagagcgagtgccagaggtggaggagcttcgacatcacgccgccgatctcgaacgccaaaacgccgacgttttgcttcgctttgaaagaaggcttcttcttcaggagcttcggcgggaccgagtcgatgctgtttgatatggcggttttgaccttcacgaggagcgtttcgagggccatggttgaggtttgaagcgaactttgttgggttatttaagctagagtgaagtgaaggagtgaggacaccatgtgtttgagaaaatgtgtgtgagaaaaagtgggagagataaataaataattgaggagtggggaggttttggtgcagagcgatgaggataaaagagaagaggattgaaaatgctggagaagctcgtggggtgtttgaacaagattgttgattgtgtttatcaacgagagattagtgagagagagagagagagagaaatgtgagtgaggttaaagtatttaaaaccacatgcagtggcagagcgtgatagatggtgctgtttctggcttaagattcagtcgctcaagaagcgcgtggaagaggcttaacttgtgattgtgatttatgaaagcttgaagctcctccaatgtgtttaagtttggggtgggttgggattttatgctttggtttttacttcgtgggttttttagttgctgaattattgattgatatatagtagttgttggtaaaaaaaaaaaaaaaa

SEQ ID NO: 6614 - protein, 84 aa, Glycine max
  misc_feature: Ceres CLONE ID no. 1249955
  misc_feature: Ceres CDNA ID no. 25400921
MIFRTPSRFTASFRTRTMVASESECQRWRSFDITPPISNAKTPTFCFALKEGFFFRSFGGTESMLFDMAVLTFTRSVSRAMVEV

SEQ ID NO: 6615 - DNA, 1224 bp, Glycine max
  misc_feature: Ceres CLONE ID no. 1249960
  misc_feature: Ceres CDNA ID no. 35383377
  CDS (376)..(921): REFERENCED BY SEQ ID NO: 6616
attttcagatccctgtttcttcaaaaccctaattctgtcaaattcagtttgagcctcgaaaaactctacatttatctatcttggttctctctctcaatctaacgatttcgccattcaacagcgatctttccgtctccatcatcgtcatcaacgctcccatttcctaaacctcagagagggatccagctaacagttgtttcccgctgaaaagttgcttccccacagaactgtaaagcaaacggttagatgcaccaacacaagcaccactaacgaaccattggttcagttcaatatataacgaatccgatactcttttcatctcacacctactgccaccacttcctgcttagtgcgaaagccatttcagcacattaaatggcagttcacggtgacgatgaccctgtggtgatggtggttcccaacctctccccgcccaacacctacgaagctgtcgtcaacggtggcaccttcgaccgattgcacaatggccaccgcctcttcctcactgcttcagcggagttggctaggcgccggattgtaattggagtttgtgacggacctatgctggcaaaaaaacagtttgctgaactgatacagcccattgaggaaaggataaataatgtcaaaactttcataaagtctgtcaagccggagttggaagtgcaagctgtaccaatcacagatccgtttggcccttccattacagatgaaaacttggaggctgtgattgtaagcaaagagacattaccgggaggattggctataaacagaagaagagctgaaagaggcctttcacagttgaagattgaagttgtagatttggtctctggagaatcaggtgaaattaagctgagttcatcaatgctacggaagattgaggctgaaaaggctaaacaacaaaacacgatatcggaaacttagttacagacaatttgtgtaacttttttctcttaaaatatttcttcaaagatgagattaagatgtccattaaagcaactaactgacatgtggttgcatgttatggcattgtttcaaagtttaaaaggcgcaagtcacattctttagaaaaaactttggaacgatgtatcgttttttttttcaacgcacgcaacaaaagaacattattagtttgtttagagaaatctgttgtatttatatttatattttctctaaaagaaataaactttttaaagtagttattttattgtaaaaaaaaaaaaaaaa

SEQ ID NO: 6616 - protein, 170 aa, Glycine max
  misc_feature: Ceres CLONE ID no. 1249960
  misc_feature: Ceres CDNA ID no. 35383377
  misc_feature (16)..(156): Pfam Name: CTP_transf_2 PFAM Desc: Cytidylyltransferase
  misc_feature: Homolog of GI Number: 50934647 NR Desc: bifunctional phosphopantetheine adenylyl transferase dephospho CoA kinase
  misc_feature: Homolog of GI Number: 52219000 NR Desc: zgc:92337
  misc_feature: Homolog of GI Number: 55238270 NR Desc: ENSANGP00000014315
  misc_feature: Homolog of GI Number: 72040606 NR Desc:  similar to CoA synthase
  misc_feature: Homolog of GI Number: 49522272 NR Desc: MGC83996 protein
  misc_feature: Homolog of GI Number: 47523266 NR Desc: bifunctional phosphopantetheine adenylyl transferase / dephospho CoA kinase
  misc_feature: Homolog of GI Number: 24658602 NR Desc: CG10575
  misc_feature: Homolog of GI Number: 54035300 NR Desc: Alpha
  misc_feature: Homolog of GI Number: 27229125 NR Desc: CoA synthase
MVVPNLSPPNTYEAVVNGGTFDRLHNGHRLFLTASAELARRRIVIGVCDGPMLAKKQFAELIQPIEERINNVKTFIKSVKPELEVQAVPITDPFGPSITDENLEAVIVSKETLPGGLAINRRRAERGLSQLKIEVVDLVSGESGEIKLSSSMLRKIEAEKAKQQNTISET

SEQ ID NO: 6617 - DNA, 765 bp, Zea mays
  misc_feature: Ceres CLONE ID no. 1272328
  misc_feature: Ceres CDNA ID no. 25445559
  CDS (76)..(612): REFERENCED BY SEQ ID NO: 6618
taatcgaaaactatcatcatccaatccagatcagcaaagcggcagtgcgtagagaggatcgtcgaacagaacagcatgaagatggtcatcgttctcgtcgtgtgcctggctctgtcagctgccagcgcctctgcaatgcagatgccctgcccctgcgcggggctgcagggcttgtacggcgctggcaccggcctgacgacgatgatgggcgccggcgggctgtacccctacgcggagtacctgaggcagccgcagtgcagcccgctggcggcggcgccctactacgccgggtgtgggcagccgagcgccatgttccagccgctccggcaacagtgctgccagcagcagatgaggatgatggacgtgcagtccgtcgcgcagcagctgcagatgatgatgcagcttgagcgtgccgctgccgccagcagcagcctgtacgagccagctctgatgcagcagcagcagcagctgctggcagcccagggtctcaaccccatggccatgatgatggcgcagaacatgccggccatgggtggactctaccagtaccagctgcccagctaccgcaccaacccctgtggcgtctccgctgccattccgccctactactgattcatgatatttgggaaatctcctctatccatctctctctatctatatatgtaataatgcagtaagacgacacacattatcatgtgtggtatgaccaataatatatgcatggtcataataaagttttggttttaatgaaaaaaaaaaaaaaaa

SEQ ID NO: 6618 - protein, 178 aa, Zea mays
  misc_feature: Ceres CLONE ID no. 1272328
  misc_feature: Ceres CDNA ID no. 25445559
  misc_feature: Homolog of GI Number: 16305115 NR Desc: 15kD beta zein
  misc_feature: Homolog of GI Number: 419803 NR Desc: zein protein
  misc_feature: Homolog of GI Number: 168664 NR Desc: zein protein precursor
  misc_feature: Homolog of GI Number: 141616 NR Desc: ZEIN
  misc_feature: Homolog of GI Number: 47824794 NR Desc: beta
  misc_feature: Homolog of GI Number: 509748 NR Desc: beta
MKMVIVLVVCLALSAASASAMQMPCPCAGLQGLYGAGTGLTTMMGAGGLYPYAEYLRQPQCSPLAAAPYYAGCGQPSAMFQPLRQQCCQQQMRMMDVQSVAQQLQMMMQLERAAAASSSLYEPALMQQQQQLLAAQGLNPMAMMMAQNMPAMGGLYQYQLPSYRTNPCGVSAAIPPYY

SEQ ID NO: 6619 - DNA, 862 bp, Zea mays
  misc_feature: Ceres CLONE ID no. 1272428
  misc_feature: Ceres CDNA ID no. 36705312
  CDS (85)..(663): REFERENCED BY SEQ ID NO: 6620
ctcgaaaccctagcgccggcgcctccacttcgttttcctcactctctcctccagctcagggtccggcggcgaagggaaggcaagatgtacaccgcgaggaagaagatccagaaggagaagggccttgagccctccgagttcgaggactccgttgcccaggctttctttgatctggagaacgggaaccaggagctcaagagcgacctcaaggacctgtacatcaacaatgctatccagatggatgttaccgggagcaggaaggctgttgtcatccacgtcccataccgcctgcgcaaggccttcaggaagatccatgtcagactcgtcagggagctggagaagaaattcagcggcaaggatgtggtaattgttgctacaaggaggattgtgaggccacccaagaagggttcagctgttctgcgccctcgcaccaggactctgactgctgttcacgatggcatcttggaggatgttgtctacccagctgagattgtggggaagcgtgtcagataccgtctggatggttccaagattatcaagattttcttggacccaaaggagaggaacaacactgaatacaagctggagacctgcactgcggtctaccgcaggctgtgtgggaaagatgtggtctttgagtaccctatgaccgaaaatgcataaatatgatgccctctggatatctccactctatttcgttgattctgaatgttatgttgggtctccctatgtacttcaaaaacatagttttgatgctaaagttgcctagcaatttggtacggggaagtggcagtggacgtgaacaatgttaagttttgagcatttaaattaaacctttgccctgataaaaaaaaaaaaaaaa

SEQ ID NO: 6620 - protein, 192 aa, Zea mays
  misc_feature: Ceres CLONE ID no. 1272428
  misc_feature: Ceres CDNA ID no. 36705312
  misc_feature: The plant is abnormally large.
  misc_feature: The plant is abnormally small.
  misc_feature: Useful for making plants with modulated biomass
  misc_feature (4)..(191): Pfam Name: Ribosomal_S7e PFAM Desc: Ribosomal protein S7e
  misc_feature: Homolog of GI Number: 57471724 NR Desc: ribosomal protein S7
  misc_feature: Homolog of GI Number: 4588906 NR Desc: ribosomal protein S7
  misc_feature: Homolog of GI Number: 22671664 NR Desc: ribosomal protein S7
  misc_feature: Homolog of GI Number: 55167942 NR Desc: putative 40S ribosomal protein S7
  misc_feature: Homolog of GI Number: 14787424 NR Desc: Ribosomal protein S7
  misc_feature: Homolog of GI Number: 77999315 NR Desc: ribosomal protein S7
  misc_feature: Homolog of GI Number: 4128206 NR Desc: 40S ribosome protein S7
  misc_feature: Homolog of GI Number: 21555683 NR Desc: 40S ribosomal protein S7 homolog
  misc_feature: Homolog of GI Number: 5532505 NR Desc: 40S ribosomal protein S7 homolog
  misc_feature: Homolog of GI Number: 6957719 NR Desc: putative 40S ribosomal protein
MYTARKKIQKEKGLEPSEFEDSVAQAFFDLENGNQELKSDLKDLYINNAIQMDVTGSRKAVVIHVPYRLRKAFRKIHVRLVRELEKKFSGKDVVIVATRRIVRPPKKGSAVLRPRTRTLTAVHDGILEDVVYPAEIVGKRVRYRLDGSKIIKIFLDPKERNNTEYKLETCTAVYRRLCGKDVVFEYPMTENA

SEQ ID NO: 6621 - DNA, 778 bp, Zea mays
  misc_feature: Ceres CLONE ID no. 1272655
  misc_feature: Ceres CDNA ID no. 36590058
  CDS (59)..(538): REFERENCED BY SEQ ID NO: 6622
cactcatctatttcttttgaatcattgtatactagctagctagctagccagagcttgtatggccactgctcatcatgcggatgaccatcgtgcagggagaagaagcgaggccgtcggagagaactacatgaggggcctctacggcgacgatgactacaacgccacccactacggtcaccagcagcagcagcggccgccgcccgcgcccatggcggtggccaaggcgttagccacagccacggcagccttctccatgttgttgttgtcggggctggcggtgacgggcacggtgctggcgctcatcgtggcgacgccattgatggtgatcttcagccccgtgctggtgccggcggccatcacggtggcgctgctcacggtaggcatcgtttcgtcgggagggttcggcgtggctgcggtggctgtgctggcgtgggtgtaccgctaccttcagaccacgacctcgtcgtcgggtcagcagccgcacatcgtcaaggactgggcgcagcagcaccgtctggagcagacacgcgcgcactgaaataaaaaaaagcgtagtacccctccgtttctttttatttgttgctgtttagttcatatttgtcactgtttcgttaaaaatgaactagcgggataacgagaacgggaggtaatatagcttttcatttaatgtaatgtaacgtaatcttatgtttgcagcagtaataatgtgtattatatatttgcagcaataaaagggcgagctcgatcgacccctctacgaataaaaaaaaaaaaaaaa

SEQ ID NO: 6622 - protein, 136 aa, Zea mays
  misc_feature: Ceres CLONE ID no. 1272655
  misc_feature: Ceres CDNA ID no. 36590058
  misc_feature (26)..(122): Pfam Name: Oleosin PFAM Desc: Oleosin
  misc_feature: Homolog of GI Number: 50899460 NR Desc: putative oleosin
  misc_feature: Homolog of GI Number: 1622939 NR Desc: oleosin
  misc_feature: Homolog of GI Number: 5381321 NR Desc: 15 kDa oleosin
  misc_feature: Homolog of GI Number: 963064 NR Desc: low molecular weight oleosin
  misc_feature: Homolog of GI Number: 1076817 NR Desc: oleosin 16
  misc_feature: Homolog of GI Number: 1171352 NR Desc: 16 kDa oleosin
  misc_feature: Homolog of GI Number: 82705 NR Desc: lipid body
  misc_feature: Homolog of GI Number: 2119749 NR Desc: oleosin
  misc_feature: Homolog of GI Number: 460803 NR Desc: oleosin
  misc_feature: Homolog of GI Number: 70663972 NR Desc: OSJNBa0079A21.14
MRGLYGDDDYNATHYGHQQQQRPPPAPMAVAKALATATAAFSMLLLSGLAVTGTVLALIVATPLMVIFSPVLVPAAITVALLTVGIVSSGGFGVAAVAVLAWVYRYLQTTTSSSGQQPHIVKDWAQQHRLEQTRAH

SEQ ID NO: 6623 - DNA, 684 bp, Zea mays
  misc_feature: Ceres CLONE ID no. 1272660
  misc_feature: Ceres CDNA ID no. 36591245
  CDS (102)..(350): REFERENCED BY SEQ ID NO: 6624
ataaaacgggagcaaggccgcaggtcgtctgtccactgcgactgtgagcttcgttcgttcagttcatccgtgttcttgtttgcgaggtcgagagagagaggatgtcgtgctgcggaggcaactgtgggtgcggctccggctgcaagtgcggcaacggctgcggagggtgcagcaagatgtacccggacatggctgagcaggtgaccaccaccacccaggctctcatcatgggtgtcgcaccatccaaggggcacgccgagggcgggttcgaggcggccgccggagctgagaacggcgggtgcaagtgcggcggcaactgccagtgcgacccctgcaactgcggcaagtgagctaggtgctccaccctgcaggccggccggaggaagctagctaattattataagctaaataaagtatagcggcgtcgctgtgtgtgtttcgagtcagtcagtcagttagttgcgtgccatggctggcatgctctgagtctgagatgatgatgatgcctgatggcggcgtcgtgtcctgtagtcctcccctgccccctcgggcgcttctggcggcgagcagtgtgttgtgttgtgttgtgtgggtgcagcacggtagcaggctagccatgtgccctgctgtgttgtgtcaccatccatctataataatcttatatctataaaaaaaaaaaaaaaa

SEQ ID NO: 6624 - protein, 82 aa, Zea mays; identical to SEQ ID NO: 906
  misc_feature: Ceres CLONE ID no. 1272660
  misc_feature: Ceres CDNA ID no. 36591245
  misc_feature (1)..(80): Pfam Name: Metallothio_2 PFAM Desc: Metallothionein
  misc_feature: Homolog of GI Number: 55416162 NR Desc: metallothionein
  misc_feature: Homolog of GI Number: 46358913 NR Desc: metallothionein
  misc_feature: Homolog of GI Number: 34895842 NR Desc: putative metallothionein
  misc_feature: Homolog of GI Number: 13491970 NR Desc: metallothionein
  misc_feature: Homolog of GI Number: 15825501 NR Desc: type 2 metallothionein
  misc_feature: Homolog of GI Number: 3901014 NR Desc: metallothionein
  misc_feature: Homolog of GI Number: 32400768 NR Desc: metallothionein
  misc_feature: Homolog of GI Number: 46850185 NR Desc: metallothionein 2a
  misc_feature: Homolog of GI Number: 23954357 NR Desc: metallothioneine type2
  misc_feature: Homolog of GI Number: 169713 NR Desc: metallothionein

SEQ ID NO: 6625 - DNA, 561 bp, Zea mays
  misc_feature: Ceres CLONE ID no. 1272708
  misc_feature: Ceres CDNA ID no. 29191409
  CDS (148)..(375): REFERENCED BY SEQ ID NO: 6626
ttttttttttgattttcttcacccgtccacctcgtcttgcgctcctctgtctcggcgacgactgtgctgccgccgccgccgccgccgccgcaagacttcgtcgggcactttgccggcgacgatttcccaccaggatcagaggaggtgatggcgaggagtgacagctgcctggcgcgcgtgggtgccggaattgctatcggtggcgcggtcggcggagccgtcggtgcttgctatggaacttttgaggcgttcagatacaagatccctggattgctaaagatcagatacattgggcaaaccaccgttggcagcgctgcgatttttgggcttttcttgggggctgggagcttgattcactgtggaaaatcctactagtttgtttccctttttttttctgaagtctgaacacacctttgtcgatgggcttcagtgaaaactattcaatgcctgtttcatgtaacagctaatagctcagggttggaaaagaacaatcaagttatgtcctagttttggtgtggatggaaatagaatcaacgttcatctgcaaaaaaaaaaaaaaaa

SEQ ID NO: 6626 - protein, 75 aa, Zea mays; identical to SEQ ID NO: 1036
  misc_feature: Ceres CLONE ID no. 1272708
  misc_feature: Ceres CDNA ID no. 29191409

SEQ ID NO: 6627 - DNA, 853 bp, Zea mays
  misc_feature: Ceres CLONE ID no. 1272732
  misc_feature: Ceres CDNA ID no. 29191410
  CDS (121)..(618): REFERENCED BY SEQ ID NO: 6628
aaagcggactgctctcctcaattgtcaggcagtagcatccatttgattgttctatcctcttctctgttctcacccccttgcaagcaacaatcgttcaccgatcgatccagtgcgtcctgcatggaaactgccgccgtcgccgcctccagtgccgggcgccgcatcatggtggccgtggacgagggcgaggagagcctgcacgcgctcaactggtgcctcgccaacgtcgtctccccggcaggaggcgacacgctggtgctcgtccacgcccgccgcccgcgcccggtctacgccgccatggacagcgcagggtacatgatgacctcggacgtgctggcgagcgttgagaggcacgccaacgcggtctcggcggcggcggtcgacaaggccaagcgcgtctgcgccgaccacccgcacgtcaaggtggagacgacggtggagagcggggacccgcgggacgtcatctgcgacgcagccaacaagatggccgcggacctgctcgtcatgggcagccatggttacggcttcatccagagggcgttcttgggcagcgtcagcaaccactgcgcgcagaactgcaaatgcccggtcctcattgtcaagaggcccaaggagtagaaggttcctcgcatgtaacgctgcagcttagccaataatgtttcatggcgaccatataggcatatatgtacacacttcacatcccattgcatggcagtgtcttccctagttcaacaactagctttctgctggaataaggtgttcagagttcagacagagtatgtactgtacatactatcttcttgcatttggtactcttgtttagtgaaaagcgttccgtaaaaaaaaaaaaaaa

SEQ ID NO: 6628 - protein, 165 aa, Zea mays
  misc_feature: Ceres CLONE ID no. 1272732
  misc_feature: Ceres CDNA ID no. 29191410
  misc_feature (12)..(161): Pfam Name: Usp PFAM Desc: Universal stress protein family
  misc_feature: Homolog of GI Number: 52077479 NR Desc: putative ER6 protein
  misc_feature: Homolog of GI Number: 34905540 NR Desc: B1146F03.27
  misc_feature: Homolog of GI Number: 34914610 NR Desc: P0520B06.18
  misc_feature: Homolog of GI Number: 55792398 NR Desc: universal stress protein
  misc_feature: Homolog of GI Number: 50939901 NR Desc: universal stress protein USP1
  misc_feature: Homolog of GI Number: 20067187 NR Desc: putative universal stress protein USP1
  misc_feature: Homolog of GI Number: 5669654 NR Desc: ER6 protein
  misc_feature: Homolog of GI Number: 18399413 NR Desc: universal stress protein
  misc_feature: Homolog of GI Number: 29376504 NR Desc: universal stress protein family
  misc_feature: Homolog of GI Number: 48835874 NR Desc: COG0589: Universal stress protein UspA and related nucleotide
  misc_feature: Useful for making bigger plants
  misc_feature: Useful for making plants with increased biomass and foliage
METAAVAASSAGRRIMVAVDEGEESLHALNWCLANVVSPAGGDTLVLVHARRPRPVYAAMDSAGYMMTSDVLASVERHANAVSAAAVDKAKRVCADHPHVKVETTVESGDPRDVICDAANKMAADLLVMGSHGYGFIQRAFLGSVSNHCAQNCKCPVLIVKRPKE

SEQ ID NO: 6629 - DNA, 942 bp, Zea mays
  misc_feature: Ceres CLONE ID no. 1273173
  misc_feature: Ceres CDNA ID no. 40351708
  CDS (1)..(345): REFERENCED BY SEQ ID NO: 6630
tcttccattcttcttctcctttccttcactctctggcttcccgatctcttctctctctctctcgtctctcacatctccagcccttcgccctcttctcggcccgacctcgacggtgttccaccatctcctaccctcttcttttcccgcccgcgccatccctttctccgctgtagccactgcaagccccgcgcgacgcacacggcagtggtccacgtcgaccaaatcgtccacagcatcgcgttctcctcggcgagggtctgtagcctgccggcgaggagctcgcagcgaagatccgtgcaagccaccctccagatcgtcacagtagcagccagacaacaaccatgagtctcgcttgtcttgtatgccatggcatgagcagcccctcgcactctcttagaagctactcggtgtcaagctcagaggaggaaagccggtgtggagctgttgttgcctgcttagctcgaagagtaacaccagctggaacctctactagcgttgggacatcgaaagtgaccccctttccacccgtggtgagtgatcaagttggtacagagggcgctcctcgacttcaacgcagccgtgctgtgtccagggaccttgttagagactggaacttcgacgaagtaatcgtcgcaaattagagtagccctcaacagtcgtcagctggactctgtgctctacttatcaggcaggagattccttcattcgatgtaaaattttcatagtagacgtctggaagtccatgccaatacttgatgaggaaatgctcgagagggatggtacctttcaggagcaatatttggactgttgcagttatatgtggtcacgtacctgtgtaggtaggataaatgttttgagtgtgttttcctaattttcagacgtgtataagttgtcatgtacctttatgtatattatgaatgaatccgaaaaaaaaaaaaaaaa

SEQ ID NO: 6630 - protein, 99 aa, Zea mays
  misc_feature: Ceres CLONE ID no. 1273173
  misc_feature: Ceres CDNA ID no. 40351708
MSLACLVCHGMSSPSHSLRSYSVSSSEEESRCGAVVACLARRVTPAGTSTSVGTSKVTPFPPVVSDQVGTEGAPRLQRSRAVSRDLVRDWNFDEVIVAN

SEQ ID NO: 6631 - DNA, 819 bp, Zea mays
  misc_feature: Ceres CLONE ID no. 1273220
  misc_feature: Ceres CDNA ID no. 25445737
  CDS (46)..(606): REFERENCED BY SEQ ID NO: 6632
aaccttccctttccccaggcacagatccggctctccgccgccgctatggccgctcgccgcctcctccttctcctcgccgttgtcgccgcgtccctcctggctgccgacgcgcggccgtgccacggcttcctcgtcgccatcccgtccgatcccaaccccgaccccagcagaggcgacggcgccgtcaaccgccacctcggcgctccccacgtcgccacggtcatcaccgtcttccgcgtccgccgcctcggtccacacgtcccccacggccaccgcaaccaccaccacctccattctatccccgccaacgttcagatccatcgccccgatctcctgcaccccgccacggccgcggccgccgggccccaggagcgcgtcagggacatactcgtggtggtcgtggggctcctcttcggcctcgcctgcggcgcgctcaccgctgcctccgtgtacctcgtctggtccatggtcgccggcgccgccgcggcttccccgtacgacgagctctatgaggacgaggacgagtcgtctgacaccgagagccccaagaaggtcggatacgtcatcatccaggagctcgaggtgcatgaaggcggtaagaagtagacccagatctagtggcgttcgtgctcccggctcccgggtgctagggcaagttcctgtagtgggatgacctattgccatatgattatgtgttgagtgaatcttaatgtctgtatgactatgtagtgggtggctgggacttgggagccttagggttttgccctccatgtgaatatatgatcgtgaagcacgcttaagctaaaaaaaaaaaaaaaa

SEQ ID NO: 6632 - protein, 186 aa, Zea mays
  misc_feature: Ceres CLONE ID no. 1273220
  misc_feature: Ceres CDNA ID no. 25445737
  misc_feature: Homolog of GI Number: 67987177 NR Desc: 4Fe
  misc_feature: Homolog of GI Number: 15809746 NR Desc: At1g65720/F1E22_13
  misc_feature: Homolog of GI Number: 5420387 NR Desc: proteophosphoglycan
  misc_feature: Homolog of GI Number: 72547018 NR Desc: proteophosphoglycan ppg3
  misc_feature: Homolog of GI Number: 67985322 NR Desc: Prolyl
  misc_feature: Homolog of GI Number: 72547041 NR Desc: proteophosphoglycan ppg1
  misc_feature: Homolog of GI Number: 50933659 NR Desc: putative high
  misc_feature: Homolog of GI Number: 72547023 NR Desc: proteophosphoglycan ppg4
  misc_feature: Homolog of GI Number: 72547036 NR Desc: proteophosphoglycan 5
MAARRLLLLLAVVAASLLAADARPCHGFLVAIPSDPNPDPSRGDGAVNRHLGAPHVATVITVFRVRRLGPHVPHGHRNHHHLHSIPANVQIHRPDLLHPATAAAAGPQERVRDILVVVVGLLFGLACGALTAASVYLVWSMVAGAAAASPYDELYEDEDESSDTESPKKVGYVIIQELEVHEGGKK

SEQ ID NO: 6633 - DNA, 905 bp, Zea mays
  misc_feature: Ceres CLONE ID no. 1273479
  misc_feature: Ceres CDNA ID no. 25445738
  CDS (262)..(648): REFERENCED BY SEQ ID NO: 6634
agaggttcgtctctatcaagtaccaaacccttttatctgcttcgtcccctcccctgtgcgtgggggtataaagcaccgggctctgcttccgtcacgcgagacggcgagagcacaacattagcaaaggctgtaccttggggccgctaaagcagcttggtccaagctgtctgtagaacttaagcaactctgatcccagccacggcacacggcaggttgaagccatcagctccggtttctggcgccggatttgggatccgcgcgatgtcttggtccgcgcccgacgacatcctcctctccacctcactcgcgggcttcctggacaagaaacttattgtcctgctaagagatggacggaaacttcttggcaccctctgctcatttgatcagtttgcaaatgttgttcttcagggtgcttgtgaacgagtgattgtagggggacaatattgtgatgttcctcttggtctgtatgtgatccggggagagaacgttgttttaatcggagaattggatcacgaaaaggatgaactccccgctcacatgacatgtgttttagaagcagaaattagaaaggctgagaaggcggagcgggaagcaagggatctgaaaggcacgatgaggaaacggatggagttcctagacttcgactgataataaacccgttcctgtggtggttgctgctcccctcccattgcggccgcggagtttttagtggcggcctgtgccatacctgatgaatagcagtgatgttttctacgtaccttttgaggcaacatcagatcctttgagcgcctcctgatacagctctgtgacctctctctgattattactactgcctggggagatgccatgtgctctcctccgttgtcgtttgcaacagtgcattcgccctaaaaaaaaaaaaaaaa

SEQ ID NO: 6634 - protein, 128 aa, Zea mays
  misc_feature: Ceres CLONE ID no. 1273479
  misc_feature: Ceres CDNA ID no. 25445738
  misc_feature (13)..(81): Pfam Name: LSM PFAM Desc: LSM domain
  misc_feature: Homolog of GI Number: 50924582 NR Desc: OSJNBa0027P08.15
  misc_feature: Homolog of GI Number: 21536995 NR Desc: Sm protein
  misc_feature: Homolog of GI Number: 20334848 NR Desc: At1g19120/F14D16_26
  misc_feature: Homolog of GI Number: 8778287 NR Desc: F14D16.28
  misc_feature: Homolog of GI Number: 54637105 NR Desc: GA18077
  misc_feature: Homolog of GI Number: 66853150 NR Desc: small nuclear ribonucleoprotein
  misc_feature: Homolog of GI Number: 66529526 NR Desc:  similar to CG4279
  misc_feature: Homolog of GI Number: 24656769 NR Desc: CG4279
  misc_feature: Homolog of GI Number: 66770685 NR Desc: IP04948p
  misc_feature: Useful for increasing chlorophyll and photosynthetic capacity
  misc_feature: Useful for increasing seed/fruit yield or modifying fruit content
  misc_feature: Useful for making ornamental plants with modified flowers
  misc_feature: Useful for making ornamental plants with modified leaves
  misc_feature: Useful for making plants with altered leaf shape eg curled leaves
  misc_feature: Useful for making plants with increased biomass
  misc_feature: Useful for making plants with increased biomass and foliage
  misc_feature: Useful for making plants with increased biomass and foliage
  misc_feature: Useful for sterility
MSWSAPDDILLSTSLAGFLDKKLIVLLRDGRKLLGTLCSFDQFANVVLQGACERVIVGGQYCDVPLGLYVIRGENVVLIGELDHEKDELPAHMTCVLEAEIRKAEKAEREARDLKGTMRKRMEFLDFD

SEQ ID NO: 6635 - DNA, 753 bp, Zea mays
  misc_feature: Ceres CLONE ID no. 1273735
  misc_feature: Ceres CDNA ID no. 29191411
  CDS (209)..(565): REFERENCED BY SEQ ID NO: 6636
aaaatagaggaggtagtgccgacagaggcacgagcgcctccctcgtcttcgttccgtctctccccacagggaaccgccgcccgtcgcctccagatacgtgcctccggcggaaaatcggtatcgagctcgctttgttcgaatcttctgtatagccagcaaggaggcctctccatctcctccgggaagctattgtgcaggctgtgcagcaatggagaagtataacagcaagactcagttagcacccttgagagataccccatttgctctccgtggtgctcttggtagttcaagctcataccttgagcaagccaggggctacacgtcttcccctctagcagctctgcgaccaaagatgtcttctactaccggaaatcgactcctgcactcgagttgccccctgtcatctcctgtagcaaaccgcccgctgtcgccccaccttcctctgaagaagccacagttcagcgcgactttctcaatctcgcatcgtatattcggtgtcgcgttgggagttgccatcgtatctgtccctctcgccaccaagttcagcctaatgtttggtgtctgagagcgatttgctgcgtctcatgagaaacatcattttccgtttctgtgtctgtttttcatcgtctcggttaccttgcgacacagctgtaggtgccgttggaataatatctttgccatgcttgcagacttgtgtaataagtaaataaacctataaaataccagtttaactgtttaaaaaaaaaaaaaaaa

SEQ ID NO: 6636 - protein, 118 aa, Zea mays
  misc_feature: Ceres CLONE ID no. 1273735
  misc_feature: Ceres CDNA ID no. 29191411
  misc_feature (67)..(117): Pfam Name: Sdh_cyt PFAM Desc: Succinate dehydrogenase cytochrome b subunit
  misc_feature: Homolog of GI Number: 50937817 NR Desc: succinate dehydrogenase subunit 3
  misc_feature: Homolog of GI Number: 50904863 NR Desc: succinate dehydrogenase subunit 3
  misc_feature: Homolog of GI Number: 32400816 NR Desc: succinate dehydrogenase subunit 3
MEKYNSKTQLAPLRDTPFALRGALGSSSSYLEQARGYTSSPLAALRPKMSSTTGNRLLHSSCPLSSPVANRPLSPHLPLKKPQFSATFSISHRIFGVALGVAIVSVPLATKFSLMFGV

SEQ ID NO: 6637 - DNA, 777 bp, Zea mays
  misc_feature: Ceres CLONE ID no. 1274796
  misc_feature: Ceres CDNA ID no. 29191235
  CDS (138)..(533): REFERENCED BY SEQ ID NO: 6638
ccatcccagccagccgtcaaagcacgacacatccaggtccaagcaaagcatccccagcccagccgagaccgcgtgcgctccacgcagcatccgccgcagcagccgcccagagaagtcgccgccggagaagggggaggatgtcgtggcagacgtacgtcgacgaccacctgtgctgcgagatcgacggccagcacctcacctccgccgccatcctcggccacgacggcagcgtctgggccgagtcccccaacttccccaagttcaagcctgaggagattgctggcatcgttaaagactttgaagaacctggacaccttgcaccaactggtcttttccttggaggcacaaagtacatggtcatccaaggtgaacctggggttgtcatccgaggaaagaagggcaccggtggcattactatcaagaagaccggcatggccctgattcttggtatctacgatgagcccatgactcctggccagtgcaatttggtcgtggagaggctcggcgactacctggtcgagcagggtttctaagcccgccctgatatgctgttattttggtcgtctgggactaagtttgctctactgtgggctttgcatccatctgcttggcgtaccgcatgatatatgcagtgaataattttagcttggggtttgtcggttggtgatgtgtcgaaggggaaaaatggatttactatgttttctttttaatgtttggcatcgcgtcgtatcaaactcagccgctctttcgctgagtaatgtaaaaaaaaaaaaaaaa

SEQ ID NO: 6638 - protein, 131 aa, Zea mays
  misc_feature: Ceres CLONE ID no. 1274796
  misc_feature: Ceres CDNA ID no. 29191235
  misc_feature: The plant is abnormally small.
  misc_feature: The plant produces a reduced number of seeds.
  misc_feature: Useful for biocontainment applications
  misc_feature: Useful for making plants with modulated biomass
  misc_feature (2)..(126): Pfam Name: Profilin PFAM Desc: Profilin
  misc_feature: Homolog of GI Number: 1052817 NR Desc: profilin
  misc_feature: Homolog of GI Number: 1008443 NR Desc: profilin
  misc_feature: Homolog of GI Number: 1709779 NR Desc: Profilin
  misc_feature: Homolog of GI Number: 1008445 NR Desc: profilin
  misc_feature: Homolog of GI Number: 55775452 NR Desc: putative profilin
  misc_feature: Homolog of GI Number: 11493677 NR Desc: profilin 5
  misc_feature: Homolog of GI Number: 2642324 NR Desc: profilin
  misc_feature: Homolog of GI Number: 14161637 NR Desc: profilin
  misc_feature: Homolog of GI Number: 59380541 NR Desc: profilin 3
  misc_feature: Homolog of GI Number: 2415702 NR Desc: profilin 4
MSWQTYVDDHLCCEIDGQHLTSAAILGHDGSVWAESPNFPKFKPEEIAGIVKDFEEPGHLAPTGLFLGGTKYMVIQGEPGVVIRGKKGTGGITIKKTGMALILGIYDEPMTPGQCNLVVERLGDYLVEQGF

SEQ ID NO: 6639 - DNA, 627 bp, Zea mays
  misc_feature: Ceres CLONE ID no. 1274940
  misc_feature: Ceres CDNA ID no. 29191236
  CDS (77)..(493): REFERENCED BY SEQ ID NO: 6640
gaccagtcctccaacctcccagcgaacccaccccacacctttccccggcgaagcagcagcagccgcagcggcatccatggcccccaaggcggagaagaagccggtggcggagaaggccgagaagaccactgcggcgaagaagaccaaggccgagaagcggccgccggcgtccaaggagggcggcgagaagaagggcaagaagaagtcgaagaagagcgtggagacgtacaagatctacatcttcaaggtgctgaagcaggtgcacccggacatcggcatctcctccaaggccatgtccatcatgaactccttcatcaacgacatcttcgagaagctcgccggcgagtccgccaagctcgcccgctacaacaagaagcccaccatcacgtcccgggagatccagacctccgtccgcctcgtcctccccggcgagctcgccaagcacgccgtctccgagggcaccaaggccgtcaccaagttcacctccgcttagatagtctgttccggtttcttggtcgatcgatggtactctgtaatagtcatgtgttcggaccatgtcgtcttgtaagtgtttcattatcttgtgaaatagtaatggcgcttctttgatcaaaaaaaaaaaaaaaa

SEQ ID NO: 6640 - protein, 138 aa, Zea mays
  misc_feature: Ceres CLONE ID no. 1274940
  misc_feature: Ceres CDNA ID no. 29191236
  misc_feature: No seed is being produced by the plant
  misc_feature: The plant flowers significantly late compared to wild-type.
  misc_feature: Useful for biocontainment applications
  misc_feature: Useful for making plants with modulated flowering time
  misc_feature (45)..(117): Pfam Name: Histone PFAM Desc: Core histone H2A/H2B/H3/H4
  misc_feature: Homolog of GI Number: 531058 NR Desc: protein H2B
  misc_feature: Homolog of GI Number: 531054 NR Desc: protein H2B153
  misc_feature: Homolog of GI Number: 21801 NR Desc: histone H2B
  misc_feature: Homolog of GI Number: 577819 NR Desc: H2B histone
  misc_feature: Homolog of GI Number: 34908130 NR Desc: putative histone H2B
  misc_feature: Homolog of GI Number: 22323 NR Desc: H2B histone
  misc_feature: Homolog of GI Number: 577825 NR Desc: H2B histone
  misc_feature: Homolog of GI Number: 22325 NR Desc: H2B histone
  misc_feature: Homolog of GI Number: 1708107 NR Desc: Histone H2B
  misc_feature: Homolog of GI Number: 531056 NR Desc: protein H2B
MAPKAEKKPVAEKAEKTTAAKKTKAEKRPPASKEGGEKKGKKKSKKSVETYKIYIFKVLKQVHPDIGISSKAMSIMNSFINDIFEKLAGESAKLARYNKKPTITSREIQTSVRLVLPGELAKHAVSEGTKAVTKFTSA

SEQ ID NO: 6641 - DNA, 750 bp, Zea mays
  misc_feature: Ceres CLONE ID no. 1275917
  misc_feature: Ceres CDNA ID no. 29191412
  CDS (58)..(405): REFERENCED BY SEQ ID NO: 6642
gaacatagcgaacaaacatcgagtacagtcggctaggtaatctggtggtacgacgacatggcggccaccagcagcaagtcgtcgtcgtcctcgagctcggcgcagcgggcagctgccgcactgctcgtggccgccgccgtggcggtgtccgtcctggtggtgggcgcggcggcggtgtgcgacatgagcaacgagcagttcatgtcgtgccagcccgcggcggccaagacgacggacccgccggccgcgccgtcgcaggcgtgctgcgacgcgctggcgggggcggacctcaagtgcctgtgcggctacaagaactcgccgtggatgggcgtctacaacatcgaccccaagcgcgccatggagcttccggccaagtgcggcctcgccacgccgcccgactgctagcagtgtgctagccaagccaagccaagcaggaaggcccccggcattgctagctgtacgtgtctgtgtgtgcatctgcagcagggtgcaggcaggggcccgtacgtacgtgtctctttctctctctcatcttgtcaccgtacctatctagagtgtgtgtgttcgtactaattaaaatgttcttgtcgtcgtcgtctgtgcatgcatgtaccatgtcgtcgtgcatgtctattatgtgtgtgtcgtcgtgtcgatcggtacgtatagatgcctgttgttagcatgtgtgtcattacctagtcgtgtgtagtgtatgtatgtgcttgccgggcaaaaaaaaaaaaaaaa

SEQ ID NO: 6642 - protein, 115 aa, Zea mays
  misc_feature: Ceres CLONE ID no. 1275917
  misc_feature: Ceres CDNA ID no. 29191412
  misc_feature (41)..(115): Pfam Name: Tryp_alpha_amyl PFAM Desc: Protease inhibitor/seed storage/LTP family
  misc_feature: Homolog of GI Number: 25044847 NR Desc: PVR3
  misc_feature: Homolog of GI Number: 1420887 NR Desc: non
  misc_feature: Homolog of GI Number: 2598597 NR Desc: MtN5
  misc_feature: Homolog of GI Number: 34906924 NR Desc: P0470A12.42
MAATSSKSSSSSSSAQRAAAALLVAAAVAVSVLVVGAAAVCDMSNEQFMSCQPAAAKTTDPPAAPSQACCDALAGADLKCLCGYKNSPWMGVYNIDPKRAMELPAKCGLATPPDC

SEQ ID NO: 6643 - DNA, 1130 bp, Zea mays
  misc_feature: Ceres CLONE ID no. 1276681
  misc_feature: Ceres CDNA ID no. 25447524
  CDS (80)..(652): REFERENCED BY SEQ ID NO: 6644
atcgactcctcgcattcgccgctgcgtcaacgtgtcttccttcccgcggtctctccgccgcctcccagatccggcggccatggcaaggaacccgggctgcaccgtcttcataggtaacttggatgacaaggttcctgagagggttctgtatgaaattcttattcaggtaggtcgtgttgtagaccttcacatacctcgtgacaaggaaactagccgaccaaaaggctatgcttttgctgagtatgaaacagaggagattgcccaatatgctgttaagctattttctggtcttgttcgacttcataataaaacgcttagatttgcgatctctgggcaagacaaaccctcattaaatggcaatatccctgtaactcctaggttaaactctgtaccacagccaaagcctcatcaacctatgaggtctagtgatactcctttgccacagcatgcagcagtgaatggcaggaatgccgggtatggtatcccaccaaatcattcatacgacacgcacactcaagcactgtcgagtgggttaccgaatagaggactaagcaacggtacatatgaatatagtaggcgtgtatttggttctgttctgaatgatgttagccgtcgagctaccagggaaccaatcccgtacccgtcctactagcatgttgagccccggtgactgactctgtgctgacagaaaatatttctgaagatgttctctgttgtgtcagccacctgtaatatctctgtactcaccatttcatgcctgtaaatatgggttatggtggtaggacatatgcttgtttttttggttctgcttcgcattgtagtgagacttgtccctgcttgttaggtccttctcatcccctagtgtgaaggccatgccttcactagtatggctgcactaggaaataccattcctagttacatgaatgggtggcaatatgctggcaattgtgttttaacattagtgccattagctatttcaatgttacagcagggcgtgtttgtgtttgcgatattagtatttggtggattttgtgcttctcatcatgtatctgggacatctgaaggagaaacattgttttaaaagaaaattgtgaaataagtcccacaatttatgaaaaaaaaaaaaaaaa

SEQ ID NO: 6644 - protein, 190 aa, Zea mays
  misc_feature: Ceres CLONE ID no. 1276681
  misc_feature: Ceres CDNA ID no. 25447524
  misc_feature (9)..(81): Pfam Name: RRM_1 PFAM Desc: RNA recognition motif.
  misc_feature: Homolog of GI Number: 50931451 NR Desc: putative galactosyltransferase
  misc_feature: Homolog of GI Number: 56784854 NR Desc: galactosyltransferase
  misc_feature: Homolog of GI Number: 34907328 NR Desc: P0698A10.26
  misc_feature: Homolog of GI Number: 31432465 NR Desc: putative spliceosomal protein
  misc_feature: Homolog of GI Number: 26399889 NR Desc: Spliceosome
  misc_feature: Homolog of GI Number: 14334958 NR Desc: putative spliceosome associated protein
  misc_feature: Homolog of GI Number: 21593441 NR Desc: putative spliceosome associated protein
  misc_feature: Homolog of GI Number: 23297611 NR Desc: putative spliceosome
  misc_feature: Homolog of GI Number: 56472460 NR Desc: RNA
MARNPGCTVFIGNLDDKVPERVLYEILIQVGRVVDLHIPRDKETSRPKGYAFAEYETEEIAQYAVKLFSGLVRLHNKTLRFAISGQDKPSLNGNIPVTPRLNSVPQPKPHQPMRSSDTPLPQHAAVNGRNAGYGIPPNHSYDTHTQALSSGLPNRGLSNGTYEYSRRVFGSVLNDVSRRATREPIPYPSY

SEQ ID NO: 6645 - DNA, 590 bp, Zea mays
  misc_feature: Ceres CLONE ID no. 1276807
  misc_feature: Ceres CDNA ID no. 29191413
  CDS (89)..(391): REFERENCED BY SEQ ID NO: 6646
agatcacactagcctacacacaccgagcgccgtctaaactgacagcaggtcagcagcctagcgaagccaagacatccgccgatctcagatggccgggagaagggtgcgcggcaagagtgccgtggccgtggcggccgtcgcgctgctggcgctgctcttcgcggcgagcgaggccgacgggacgtgcaacgtcgaccggggcacggtgctgaggcagtgcgcgtcctgctcgagcggcgcgccgagccaggggtgctgcgacgcgctgaggaacgccgacttcggctgcctctgcagcaactactggaacaagctcaagaacacgccatacgccagctgcgccaaggccatcccttccgcgtgcaacctcccaaacgccaagtgccagtagatggagacatggagtgcgtgacccggacagcgaacgggcagcttggaccaaacagaataaatccgcttcattaccctgtttcttcctcctctgagtgtgttagttctttgctttgagtcgttatccgatatgatcggctgccctgctagccggcgggacgttctatatatgtctttgcaactcaaaaaaaaaaaaaaaa

SEQ ID NO: 6646 - protein, 100 aa, Zea mays
  misc_feature: Ceres CLONE ID no. 1276807
  misc_feature: Ceres CDNA ID no. 29191413
  misc_feature: Homolog of GI Number: 34906926 NR Desc: P0470A12.43
  misc_feature: Homolog of GI Number: 34906924 NR Desc: P0470A12.42
MAGRRVRGKSAVAVAAVALLALLFAASEADGTCNVDRGTVLRQCASCSSGAPSQGCCDALRNADFGCLCSNYWNKLKNTPYASCAKAIPSACNLPNAKCQ

SEQ ID NO: 6647 - DNA, 700 bp, Zea mays
  misc_feature: Ceres CLONE ID no. 1276810
  misc_feature: Ceres CDNA ID no. 29191414
  CDS (106)..(609): REFERENCED BY SEQ ID NO: 6648
caagtgacaaactgaaactaaccatgaagccatgaaacaggctccgctccggcctgtagccgtgacggcgtcaggctcagctcgctcccccccacgaaaaccctaatggcgtcccggctccttcacctccgccgcctcattactcctccctccaccgtccccaccgcttccttctccaccgccgtcagcgcgaccccgcgcgtctccgcgctcgtcgacgagatctgcgggctcaccctcctcgaggcctcttccctggccgatgccctgcgcggccgcctcggcgtcgaccagttgccgccactagctatccttacgggcggcgccgcaccgctcgtcggcggcggagtaggtcccggcgcggccggcgaggaggcgaaggccaaggaggagaagatggcgttcgacgtgaagctggaggggttcgacgccgcggcgaagctcaagatcatcaaggagctgagggcgttcacgaatctgggtctgaaggaggccaaggatctcgtggagaaggcgcccgccgtgctcaaggctggagttcccaaggaggaggcggagagtatcgccgagaagatgcgggcgctcggcgccaagattgttctcgagtgaacgacgagagctgtgtatgccctcgtttcttgatttgtttcgtgtttcttgtatgaaaaaaagagagaattttggaaaaaaaaaaaaaaaa

SEQ ID NO: 6648 - protein, 167 aa, Zea mays
  misc_feature: Ceres CLONE ID no. 1276810
  misc_feature: Ceres CDNA ID no. 29191414
  misc_feature (100)..(167): Pfam Name: Ribosomal_L12 PFAM Desc: Ribosomal protein L7/L12 C
  misc_feature: Homolog of GI Number: 50582718 NR Desc: putative ribosomal protein
  misc_feature: Homolog of GI Number: 50932695 NR Desc: putative 50S ribosomal protein L12
  misc_feature: Homolog of GI Number: 17104653 NR Desc: putative ribosomal protein
  misc_feature: Homolog of GI Number: 34913132 NR Desc: ribosomal protein
  misc_feature: Homolog of GI Number: 50906015 NR Desc: ribosomal protein L12
  misc_feature: Homolog of GI Number: 66849485 NR Desc: 60S ribosomal protein L7/L12 precursor
  misc_feature: Homolog of GI Number: 45198430 NR Desc: AFL089Cp
  misc_feature: Homolog of GI Number: 72086543 NR Desc:  similar to 39S ribosomal protein L12
  misc_feature: Homolog of GI Number: 42475536 NR Desc: mitochondrial ribosomal protein L12
MASRLLHLRRLITPPSTVPTASFSTAVSATPRVSALVDEICGLTLLEASSLADALRGRLGVDQLPPLAILTGGAAPLVGGGVGPGAAGEEAKAKEEKMAFDVKLEGFDAAAKLKIIKELRAFTNLGLKEAKDLVEKAPAVLKAGVPKEEAESIAEKMRALGAKIVLE

SEQ ID NO: 6649 - DNA, 601 bp, Zea mays
  misc_feature: Ceres CLONE ID no. 1276968
  misc_feature: Ceres CDNA ID no. 40351709
  CDS (129)..(395): REFERENCED BY SEQ ID NO: 6650
aaaacaggcaaacacacaacacaaccaaccacctcactcgatctctcatcactcgcaagtccagctatcaccaaccagacagagctcggctgcaagcctccaacccaaggagacagatacgttcgcagatggcgggtgcagcgaaggcgtcgtggatggtggccatgagcgtgggcgccgtggaggcgctcaaggaccagggtggcctctgccgctggaactacgcgctgcggtccgtccaccgcaccgccaaggccaacgtccgcagcagcctcgccgcgcagcgggacaaggagctggccccggcggcggagtcgaagaggcggccgggcaaggccgccgcggaggaggggatgaggaccgtcatgtacctcagctgctggggacccaactaggaggactagctagggttcactgttcagctcattgccggtgctaggttcagttcagacctggttggccttcgattgtaaaataggaatacggtcacgacgatgaatgatgatgacgatgaaaagttctgccactgtatgtttcaggcctgtgggctcaaaacaagaattcggtggtgcttgatgcatccataaaaaaaaaaaaaaaa

SEQ ID NO: 6650 - protein, 88 aa, Zea mays
  misc_feature: Ceres CLONE ID no. 1276968
  misc_feature: Ceres CDNA ID no. 40351709
MAGAAKASWMVAMSVGAVEALKDQGGLCRWNYALRSVHRTAKANVRSSLAAQRDKELAPAAESKRRPGKAAAEEGMRTVMYLSCWGPN

SEQ ID NO: 6651 - DNA, 944 bp, Zea mays
  misc_feature: Ceres CLONE ID no. 1276971
  misc_feature: Ceres CDNA ID no. 25445902
  CDS (65)..(736): REFERENCED BY SEQ ID NO: 6652
accactgggtcttcagaccattagctttatctactccagagcgcagaagaacccgatcgacaccatgagggtgttgctcgttgccctcgctctcctggctctcgctgcgagcgccacctccacgcatacaagcggcggctgcggctgccagccaccgccgccggttcatctaccgccgccggtgcatctgccacctccggttcacctgccacctccggtgcatctcccaccgccggtccacctgccgccgccggtccacctgccaccgccggtccatgtgccgccgccggttcatctgccgccgccaccatgccactaccctactcaaccgccccggcctcagcctcatccccagccacacccatgcccgtgccaacagccgcatccaagcccgtgccagctgcagggaacctgcggcgttggcagcaccccgatcctgggccagtgcgtcgagttcctgaggcatcagtgcagcccgacggcgacgccctactgctcgcctcagtgccagtcgttgcggcagcagtgttgccagcagctcaggcaggtggagccgcagcaccggtaccaggcgatcttcggcttggtcctccagtccatcctgcagcagcagccgcaaagcggccaggtcgcggggctgttggcggcgcagatagcgcagcaactgacggcgatgtgcggcctgcagcagccgactccatgcccctacgctgctgccggcggtgtcccccactgaagaaactatgtgctgtagtatagccgctggctagctagctagttgagtcatttagcggcgatgattgagtaataatgtgtcacgcatcaccatgggtggcagtgtcagtgtgagcaatgacctgaatgaacaattgaaatgaaaagaaaaaaagtactccatctgttccaaattaaaaaaaaaaaaaaaaaaaaaaaaaaaaaaaaaa

SEQ ID NO: 6652 - protein, 223 aa, Zea mays; identical to SEQ ID NO: 4224
  misc_feature: Ceres CLONE ID no. 1276971
  misc_feature: Ceres CDNA ID no. 25445902
  misc_feature (128)..(213): Pfam Name: Tryp_alpha_amyl PFAM Desc: Protease inhibitor/seed storage/LTP family
  misc_feature: Homolog of GI Number: 168695 NR Desc: gamma zein
  misc_feature: Homolog of GI Number: 22550 NR Desc: 27kDa storage protein
  misc_feature: Homolog of GI Number: 170156 NR Desc:
  misc_feature: Homolog of GI Number: 18054 NR Desc: gamma
  misc_feature: Homolog of GI Number: 671656 NR Desc: gamma
  misc_feature: Homolog of GI Number: 2119755 NR Desc: gamma
  misc_feature: Homolog of GI Number: 45645342 NR Desc: gamma kafirin protein
  misc_feature: Homolog of GI Number: 45645344 NR Desc: gamma kafirin protein
  misc_feature: Homolog of GI Number: 9280319 NR Desc: extensin protein
  misc_feature: Homolog of GI Number: 5917664 NR Desc: extensin

SEQ ID NO: 6653 - DNA, 1434 bp, Zea mays
  misc_feature: Ceres CLONE ID no. 1277129
  misc_feature: Ceres CDNA ID no. 25446527
  CDS (181)..(1209): REFERENCED BY SEQ ID NO: 6654
agtcctttcgctggtaacgaatcaatgaaccagttggattgttctaacttgctgccaacaatcaaattcattttgccactcttcctccgcgtcagtagattgcggttgcagattcctctcctgcgaggcacgagctgagtcctatccctatccgcccttgttgcagcggtgcggaaggcaatggtggggttgggatggagagtcggctcaaaggtgcagagatgggtccggagctgcctccggggtttctcttctgctgcagttccgtctcagctggagaatgtcggattcatcggacttgggaacatgggttcccatatggcaaggaacttgatcacggctggatataaagtgactgttcatgatataaatgaaaattctatgaagaaattctcagaggatggaatccctacaaaacagtctccacttgaagtatcagaatcgagtgatgttataattaccatgcttccttcatctactcatgttttagaagtatacaatggacccaatggcttgctttgtcggggcgaacgcttgggcccatggttatacatagattcatcaacagttgatccacaaacatcaagaaagatatcgacagccatctcaagatgccttttaaaagaaaagaaaggttacgctgaaagccctaagattctggatgctccggtgtctggaggtgttcctgctgcagaagctggcaagctaactttcatggtgggtggtcttgaggaagcgtatttagcagccaagcccttacttcaagcaatgggggaaaaaacaatctactgtggtggtgctggaaatggctcggctgcaaagatatgtaacaacatggcaatggcaatcagcatgcttggggtctccgaggcctttgttcttggccagaaccttgggatcaaagcaaccactctcacagacattttcaactgttcaagcgctcgctgctggagtagcgatacatataatccagttcctggagttatggaaggtgtaccatcatcaaggaactatagtggtggtttcacttccaaactaatggccaaagatttggatttggccatggcttctgcatctggagttggcttcaaatgccctatgggttccaatgcacttgaaatttaccgaaaactatgcgaggatggttgtgaactcaaagacttctcgtgcgcattccgacattactattctggcaagaatgaagagtgatcttggagttacgctgcaaaatttcctcctttcgaaatcaataaaacaacaaataaagttaggacctgtttatatcccatgaattgaaaccaatatctagaaagtgtgtttccttgtttcattattagattactttctaattggtctaaattcctggaatcgaacaggaccttggaaagtttacagtgtaagctgtgtagcattgtaccaaaaaaaaaaaaaaaa

SEQ ID NO: 6654 - protein, 342 aa, Zea mays
  misc_feature: Ceres CLONE ID no. 1277129
  misc_feature: Ceres CDNA ID no. 25446527
  misc_feature (32)..(207): Pfam Name: NAD_binding_2 PFAM Desc: NAD binding domain of 6
  misc_feature: Homolog of GI Number: 52076907 NR Desc: putative 3
  misc_feature: Homolog of GI Number: 30316393 NR Desc: Probable 3
  misc_feature: Homolog of GI Number: 21555592 NR Desc: 3
  misc_feature: Homolog of GI Number: 7268890 NR Desc: 3
  misc_feature: Homolog of GI Number: 57530712 NR Desc: similar to 3
  misc_feature: Homolog of GI Number: 73976179 NR Desc:  similar to 3
  misc_feature: Homolog of GI Number: 47125249 NR Desc: MGC84587 protein
  misc_feature: Homolog of GI Number: 57086943 NR Desc:  similar to 3
MVGLGWRVGSKVQRWVRSCLRGFSSAAVPSQLENVGFIGLGNMGSHMARNLITAGYKVTVHDINENSMKKFSEDGIPTKQSPLEVSESSDVIITMLPSSTHVLEVYNGPNGLLCRGERLGPWLYIDSSTVDPQTSRKISTAISRCLLKEKKGYAESPKILDAPVSGGVPAAEAGKLTFMVGGLEEAYLAAKPLLQAMGEKTIYCGGAGNGSAAKICNNMAMAISMLGVSEAFVLGQNLGIKATTLTDIFNCSSARCWSSDTYNPVPGVMEGVPSSRNYSGGFTSKLMAKDLDLAMASASGVGFKCPMGSNALEIYRKLCEDGCELKDFSCAFRHYYSGKNEE

SEQ ID NO: 6655 - DNA, 699 bp, Zea mays
  misc_feature: Ceres CLONE ID no. 1277159
  misc_feature: Ceres CDNA ID no. 36706695
  CDS (71)..(523): REFERENCED BY SEQ ID NO: 6656
agcgaacacatctgcttcgcatttcttcccatcccccttcgcaacccaaaccccaactcgctccgcatcgatggcgcccaaggccgagaagaagcccgcggcgaagaagccggcggaggaggagcccgcggctgagaaggcgcccgccgggaagaagccgaaggcggagaagcgggtccccgctggcaagtccgctgccaaggagggcggcgagggcaagaggggcaggaagaagggcaagaagagcgtggagacctacaagatctacatcttcaaggtgctgaagcaggtgcacccggacattggcatctcctccaaggccatgtcgatcatgaactccttcattaacgatatcttcgagaagctagctgctgaggccgccaagctcgcgcgctataacaagaagccaaccatcacctcccgtgagatacagacttccgtgcgcctcgtccttcccggggagctcgccaagcacgccgtctccgagggcaccaaggccgtcaccaagttcacctcggcctaggctgcgctgccgccgcttgcaggattgtctcctgtgttcacgtgtattgctgtagttaggtgctgctggtttctgtctgttacccatctgtctgtagcaactttgttatctgataggaccgtaatggtgcttatttaacccagctatatgtttctatgtgaaaaaaaaaaaaaaaa

SEQ ID NO: 6656 - protein, 150 aa, Zea mays; identical to SEQ ID NO: 48
  misc_feature: Ceres CLONE ID no. 1277159
  misc_feature: Ceres CDNA ID no. 36706695
  misc_feature: No seed is being produced by the plant
  misc_feature: The plant flowers significantly late compared to wild-type.
  misc_feature: Useful for biocontainment applications
  misc_feature: Useful for making plants with modulated flowering time
  misc_feature (57)..(129): Pfam Name: Histone PFAM Desc: Core histone H2A/H2B/H3/H4
  misc_feature: Homolog of GI Number: 22325 NR Desc: H2B histone
  misc_feature: Homolog of GI Number: 577825 NR Desc: H2B histone
  misc_feature: Homolog of GI Number: 21801 NR Desc: histone H2B
  misc_feature: Homolog of GI Number: 22323 NR Desc: H2B histone
  misc_feature: Homolog of GI Number: 50932769 NR Desc: putative histone H2B
  misc_feature: Homolog of GI Number: 1708107 NR Desc: Histone H2B
  misc_feature: Homolog of GI Number: 34895904 NR Desc: putative histone H2B
  misc_feature: Homolog of GI Number: 34895900 NR Desc: putative histone H2B
  misc_feature: Homolog of GI Number: 34895838 NR Desc: putative histone H2B
  misc_feature: Homolog of GI Number: 34895908 NR Desc: putative histone H2B

SEQ ID NO: 6657 - DNA, 1016 bp, Zea mays
  misc_feature: Ceres CLONE ID no. 1277241
  misc_feature: Ceres CDNA ID no. 29191415
  CDS (99)..(680): REFERENCED BY SEQ ID NO: 6658
atatatcctcctgcgaggaaaacaattcattccgcgccgcatctgggaaggtctcgtcttgctcgcctccgtccgtcgccgcaccctgcgtcgtcgccatggccaccgacgaagccaccaagccgtccccgatcccaccctatcccgagatgatcctggcggcgatcgagggtctagacgacaagagcgggtcgaacaagtccgccatctccaagtacatcgagggcaagtacggctcgctgccccccgcgcacgcgtcgctgctgaccgcgcacctggcgcgcatgaaggagtccggagagctcgtcttcctcaagaacaactacttccgcgcgggcgcccccgacgcgccgccgaagcgcgggcgcgggcgccctcccaaggcgcgggacccgaacgcgccggcgccggcgcccaagtcgccgtcgtccacggggcgcggccgcgggcgcccgcccaaggccaagagcccgctggaagccgccgtgaagcaggccaccgcggggatgcccaagccccgcggccgcccgcccaagaaggccaagaccgacggcgccgcgtccccgtccccgtcccctgcccctgcccctgctggcgacgggtccacccccggcaagcgcggccgcggcaggccccccaaggtacgccccgccgtgcccagcgagacggccgcggcttgaccccgcttcttggggataatagttcgtcccgccgcgagatgggatggttagggcgtagcaattcgtcccgctgcagctgcggctgcagctgccgtgttaatgttggtaggcttggtctccatgcttcatctaattgttgtcgtcgtcggcgtcgtcgttgctcaattaattaatggagtaattaggaggattcgatgtgctgtcttctgtgctgtgttgtgttcagttcagtttcaccgtgtgtctctggtgttatgtgctggatctgttgtaagctaagctagggagcttgagtgctgtgttggtcgattaattattataaaaaaaaaaaaaaaa

SEQ ID NO: 6658 - protein, 193 aa, Zea mays
  misc_feature: Ceres CLONE ID no. 1277241
  misc_feature: Ceres CDNA ID no. 29191415
  misc_feature (13)..(81): Pfam Name: Linker_histone PFAM Desc: linker histone H1 and H5 family
  misc_feature (87)..(99): Pfam Name: AT_hook PFAM Desc: AT hook motif
  misc_feature: Homolog of GI Number: 9837562 NR Desc: high mobility group I/Y
  misc_feature: Homolog of GI Number: 11544762 NR Desc: HMGI/Y protein
  misc_feature: Homolog of GI Number: 4585621 NR Desc: HMGI/Y protein
  misc_feature: Homolog of GI Number: 50945947 NR Desc: putative high mobility group I/Y
  misc_feature: Homolog of GI Number: 51091572 NR Desc: DNA binding protein PF1
  misc_feature: Homolog of GI Number: 20502966 NR Desc: HMG
  misc_feature: Homolog of GI Number: 47027043 NR Desc: high mobility group I/Y
  misc_feature: Homolog of GI Number: 629769 NR Desc: histone
  misc_feature: Homolog of GI Number: 1181589 NR Desc: high mobility group protein
  misc_feature: Homolog of GI Number: 6651027 NR Desc: high mobility group protein I/Y
  misc_feature: Useful for delaying flowering time
  misc_feature: Useful for sterility
MATDEATKPSPIPPYPEMILAAIEGLDDKSGSNKSAISKYIEGKYGSLPPAHASLLTAHLARMKESGELVFLKNNYFRAGAPDAPPKRGRGRPPKARDPNAPAPAPKSPSSTGRGRGRPPKAKSPLEAAVKQATAGMPKPRGRPPKKAKTDGAASPSPSPAPAPAGDGSTPGKRGRGRPPKVRPAVPSETAAA

SEQ ID NO: 6659 - DNA, 2435 bp, Zea mays
  misc_feature: Ceres CLONE ID no. 1277276
  misc_feature: Ceres CDNA ID no. 36590559
  CDS (154)..(1962): REFERENCED BY SEQ ID NO: 6660
caaagctctctcgctacctccctccctccctccctccccctcttccgaggcttctcctttccgccatggcctcctgctagtgccagcccccgtcgcaacgcctcccagatcccggacgcagcgtgccgcaccccgcgacggccggttcgcgacatgggagggtgtcacgcgaagccgctcacccacgacgcggaccgctcgccgccgcacgcagcgccggcgaccccgcccccgggctccgccacgcccgccacccccggccccgggaagaagcactgggcggtgtccccgttcttcgcgttctccacgccgagcccgagccccgcgcaccacctcttcggcggctccgcggcatcgccgcgcaagtcccccgctccgccgggctccgcgcccaccaccccggccaggcggctcctgaggctgcccttcccgccgccgtcgcccgccaagcacatccgggcggcgctcgccaggcgccacggcccgccgcggccgtctatccccgaggaaggcggcggcgagggggagggcggcggcggcggaggcaggggcctcgacaaggggtttgggttcaacaaggggtttgcggccaagtatgacttgggggatgaggtcggacgggggcacttcggctacacctgcgccgccacggttaagaagggcgcgcgcaagggggagtccgtcgccgtcaaggtcatccccaaagcaaagatgactacatccattgctatagaggatgtccgaagggaggttaaaatcttgaaagctttagcaggaaacaaaaacttggtccaattttatgatgcctacgaggacaacgacaacgtgtatatagtaatggagctgtgcgaaggtggagagctacttgacagaatactttccagaggcgggaagtactccgaggatgatgcaaaagctgtcctggtgcaaatattaaatgtcgtcgctttttgccacattcaaggagtggttcatcgagatctcaaaccagagaattttctttttacatcaaaagatgatgattcccatcttaaggccattgattttggcctatcagactttgtaaaaccagatgagaggctcaatgacatagttggaagtgcttattatgttgctccagaagttctgcatagatgctatagcacagaagctgatgtttggagcataggtgtaattgcatatatccttctttgtggcagtcgtccattttgggcacgcacggaatctggcatattccgttcggttctcaaagccgatcccagttacaatgaggcaccatggccttctctgactccggaagcaatggattttgtcaagcgattgctgtgcaaggatccgcgtagaaggatgactgcagctcaggctttaagtcatccatggatcagaaattataatgacattaagctgccgttggacattcttatattccgacttatcaaagcttatattcgctcctcatctttacggaaagctgctctgagggctctgtcaaagaccttaaccgtagacgagcttttctacctgaaatcacagttttctctattggaaccagacaggaatgggtgcatcactcttgacaatatcagaatggccttaacgagagaagctactgatgcaatgaaggaatcgcgagttcaagatattcttgtttcgttgagcgcccttcagtacagaagaatggaattccaagagttctgtgcagcagcagttagtgtgcatcagcttgaagcattggatagatgggagcaacatgcgagatctgcttatgaacattttgagaaggaaggcaaccgagctattgtaatagatgaattagcttctgaattgggcctcagcccttcagcgccactgcatgtcgttctgcaagattggatcaggcatacggatgggaaattgagctttctcggatttgtcaagttattgcatggcatgtccagcaggtccctgtcaaagatgagatagctgttgataatctctaacgacagcgcatgcttacaccgccttagcccttgtcgacttggttcgtgggttggagcttgtgtatcaagggcgtatctagcagcacctgatctgtcactaatttgagtatagagttatgtttgttgttgcctgcctactgatcattagccgataggaaaaaggaaaatctcacccatatctgcaacatgtgatgttatctaacagtgttagattaggcgtcattttctgttgtgatttttggaaactttgtaatgcttccttcctggaactggagcaagttaactgcaagttaccaggttggcctttagagcatggacatatcacttaccgtgcgtggtcgttatgtggtactacgtcaggttctcttcgtgtatatattgatgagatggaactgtgcattattttgaatctcaatattagcatgtcaatttgcaaactcaaaaaaaaaaaaaaaa

SEQ ID NO: 6660 - protein, 602 aa, Zea mays
  misc_feature: Ceres CLONE ID no. 1277276
  misc_feature: Ceres CDNA ID no. 36590559
  misc_feature (321)..(340): Pfam Name: Pkinase_Tyr PFAM Desc: Protein tyrosine kinase
  misc_feature: Homolog of GI Number: 37202008 NR Desc: At1g49580
  misc_feature: Homolog of GI Number: 6561993 NR Desc: CDPK
  misc_feature: Homolog of GI Number: 2154715 NR Desc: CDPK
  misc_feature: Homolog of GI Number: 1103386 NR Desc: CDPK
  misc_feature: Homolog of GI Number: 14133874 NR Desc: CaMK1
  misc_feature: Homolog of GI Number: 9294612 NR Desc: calcium
  misc_feature: Homolog of GI Number: 45550245 NR Desc: calcium/calmodulin protein kinase
  misc_feature: Homolog of GI Number: 16904226 NR Desc: calcium/calmodulin
  misc_feature: Homolog of GI Number: 50939305 NR Desc: putative CDPK
  misc_feature: Homolog of GI Number: 55741110 NR Desc: putative CDPK
MGGCHAKPLTHDADRSPPHAAPATPPPGSATPATPGPGKKHWAVSPFFAFSTPSPSPAHHLFGGSAASPRKSPAPPGSAPTTPARRLLRLPFPPPSPAKHIRAALARRHGPPRPSIPEEGGGEGEGGGGGGRGLDKGFGFNKGFAAKYDLGDEVGRGHFGYTCAATVKKGARKGESVAVKVIPKAKMTTSIAIEDVRREVKILKALAGNKNLVQFYDAYEDNDNVYIVMELCEGGELLDRILSRGGKYSEDDAKAVLVQILNVVAFCHIQGVVHRDLKPENFLFTSKDDDSHLKAIDFGLSDFVKPDERLNDIVGSAYYVAPEVLHRCYSTEADVWSIGVIAYILLCGSRPFWARTESGIFRSVLKADPSYNEAPWPSLTPEAMDFVKRLLCKDPRRRMTAAQALSHPWIRNYNDIKLPLDILIFRLIKAYIRSSSLRKAALRALSKTLTVDELFYLKSQFSLLEPDRNGCITLDNIRMALTREATDAMKESRVQDILVSLSALQYRRMEFQEFCAAAVSVHQLEALDRWEQHARSAYEHFEKEGNRAIVIDELASELGLSPSAPLHVVLQDWIRHTDGKLSFLGFVKLLHGMSSRSLSKMR

SEQ ID NO: 6661 - DNA, 858 bp, Zea mays
  misc_feature: Ceres CLONE ID no. 1277330
  misc_feature: Ceres CDNA ID no. 25445632
  CDS (58)..(762): REFERENCED BY SEQ ID NO: 6662
atcgcacatattattgagaccaactagcaacatagaaagcacaatagtgtaccaacaatggcagccaaaatattttgcctccttatgctccttggtctttctgcaagtgctgctacggcgaccattttcccgcaatgctcgcaagctcctatagcttcccttcttcccccgtacctctcaccagcggtgtcttcggtatgtgaaaacccaattcttcaaccctacaggatccaacaggcaatcgcagctggcatcttacctttatcacccttgttcctccaacaatcatcagccctattacaacagttacctttggtgcatttattggcacaaaacatcagggcacaacaactacaacaacttgtgctagcaaaccttgctgcctactctcagcaacagcagtttcttccattcaaccaactaggttcattgaactctgcttcttatttgcaacaacaacaactaccattcagccagctacctgctgcctacccccagcaatttcttccattcaaccaactagcagcattgaactctcctgcttatttacagcagcaacaactactaccattcagccagctagctggtgtgagccctgctaccttcttgacacaaccacagttgttgccgttctaccagcacgttgcgcctaacgctggcaccctcttacaactgcaacaattgctgccattcaaccaacttgctttgacaaacccagcagtgttctaccaacaacccatcattggtggtgccctcttttagatttcttatgagttatagttcaataataaagttttttatctgatgtttgtggcttcccagaaataagaaagtacatttctaaaaaaaaaaaaaaaa

SEQ ID NO: 6662 - protein, 234 aa, Zea mays
  misc_feature: Ceres CLONE ID no. 1277330
  misc_feature: Ceres CDNA ID no. 25445632
  misc_feature (99)..(146): Pfam Name: Zein PFAM Desc: Zein seed storage protein
  misc_feature: Homolog of GI Number: 72315 NR Desc: 19K zein precursor
  misc_feature: Homolog of GI Number: 16305125 NR Desc: 19kD alpha zein B1
  misc_feature: Homolog of GI Number: 224509 NR Desc: zein E19
  misc_feature: Homolog of GI Number: 168691 NR Desc: zein
  misc_feature: Homolog of GI Number: 22446 NR Desc: 19 kDa zein
  misc_feature: Homolog of GI Number: 22534 NR Desc: zein
  misc_feature: Homolog of GI Number: 535020 NR Desc: zein Zd1
  misc_feature: Homolog of GI Number: 809117 NR Desc: zein
  misc_feature: Homolog of GI Number: 100940 NR Desc: zein zA1
  misc_feature: Homolog of GI Number: 41745908 NR Desc: low molecular weight glutenin
MAAKIFCLLMLLGLSASAATATIFPQCSQAPIASLLPPYLSPAVSSVCENPILQPYRIQQAIAAGILPLSPLFLQQSSALLQQLPLVHLLAQNIRAQQLQQLVLANLAAYSQQQQFLPFNQLGSLNSASYLQQQQLPFSQLPAAYPQQFLPFNQLAALNSPAYLQQQQLLPFSQLAGVSPATFLTQPQLLPFYQHVAPNAGTLLQLQQLLPFNQLALTNPAVFYQQPIIGGALF

SEQ ID NO: 6663 - DNA, 513 bp, Zea mays
  misc_feature: Ceres CLONE ID no. 1277449
  misc_feature: Ceres CDNA ID no. 25445727
  CDS (119)..(310): REFERENCED BY SEQ ID NO: 6664
acacgcggatcgaattaggctctccgagtctccggttccctcctctcggcggcggctcaggtccctctccatctccggcgtggcgcttggcgtctgacctcaacaagcaagaaagcaaatggcaggcggcagggttgcgcatgccaccctcaagggcccgagtgtggtgaaggagatcttcattggactgaccctgggtctgatcgcgggaggcatgtggaagatgcaccactggaacgagcagaggaagactaggtccttctatgacatgcttgacaagggccagatcagcgttgtcgtcgaggagtaaagagttcttcccagttattttcaaagaactctctcgagagcatgacaaagtgattgcttgctgtggagatttgtcctggaaataagcacaaccatttgggaacaccagattttgtcgaattttcctttccttttgatgaatatttgagcacgtccatgtcaataccaaacatctggccttttctctcaaaaaaaaaaaaaaaa

SEQ ID NO: 6664 - protein, 63 aa, Zea mays
  misc_feature: Ceres CLONE ID no. 1277449
  misc_feature: Ceres CDNA ID no. 25445727
  misc_feature (2)..(63): Pfam Name: COX5C PFAM Desc: Cytochrome c oxidase subunit Vc
  misc_feature: Homolog of GI Number: 1070356 NR Desc: cytochrome c oxidase
  misc_feature: Homolog of GI Number: 48428177 NR Desc: Cytochrome c oxidase polypeptide Vc
  misc_feature: Homolog of GI Number: 2275216 NR Desc: putative cytochrome c oxidase Vc subunit
  misc_feature: Homolog of GI Number: 7340711 NR Desc: cytochrome c oxidase subunit 5c
  misc_feature: Homolog of GI Number: 18409602 NR Desc: cytochrome c oxidase subunit 5c
  misc_feature: Homolog of GI Number: 21593916 NR Desc: cytochrome c oxidase subunit
  misc_feature: Homolog of GI Number: 18409600 NR Desc: cytochrome c oxidase subunit 5c
  misc_feature: Homolog of GI Number: 10178149 NR Desc: cytochrome c oxidase Vc subunit
  misc_feature: Homolog of GI Number: 4105786 NR Desc: PGPS/D8
MAGGRVAHATLKGPSVVKEIFIGLTLGLIAGGMWKMHHWNEQRKTRSFYDMLDKGQISVVVEE

SEQ ID NO: 6665 - DNA, 528 bp, Zea mays
  misc_feature: Ceres CLONE ID no. 1277475
  misc_feature: Ceres CDNA ID no. 36706809
  CDS (64)..(363): REFERENCED BY SEQ ID NO: 6666
caccacaacccagcgccggcagtcgccgtcatcgatcgatcgccggaaaactaacccctaacgatgtctggagccggcgaggaggacaagaagcccgcggagggcggcgcccacatcaaccttaaggtcaagggacaggatggcaatgaggtgttctttcgcataaagaggtccacccagctgaagaagctgatgaacgcttattgtgaccgccagtctgtggacatgaatgccattgcgttcctgtttgatggccgcaggcttcgcggcgagcagacccctgatgagctggagatggaggacggcgacgagatcgacgccatgcttcaccagaccggaggcagcgttcctagcaccacctaaaagcctcgttttgctctccgtcctgcgtagtagtaaacaaaagggaaaaagtctttttaaggaacttgtgatgctctggctccttgtgccattgctgagggacatccttagcctttgtttagtagtatggtttggtactttgttctgtcaaaaaaaaaaaaaaaa

SEQ ID NO: 6666 - protein, 99 aa, Zea mays; identical to SEQ ID NO: 36
  misc_feature: Ceres CLONE ID no. 1277475
  misc_feature: Ceres CDNA ID no. 36706809
  misc_feature (16)..(91): Pfam Name: ubiquitin PFAM Desc: Ubiquitin family
  misc_feature: Homolog of GI Number: 1668773 NR Desc: ubiquitin
  misc_feature: Homolog of GI Number: 34907010 NR Desc: putative ubiquitin
  misc_feature: Homolog of GI Number: 30725548 NR Desc: At4g26840
  misc_feature: Homolog of GI Number: 1707372 NR Desc: ubiquitin
  misc_feature: Homolog of GI Number: 20386084 NR Desc: ubiquitin
  misc_feature: Homolog of GI Number: 34907008 NR Desc: putative ubiquitin
  misc_feature: Homolog of GI Number: 21537401 NR Desc: ubiquitin
  misc_feature: Homolog of GI Number: 6433950 NR Desc: SUMO protein
  misc_feature: Homolog of GI Number: 2558518 NR Desc: Ubiquitin
  misc_feature: Homolog of GI Number: 55859483 NR Desc: ubiquitin

SEQ ID NO: 6667 - DNA, 875 bp, Zea mays
  misc_feature: Ceres CLONE ID no. 1277571
  misc_feature: Ceres CDNA ID no. 36705534
  CDS (66)..(725): REFERENCED BY SEQ ID NO: 6668
attttttcgaccgccgccgcccccagtccccgatccgaagctgtgcctcgtaccatttcgatccaatggcgccgacgtcgaagctgtcgacgggcatcaagcgcgcttcgcggtcgcacacgtaccatcgccgtgggctgtgggccatcaaggccaagaacggcggcgccttccccaaggccgacaaggccgccgccgccgtggaacccaagttctaccctgccgacgacgtcaagccccgcgttcccagcacccgcaagcctaagcctaccaagctcaggtcgagcatcacgcctgggacggtgctgatcctcctcgcagggcgcttcatggggaagagagtggtgtttctcaagcagctcaagtctggcctgctccttatctctgggcctttcaagatcaatggagtaccgatccgccgtgtgaaccagacctatgtcattgctacatcaaccaaagttgacatctctggtgttgatgtcgccaagtttgatgacaagtactttgccagggagaagaagcagaaggtgaagaagaccgagggcgagctttttgagacagaaaaggaggcatccaagtcactgcctgacttcaagaaggatgaccagaaggctgtggattctgctctgatcaaggctatcgaggctgtcctggagctgaaaacctatcttggcgcccggttctctctcagggatggtgacaagccccatgagatggtattctaagtttctagttttggagttcgtaggaagctgttttgtctgtgttcttgtacttctgagttttgtaccagtagcgaacgtttcattgtgattgaagtcttcctgccaaatattataagatctaagaaagttctatcaaaaaaaaaaaaaaaa

SEQ ID NO: 6668 - protein, 219 aa, Zea mays; identical to SEQ ID NO: 4
  misc_feature: Ceres CLONE ID no. 1277571
  misc_feature: Ceres CDNA ID no. 36705534
  misc_feature: null
  misc_feature: Useful for making plants with modulated nitrogen use efficiency
  misc_feature (1)..(49): Pfam Name: Ribosomal_L6e_N PFAM Desc: Ribosomal protein L6
  misc_feature (112)..(219): Pfam Name: Ribosomal_L6e PFAM Desc: Ribosomal protein L6e
  misc_feature: Homolog of GI Number: 50925014 NR Desc: OSJNBb0022F23.11
  misc_feature: Homolog of GI Number: 50909993 NR Desc: putative 60S ribosomal protein L6
  misc_feature: Homolog of GI Number: 57471700 NR Desc: ribosomal protein L6
  misc_feature: Homolog of GI Number: 21592925 NR Desc: putative 60S ribosomal protein L6
  misc_feature: Homolog of GI Number: 27311965 NR Desc: putative 60S ribosomal protein L6
  misc_feature: Homolog of GI Number: 19539 NR Desc: ribosomal protein YL16
  misc_feature: Homolog of GI Number: 9795602 NR Desc: Putative  60S ribosomal protein L6
  misc_feature: Homolog of GI Number: 21593910 NR Desc: 60S ribosomal protein L6
  misc_feature: Homolog of GI Number: 7208784 NR Desc: 60S ribosomal protein L6
  misc_feature: Homolog of GI Number: 57999636 NR Desc: 60S ribosomal protein L6 CgRPL6

SEQ ID NO: 6669 - DNA, 666 bp, Zea mays
  misc_feature: Ceres CLONE ID no. 1277707
  misc_feature: Ceres CDNA ID no. 25446702
  CDS (1)..(444): REFERENCED BY SEQ ID NO: 6670
aacatgaatccgccgcacccagagccgggccttccccgccgccaccaccacatggtccacctccacctcgacccgcgccaccaccaccacgtccacatccacctccgctgctgccatcatcaccaccacggcacccacctgctcgctcctgcgccgccggcccgcctcaacgacaaccagcagcggcacccggctcccgtactcttccccaacacctacccgaacccaagcgcggcgcctgggcagccagagccgccccgcgccgccgtaagggaggacgtggaggatttggatcccgagccggggctgctgcacgcggaggaggaggaggaggaagacgaggagccggtgttcgtacttacggacgagtgggcggagttcttcgccaaatccgaggccaagagaagactggctaaacagcagaagaagaagagccggaagtgatctgatgtgtctgggccatcatcagacagtctggccagagtctggagctcgggaagagaacggacgaatagcttgtcaacatatacgcatcgctttgccaggagttcattatgttttttttttactttatacagagagttacgagttcacatgatctaaacactgtaaccttttgagttcacatcatctgaaatctgtgctgtaccaaaaaaaaaaaaaaaa

SEQ ID NO: 6670 - protein, 130 aa, Zea mays
  misc_feature: Ceres CLONE ID no. 1277707
  misc_feature: Ceres CDNA ID no. 25446702
  misc_feature: Homolog of GI Number: 34906974 NR Desc: P0004D12.28
  misc_feature: Homolog of GI Number: 6523547 NR Desc: hydroxyproline
  misc_feature: Homolog of GI Number: 322747 NR Desc: extensin
  misc_feature: Homolog of GI Number: 1405821 NR Desc: SULFATED SURFACE GLYCOPROTEIN 185
  misc_feature: Homolog of GI Number: 21992 NR Desc: extensin
  misc_feature: Homolog of GI Number: 72161182 NR Desc: initiation factor 2:Small GTP
  misc_feature: Homolog of GI Number: 66777112 NR Desc: Phospholipid/glycerol acyltransferase
  misc_feature: Homolog of GI Number: 258215 NR Desc: NaPRP3
  misc_feature: Homolog of GI Number: 15145793 NR Desc: basic proline
  misc_feature: Homolog of GI Number: 14253163 NR Desc: VMP4 protein
MVHLHLDPRHHHHVHIHLRCCHHHHHGTHLLAPAPPARLNDNQQRHPAPVLFPNTYPNPSAAPGQPEPPRAAVREDVEDLDPEPGLLHAEEEEEEDEEPVFVLTDEWAEFFAKSEAKRRLAKQQKKKSRK

SEQ ID NO: 6671 - DNA, 762 bp, Zea mays
  misc_feature: Ceres CLONE ID no. 1277743
  misc_feature: Ceres CDNA ID no. 36590936
  CDS (223)..(447): REFERENCED BY SEQ ID NO: 6672
gaattttcttactgctggctgctgctcgccattgctgaccacactcacagcagcctccctccccctcgccaccgaaagctagccgccgttgcttgcaagcctcgccaactgccgctatatatacgcatacaagcgcgcgccgcgcacgcgcagcacgcaatcagaacagtggttgctggagagcgcgcgggccgggcaaggagcaaggacgagggatcgtcgatggtgttcttctgcttcctggtggagcagcggcggacggtgcggagcagcaagccggcggcggggatctgctcgcgctgcggcgggtgcgccagcgtggcggacatggagaccgccaccagggtctgctacctgctcaccgtgcaccgccgcacctggcgcgccatcatctgcaccttctgcggcgccatgctcaagtcctaccgccactacaggctctactgactctcggccgatcgatggagttgttcgagtcggtgggtggtggtggaacgcgcgccttcattcttcgcgggcctcgcggcttgctgtgaggtgtagtgatgagctacttacggtactagctagtgatctgttcttcctgatgagtcctctcctgactgggtatcttgctcgcgactgctactagattttttttttgtttttgttttgttcctgcttgattatgctgctggggtttgcagatggttgtaatggcagagctgcgtgtaaatatagttatgtgtcatccaaaaaaaaaaaacaaaaaaaaaaaaaaaa

SEQ ID NO: 6672 - protein, 74 aa, Zea mays; identical to SEQ ID NO: 4704
  misc_feature: Ceres CLONE ID no. 1277743
  misc_feature: Ceres CDNA ID no. 36590936

SEQ ID NO: 6673 - DNA, 676 bp, Zea mays
  misc_feature: Ceres CLONE ID no. 1277748
  misc_feature: Ceres CDNA ID no. 29191416
  CDS (100)..(486): REFERENCED BY SEQ ID NO: 6674
agatccgtgttccgtgtccgcgtccagtgtgtccgctactccgctccccctcagtcctcagttcctcacctagcggtagcgtgcgcgcgggagacgtagatggcggcttcggaggcggcagcggcggcggcaacaccggtgacgccgacagaggggacggtgatcgcgatccacagcctggaggagtggagcatccagatcgaggaggccaacagcgccaagaagctggtggtgattgacttcactgcaacatggtgtcctccgtgccgcgccatggctccaatttttgctgatatggccaagaagtccccaaatgttgttttcctgaaagttgatgtggatgaaatgaagaccattgctgagcaattcagcgtagaggccatgccaacattcctgttcatgagggagggcgacgtcaaggacagggtcgttggcgcagcaaaggaagagctagcaaggaagcttgaactacacatggcctcgtagatcagtgatgccgtaatgtagtattcgcctaaataagaggacgcctcgcctcaactctgagaaaactagtgcttctgtgatggtaattcgtatgagagagtgccccctttggtggtacttcttcgtatgtagtattaactcctgtcttaatatgttgccctgcttgtgcttttcaaaaaaaaaaaaaaaa

SEQ ID NO: 6674 - protein, 128 aa, Zea mays
  misc_feature: Ceres CLONE ID no. 1277748
  misc_feature: Ceres CDNA ID no. 29191416
  misc_feature (21)..(127): Pfam Name: Thioredoxin PFAM Desc: Thioredoxin
  misc_feature: Homolog of GI Number: 66841002 NR Desc: thioredoxin h1 protein
  misc_feature: Homolog of GI Number: 50932277 NR Desc: putative thioredoxin H
  misc_feature: Homolog of GI Number: 12082335 NR Desc: thioredoxin h
  misc_feature: Homolog of GI Number: 2995380 NR Desc: thioredoxin H
  misc_feature: Homolog of GI Number: 8980491 NR Desc: thioredoxin h
  misc_feature: Homolog of GI Number: 32186042 NR Desc: thioredoxin h isoform 2
  misc_feature: Homolog of GI Number: 21537330 NR Desc: thioredoxin
  misc_feature: Homolog of GI Number: 1388084 NR Desc: thioredoxin h
  misc_feature: Homolog of GI Number: 25405885 NR Desc: protein F27F5.21
  misc_feature: Homolog of GI Number: 50251453 NR Desc: putative tetratricoredoxin
  misc_feature: Useful for making larger plants
  misc_feature: Useful for sterility
MAASEAAAAAATPVTPTEGTVIAIHSLEEWSIQIEEANSAKKLVVIDFTATWCPPCRAMAPIFADMAKKSPNVVFLKVDVDEMKTIAEQFSVEAMPTFLFMREGDVKDRVVGAAKEELARKLELHMAS

SEQ ID NO: 6675 - DNA, 751 bp, Zea mays
  misc_feature: Ceres CLONE ID no. 1277791
  misc_feature: Ceres CDNA ID no. 25446613
  CDS (145)..(495): REFERENCED BY SEQ ID NO: 6676
aacacatccatcctcgctagctcgctcgctctccttgcaactccagtgctgctcactgccactgccagcagatcgagctgctccgtctcacaaaccctcttgctttgctgctgcacctgcaagtctgcaaccgcgcacacagagatgtcgacgacggtgagccgtgcgtccctcgaccagaagctcgccctcgccaagcgttgctcccgagaggcgaccctcgccggagccaaggcggcagcggtggcgactatcgcctccgcgatccccaccctggccagcgtgcggatgctgccatgggccaaggccaacatcaaccccaccggccaggcgctcatcgtctccacggtggctgggatggcctacttcatcgccgccgacaagaagatcctgtcgctggcgaggcgccactcgttcgagcaagcccctgagcacctcaagaacacctccttccagggcaccggccgtccccacccagccttcttcaggccgtgagacgagacctccgtccagagctagctacctacctctttttccagtttgccaatgcaagcaccaaatgcccaccgatgcatgcctgaataaactactgtaattgcgaggctgctgaacgtcgatgcgctagtataactactactactacgaggctagctgcgcgctgaacacagcgctgtaaagtagtgttggtgtgctaaattcagaatgtgtaagtttaatttatgttattaccagttaaaaaaaaaaaaaaaaa

SEQ ID NO: 6676 - protein, 116 aa, Zea mays; identical to SEQ ID NO: 4910
  misc_feature: Ceres CLONE ID no. 1277791
  misc_feature: Ceres CDNA ID no. 25446613
  misc_feature (12)..(90): Pfam Name: ENOD93 PFAM Desc: Early nodulin 93 ENOD93 protein
  misc_feature: Homolog of GI Number: 50948753 NR Desc: putative early nodulin
  misc_feature: Homolog of GI Number: 50948737 NR Desc: putative early nodulin
  misc_feature: Homolog of GI Number: 50948739 NR Desc: putative early nodulin
  misc_feature: Homolog of GI Number: 50948751 NR Desc: putative early nodulin
  misc_feature: Homolog of GI Number: 50948749 NR Desc: putative early nodulin
  misc_feature: Homolog of GI Number: 50948755 NR Desc: putative early nodulin
  misc_feature: Homolog of GI Number: 4809191 NR Desc: early nodulin
  misc_feature: Homolog of GI Number: 218262 NR Desc: early nodulin
  misc_feature: Homolog of GI Number: 4731119 NR Desc: root
  misc_feature: Homolog of GI Number: 50948733 NR Desc: Similar to OsENOD93a gene for early nodulin

SEQ ID NO: 6677 - DNA, 714 bp, Zea mays
  misc_feature: Ceres CLONE ID no. 1277815
  misc_feature: Ceres CDNA ID no. 29191417
  CDS (220)..(513): REFERENCED BY SEQ ID NO: 6678
gttcaatctccttgcccgttgtgctctctctcttcattcgttcccggcctcaccccgagccagtcgtctcgctagggtttcgccgccgccgccatgcctcgccgcagctcaggaaggtctgccccacgcccagctccccgtgctgcttcactgaggaacccgccacagccagcacgccaggctcctcctccagctcctgttcgagatggtggtggctccatgtttggaggaattgggtccaccattgctcaaggtatggcgtttggcacgggtagtgccatggcacacagggctgttgactctgtattaggtccccggaccatccagcatgagactcttgccacagaagctcctgctgctgcccctgctgctccagcgatgaatgctgatgcttgcagcttccattctaaggctttccaagattgtctcaacaactatggcagcgagatcagcaagtgccagttctacctagacatgctgaacgagtgccgccgtggtggtgtgtctgtctaagctgcctctgggattattcatggattttctttccggatgggggtatctcattaataaggcaccgtgaaacttcgaccatctccacagcttgaaaccaaacttcctgggattaatttattttgttatcctatggtgttggaacagactttttgtctcttgatcataaatatttaaacgaacctgttaaaaaaaaaaaaaaaa

SEQ ID NO: 6678 - protein, 139 aa, Zea mays; identical to SEQ ID NO: 130
  misc_feature: Ceres CLONE ID no. 1277815
  misc_feature: Ceres CDNA ID no. 29191417
  misc_feature (94)..(135): Pfam Name: CHCH PFAM Desc: CHCH domain
  misc_feature: Homolog of GI Number: 52139112 NR Desc: Similar to Nur77 downstream protein 2
  misc_feature: Homolog of GI Number: 33413978 NR Desc: Nur77 downstream protein 2

SEQ ID NO: 6679 - DNA, 538 bp, Zea mays
  misc_feature: Ceres CLONE ID no. 1277889
  misc_feature: Ceres CDNA ID no. 25446528
  CDS (68)..(391): REFERENCED BY SEQ ID NO: 6680
agtgtcacacatagaccatacatctcacttcgccaaaaaaattccgtcaacagttgaagttatacccatggcaaaactactcttgggtttgctccttgcccttgctattctagggacaacatcggctgctggttgtgtacaagacgcggaagacatgaaacgagagtgcaagcagtttgagctattcccagcgaacccaaagttgccaccgtcggcagcatgttgtgctgtgtggaagagggcagatgttccatgcctatgcaaatatgttaacaaggaagtagagaaggtatggtgcatggagaaggttgtgtacgtcgccaactattgtaagaggccgtttcaacctggctacaagtgcgggagttatacagttcctcttagtatgtaaaaggagtggttgggacatgtggtactctctcctagaactttaatttgagatttgtaacatgtgagagactattgagaataatatgtatggagtaatatgcttccttcttttaaactgatctaattacttcaaaaaaaaaaaaaaaaa

SEQ ID NO: 6680 - protein, 107 aa, Zea mays
  misc_feature: Ceres CLONE ID no. 1277889
  misc_feature: Ceres CDNA ID no. 25446528
  misc_feature: Homolog of GI Number: 66840998 NR Desc: 5a2 protein
  misc_feature: Homolog of GI Number: 34908944 NR Desc: P0691E06.24
  misc_feature: Homolog of GI Number: 34908942 NR Desc: P0691E06.23
  misc_feature: Homolog of GI Number: 32395579 NR Desc: seed specific protein Bn15D18B
  misc_feature: Homolog of GI Number: 42567284 NR Desc: protease inhibitor/seed storage/lipid transfer protein
MAKLLLGLLLALAILGTTSAAGCVQDAEDMKRECKQFELFPANPKLPPSAACCAVWKRADVPCLCKYVNKEVEKVWCMEKVVYVANYCKRPFQPGYKCGSYTVPLSM

SEQ ID NO: 6681 - DNA, 1339 bp, Zea mays
  misc_feature: Ceres CLONE ID no. 1277891
  misc_feature: Ceres CDNA ID no. 25446962
  CDS (43)..(1125): REFERENCED BY SEQ ID NO: 6682
ctctccttccaactcttgtttctgcaacgccagggcgcaaccatggatcagcagcagcaagggccggcggccaggcggatggccacgctcgcctcccacctgcgccatccctccgtctctcaccctcagatggaagatgttcccctcttgaggggatccaattgccgtgcaaaaggtgcggcgccaggcttcaaagtcgcgatcttgggtgcagcaggtgggatcgggcagccacttgcgctattgatgaagatgaaccctcttgtttcggtgctccatctatacgatgtcgtcaacgcacctggtgtcacagccgacatcagccacatgaacactggtgctgtggtacgtggcttcttgggccagccacagttggaaaatgccctggctggaatggatcttgtaataattcctgctggtgtccctcggaaacctgggatgacaagggatgatttgttcaacataaatgctggaatagtccgtaccctgtgtgaaggaattgcaaaatgctgccctaatgcaattgtgaatgtgatcagtaatcctgtcaactctaccgtcccaattgctgctgaagttttcaagaaagctggaacttatgaccctaagcggcttttaggtgtgaccacacttgacgtagtgagagcaaatacgtttgtgggagaggttcttggacttgaccccagagaggtaaatgttccagtcattggtgggcatgcaggaattacgatactaccactcctttcacaggtgaatccttcctgctcattcacctcggaagaggttaaatacctcacttctcgcatacagaatggtgggacagaagtagtcgaggctaaagctggagcaggatcagcaactctttcaatggcttatgcagctgccaaatttgcagatgcttgcctgagaggattgcgtggtgatgctgggataatagagtgctcttatgtggcttctcaggtcacagagttgcctttctttgcatccaaagtgcggctagggcgatgtggcattgaggagatcctaccacttggaccattaaatgagttcgagagatctggtctggagaaggcaaagaaagagctggcggagagtatccagaagggcgtctctttcatcaagtgaggccggcgacggccagcccaacatagaaatagatgtggcgtgtttctgcttcttgagaactcatcttgttatctctctgtaagactgagtgcatgacacgaataatccacgtacacggctgtactaaaaagatgatgaatctgtggtggctaaaaaaagggaaatagaaaagtctggtaataaaagttgtttctgaataaaaaaaaaaaaaaaa

SEQ ID NO: 6682 - protein, 360 aa, Zea mays
  misc_feature: Ceres CLONE ID no. 1277891
  misc_feature: Ceres CDNA ID no. 25446962
  misc_feature (195)..(359): Pfam Name: Ldh_1_C PFAM Desc: lactate/malate dehydrogenase
  misc_feature (50)..(193): Pfam Name: Ldh_1_N PFAM Desc: lactate/malate dehydrogenase
  misc_feature: Homolog of GI Number: 60593476 NR Desc: Chain B
  misc_feature: Homolog of GI Number: 1346501 NR Desc: Malate dehydrogenase
  misc_feature: Homolog of GI Number: 3183079 NR Desc: Malate dehydrogenase
  misc_feature: Homolog of GI Number: 52139820 NR Desc: glyoxisomal malate dehydrogenase
  misc_feature: Homolog of GI Number: 695311 NR Desc: glyoxysomal malate dehydrogenase
  misc_feature: Homolog of GI Number: 169977 NR Desc: malate dehydrogenase
  misc_feature: Homolog of GI Number: 319832 NR Desc: malate dehydrogenase
  misc_feature: Homolog of GI Number: 77557142 NR Desc: malate dehydrogenase
  misc_feature: Homolog of GI Number: 77557143 NR Desc: malate dehydrogenase
  misc_feature: Homolog of GI Number: 31745229 NR Desc: putative  glyoxysomal malate dehydrogenase
  misc_feature: Useful for making bigger plants
  misc_feature: Useful for making ornamental plants with modified flowers
MDQQQQGPAARRMATLASHLRHPSVSHPQMEDVPLLRGSNCRAKGAAPGFKVAILGAAGGIGQPLALLMKMNPLVSVLHLYDVVNAPGVTADISHMNTGAVVRGFLGQPQLENALAGMDLVIIPAGVPRKPGMTRDDLFNINAGIVRTLCEGIAKCCPNAIVNVISNPVNSTVPIAAEVFKKAGTYDPKRLLGVTTLDVVRANTFVGEVLGLDPREVNVPVIGGHAGITILPLLSQVNPSCSFTSEEVKYLTSRIQNGGTEVVEAKAGAGSATLSMAYAAAKFADACLRGLRGDAGIIECSYVASQVTELPFFASKVRLGRCGIEEILPLGPLNEFERSGLEKAKKELAESIQKGVSFIK

SEQ ID NO: 6683 - DNA, 705 bp, Zea mays
  misc_feature: Ceres CLONE ID no. 1277927
  misc_feature: Ceres CDNA ID no. 36591155
  CDS (71)..(439): REFERENCED BY SEQ ID NO: 6684
accaaaggtaccttgcaatcacaacgaacagaagctctcgatctcaccgacaccgaggaagaagagatcaatggcgtccgagcagggagtcgtgatcgcgtgccacagcaaggctgagttcgacgcccacatgaccaaggcccaggaagccggcaagctggtggtcatcgacttcactgccgcctggtgcggtccatgccgcgccatcgccccactgttcgtcgaacacgccaagaagttcactcaggtcgtcttcctgaaggtggacgtggacgaagtgaaggaagtcaccgcggcctacgaggtcgaggcgatgccgaccttccacttcgtcaagaacggcaagacggtcgcgaccatcgtgggtgccaggaaggacgagctcctggcccagatcgagaagcatgccgcgcctgcgcctgcgtctgcgtctgcctaaaggagatcagtcgtcgccgtcaataagggccagcacgtatggctgtaaatgttgtcgttatcagttctggctttgtcgtttgtgggcgattgtgaactagtagtatgtttgtttctatccgagccggaggcgatacttaaccatggatacttgttgtgagttcgtttctgttcgcgtgtgactcttgaattgaatcaaccagctcaccactgcaccaggccgtggtgagtggtgacagtgatttcctgttaaaaaaaaaaaaaaaa

SEQ ID NO: 6684 - protein, 122 aa, Zea mays; identical to SEQ ID NO: 1072
  misc_feature: Ceres CLONE ID no. 1277927
  misc_feature: Ceres CDNA ID no. 36591155
  misc_feature (8)..(114): Pfam Name: Thioredoxin PFAM Desc: Thioredoxin
  misc_feature: Homolog of GI Number: 66841004 NR Desc: thioredoxin h2 protein
  misc_feature: Homolog of GI Number: 82407383 NR Desc: Chain A
  misc_feature: Homolog of GI Number: 50934769 NR Desc: Thioredoxin H
  misc_feature: Homolog of GI Number: 27461140 NR Desc: thioredoxin H
  misc_feature: Homolog of GI Number: 32186040 NR Desc: thioredoxin h isoform 1
  misc_feature: Homolog of GI Number: 20047 NR Desc: thioredoxin
  misc_feature: Homolog of GI Number: 53748515 NR Desc: thioredoxin 1
  misc_feature: Homolog of GI Number: 40287476 NR Desc: thioredoxin
  misc_feature: Homolog of GI Number: 55670844 NR Desc: Chain A
  misc_feature: Homolog of GI Number: 21617958 NR Desc: thioredoxin h

SEQ ID NO: 6685 - DNA, 643 bp, Zea mays
  misc_feature: Ceres CLONE ID no. 1277975
  misc_feature: Ceres CDNA ID no. 29191418
  CDS (68)..(412): REFERENCED BY SEQ ID NO: 6686
gactactactgcagcgagaggaaagagaaaaaggaaaggaaaggacaaaggagcggcggcgaggtctatggcgtcgacggctgggtacctggcgcggcgggcggcgcagaaggagcgggtgcgcctgctctaccgcagggcgctcaaggacacgctcaactgggccgtccaccgccacctcttctaccaggacgcgtcggatctccgggacaagttcgaggccaaccgacacgtggataacctggacgtggtcgataggctcatcgacgatgcggaggctcagtacaggaacttccagcaccccgatccctacattgttccatgggcaccaggcggcactaaattcacaagaaacccccctccacctcaagggatcgagatcatctacaattatggcaaggaggaccagtaaacaagagtcctgcaagcggggggcagaacttccacagttccaaatcacttcctgtttaatcgagttgttgtacgagaaataagaatggaaattactggactccatccatgcttctcatttgcttgttctgataatcatgtgctcttcatctagtgcatattgaagtcatgtttcctgtcataaaatggaactgtactatctttgtcgtgcagtttaaaaaaaaaaaaaaaa

SEQ ID NO: 6686 - protein, 114 aa, Zea mays; identical to SEQ ID NO: 68
  misc_feature: Ceres CLONE ID no. 1277975
  misc_feature: Ceres CDNA ID no. 29191418
  misc_feature (13)..(78): Pfam Name: Complex1_LYR PFAM Desc: Complex 1 protein
  misc_feature: Homolog of GI Number: 53792931 NR Desc: complex 1 family protein
  misc_feature: Homolog of GI Number: 24111283 NR Desc: At4g34700/T4L20_280
  misc_feature: Homolog of GI Number: 29789148 NR Desc: NADH dehydrogenase
  misc_feature: Homolog of GI Number: 28461191 NR Desc: NADH dehydrogenase
  misc_feature: Homolog of GI Number: 50731984 NR Desc:  similar to NADH2 dehydrogenase
  misc_feature: Homolog of GI Number: 6274550 NR Desc: NADH dehydrogenase
  misc_feature: Homolog of GI Number: 4894370 NR Desc: NADH
  misc_feature: Homolog of GI Number: 55631220 NR Desc:  similar to NADH dehydrogenase
  misc_feature: Homolog of GI Number: 57095338 NR Desc:  similar to NADH2 dehydrogenase
  misc_feature: Useful for making taller plants and plants with longer inflorescences
  misc_feature: Useful for sterility

SEQ ID NO: 6687 - DNA, 865 bp, Zea mays
  misc_feature: Ceres CLONE ID no. 1278094
  misc_feature: Ceres CDNA ID no. 25446614
  CDS (60)..(764): REFERENCED BY SEQ ID NO: 6688
atatcgcacatattattgagaccaactagcaacatagaaagcacaatagtgtaccaacaatggcagccaaaatattttgcctccttatgctccttggtctttctgcaagtgctgctacggcgaccattttcccgcaatgctcgcaagctcctatagcttcccttcttcccccgtacctctcaccagcggtgtcttcggtatgtgaaaacccaattcttcaaccctacaggatccaacaggcaatcacagctggcatcttacctttatcacccttgttcctccaacaatcatcagccctattacatcagttacctttggtgcatttattggcacaaaacatcagggcacaacaactacaacaacttgtgctagcaaaccttgctgcctactctcagcaacagcagtttcttccattcaaccaactagctgcattgaactctgcttcttatttgcaacaacaacaactaccattcagccagctacctgctgcctacccccagcaatttcttccattcaaccaactggcagcattgaactctcctgcttatttacagcagcaacaactactaccattcagccagctagctggtgtgagccctgctaccttcttgatacaaccacagttgttgccgttctaccagcacgctgcgcctaacgctggcaccctcttacaactgcaacaattgctgccattcaaccaacttgctttgacaaacccagcagcgttctaccaacaacccatcattggtggtgccctcttttagatttcttatgagttatagttcaataataaagttttttgtctgatgtttgtggcttcccagaaataagaaagtacatttctagattaaaaaaaaaaaaaaaa

SEQ ID NO: 6688 - protein, 234 aa, Zea mays
  misc_feature: Ceres CLONE ID no. 1278094
  misc_feature: Ceres CDNA ID no. 25446614
  misc_feature (99)..(146): Pfam Name: Zein PFAM Desc: Zein seed storage protein
  misc_feature: Homolog of GI Number: 168691 NR Desc: zein
  misc_feature: Homolog of GI Number: 16305125 NR Desc: 19kD alpha zein B1
  misc_feature: Homolog of GI Number: 72315 NR Desc: 19K zein precursor
  misc_feature: Homolog of GI Number: 224509 NR Desc: zein E19
  misc_feature: Homolog of GI Number: 22446 NR Desc: 19 kDa zein
  misc_feature: Homolog of GI Number: 809117 NR Desc: zein
  misc_feature: Homolog of GI Number: 22534 NR Desc: zein
  misc_feature: Homolog of GI Number: 535020 NR Desc: zein Zd1
  misc_feature: Homolog of GI Number: 100940 NR Desc: zein zA1
  misc_feature: Homolog of GI Number: 41745908 NR Desc: low molecular weight glutenin
MAAKIFCLLMLLGLSASAATATIFPQCSQAPIASLLPPYLSPAVSSVCENPILQPYRIQQAITAGILPLSPLFLQQSSALLHQLPLVHLLAQNIRAQQLQQLVLANLAAYSQQQQFLPFNQLAALNSASYLQQQQLPFSQLPAAYPQQFLPFNQLAALNSPAYLQQQQLLPFSQLAGVSPATFLIQPQLLPFYQHAAPNAGTLLQLQQLLPFNQLALTNPAAFYQQPIIGGALF

SEQ ID NO: 6689 - DNA, 866 bp, Zea mays
  misc_feature: Ceres CLONE ID no. 1278109
  misc_feature: Ceres CDNA ID no. 25445633
  CDS (216)..(551): REFERENCED BY SEQ ID NO: 6690
acctttcggggtcaccggcttctgctttcttgctacgccaccgcgcctctcgtctatttatggagtcccccgatccatgaagccggtgcaggccgagagttgtcaacgacgacgtctgccggcagtgctcctgctcctcctcctccttcccggccgccgcgcgagcttgggttagtgtctcttcttcgcggaggcctgtgagaggagccatcatcatggccgctgttgagactgttgtcctcaaggttgctatgtcatgcgagggctgcgccggggcggtcagaagagtgctctccaagatggaaggagttgaaaccttcgacatagacctcaaggagcagaaggtgacagtcaaaggcaatgtcaagcctgaggacgtcttccagacggtttccaagtcggggaagaggacctcgtactgggagggcgaagccacggccccggacgctgcggcggctccagaagccgaagcagctcccagcaccgcggcagaagcgcctcctgctgctccggcggcgccagagatcaccccagccaaagctgacgcctgatcgtcacgctattattcactcacatgtgatgctgtgcggctgcgactcctaaaccttaaatctagaaatagctggggattgagtttgcattgcatcgtgttcttgccggtctagcaagtgactataagaataatggaataaacgatgacccagtgtgtgtatgatttccgttctgaagaacaacacatcccttgcaggattgttgttcagtagattttacttgtaccgcggctttggagttccccaaaggactttgttcaagaacttcttctcacaggaaataacatgtgagtgcagtcaaaaaaaaaaaaaaaa

SEQ ID NO: 6690 - protein, 111 aa, Zea mays
  misc_feature: Ceres CLONE ID no. 1278109
  misc_feature: Ceres CDNA ID no. 25445633
  misc_feature (7)..(68): Pfam Name: HMA PFAM Desc: Heavy
  misc_feature: Homolog of GI Number: 37651975 NR Desc: chopper chaperone
  misc_feature: Homolog of GI Number: 56202338 NR Desc: putative copper chaperone
  misc_feature: Homolog of GI Number: 50909185 NR Desc: copper chaperone homolog CCH
  misc_feature: Homolog of GI Number: 21553785 NR Desc: copper homeostasis factor
  misc_feature: Homolog of GI Number: 6525011 NR Desc: copper chaperone homolog CCH
  misc_feature: Homolog of GI Number: 53748477 NR Desc: copper chaperone
  misc_feature: Homolog of GI Number: 47176684 NR Desc: copper chaperone
  misc_feature: Homolog of GI Number: 30039180 NR Desc: copper chaperone
  misc_feature: Homolog of GI Number: 50942155 NR Desc: putative copper chaperone
  misc_feature: Homolog of GI Number: 18655401 NR Desc: At1g66240/T6J19_6
MAAVETVVLKVAMSCEGCAGAVRRVLSKMEGVETFDIDLKEQKVTVKGNVKPEDVFQTVSKSGKRTSYWEGEATAPDAAAAPEAEAAPSTAAEAPPAAPAAPEITPAKADA

SEQ ID NO: 6691 - DNA, 741 bp, Zea mays
  misc_feature: Ceres CLONE ID no. 1278117
  misc_feature: Ceres CDNA ID no. 25446615
  CDS (93)..(563): REFERENCED BY SEQ ID NO: 6692
acacactcgactctcctctctcgcatccgcagcctttcgagctctactccaccccctcgatctcgaagcgcagcagcagcagtcaggcggccatggacgcgagcgtagccggagccggcgggaaggcgaagaagggcgcggccgggcgcaaggccggcgggccgaggaagaagtcggtgacgaggtccgtcaaggccgggctgcagtttcccgtcggccgcatcgggcggtacctgaagaagggccggtacgcgcagcgcgtcggcacgggcgcccccgtctacctggccgccgtcctcgagtacctggccgccgaggtgctggagctggccggcaacgctgccaaggacaacaagaagacccgcatcatcccgcgccacgtgctccttgccatccgcaacgacgaggagctcggcaagctgctgtccggcgtcaccatcgcccacggcggcgtcctccccaacatcaacccggtgctcctgcccaagaagaccgctgagaaggcggcggccaaggaggccaagtcgcccaagaaggccgccaagtcccccaagaaggcatagaggggcgggcgcctttaccgctgtgatgttgaatgctcgtgttcagtagatctttacgtctgtagtgtcgtcgttgttattggaactggttagtagatctgtgcattgtggttgaaacgtgattccctgatttcagaaatctaatttgcaatttgggtgcacaaaaaaaaaaaaaaaa

SEQ ID NO: 6692 - protein, 156 aa, Zea mays
  misc_feature: Ceres CLONE ID no. 1278117
  misc_feature: Ceres CDNA ID no. 25446615
  misc_feature (31)..(106): Pfam Name: Histone PFAM Desc: Core histone H2A/H2B/H3/H4
  misc_feature: Homolog of GI Number: 34914498 NR Desc: putative histone H2A
  misc_feature: Homolog of GI Number: 729671 NR Desc: Histone H2A
  misc_feature: Homolog of GI Number: 47026912 NR Desc: histone H2A
  misc_feature: Homolog of GI Number: 47026919 NR Desc: histone H2A
  misc_feature: Homolog of GI Number: 7649159 NR Desc: histone H2A
  misc_feature: Homolog of GI Number: 121974 NR Desc: Histone H2A.2.1
  misc_feature: Homolog of GI Number: 121982 NR Desc: Histone H2A.2.2
  misc_feature: Homolog of GI Number: 122006 NR Desc: Histone H2A
  misc_feature: Homolog of GI Number: 68441405 NR Desc:  similar to histone H2A
  misc_feature: Homolog of GI Number: 48116277 NR Desc: similar to CG31618
MDASVAGAGGKAKKGAAGRKAGGPRKKSVTRSVKAGLQFPVGRIGRYLKKGRYAQRVGTGAPVYLAAVLEYLAAEVLELAGNAAKDNKKTRIIPRHVLLAIRNDEELGKLLSGVTIAHGGVLPNINPVLLPKKTAEKAAAKEAKSPKKAAKSPKKA

SEQ ID NO: 6693 - DNA, 567 bp, Zea mays
  misc_feature: Ceres CLONE ID no. 1278147
  misc_feature: Ceres CDNA ID no. 25447048
  CDS (90)..(326): REFERENCED BY SEQ ID NO: 6694
atttgctgcgtctccttgcccgcgccgccgctcgccgtttgcccctcgtctccgcaccgcgcgctgttgtccatccttgtgcagcaaaaatgacggctggctacattgttggctcactggtcggatcctttgccattgcatacctgtgtgacacatttatctctgacaagaaggcatttggaggtagcacccccaagactgtttctgagaaggagtggtggcaagccacagacaccaagttccaggcctggcctcgcactgctgggccaccggttgtcatgaaccccatcagccgccagaacttcatcgtcaagtccactgagtaggtttgggctggagaagctggttctgcgacttggtgccgccatgaagccagagttccttttctaaggtcttaatcaattgtaataaaacgaaatacagtcaggatttttttgtgatttttacttgatctgtgagcgaacactgggtctttcaccttgtcatccaatgggttctgctccttggtgaaatctcccaccagccagtaaagaactgggttgttttcaaagaaaaaaaaaaaaaaaa

SEQ ID NO: 6694 - protein, 78 aa, Zea mays; identical to SEQ ID NO: 674
  misc_feature: Ceres CLONE ID no. 1278147
  misc_feature: Ceres CDNA ID no. 25447048
  misc_feature: Homolog of GI Number: 34897944 NR Desc: ozone
  misc_feature: Homolog of GI Number: 34897932 NR Desc: ozone
  misc_feature: Homolog of GI Number: 15223334 NR Desc: ozone
  misc_feature: Homolog of GI Number: 21387039 NR Desc: stress
  misc_feature: Homolog of GI Number: 6715639 NR Desc: T25K16.16
  misc_feature: Homolog of GI Number: 50910341 NR Desc: putative stress
  misc_feature: Homolog of GI Number: 7739775 NR Desc: stress
  misc_feature: Homolog of GI Number: 50925981 NR Desc: OSJNBa0067K08.15

SEQ ID NO: 6695 - DNA, 973 bp, Zea mays
  misc_feature: Ceres CLONE ID no. 1278284
  misc_feature: Ceres CDNA ID no. 36706850
  CDS (94)..(693): REFERENCED BY SEQ ID NO: 6696
cttttcctagggtttcgtcgcttccagccgccgccgcgtccgcctcgccaagcgcagcagccgccgcagcacatctctctctcgatctcagccatggcggaggtggagcagcaacaggacacgccgaagctgttcaaccgctggaccttcgatgatgtccaggtgaacgacatctcgctgaacgactacctcgctgtgaacgcgacgaagcacgcgatgtacctgccgcacaccgcggggcgttactccaagaagcggttccgcaaggcgcagtgcccgatcgtcgagcgcctcacaaactccctcatgatgcacgggcgcaacaacggcaagaaggtcatggctgtccgcatcatcaagcataccctggagatcattcacctgctcaccgatgccaaccccatccaggtcgtcgtcgacgcgatcatcaacagtggaccccgtgaggatgccacccgtattggttccgctggtgttgtgaggaggcaggccgtggatatctcacccctgaggagggtgaaccaggccatctacctcctcaccactggtgccagggagagtgctttccggaacatcaaaaccattgccgagtgccttgcagatgagctgatcaacgctgccaagggctcatccaacagttacgccatcaagaagaaggacgagattgagcgtgttgccaaggccaaccgttgaacggagcttgtatcctggtgcactctgcgctggaaacttttatgttactggcagtcgtatcggttcctgttttaccaatgtttagagttttttgagacctatatgcggttttggttttcagtgcacaattaaaattactgagtaatgtagttgattgggaacagaaagtgcctggtttaccgaactccatttctcttgtcatttttctttattctgtagtctgtattatgtatgcgtatgagtattgagatgattctgcatttgaaaaaaaaaaaaaaaa

SEQ ID NO: 6696 - protein, 199 aa, Zea mays
  misc_feature: Ceres CLONE ID no. 1278284
  misc_feature: Ceres CDNA ID no. 36706850
  misc_feature: The plant flowers significantly late compared to wild-type.
  misc_feature: The plant is abnormally small.
  misc_feature: Useful for making plants with modulated biomass
  misc_feature: Useful for making plants with modulated flowering time
  misc_feature (46)..(199): Pfam Name: Ribosomal_S7 PFAM Desc: Ribosomal protein S7p/S5e
  misc_feature: Homolog of GI Number: 77550926 NR Desc: ribosomal protein S7
  misc_feature: Homolog of GI Number: 34893994 NR Desc: putative 40S ribosomal protein S5
  misc_feature: Homolog of GI Number: 4056502 NR Desc: 40S ribosomal protein S5
  misc_feature: Homolog of GI Number: 3043428 NR Desc: 40S ribosomal protein S5
  misc_feature: Homolog of GI Number: 6671950 NR Desc: putative 40S ribosomal protein S5
  misc_feature: Homolog of GI Number: 21617886 NR Desc: 40S ribosomal protein S5
  misc_feature: Homolog of GI Number: 40748265 NR Desc: 40S ribosomal protein S5
  misc_feature: Homolog of GI Number: 32400987 NR Desc: 40S ribosome protein S5
  misc_feature: Homolog of GI Number: 83582438 NR Desc: 40S ribosomal protein S5
  misc_feature: Homolog of GI Number: 67083821 NR Desc: 40S ribosomal protein S5
MAEVEQQQDTPKLFNRWTFDDVQVNDISLNDYLAVNATKHAMYLPHTAGRYSKKRFRKAQCPIVERLTNSLMMHGRNNGKKVMAVRIIKHTLEIIHLLTDANPIQVVVDAIINSGPREDATRIGSAGVVRRQAVDISPLRRVNQAIYLLTTGARESAFRNIKTIAECLADELINAAKGSSNSYAIKKKDEIERVAKANR

SEQ ID NO: 6697 - DNA, 693 bp, Zea mays
  misc_feature: Ceres CLONE ID no. 1278456
  misc_feature: Ceres CDNA ID no. 29191419
  CDS (131)..(532): REFERENCED BY SEQ ID NO: 6698
attcgaccagtctgtcttcgctagggtttttagcccgtataagagccccttcctcactccggaaccccattccccgccgcctcgcgcccccgctcgcttcacttctctaggtgcgcaccgatcagaagagatggcggtgccgctgctgacgaagaagatcgtgaagaagcgggtcaagcagttcaagaggccccacctcgaccgctacaagtgccttaagccaagctggcgcaggccaaagggtattgactcccgtgtcaggaggaagttcaagggatgcaccttgatgcccaacattggttatggttctgacaagtcgaccaggcactacctccccaacaagttcaagaagtttgtggtccacaacgtttctgagctggagttgctcatgatgcacaacaggacctactgcgctgaaattgctcacaacgtgtccactaagaagcgcaaggagatcgtggagcgtgctgcgcagctcgacattgtggtcacgaacaagcttgctaggctccgcagccaggaggacgagtagtctggtttcttgtcttaacgacgaactggatgttgccattcctttctgtaggaaactactttgcttgtgtcttgttagtactgaaaaccagagtcactcctacctttttgcaatcagtagctactaaaatgtggcagattccactaaaaaaaaaaaaaaaa

SEQ ID NO: 6698 - protein, 133 aa, Zea mays
  misc_feature: Ceres CLONE ID no. 1278456
  misc_feature: Ceres CDNA ID no. 29191419
  misc_feature (14)..(123): Pfam Name: Ribosomal_L32e PFAM Desc: Ribosomal protein L32
  misc_feature: Homolog of GI Number: 50947773 NR Desc: putative ribosomal protein L32
  misc_feature: Homolog of GI Number: 76057835 NR Desc: ribosomal L32
  misc_feature: Homolog of GI Number: 71534997 NR Desc: ribosomal protein L32
  misc_feature: Homolog of GI Number: 13899057 NR Desc: ribosomal protein L32
  misc_feature: Homolog of GI Number: 40287540 NR Desc: ly200 protein
  misc_feature: Homolog of GI Number: 77745481 NR Desc: ly200
  misc_feature: Homolog of GI Number: 23198054 NR Desc: ribosomal protein L32
  misc_feature: Homolog of GI Number: 21555143 NR Desc: ribosomal protein L32
  misc_feature: Homolog of GI Number: 10177580 NR Desc: ribosomal protein L32
  misc_feature: Homolog of GI Number: 31241003 NR Desc: ENSANGP00000017702
MAVPLLTKKIVKKRVKQFKRPHLDRYKCLKPSWRRPKGIDSRVRRKFKGCTLMPNIGYGSDKSTRHYLPNKFKKFVVHNVSELELLMMHNRTYCAEIAHNVSTKKRKEIVERAAQLDIVVTNKLARLRSQEDE

SEQ ID NO: 6699 - DNA, 1074 bp, Zea mays
  misc_feature: Ceres CLONE ID no. 1278568
  misc_feature: Ceres CDNA ID no. 29191420
  CDS (184)..(840): REFERENCED BY SEQ ID NO: 6700
attttttttgatcgtctccatcccgcatccggcacaaaccaactgcatcaagctccaccagagaagacagcccgccgaggcgccgacggccgcagccgcgggcggactcgtgagtcgcgagtacgccgctgcagttcccaactcagggtgcctgcccgtaacctacccaagagcggtcccgccatgcgcgcggaggtcacccagatcagcgccctaaccgccgtggccgcgcacgtgctctgctctgcgggccttgctgccgcccacgccctcgctggccgcggcgcgctcgtctccgaccccgcgctcgcccttcgccttctcatggtctgtgaagcgcccatagtcatcgcagtgttcagctacctccggcgtgatgctaaaagttgctcgtttttcagggctgttgcaagaggattgatcggcttgcccgtgggagcgttccttaatgcatttggagcaatcattcttggggcacctgttggagtcaagtactggatagctactatttactggtcgcttgtcatgtccctgttcacgtttgttcccgcagcatgtgtctttggagcatccaggatcgattggcaggatgtgctttctcactccatttatttcacgccaactgatgttgagaactacatgatctctgcaccttgccatggagctgtgctaggagcatggctcggtgcttggcctatgccacttgactgggagagaccatggcaggaatggccaatctgtgtcacttatggtgcagttgctgggtatttgttcggaatggcagtgtcattggtcctaacagcacttcacaaaagaagggttcgtgcaaaagctgactagccgttcttcccacaaagcaatgtatttgctgataacatttcttgttcctgcgagtactcatcactttcagtagccttttcacccaggttcacattgttgtattcttttgaagcccccctcattttttttgcagttgtacattgttttcttgaatgtaatgtgaaggactcagtttattactgtaaaacacacgtttgttgagagagtgcgtgttacacaaaaaaaaaaaaaaaa

SEQ ID NO: 6700 - protein, 218 aa, Zea mays
  misc_feature: Ceres CLONE ID no. 1278568
  misc_feature: Ceres CDNA ID no. 29191420
  misc_feature (3)..(205): Pfam Name: PIG PFAM Desc: Phospho
  misc_feature: Homolog of GI Number: 78708040 NR Desc: retrotransposon protein
  misc_feature: Homolog of GI Number: 22135636 NR Desc: Phosphatidylinositol glycan
  misc_feature: Homolog of GI Number: 6679315 NR Desc: phosphatidylinositol glycan
  misc_feature: Homolog of GI Number: 62650301 NR Desc:  similar to Phosphatidylinositol glycan
  misc_feature: Homolog of GI Number: 73969532 NR Desc:  similar to Phosphatidylinositol
  misc_feature: Homolog of GI Number: 73969534 NR Desc:  similar to phosphatidylinositol glycan
  misc_feature: Homolog of GI Number: 62859541 NR Desc: LOC548825
MRAEVTQISALTAVAAHVLCSAGLAAAHALAGRGALVSDPALALRLLMVCEAPIVIAVFSYLRRDAKSCSFFRAVARGLIGLPVGAFLNAFGAIILGAPVGVKYWIATIYWSLVMSLFTFVPAACVFGASRIDWQDVLSHSIYFTPTDVENYMISAPCHGAVLGAWLGAWPMPLDWERPWQEWPICVTYGAVAGYLFGMAVSLVLTALHKRRVRAKAD

SEQ ID NO: 6701 - DNA, 1335 bp, Zea mays
  misc_feature: Ceres CLONE ID no. 1278659
  misc_feature: Ceres CDNA ID no. 29191421
  CDS (127)..(1131): REFERENCED BY SEQ ID NO: 6702
accacctttcccttcctctcccctccccaccccaaatcgaggccagccaggggcaccgccaccatcacttcaccgccgccgtcgacttcactctctctcactcccaaaccaagctaccttccgcccatgggcccaccgccgcgccgccgccaactcctgctgtctctcgcgctgctcgccaccgcggccgcctgctgcgcggcgggggcggcgcccaggctgtcgcccaactactaccgccgcagctgcccgcgcgtggagcggatcgtgtcggacgccgtcgccgccaagcagcgcgccaacccgtccacggcggcgggcacgctgcggctcttcttccacgactgcttcgtcaacggctgcgacgcctcggtgctggtctcgccgctctcctcctccggcgccgcgccggagcgcgccgcggagatcaacctctccctgcccggggacgccttcgacgccgtggcccgcgccaaggcggcgctggaggccgagtgcccgggcgtcgtctcctgcgccgacgcgctggcgctggcggcgcgcgacctcgtggccgccctgggcgggccccggttccccgtcgcgctgggccgccgcgactcccgccgctccgacgcgcgcgacgtcgagggcaacctgccccgcaccaacatgtcggcgcgagccatggtgcgcctcttcgcccgcaagggcctctcgccccgggagatggtggcgctggccggcgcccacaccgtcggcttctcccactgcgccgagttcgcgccccgcatctacggctaccggggcgccagccacgacccgcggctcaacccggagttcgcgcgcgcgctgcagcgctcctgcgcgggataccgcaccgaccccaccgtctccatcttcaacgacatcgtcacgccccgggacttcgacgagacctactacaagaacctgccccacggcctcggcctgctcgcctccgacgccgccatctgggagtacccgcccaccagggtcttcgcccagcgctacgccgccaaccgcaccgccttcttcgaggacttcgccgccgcgatgcagaggctcggcgccgtcggcgtcaagacggggcgccagggcgtcgtcaggcgccgctgcgacgcgctcgactgagtgtcgcgatgcttgttgtgccattgggtcggtcgatcgttgtaaggcttcgaattcgattacgggatatgagaggctcttctttctctgtacttggaaaatggggcgtgagtggtaactaaagtgatgaactgagggcaagctaattctaaattgcatgtcaattgcaatagggttacattaaaaagaaaaaaaaaaaaaaaa

SEQ ID NO: 6702 - protein, 334 aa, Zea mays
  misc_feature: Ceres CLONE ID no. 1278659
  misc_feature: Ceres CDNA ID no. 29191421
  misc_feature (48)..(298): Pfam Name: peroxidase PFAM Desc: Peroxidase
  misc_feature: Homolog of GI Number: 50924882 NR Desc: OSJNBa0060P14.16
  misc_feature: Homolog of GI Number: 55701019 NR Desc: TPA: class III peroxidase 76 precursor
  misc_feature: Homolog of GI Number: 50912621 NR Desc: putative peroxidase
  misc_feature: Homolog of GI Number: 31711808 NR Desc: At5g47000
  misc_feature: Homolog of GI Number: 9759442 NR Desc: peroxidase
  misc_feature: Homolog of GI Number: 21593687 NR Desc: peroxidase
  misc_feature: Homolog of GI Number: 7268522 NR Desc: peroxidase like protein
  misc_feature: Homolog of GI Number: 10177502 NR Desc: peroxidase ATP26a homolog
  misc_feature: Homolog of GI Number: 23297263 NR Desc: putative peroxidase
  misc_feature: Homolog of GI Number: 14334600 NR Desc: putative peroxidase
MGPPPRRRQLLLSLALLATAAACCAAGAAPRLSPNYYRRSCPRVERIVSDAVAAKQRANPSTAAGTLRLFFHDCFVNGCDASVLVSPLSSSGAAPERAAEINLSLPGDAFDAVARAKAALEAECPGVVSCADALALAARDLVAALGGPRFPVALGRRDSRRSDARDVEGNLPRTNMSARAMVRLFARKGLSPREMVALAGAHTVGFSHCAEFAPRIYGYRGASHDPRLNPEFARALQRSCAGYRTDPTVSIFNDIVTPRDFDETYYKNLPHGLGLLASDAAIWEYPPTRVFAQRYAANRTAFFEDFAAAMQRLGAVGVKTGRQGVVRRRCDALD

SEQ ID NO: 6703 - DNA, 1507 bp, Zea mays
  misc_feature: Ceres CLONE ID no. 1278863
  misc_feature: Ceres CDNA ID no. 40351710
  CDS (168)..(1301): REFERENCED BY SEQ ID NO: 6704
accgttgctaccccagcacgctctcgccgtcgccacgccctatatctcgcgcctttcacctcccactctttctccatccgcacgctcgcctccctgctagtgctacgcttcgtgccgccgccgcaacctattccttcccgttccagattgcagatcatttaacataaatggctgacgcagaggacattcagcccctagtctgtgacaatggaactggaatggtcaaggctggctttgctggagatgatgctccccgtgctgttttcccaagtatagttggtcgtccacgtcacactggtgtcatggttgggatgggacagaaggatgcttatgttggtgatgaagcccaatccaagaggggtatcctgactttgaagtaccccatcgaacatggaattgtaagcaactgggatgacatggaaaagatctggcatcacaccttctacaatgagcttcgtgtcgcaccagaagagcacccagttcttcttacagaggcccctcttaacccgaaggctaacagggaaaagatgacgcaaatcatgtttgaaaccttcagtgttcctgctatgtatgttgctattcaagctgtcctttccctatatgctagtggccgtaccactggtatcgtcctggattctggagatggtgtcagtcacactgtcccaatctatgaaggctacgccctcccacatgccattcttcgtctcgatcttgctggcagggacctcactgattccctcatgaagatcctcaccgagaggggctactctttcacaaccactgccgagcgggaaattgtccgtgacatcaaggaaaagcttgcatatgtcgcgctagactatgaacaagaactcgagaccgccaagagcagctcatcagttgagaagagctacgagctgcctgatgggcaagtgatcaccataggcgcagagcgcttcagatgcccggaggtgctcttccagccatccatgatcggtatggaagctccaggaatccacgagacgacctacaactccatcatgaagtgcgacgtggacatcagaaaggacctgtacggcaacattgtcctcagcggtggatccaccatgttccctggcatcgctgaccgcatgagcaaggagatcaccgcgctcgcgccaagcagcatgaagatcaaggtcgtcgctccgccggagaggaagtacagtgtctggattggaggatcaatcctcgcatccctgagcacattccagcagatgtggatctcaagggctgagtatgaggagtctggtccagctattgtccacaggaagtgcttctagacgtcactcctcgtggaaatgcctttgtttcatgacatatctatgggtggtcgctctgctacagctcgcagttttttgtgtatgccacaagccgcatatatatatatccattctggtaacgttgtggagtcagccgagcactgtatgaagtatgtagtttggtttgatatatattgattggggaatgtgcaaaaaaaaaaaaaaaa

SEQ ID NO: 6704 - protein, 377 aa, Zea mays
  misc_feature: Ceres CLONE ID no. 1278863
  misc_feature: Ceres CDNA ID no. 40351710
  misc_feature: The plant flowers significantly late compared to wild-type.
  misc_feature: The plant is abnormally small.
  misc_feature: Useful for making plants with modulated biomass
  misc_feature: Useful for making plants with modulated flowering time
  misc_feature (8)..(377): Pfam Name: Actin PFAM Desc: Actin
MADAEDIQPLVCDNGTGMVKAGFAGDDAPRAVFPSIVGRPRHTGVMVGMGQKDAYVGDEAQSKRGILTLKYPIEHGIVSNWDDMEKIWHHTFYNELRVAPEEHPVLLTEAPLNPKANREKMTQIMFETFSVPAMYVAIQAVLSLYASGRTTGIVLDSGDGVSHTVPIYEGYALPHAILRLDLAGRDLTDSLMKILTERGYSFTTTAEREIVRDIKEKLAYVALDYEQELETAKSSSSVEKSYELPDGQVITIGAERFRCPEVLFQPSMIGMEAPGIHETTYNSIMKCDVDIRKDLYGNIVLSGGSTMFPGIADRMSKEITALAPSSMKIKVVAPPERKYSVWIGGSILASLSTFQQMWISRAEYEESGPAIVHRKCF

SEQ ID NO: 6705 - DNA, 748 bp, Zea mays
  misc_feature: Ceres CLONE ID no. 1278925
  misc_feature: Ceres CDNA ID no. 40351711
  CDS (1)..(522): REFERENCED BY SEQ ID NO: 6706
aaaacccgttcgatgcgtctccgccgtttcaggacacaatcaagggctagaagccactacaggcccaaattcagcccatacccactctcccatccacgagaccacaagccacaccaaacccgcgttcatcgacggacgagctcgccggcgagagagcgactgagatggaggcggcggcagcggcggccggcgtggagctgggctcctcgaagccccagatcgcgacgcaggcggagatggcggaggcccgggtgccgctcgcctaccgcgatcagtgcgcgcacctcctcatcccgctcaacaagtgccgcgtcgccgagttctacctcccctggaagtgcgagcccgagcgccacgcctacgagaagtgccagtacgagctcgtcatggagcggatgctccagatgcagaagatccgcgaggcgcaggagaccaaggtcaagggcggcgcctccattggcctcatcccggccaccgccaagctcgcctgatacgggtcccagaccgatccgcttgatttaggtctgcctgttggctatagcagcgtccagaggcgttgcgccgtgcaaggatcctcaatgtttgttgtgtgaacagagatacgcgtttgaatttggcataaagttaactgttgtcttctttttcccttcccctctctctctatctccctgcctgatggctatcttcaggtttcaatttgatgatggaataaggaaaggtacttgtcctattaaaaaaaaaaaaaaaa

SEQ ID NO: 6706 - protein, 108 aa, Zea mays
  misc_feature: Ceres CLONE ID no. 1278925
  misc_feature: Ceres CDNA ID no. 40351711
  misc_feature (1)..(89): Pfam Name: NDUF_B7 PFAM Desc: NADH
MEAAAAAAGVELGSSKPQIATQAEMAEARVPLAYRDQCAHLLIPLNKCRVAEFYLPWKCEPERHAYEKCQYELVMERMLQMQKIREAQETKVKGGASIGLIPATAKLA

SEQ ID NO: 6707 - DNA, 680 bp, Zea mays
  misc_feature: Ceres CLONE ID no. 1278940
  misc_feature: Ceres CDNA ID no. 36707048
  CDS (98)..(514): REFERENCED BY SEQ ID NO: 6708
aaaacgcagcagagcccctcgcgccgccggcctcttcagccttgcagcacaccgccgccagcccgagtgaccgctgcagcctaggtttccggcgccgatggcgggtaagggagggaagggtctgctggcggccaagacgacggcggccaagagcaccgacaaggacaaggacaggaagaaggcccccgtgtcgcgctcttcccgcgccggcctccagttcccggtgggtcgcatccaccgccagctcaagtcgcgtgcctctgcgcacggccgcgtcggcgccaccgccgccgtctattccgccgccatcctcgagtacctcaccgccgaggtcctcgagctggccggcaacgccagcaaggacctcaaggtcaagcgcatcaccccgcgccacctgcagctcgccatccgcggggacgaggagctcgacaccctcatcaagggcaccatcgccgggggcggcgtcatcccgcacatccacaagtcgctcatcaacaagaccgccaaggagtgaatcaaggccgtgctgctgcttctgcctgactacagtcccatctcgttctgtacttgtgcaatctgagtttaagtgcatgttggcacagttctagtaaactcatcctgttcacctatgcttctatcttgttaatttaagctctattccgcgaaaaaaaaaaaaaaaa

SEQ ID NO: 6708 - protein, 138 aa, Zea mays
  misc_feature: Ceres CLONE ID no. 1278940
  misc_feature: Ceres CDNA ID no. 36707048
  misc_feature (33)..(109): Pfam Name: Histone PFAM Desc: Core histone H2A/H2B/H3/H4
  misc_feature: Homolog of GI Number: 34902610 NR Desc: Putative histone H2A
  misc_feature: Homolog of GI Number: 31432099 NR Desc: putative histone H2A
  misc_feature: Homolog of GI Number: 50918585 NR Desc: putative histone H2A protein
  misc_feature: Homolog of GI Number: 6319146 NR Desc: H2A protein
  misc_feature: Homolog of GI Number: 21592838 NR Desc: histone H2A.F/Z
  misc_feature: Homolog of GI Number: 62319094 NR Desc: histone H2A
  misc_feature: Homolog of GI Number: 21536635 NR Desc: putative histone H2A
  misc_feature: Homolog of GI Number: 30024110 NR Desc: putative histone H2A
  misc_feature: Homolog of GI Number: 76615576 NR Desc:  similar to H2A histone family
  misc_feature: Homolog of GI Number: 62664724 NR Desc:  similar to H2A histone family
MAGKGGKGLLAAKTTAAKSTDKDKDRKKAPVSRSSRAGLQFPVGRIHRQLKSRASAHGRVGATAAVYSAAILEYLTAEVLELAGNASKDLKVKRITPRHLQLAIRGDEELDTLIKGTIAGGGVIPHIHKSLINKTAKE

SEQ ID NO: 6709 - DNA, 738 bp, Zea mays
  misc_feature: Ceres CLONE ID no. 1279712
  misc_feature: Ceres CDNA ID no. 24766061
  CDS (87)..(560): REFERENCED BY SEQ ID NO: 6710
atcacaattcactccactcatcttttctcgtttagaacctctaaaatttcccccactcgccagtcgcagcagcacctgtagcagccatggacgccagcggagccggtagcaaggggaagaagggggcggccgggcgcaaggcaggcggccccaggaagaagtcggtgacgcggtccgtcaaggccgggctgcagttccccgtcggccggatcgggcgctacctcaagaagggccggtacgcgcagcgcgtgggcactggcgcccccgtctacctcgccgccgttctggagtacctcgccgccgaggttctggagttggcagggaacgcggcgaaagacaacaagaagacgcgcatcatcccgcgccacgtgctcctggcgatccgcaacgacgaggagctcgggaagctgctggccggcgtcaccatcgcgcacggtggcgtcctccccaacatccactccgtgctcctgcccaagaaggcggcggagaaggcggccagcggcggcagcaaggagcccaagtcccccaagaagggcgccaagtcccccaagaaggcttagaaagtagggtcttcatttgcgctgtgtgctgtagcatgttcgtgtctagatctgtggatgggatgtgtcatgctctagtatcgtccttgtgtcttattgtatgttcgtcttcatcgagaagatcttcagcagtcagagctcgttgtgtactaatgttcccccaaaaaaaaaaaaaaaa

SEQ ID NO: 6710 - protein, 157 aa, Zea mays
  misc_feature: Ceres CLONE ID no. 1279712
  misc_feature: Ceres CDNA ID no. 24766061
  misc_feature (29)..(104): Pfam Name: Histone PFAM Desc: Core histone H2A/H2B/H3/H4
  misc_feature: Homolog of GI Number: 729671 NR Desc: Histone H2A
  misc_feature: Homolog of GI Number: 34914498 NR Desc: putative histone H2A
  misc_feature: Homolog of GI Number: 7649159 NR Desc: histone H2A
  misc_feature: Homolog of GI Number: 121974 NR Desc: HISTONE H2A.2.1
  misc_feature: Homolog of GI Number: 121982 NR Desc: HISTONE H2A.2.2
  misc_feature: Homolog of GI Number: 47026912 NR Desc: histone H2A
  misc_feature: Homolog of GI Number: 47026919 NR Desc: histone H2A
  misc_feature: Homolog of GI Number: 122006 NR Desc: HISTONE H2A
  misc_feature: Homolog of GI Number: 68441405 NR Desc:  similar to histone H2A
  misc_feature: Homolog of GI Number: 62653580 NR Desc:  similar to Histone H2A.x
MDASGAGSKGKKGAAGRKAGGPRKKSVTRSVKAGLQFPVGRIGRYLKKGRYAQRVGTGAPVYLAAVLEYLAAEVLELAGNAAKDNKKTRIIPRHVLLAIRNDEELGKLLAGVTIAHGGVLPNIHSVLLPKKAAEKAASGGSKEPKSPKKGAKSPKKA

SEQ ID NO: 6711 - DNA, 1210 bp, Zea mays
  misc_feature: Ceres CLONE ID no. 1279773
  misc_feature: Ceres CDNA ID no. 40351712
  CDS (302)..(940): REFERENCED BY SEQ ID NO: 6712
ggcgagttctttaaggaggcgggcgacaggccggtaccggcgcggtgcctttgccttgcctgtcttggcgtggagtggcctgcattctcttctcggagaagacaagcaaagctaagcaaagcaaggcaacccattcccgttcttgtcccgttgtctttgtctctcttgtcccttgctgctcgctcgccgccgtttctcggagcgctagctgctgctgctgctgctgggagtgtgagagtgaggcgaagggccgacctgagccggggagaagaagggggcctgccggccggggctgggagacatgagcgtgaccaagttcatcaagtgcgtcacggtgggcgacggcgcggtgggcaagacctgcatgctcatctgctacaccagcaacaagttccccacggactacatccccacggtgttcgacaacttcagcgccaacgtctccgtggacggcagcatcgtcaacctgggcctctgggacaccgcggggcaagaggactacagcaggctgcggccgctgagctacaggggcgcggacgtgttcgtgctggccttctccctgatcagcagggcgagctacgagaacgttcttaagaagtgggtgccagagcttcgcagattcgcgcccaacgtcccggtcgttcttgttgggaccaagttagatctccgcgaccacagagcctacctcgccgaccatcctggagcttcagcagtcaccacggcgcagggtgaggaactgaggaagcagatcggcgctgcggcctacatcgagtgcagttccaaaacccagcagaacgtcaagtctgtcttcgatacggccatcaaagtggtccttcagcccccacggaggagggaggcagtgcctgccaggaagaagaacaggcgtggctccggatgctctataatgaaccttgtgtgtggcagcacatgtgctgcttagggagtctactagaacactgaaccggaagggaggtgaaggcgtgattcatggtgtgtaatgtgctgtggcaactggcaagttagtttgctatagatgaggatgactgctgcttttgttttccttggcccatctgctgtagttcgtcaggctcttcaagggctgactttttaccagactgcagtgttgtgtaagaagtttgctagacgctgtaactgtaatgttctccgctgatgtggtataactaagatacgagtaaaaaaaaaaaaaaaa

SEQ ID NO: 6712 - protein, 212 aa, Zea mays
  misc_feature: Ceres CLONE ID no. 1279773
  misc_feature: Ceres CDNA ID no. 40351712
  misc_feature: null
  misc_feature: Useful for making plants with modulated nitrogen use efficiency
  misc_feature (8)..(179): Pfam Name: Ras PFAM Desc: Ras family
MSVTKFIKCVTVGDGAVGKTCMLICYTSNKFPTDYIPTVFDNFSANVSVDGSIVNLGLWDTAGQEDYSRLRPLSYRGADVFVLAFSLISRASYENVLKKWVPELRRFAPNVPVVLVGTKLDLRDHRAYLADHPGASAVTTAQGEELRKQIGAAAYIECSSKTQQNVKSVFDTAIKVVLQPPRRREAVPARKKNRRGSGCSIMNLVCGSTCAA

SEQ ID NO: 6713 - DNA, 732 bp, Zea mays
  misc_feature: Ceres CLONE ID no. 1279818
  misc_feature: Ceres CDNA ID no. 36705313
  CDS (121)..(396): REFERENCED BY SEQ ID NO: 6714
atcaacgacagccccagacaacactcaccgatagcaagtagcgccgccgacgtttcgagagcagagtatccaagctagccaagcgcgcacctcggtgacctagctagttcaggcgacgatatggcgtcaggtcaggaaagcaggaaggagctggaccgcaaggcccgcgagggcgagaccgtcgtccccggcgggaccggcggcaagagcgtcgaggcccaggagcacctcgccgaagggcgcagccgcggaggccagactcgcagggagcagctggggcagcaggggtacagcgagatggggaagaagggcggtctgagcaccacggacgagtccggcggcgagcgcgccgccagggagggcgtcagcatcgacgagtccaagttcaccaagtagtcctatcgcgtgcgtgcgtacgcagcgttcgtagctgtctgcgtagtgtaccttggccgtagctagtgctactctctactttggagtagctgaatgataataatgtagctagcagcatgcatgtaggcgatcatacatacgtacgtacatgcaggtacttgtgtgtgatcatgtatgcttccagaagggtatcctagcttaattagtcatgtcgtcagtcgtcaaaatggcaggttcgcgtcagagctttgtagtttggtagcctgtttcacgactcctcaataatcagtagtgtaatgaaagtttggcggttccttgttaaaaaaaaaaaaaaaa

SEQ ID NO: 6714 - protein, 91 aa, Zea mays; identical to SEQ ID NO: 4824
  misc_feature: Ceres CLONE ID no. 1279818
  misc_feature: Ceres CDNA ID no. 36705313
  misc_feature (1)..(91): Pfam Name: LEA_5 PFAM Desc: Small hydrophilic plant seed protein
  misc_feature: Homolog of GI Number: 22271 NR Desc: embrygenic protein
  misc_feature: Homolog of GI Number: 7594649 NR Desc: Early
  misc_feature: Homolog of GI Number: 19013 NR Desc: LEA B19.1
  misc_feature: Homolog of GI Number: 312519 NR Desc: Em protein
  misc_feature: Homolog of GI Number: 7594645 NR Desc: Early
  misc_feature: Homolog of GI Number: 1345529 NR Desc: gB19.1b
  misc_feature: Homolog of GI Number: 7594647 NR Desc: Early
  misc_feature: Homolog of GI Number: 6138910 NR Desc: Em H5 protein
  misc_feature: Homolog of GI Number: 4007844 NR Desc: Em protein
  misc_feature: Homolog of GI Number: 167381 NR Desc: storage protein

SEQ ID NO: 6715 - DNA, 782 bp, Zea mays
  misc_feature: Ceres CLONE ID no. 1279828
  misc_feature: Ceres CDNA ID no. 29191422
  CDS (58)..(630): REFERENCED BY SEQ ID NO: 6716
cgcaaaccctcctaccccattccgccgcccgccccgcgaccccgaggaggaggcaagatgaagacgatcctggcgtcggagacgatggacatcccggagggcgtcacagtgacggtggcggccaagctggtgacggtggagggcccccgcgggaagctcacccggaacttcaagcacctcaacctcgacttccagctgcaggagggcggccgcaagctcaaggtggacgcatggttcggcacccgccgcaccatggccgccatccgcaccgccatctcccacgtccagaacctcatcaagggggtcaccaagggctaccgctacaagatgaggtttgtctacgcccatttccccatcaacgcgtccatcaccaactccaacaccgccatcgagataaggaacttcctcggcgagaagaaggtcagaaaggtggacatgcttgacggcgtgaccatcctccgctccgagaaggtcaaggacgagcttattctcgatggcaacgacgtcgagttagtctctcgctccgccgccctcatcaaccagaaatgccatgtcaagaagaaggatatcaggaagtttttggatggtatctatgtgagcgacaagggtgtgatcgaagaggagcagtgagggacaattagttgttatcgtttgagttggaattattgtttggtttgcaattttctcaaggtgaactttgtaatcggttaggatgtgttgtggaccattatcttatcctacaatattatcgtatctgtttaagaataaaaaaaaaaaaaaaa

SEQ ID NO: 6716 - protein, 190 aa, Zea mays; identical to SEQ ID NO: 250
  misc_feature: Ceres CLONE ID no. 1279828
  misc_feature: Ceres CDNA ID no. 29191422
  misc_feature (98)..(177): Pfam Name: Ribosomal_L6 PFAM Desc: Ribosomal protein L6
  misc_feature: Homolog of GI Number: 33087067 NR Desc: ribosomal L9
  misc_feature: Homolog of GI Number: 7440702 NR Desc: probable ribosomal protein L9
  misc_feature: Homolog of GI Number: 51963784 NR Desc: PREDICTED OJ1435_F07.31 gene product
  misc_feature: Homolog of GI Number: 50904621 NR Desc: putative 60S ribosomal protein L9
  misc_feature: Homolog of GI Number: 20727 NR Desc: GA
  misc_feature: Homolog of GI Number: 6015604 NR Desc: ribosomal protein L9
  misc_feature: Homolog of GI Number: 12642868 NR Desc: putative ribosomal protein L9
  misc_feature: Homolog of GI Number: 21554945 NR Desc: ribosomal protein L9

SEQ ID NO: 6717 - DNA, 951 bp, Zea mays
  misc_feature: Ceres CLONE ID no. 1279881
  misc_feature: Ceres CDNA ID no. 36591041
  CDS (89)..(619): REFERENCED BY SEQ ID NO: 6718
actactctctctctctctgcctgcaaagctgcttgatccatcatcgatcacatcactccaccagccgcagcgcacgaacgtacgactcatggcagatcgcgaccgcagcggcatctacggcggcggcgcctacgggcagcagcaggggggcggccgcccgatgggtgagcaggtgaagggcatgatccacgacaaggggccgacggcgtcccaggcgctgacggtggcgacgctgttccctctgggcgggctgctcctggtgctgtcgggcctggcgctggcggcctccacggtggggctggccctggccacgcccgtgttcctgctcttcagccccgtgctcgtccccgccgcgctgctcatcggcacggccgtcgcggggttcctcacgtcgggcgcgctggggctcggcggcctgtcctcgctcacgtgcctcgccaacacggcgcggcaggcgttccagcgcaccccggactacgtcgaggaggcgcgccgcaggatggcggaggccgcggcgcacgcgggccacaagaccgcgcaggccgggcacggcatccagagcaaggcgcaggaggccggtgctggcactggcgccggcggcggcaggacttcctcgtaaataagcaaatcatccatggatgcgtgcgtgtcaatgtcagcagggtcgtcgtggaatgctcttctctgtacgtgggtaaccgtcttttggtcgtcttccccgagtgcgtgataaatatcctggtgttcgtcgtgtgtggtgctgccctaggctggggcctggggtcggctgtgtaccggtatctgttcatcgccgctccgtcgcgttcggagatgtgaataagtgatgtgaaggttaagtttcagctttgctattgctattgtggcttgtgcatcagcggtttgctcgttgactgttatggaaataagcattggtgaaaaaaaaaaaaaaaa

SEQ ID NO: 6718 - protein, 176 aa, Zea mays
  misc_feature: Ceres CLONE ID no. 1279881
  misc_feature: Ceres CDNA ID no. 36591041
  misc_feature (39)..(156): Pfam Name: Oleosin PFAM Desc: Oleosin
  misc_feature: Homolog of GI Number: 1076818 NR Desc: oleosin 17
  misc_feature: Homolog of GI Number: 168509 NR Desc: oleosin KD18
  misc_feature: Homolog of GI Number: 50917995 NR Desc: oleosin
  misc_feature: Homolog of GI Number: 4102969 NR Desc: 18 kDa oleosin
  misc_feature: Homolog of GI Number: 963062 NR Desc: high molecular weight oleosin
  misc_feature: Homolog of GI Number: 82051 NR Desc: lipid body
  misc_feature: Homolog of GI Number: 9963897 NR Desc: oleosin
  misc_feature: Homolog of GI Number: 10880961 NR Desc: 19 kDa oleosin
  misc_feature: Homolog of GI Number: 22651523 NR Desc: oleosin
  misc_feature: Homolog of GI Number: 61658202 NR Desc: OLE
MADRDRSGIYGGGAYGQQQGGGRPMGEQVKGMIHDKGPTASQALTVATLFPLGGLLLVLSGLALAASTVGLALATPVFLLFSPVLVPAALLIGTAVAGFLTSGALGLGGLSSLTCLANTARQAFQRTPDYVEEARRRMAEAAAHAGHKTAQAGHGIQSKAQEAGAGTGAGGGRTSS

SEQ ID NO: 6719 - DNA, 949 bp, Zea mays
  misc_feature: Ceres CLONE ID no. 1279905
  misc_feature: Ceres CDNA ID no. 36706152
  CDS (112)..(546): REFERENCED BY SEQ ID NO: 6720
aatcacccatcactcgctctattcccattccaagtccccgctcttggattcccgacgacgagctcggagcttcttcttccctgctcggtgctcgtcgcaacagctgccgccatgtctgccgcgaaccagctcgccgctctggtcagcaacatgtacgccacgggtttgcttgacgatcagttccagcagctccagctgctccaggaccccagcgcccctgacttcgtctccgaggtcgtcacgctcttctgtcaggacggcgagcggatcatcgaagagctggccaaactgctggagaagcccaacgtggattttgacagggttgacgcctttgtgcatcagctcaagggaagcagtgcaaatattggtgctcagaaggttaagaacacttgcattcagttccgcgaattctgtcagcagaagagcagagatgggtgcctcaaggtactggagacaatgaggattaacttctatgagctgcgtggcaagtttcagaccatgcttcagctggagcgtcaggtcaatggctttccccccaacaagtaaaccagatggtggagtggaccttcatgttaggatgatgcttgcacctttcaagtttcagaacattctgaatgagctcctcaattggtttctgggaagtcttgtaatagcttagcagcaagattagcgttgacaccaccgtagcagtagtcattgtcgtcaagtagttgtcctaaatgtctgtgctgggttatggatctcctgcaagcagttgcaggcttgcagctgttctgtttactctagtagtttattttggagtagtcgctctcaataaatctgtcctaggagtctattggtggattattagtcagtcagtttctgggattcctggtggtgaagcaaaacaatgttatggctatcggttaataataatagtttgctgtgtttgacaaaaaaaaaaaaaaaa

SEQ ID NO: 6720 - protein, 144 aa, Zea mays
  misc_feature: Ceres CLONE ID no. 1279905
  misc_feature: Ceres CDNA ID no. 36706152
  misc_feature (41)..(126): Pfam Name: Hpt PFAM Desc: Hpt domain
  misc_feature: Homolog of GI Number: 6009622 NR Desc: histidine
  misc_feature: Homolog of GI Number: 22036126 NR Desc: his
  misc_feature: Homolog of GI Number: 46371872 NR Desc: histidine
  misc_feature: Homolog of GI Number: 54208747 NR Desc: histidine
  misc_feature: Homolog of GI Number: 61680826 NR Desc: Chain B
  misc_feature: Homolog of GI Number: 33637784 NR Desc: two
  misc_feature: Homolog of GI Number: 60593896 NR Desc: Chain D
  misc_feature: Homolog of GI Number: 37719728 NR Desc: histidine
  misc_feature: Homolog of GI Number: 52673260 NR Desc: putative histidine
  misc_feature: Homolog of GI Number: 52673256 NR Desc: putative histidine
MSAANQLAALVSNMYATGLLDDQFQQLQLLQDPSAPDFVSEVVTLFCQDGERIIEELAKLLEKPNVDFDRVDAFVHQLKGSSANIGAQKVKNTCIQFREFCQQKSRDGCLKVLETMRINFYELRGKFQTMLQLERQVNGFPPNK

SEQ ID NO: 6721 - DNA, 1187 bp, Zea mays
  misc_feature: Ceres CLONE ID no. 1279910
  misc_feature: Ceres CDNA ID no. 25445634
  CDS (107)..(967): REFERENCED BY SEQ ID NO: 6722
aaattgcaaacccgttctccttttccgtctcctcgacgcaactcgtcgccgtcttctccaactcgcacctcgttcctcgccccaccatttgccgctcccgcctacgatgtcgacgagtgaggtgtggagcttgtccgatttcgaaatcagcaagtacatcggtgagggcaggttcggcaaggtctacctcgcccgcgagaagcagagcgggtacgtggtggcgctcaaggtgatatttaaggcgaaactgcagaagtaccacttccacgcgcacctgcggcgggagatcgagatccagcagagtctcgaccaccctaacgtgctccgcctcttcacctggttccacgacgaagagcgagtcgtcctcgtcctcgagtacgcggcccgtggcgagctctacaaggtccttcgcgctgctggccgcttcaccgagcgcacgtccgccacatatgtagcgagtcttgctggtgcactggcatactgtcacaaaaagcaagtcattcatagggacatcaagcctgagaatttgctaatcgacatcgagggccggcttaaaattgcagattttggatgggcggctcgttcaaatgctaaacgccacacactctgtggcacaatcgattatctggcaccagagatggtagagaaaaaagctcatgaccatgctgtggacaactggacattaggaatcctgtgctatgagttcttatatggttcacctccttttgaagctgatgaacaggatgataccttgagaaggatagttagggtggatttggcattcccttcatctccttgtgtatcttcagaggctaaggatctcatttccaagcttctagttaaggattcaagcaagaggctttgccttgaagacatcatgaagcatccatggataaagaagaatgcagacccttcaggcagttgcattaagcaaaaagatgtcacaagatcaaaggtaaaacgataagtgaatatgcaagatatcttctgagccatggtgtttagtgttcttgttccttggagataaccatggtgtttagtgtaagtagaagccagcctatgtactgtgatcttagttatggaccatgtgtcgaagttgctaaacttctgttgcctgcctcatctggggaggcaattaatcttagcttttgtgtggatacagtagttccataaaaaaaaaaaaaaaa

SEQ ID NO: 6722 - protein, 286 aa, Zea mays
  misc_feature: Ceres CLONE ID no. 1279910
  misc_feature: Ceres CDNA ID no. 25445634
  misc_feature (12)..(219): Pfam Name: Pkinase_Tyr PFAM Desc: Protein tyrosine kinase
  misc_feature: Homolog of GI Number: 50918987 NR Desc: putative aurora
  misc_feature: Homolog of GI Number: 7270230 NR Desc: putative serine/threonine protein kinase
  misc_feature: Homolog of GI Number: 21592557 NR Desc: putative serine/threonine protein kinase
  misc_feature: Homolog of GI Number: 61833045 NR Desc:  similar to Serine/threonine
  misc_feature: Homolog of GI Number: 76633120 NR Desc:  similar to Serine/threonine
  misc_feature: Homolog of GI Number: 57104730 NR Desc:  similar to serine/threonine kinase
  misc_feature: Homolog of GI Number: 73992315 NR Desc:  similar to Serine/threonine
  misc_feature: Homolog of GI Number: 73992311 NR Desc:  similar to Serine/threonine
  misc_feature: Homolog of GI Number: 73992313 NR Desc:  similar to Serine/threonine
  misc_feature: Homolog of GI Number: 13529359 NR Desc: Stk6 protein
MSTSEVWSLSDFEISKYIGEGRFGKVYLAREKQSGYVVALKVIFKAKLQKYHFHAHLRREIEIQQSLDHPNVLRLFTWFHDEERVVLVLEYAARGELYKVLRAAGRFTERTSATYVASLAGALAYCHKKQVIHRDIKPENLLIDIEGRLKIADFGWAARSNAKRHTLCGTIDYLAPEMVEKKAHDHAVDNWTLGILCYEFLYGSPPFEADEQDDTLRRIVRVDLAFPSSPCVSSEAKDLISKLLVKDSSKRLCLEDIMKHPWIKKNADPSGSCIKQKDVTRSKVKR

SEQ ID NO: 6723 - DNA, 795 bp, Zea mays
  misc_feature: Ceres CLONE ID no. 1279933
  misc_feature: Ceres CDNA ID no. 25446674
  CDS (1)..(681): REFERENCED BY SEQ ID NO: 6724
atcgcatatccactattctctaggaagcaagggaatcacatcgccatggcagccaagatgtttgcattgtttgcgctcctagctctttgtgcaaccgccactagtgctacccatatcccagggcacttgtcaccactactgatgccattggctaccatgaacccatggatgcagtactgcatgaagcaacagggggttgccaacttgctagcgtggccgaccctgatgctgcagcaactgttggcctcaccgcttcagccgtgccagatgccaatgatgatgccaggtatgatgccaccgatgacaatgatgccgatgccgaatatgatgccatcgatgatggtgccgactatgatgtcaccaataacgatagctagtatgatgccaccgatgatgatgccaaacatggtttcaccaatgatgatgccgagtatgatgccttcgacgatgacgccgagtatgatgccaccgataatgatgccaagtatgataccaccgatgatgatgccgagcatggtgtcatcaatgataatgccaaacatgatgacagtgccacaatgttactctgattccatctcgcacattatacaacaacaacaattaccattcatgttcagccccacagccgtggcgatctcacccatgtttttacagcagccctttgttggtgctgcattctagatataagcatttgtgttgtacccaataatgaagtcggcatgccatcgcatgcgactcattgtttaggaataaaacaagctaataatgacttttctctcaaaaaaaaaaaaaaaa

SEQ ID NO: 6724 - protein, 211 aa, Zea mays
  misc_feature: Ceres CLONE ID no. 1279933
  misc_feature: Ceres CDNA ID no. 25446674
  misc_feature (1)..(25): Pfam Name: Zein PFAM Desc: Zein seed storage protein
  misc_feature: Homolog of GI Number: 16305117 NR Desc: 18kD delta zein
  misc_feature: Homolog of GI Number: 15983739 NR Desc: modified zein precursor
  misc_feature: Homolog of GI Number: 984525 NR Desc: DZS18
  misc_feature: Homolog of GI Number: 18087509 NR Desc: 11 kDa methionine
  misc_feature: Homolog of GI Number: 511870 NR Desc: zein protein
  misc_feature: Homolog of GI Number: 57021071 NR Desc: delta kafirin
  misc_feature: Homolog of GI Number: 1084475 NR Desc: 10k zein protein
  misc_feature: Homolog of GI Number: 14906664 NR Desc: seed storage protein delta kafirin
  misc_feature: Homolog of GI Number: 847834 NR Desc: 10 kDa zein
  misc_feature: Homolog of GI Number: 75762993 NR Desc: SpoVID
MAAKMFALFALLALCATATSATHIPGHLSPLLMPLATMNPWMQYCMKQQGVANLLAWPTLMLQQLLASPLQPCQMPMMMPGMMPPMTMMPMPNMMPSMMVPTMMSPITIASMMPPMMMPNMVSPMMMPSMMPSTMTPSMMPPIMMPSMIPPMMMPSMVSSMIMPNMMTVPQCYSDSISHIIQQQQLPFMFSPTAVAISPMFLQQPFVGAAF

SEQ ID NO: 6725 - DNA, 688 bp, Zea mays
  misc_feature: Ceres CLONE ID no. 1280033
  misc_feature: Ceres CDNA ID no. 25445853
  CDS (111)..(443): REFERENCED BY SEQ ID NO: 6726
cccgctcggctcggcgaacgcgatctgttccccaacctccgcagccgcttcaccgccctccactccggctgccgaatcgacccgccccgatccagatcaggagctgagggatggacgcgaacaggcgccagagtgggatccagcagttgctggctgcggagcaggaggctcagcaaattgtgaatgcggctagagctgccaagtcagcgaggcttaggcaagcaaaagaggaggctgagcgggaaatagctgaataccgtgcccagatggagtctgagtttcagaggaaggttgcagagagcagcggcgactccggtgcaaacgtcaagcgtctcgaggaagaaacggcggcgaagattgaacaactcacccagcaggccgcaagcatctccccggatgtcattcagatgcttctgcggcatgtcaccaccgtcaagaactgaggagtgctgttcccgaactatgctcgcagacttgtaccgtcgatctatttatttttgtcaagagtgagagtggtgaggaataatatgcccgcttgtatccataattcctgttcgtaactacggaataagccgccgcagctttagcggcaaacgtgactagtactgtcagaacctaccattgttatttggtacaattggtaaataatattgttttaaactggatttttccaaaaaaaaaaaaaaaa

SEQ ID NO: 6726 - protein, 110 aa, Zea mays
  misc_feature: Ceres CLONE ID no. 1280033
  misc_feature: Ceres CDNA ID no. 25445853
  misc_feature (2)..(109): Pfam Name: V PFAM Desc: Vacuolar
  misc_feature: Homolog of GI Number: 50928483 NR Desc: OSJNBa0083N12.23
  misc_feature: Homolog of GI Number: 6692259 NR Desc: vacuolar membrane ATPase subunit G
  misc_feature: Homolog of GI Number: 3717987 NR Desc: G subunit of Vacuolar
  misc_feature: Homolog of GI Number: 5917785 NR Desc: vacuolar membrane ATPase subunit G
  misc_feature: Homolog of GI Number: 26986108 NR Desc: vacuolar ATPase subunit G
  misc_feature: Homolog of GI Number: 82621172 NR Desc: ATPase
  misc_feature: Homolog of GI Number: 3717989 NR Desc: vag2
  misc_feature: Homolog of GI Number: 58578266 NR Desc: ATPase
  misc_feature: Homolog of GI Number: 27808518 NR Desc: At4g23710
  misc_feature: Homolog of GI Number: 50911849 NR Desc: putative Vacuolar ATP synthase subunit G 1
MDANRRQSGIQQLLAAEQEAQQIVNAARAAKSARLRQAKEEAEREIAEYRAQMESEFQRKVAESSGDSGANVKRLEEETAAKIEQLTQQAASISPDVIQMLLRHVTTVKN

SEQ ID NO: 6727 - DNA, 1180 bp, Zea mays
  misc_feature: Ceres CLONE ID no. 1280037
  misc_feature: Ceres CDNA ID no. 36707049
  CDS (153)..(917): REFERENCED BY SEQ ID NO: 6728
atttgctggtggaacgtggaagaagagcgagaacgccaaacgagaaaagaaacccaagccttcgccatcaaaaaaaaaaaagaaaagaaaaaaaaagagcagaaaaagtagagtagactacgacagcgtccggcgaggaggcggaggcgaagatgaggaagaagctcggcacccgattccccgcggctcgaatcaaaaagataatgcaagcagatgaggatgttggaaagattgcactagcagttcctgttttagtttcgaggtctcttgaattgtttttacaagatttaattgaccgtacttatgaaattactcttcaaagtggagcaaagacactgaattccttccacctgaagcaatgtgtgaagaggtacagttcttttgatttcctaactgaagttgtcagcaaggtaccagatcttggtggcgctgattcctgtggagatgaaagaggattacctagaagaagaaagtcaaatggcagtgacccagaaaatgatgaatcaagatctagtaaaatggccataagaaatgcaaacatcagccccagaggacgtgggaggggtcgaggcagaggacgaggtcggccaccaaccaagagaaaggaggttggttatgtacaatttgaagatgagagcagcatgtttgctgaacaaggtgagcccttgccaggagtggaaacagttcaagagatcaatggcaacgagaccatgcctcaaagcacgcaacctccagtagaggctccgccaacagcccttgcacaagctacaacaagttctaaggcggaagaagcgaatagtgatcatcagtcagattggcctatgccagatgccattggaagcatcggtgtcgtgccatctggttttggacatctgacagtgcaggttgaagatgaggactacgacaatgaggattagtcagggtcatcttctcattgtatgcactaacaggactgttctggtgttgtaaaatgtaaatatagtttgaaatagttgccgcagtttacctgtgtgattgtctgttgttttatgcggttatgtagtcctgtgtaactttcgttctccaataattgcttggtagttgcttttttacatgattcaagtgttttgtcacatttaacacagtatttgagcagggattgcctattttaagtatttttgtcttaaaaaaaaaaaaaaaa

SEQ ID NO: 6728 - protein, 254 aa, Zea mays
  misc_feature: Ceres CLONE ID no. 1280037
  misc_feature: Ceres CDNA ID no. 36707049
  misc_feature (7)..(71): Pfam Name: CBFD_NFYB_HMF PFAM Desc: Histone
  misc_feature: Homolog of GI Number: 18481626 NR Desc: repressor protein
  misc_feature: Homolog of GI Number: 18481624 NR Desc: repressor protein
  misc_feature: Homolog of GI Number: 77551403 NR Desc: repressor protein
  misc_feature: Homolog of GI Number: 15239766 NR Desc: repressor protein
  misc_feature: Homolog of GI Number: 61833747 NR Desc:  similar to Dr1 associated protein 1
  misc_feature: Homolog of GI Number: 27661225 NR Desc: similar to RIKEN cDNA 2310074H19
  misc_feature: Homolog of GI Number: 73983662 NR Desc:  similar to DR1
MRKKLGTRFPAARIKKIMQADEDVGKIALAVPVLVSRSLELFLQDLIDRTYEITLQSGAKTLNSFHLKQCVKRYSSFDFLTEVVSKVPDLGGADSCGDERGLPRRRKSNGSDPENDESRSSKMAIRNANISPRGRGRGRGRGRGRPPTKRKEVGYVQFEDESSMFAEQGEPLPGVETVQEINGNETMPQSTQPPVEAPPTALAQATTSSKAEEANSDHQSDWPMPDAIGSIGVVPSGFGHLTVQVEDEDYDNED

SEQ ID NO: 6729 - DNA, 776 bp, Zea mays
  misc_feature: Ceres CLONE ID no. 1280058
  misc_feature: Ceres CDNA ID no. 36705537
  CDS (86)..(481): REFERENCED BY SEQ ID NO: 6730
aaccgagacaccgcgtgcgaaccaagcagaccccagcagaagaagcgaagtcgtagccggagcaggaggaagagcgagcagcaagatgtcgtggcaggcgtacgtcgatgaccacctgctgtgcgacatcgaaggccagcacctcagcgccgccgccatcgtcggccacgacggcagcgtctgggcacagtccgagaactttcccgagttaaagcctgaggaggttgctgggatgataaaggactttgatgaacctggaactcttgcaccaactggtctttttgttggaggtacgaagtacatggtgatccaaggtgaacccggagttgtcatccgaggaaagaagggcactggaggcattactatcaagaaaactggcatgtccttgattatcggtatctatgatgagccaatgactccagggcaatgcaatatggtggtggagaggctcggcgattacctgatcgaacagggcttctaagtttgtcataatgctattttggtcattgggcacttaagtttgcacctcatttggttctgtaatatgtgggcttgtgcatgtgcttggcgtattgcatgcagtgaataatttatcttcgcgttgggttggtgacaatgttgggaatggatttgaattggggtttatgcttgccatctcctcatatctcgaactcagctgctgtttcactgagtaatgtacatttccctggtaatggtacttgtgcactctgctgctttgtggaaaagagtgcattttactaaaaaaaaaaaaaaaa

SEQ ID NO: 6730 - protein, 131 aa, Zea mays; identical to SEQ ID NO: 182
  misc_feature: Ceres CLONE ID no. 1280058
  misc_feature: Ceres CDNA ID no. 36705537
  misc_feature (2)..(126): Pfam Name: Profilin PFAM Desc: Profilin
  misc_feature: Homolog of GI Number: 11493677 NR Desc: profilin 5
  misc_feature: Homolog of GI Number: 2642324 NR Desc: profilin
  misc_feature: Homolog of GI Number: 55775452 NR Desc: putative profilin
  misc_feature: Homolog of GI Number: 1008443 NR Desc: profilin
  misc_feature: Homolog of GI Number: 1709779 NR Desc: Profilin
  misc_feature: Homolog of GI Number: 1052817 NR Desc: profilin
  misc_feature: Homolog of GI Number: 1008445 NR Desc: profilin
  misc_feature: Homolog of GI Number: 60418862 NR Desc: profilin 2
  misc_feature: Homolog of GI Number: 60418866 NR Desc: profilin 2
  misc_feature: Homolog of GI Number: 14161637 NR Desc: profilin

SEQ ID NO: 6731 - DNA, 743 bp, Zea mays
  misc_feature: Ceres CLONE ID no. 1280142
  misc_feature: Ceres CDNA ID no. 36705538
  CDS (199)..(555): REFERENCED BY SEQ ID NO: 6732
caaaatagaggaggtagtgccgacagaggcacgagcgcctccctcgtcttcgttccgtctctccccacagggaaccgccgcccgtcgcctccagatacgtgcctccggcggaaaatcggtatcgagctcgctttgttcgaatcttctgtatagccagcaaggaggcctctccatctcctccgggaaggctgtgcagcaatggagaagtataacagcaagactcagttagcacccttgagagataccccatttgctctccgtggtgctcttggtagttcaagctcataccttgagcaagccaggggctacacgtcttcccctctagcagctctgcgaccaaagatgtcttctactaccggaaatcgactcctgcactcgagttgccccctgtcatctcctgtagcaaaccgcccgctgtcgccccaccttcctctgaagaagccacagttcagcgcgactttctcaatctcgcatcgtatattcggtgtcgcgttgggagttgccatcgtatctgtccctctcgccaccaagttcagcctaatgtttggtgtctgagagcgatttgctgcgtctcatgagaaacatcattttccgtttctgtgtctgtttttcatcgtctcggttaccttgcgacacagctgtaggtgccgttggaataatatctttgccatgcttgcagacttgtgtaataagtaaataaacctataaaataccagtttaactgtttaaaaaaaaaaaaaaaa

SEQ ID NO: 6732 - protein, 118 aa, Zea mays; identical to SEQ ID NO: 6636
  misc_feature: Ceres CLONE ID no. 1280142
  misc_feature: Ceres CDNA ID no. 36705538
  misc_feature (67)..(117): Pfam Name: Sdh_cyt PFAM Desc: Succinate dehydrogenase cytochrome b subunit
  misc_feature: Homolog of GI Number: 50937817 NR Desc: succinate dehydrogenase subunit 3
  misc_feature: Homolog of GI Number: 50904863 NR Desc: succinate dehydrogenase subunit 3
  misc_feature: Homolog of GI Number: 32400816 NR Desc: succinate dehydrogenase subunit 3

SEQ ID NO: 6733 - DNA, 881 bp, Zea mays
  misc_feature: Ceres CLONE ID no. 1280157
  misc_feature: Ceres CDNA ID no. 25445752
  CDS (134)..(652): REFERENCED BY SEQ ID NO: 6734
gcaaaggctgggtcccaccgtccaccaacaaaaaaacgaacgactgttgcccggcccgaatctcccgtgcttccctccccatctccctctccccctccctccgggctctgcctccgctcaccgctcaccactcatgggcgagtaccaccgtccctaccggggcgacctccgctcgccgccgtcctccgtgccggacccggccttcacgcacgccaacggctacttctcctcctccgcctccccgaactccaacaacggctacttctctcccatcttcgcaaagaatgacgctttccctgggaccggcgctggcgcaggcggcgaccggcggatcgagatctacaccacggcgcctcctccgcacctcccgccgccacccggccacacgctggcgctgcccccgccgccggggtggaaggaggggcgactgggtggaggtggaggcggaggcggcgccggcggcggcaggaaagcgggaggtggtgggggcggggccagcatgtggtgcctcagcgatccggagatgaagcggcggcgaagggtggcgagctacaaggcctactcggtggagggcaaggtgaaggcgtcgctgcggcgcgggctccggtggttcaagggcaagtgctccgagatcttccaccatggatggtaacctccgatggctggctggctggctggctggccggctctccttcttggacggtggcagggcccccccaagaaaggaaccaaacttctgaatatgttcgcgatttacttttcctttttgaaaataatgatgctcatgctccagatgtctatctatctatgtatctgttcgcctactaatttcgagatggatttgagactgagagtgtatattcgcaaaaaaaaaaaaaaaa

SEQ ID NO: 6734 - protein, 172 aa, Zea mays
  misc_feature: Ceres CLONE ID no. 1280157
  misc_feature: Ceres CDNA ID no. 25445752
  misc_feature: Homolog of GI Number: 34905694 NR Desc: P0552C05.17
MGEYHRPYRGDLRSPPSSVPDPAFTHANGYFSSSASPNSNNGYFSPIFAKNDAFPGTGAGAGGDRRIEIYTTAPPPHLPPPPGHTLALPPPPGWKEGRLGGGGGGGGAGGGRKAGGGGGGASMWCLSDPEMKRRRRVASYKAYSVEGKVKASLRRGLRWFKGKCSEIFHHGW

SEQ ID NO: 6735 - DNA, 708 bp, Zea mays
  misc_feature: Ceres CLONE ID no. 1280227
  misc_feature: Ceres CDNA ID no. 40351713
  CDS (103)..(498): REFERENCED BY SEQ ID NO: 6736
aacctacccagcctcggccagccacctccccgtcgctctcacgctcttcgtgcccgccgcctcccctcttcccctccacctcactcctcccgtctgacgcacatggcctccatcgccggatcttccgctctctccttcgccatgcctgtcaaggcaatcaactcaaattctctagccttctccccggtgaggaagggtaacacattcctccgcctgcaaccagtgcctatgagatctgtttcctgcgctgccaagaaggatacggtggacaaggtttgtgaaattgtgaagaagcagcttgctcttcctgaccacactgaagtttgtggtgaatcgaaattctctgaacttggtgcggattcgctggacacggttgagattgtgatgggccttgaggaacacttcgacattagcgtggaggagtccagcgcgcagacaattgccaccgttgaagacgccgctgacctcattgacaagcttgttgctgtgaaggcataggccgcatctcttctatcattgtcttaccactctaggtttctatggtctgaagacttgtgattttctccgcactgctgttgctattcccgtgtcgtaataatacgagatgttttaagcggctgaacacacggtggtgtaatctgttactggtaaggtgcattgttgtatgaattgtttctcacccaaaaaaaaacaaaaaaaaaaaaaaaa

SEQ ID NO: 6736 - protein, 118 aa, Zea mays
  misc_feature: Ceres CLONE ID no. 1280227
  misc_feature: Ceres CDNA ID no. 40351713
  misc_feature (43)..(110): Pfam Name: PP PFAM Desc: Phosphopantetheine attachment site
MPVKAINSNSLAFSPVRKGNTFLRLQPVPMRSVSCAAKKDTVDKVCEIVKKQLALPDHTEVCGESKFSELGADSLDTVEIVMGLEEHFDISVEESSAQTIATVEDAADLIDKLVAVKA

SEQ ID NO: 6737 - DNA, 655 bp, Zea mays
  misc_feature: Ceres CLONE ID no. 1280236
  misc_feature: Ceres CDNA ID no. 25401487
  CDS (3)..(566): REFERENCED BY SEQ ID NO: 6738
gtccatccgtatttccgtcacaactcacaacccgagccccccaaacccgaagcagcaggagctcccctgaccttgctccgcctccgatcaaggaaaaggaagatgagctactacggccagcagccccccgtcggcgtcccgccgcagcaaggctacccggggaaggacggctacccgccagcggggtacccgccggccggctaccccccgccggcgcagggctacccgccgcagggctacccgcagcagggttacccacagcagggctacccgccgcagtacgcgcagccgcctccacagcagcagcagagcagcgggccttccttcatggaaggatgcttggctgccctctgctgctgctgcctcctggacgcctgcttctgacggaaccatccgtgccgggtccaacacggctgcaagtgaagcaaccagcttacggaagagctggaactgggccgtgctattctagctttgtcctgcgttatcgccctcttttctttttttttctctctctctctctctctgttatgagactactggtactctgtcgatgtcgattggattagactagggctggtgtgtattctgtggatgctccgtgtttctggtgggattcaagttcaaccctgggattattgtaaaaaaaaaaaaaaaa

SEQ ID NO: 6738 - protein, 93 aa, Zea mays; identical to SEQ ID NO: 3076
  misc_feature: Ceres CLONE ID no. 1280236
  misc_feature: Ceres CDNA ID no. 25401487
  misc_feature: Homolog of GI Number: 50938779 NR Desc: adhesive/proline
  misc_feature: Homolog of GI Number: 21618167 NR Desc: adhesive/proline
  misc_feature: Homolog of GI Number: 42565788 NR Desc: proline
  misc_feature: Homolog of GI Number: 113965 NR Desc: Annexin A7
  misc_feature: Homolog of GI Number: 671859 NR Desc: annexin VII
  misc_feature: Homolog of GI Number: 167666 NR Desc: annexin VII
  misc_feature: Homolog of GI Number: 60473993 NR Desc: annexin VII
  misc_feature: Homolog of GI Number: 45511081 NR Desc: rhodopsin

SEQ ID NO: 6739 - DNA, 670 bp, Zea mays
  misc_feature: Ceres CLONE ID no. 1280425
  misc_feature: Ceres CDNA ID no. 40351714
  CDS (2)..(205): REFERENCED BY SEQ ID NO: 6740
ccaagaacaaaccattgttggacgcgttcccctcctgcacgcaacctcatctcgtcctccagatcctggatggccgtcctccttgataccttgcctcgcgagtgctctcggtgagctactttgttttgatttatcaggaaatccgtttgcttcatgttatgcaggctcagatctgattgctggattcggcatcttacgggcttgaatagagctaggactgggagaaaacaacaaacccgcgttggatcctgtatcggttagtccttgccttcaaggttcatgttgttttgttttggtggtcgagcatcgcatgttctgcttctggttccagatctggagaaatttctaagtcgtcgtcgtcgtcgtcgttcggttcggagcggatctgaggcgacgatggctggaggcggcgggatctcttggtctgcagtcctgcttcacctcgatggatgatgtctctgcgctgataattattggatcaatttcgataattattagtagatctatgagatatgccgcctggaagaggcgaggtaagctgcagcatgtaaaagtctgcgtgcgtcgacagcaaaaaagagaaaaaaagatgtgacatcctagaggaggcctttgccatgatgggtgcgctcgcatggcaggccaggtattaataaaaaaaaaaaaaaaa

SEQ ID NO: 6740 - protein, 57 aa, Zea mays
  misc_feature: Ceres CLONE ID no. 1280425
  misc_feature: Ceres CDNA ID no. 40351714
MLFCFGGRASHVLLLVPDLEKFLSRRRRRRSVRSGSEATMAGGGGISWSAVLLHLDG

SEQ ID NO: 6741 - DNA, 738 bp, Zea mays
  misc_feature: Ceres CLONE ID no. 1280450
  misc_feature: Ceres CDNA ID no. 36591015
  CDS (111)..(506): REFERENCED BY SEQ ID NO: 6742
ctaactccaacctacccagcctcggccagccacctccccgtcgctctcacgctcttcgtgcccgccgcctcccctcttcccctccacctcactcctcccgtctgacgcacatggcatccatcgccggatcttccgctctctccttcgccatgcctgtcaaggcaatcaactcaaattctctagccttctccccggtgaggaagggtaacacattcctccgcctgcaaccagtgcctatgagatctgtttcctgcgctgccaagaaggatacggtggacaaggtttgtgaaattgtgaagaagcagcttgctcttcctgaccacactgaagtttgtggtgaatcgaaattctctgaacttggtgcggattcgctggacacggttgagattgtgatgggccttgaggagcacttcgacattagcgtggaggagtccagcgcgcagacaattgccaccgttgaagacgccgctgacctcattgacaagcttgttgctgtgaaggcataggccgcatctcttctatcattgtcttaccactctaggtttctatggtctgaagacttgtgattttctccgcactgctgttgctattcccgtgtcgtaataatacgagatgttttaagcggctgaacacacggtggtgtaatctgttactggtaaggtgcattgttgtatgaattgtttctcacccagaagaaccagaccatcggggattctagcatcaaaacaaaaaaaaaaa

SEQ ID NO: 6742 - protein, 118 aa, Zea mays; identical to SEQ ID NO: 6736
  misc_feature: Ceres CLONE ID no. 1280450
  misc_feature: Ceres CDNA ID no. 36591015
  misc_feature (43)..(110): Pfam Name: PP PFAM Desc: Phosphopantetheine attachment site
  misc_feature: Homolog of GI Number: 453189 NR Desc: acyl carrier protein
  misc_feature: Homolog of GI Number: 113172 NR Desc: Acyl carrier protein III
  misc_feature: Homolog of GI Number: 50948281 NR Desc: putative acyl carrier protein III
  misc_feature: Homolog of GI Number: 113169 NR Desc: Acyl carrier protein II
  misc_feature: Homolog of GI Number: 166975 NR Desc: acyl carrier protein III precursor
  misc_feature: Homolog of GI Number: 77556020 NR Desc: acyl carrier protein
  misc_feature: Homolog of GI Number: 16518983 NR Desc: acyl carrier protein
  misc_feature: Homolog of GI Number: 4457219 NR Desc: acyl carrier protein
  misc_feature: Homolog of GI Number: 50920229 NR Desc: putative acyl carrier protein
  misc_feature: Homolog of GI Number: 1838961 NR Desc: acyl carrier protein

SEQ ID NO: 6743 - DNA, 692 bp, Zea mays
  misc_feature: Ceres CLONE ID no. 1280469
  misc_feature: Ceres CDNA ID no. 25445561
  CDS (156)..(437): REFERENCED BY SEQ ID NO: 6744
aacttgggtactattttaaattttaggacctaattataagactctctcttggagatgctctaaggcaccgactcgccggggacagagagagagaccgacgcgccggcagatcccaagctcaccctagagggggaagagggcgaccgaaggcggcgatgggtttcatcatggacttcgcggagaatctgatcctccgtctgatggaggacccggacaagcgcgaccaggttcggcgggagcatgtctacaagatgaaggagcggtgcgagcgcactaaggcggcgtggagcctccctctgcgcccctacggcttctggaccttcgaccgcttcaactcgcagctctcctgggatccccagatcagccaggccgccggccgtcgggacccctacgacgacctcatcgcacgccactctggctcgccgccgtcttcctgaacacccgttccgatctttgcccagaaggtctacttgggcatcaataagaaactctttcccctcaaactgattgtggttccatcctcttctgtctggaaaatgttgtcaccaaactaccctatttcctgttccagtttggcatggaagtataagttgtgtacttctattctcaagttgttgtctttgtattatgaaatgtttccaataatcagcagtttttgatgtatggtcgtggatccaaaaaaaaaaaaaaaa

SEQ ID NO: 6744 - protein, 93 aa, Zea mays; identical to SEQ ID NO: 4826
  misc_feature: Ceres CLONE ID no. 1280469
  misc_feature: Ceres CDNA ID no. 25445561
  misc_feature: Homolog of GI Number: 42565426 NR Desc: At1g67350

SEQ ID NO: 6745 - DNA, 791 bp, Zea mays
  misc_feature: Ceres CLONE ID no. 1280567
  misc_feature: Ceres CDNA ID no. 29191423
  CDS (85)..(426): REFERENCED BY SEQ ID NO: 6746
atctctcaccacctctaccctcagcttctccccacctttggtcaggcaggctcaggcaaagggggcggccaacaaggacgagcgatggcgaccaaggtcatctgcttcctgttgctcgcatccctgctcctcgccgtcgcctttcccgtgtctgctctgcggcagcaggtgaagaagggcggcggcggaggcggaggcggaggcagtgttagcggaagcggaggcggcaacctgaatccctgggagtgctcgcccaagtgcgggtcgcggtgctccaagacgcagtacaggaaggcctgcctcaccttatgtaacaagtgctgcgccaagtgcctctgcgtgccaccggggttctacggcaacaagggcgcctgcccctgctacaacaactggaaaaccaaggaaggagggcccaagtgcccctagaagatccaccgcagctcccgtccgccattgtcccctcttctccgaatctggaacgtgttgttcatcttggaccaccccctaggcttggcattttattactagtataatgctagtgtccgcccattgcttaatctggaatgctaccagccagatctccatgctctcctgtgagccactcggcagagtgaggattactaggtagggtggcatgtcatgtgctccaccctccactggtacgagtcaatcaactaaagctacccccggattgatgaggaacatcccgcgcgattagtggggcatgtcattacattcatcagcttctatatataaactagataaactttttatcaaaaaaaaaaaaaaaa

SEQ ID NO: 6746 - protein, 113 aa, Zea mays
  misc_feature: Ceres CLONE ID no. 1280567
  misc_feature: Ceres CDNA ID no. 29191423
  misc_feature (1)..(113): Pfam Name: GASA PFAM Desc: Gibberellin regulated protein
  misc_feature: Homolog of GI Number: 48375076 NR Desc: gibberellin
  misc_feature: Homolog of GI Number: 53793182 NR Desc: putative gibberellin induced protein 3
  misc_feature: Homolog of GI Number: 59042581 NR Desc: GASA2
  misc_feature: Homolog of GI Number: 56236466 NR Desc: Gip1
  misc_feature: Homolog of GI Number: 16516823 NR Desc: Gip1
  misc_feature: Homolog of GI Number: 55584076 NR Desc: Gasa4
  misc_feature: Homolog of GI Number: 16516825 NR Desc: Gip1
  misc_feature: Homolog of GI Number: 50251529 NR Desc: putative gibberellin
  misc_feature: Homolog of GI Number: 16516819 NR Desc: putative gibberellin induced protein 2
  misc_feature: Homolog of GI Number: 16516821 NR Desc: gibberellin induced protein 3
MATKVICFLLLASLLLAVAFPVSALRQQVKKGGGGGGGGGSVSGSGGGNLNPWECSPKCGSRCSKTQYRKACLTLCNKCCAKCLCVPPGFYGNKGACPCYNNWKTKEGGPKCP

SEQ ID NO: 6747 - DNA, 990 bp, Zea mays
  misc_feature: Ceres CLONE ID no. 1280883
  misc_feature: Ceres CDNA ID no. 25445635
  CDS (43)..(648): REFERENCED BY SEQ ID NO: 6748
accctttccatgaccatgagtccatgaccataactgcactgcatgcatggttgcacatccttctgccatcaaagaaaccatgtgaccgatcgacccatcaggttcccggaggtggtgaagctgcaggacgtgtgctggctggagatcagcgggaagctcagtctgtcgctgctgtctccggggacgacctacgcggcgcacctcgtcttcgccatagccgacgactcgtacggcctcgagtgccacgtcgggatgccggcgcttaaggccacggtcaccgtcaccgtctccggcaagacaacgatggcggagcacgacatctgcctgcaccacatgcagggcgaggcggaggccgcggcgcaccggcggacgcagcagtacgtgcgcctccgcaggggctacggcggcggagggaaggcgacggtgctgacgacgacgagggaggccgaccccgacatcaggtgcccccggcggaggggcgacgggtgggccgaggtcgaggtgggcgagttcgccgtggcgggcgacgagggcgacgccgcggacgtggaggtgacggtgcaggaggatagcctgcgctggaagaggggcctcgtggtgctgggcgtcgacatccggcccaagcagcacacgccaacgccatgctagctagctagcgcaatggccggtgcccgctgcccggtggattttattttttatacaaaaatctagggagaaattaacaagctaagtgctgatcaaattagatccagtcaggaacaggtaggcgatgtgcccactgctcaataaggccaagctttaaaacctgtatcttttatggacagactagtgcacttttaaaacggccgtccatttcttagcgctttagcttctctgaatatgcgcatggtgtattatttattattgtgtcagttgcttgcatgcaggctacgtacgtagcccataaaaccgtgatgaaattataggtgtgttttaaaaaaaaaaaaaaaa

SEQ ID NO: 6748 - protein, 201 aa, Zea mays
  misc_feature: Ceres CLONE ID no. 1280883
  misc_feature: Ceres CDNA ID no. 25445635
  misc_feature: Homolog of GI Number: 50915780 NR Desc: phloem
  misc_feature: Homolog of GI Number: 50915794 NR Desc: F
  misc_feature: Homolog of GI Number: 50915786 NR Desc: F
  misc_feature: Homolog of GI Number: 50915782 NR Desc: F
  misc_feature: Homolog of GI Number: 38454184 NR Desc: At2g02230
  misc_feature: Homolog of GI Number: 3894158 NR Desc: putative phloem
  misc_feature: Homolog of GI Number: 3894168 NR Desc: putative phloem
  misc_feature: Homolog of GI Number: 21592660 NR Desc: phloem
  misc_feature: Homolog of GI Number: 18390986 NR Desc: SKP1 interacting partner 3
  misc_feature: Homolog of GI Number: 3894160 NR Desc: putative phloem
MHGCTSFCHQRNHVTDRPIRFPEVVKLQDVCWLEISGKLSLSLLSPGTTYAAHLVFAIADDSYGLECHVGMPALKATVTVTVSGKTTMAEHDICLHHMQGEAEAAAHRRTQQYVRLRRGYGGGGKATVLTTTREADPDIRCPRRRGDGWAEVEVGEFAVAGDEGDAADVEVTVQEDSLRWKRGLVVLGVDIRPKQHTPTPC

SEQ ID NO: 6749 - DNA, 1003 bp, Zea mays
  misc_feature: Ceres CLONE ID no. 1280894
  misc_feature: Ceres CDNA ID no. 29191424
  CDS (120)..(437): REFERENCED BY SEQ ID NO: 6750
ttttcttttttctccaaaccatcgtcggctgcggcactcctgaagggaggaagccccaagcccttgccgccgcagctgccgcagccagcaacgaaccgtacataggcagggacgaagcgatggagggagccaatggagtcggtgagtcggagtccgagcggaagccgctgtcagaggtggtcggcgactgcgtccagcgctggttccaggacgcgtacaaggaggcgcgcaaaggagacatcgccaaccaggtgcttgtagcgcagatgttcttctcgggttatgggacccccaagaacgagtacaagggaaaacaatggatggatagagcatcaaggttcaggtcttccgctttgaaggttggcatgaaacgtccaggatacaatgcaagtgactcagactctgatgacgatgcaaatgatgacgccaaccaataacactcagttacaaattgagttattagttaggagattcacagggtaaggaagtttggcatacactccttttcacggtttctaatacatactcccctaacccttaaccccatccctaggatgaaattttccttggtgctgggacttcagggtcgaattacttggtggtttatgcatttattagcactgtgtttgaattgtgactgtcacattgagcttgtggtgattagatatcctggcctttgtcgttccgtgtgccactgttgcatggtctatagtgcaatggggttcgtcaggtgtttaatgacaaaattgaatttatgttttaaggtaatcacaaggttgtggttaatctagtgtcagtcccagcaacgcaacctgattatgctgggactgctgctctcgattttgattcgcttgtgcgagccagcaatcaagtaaatcttgtaaacccatttggacgcttcaaagtacagtgtactcggtacctgcttgaaaaaacaaggggattatgatttggcagtgtttaattatatttattaatccattttaaaaaaaaaaaaaaaaaa

SEQ ID NO: 6750 - protein, 105 aa, Zea mays
  misc_feature: Ceres CLONE ID no. 1280894
  misc_feature: Ceres CDNA ID no. 29191424
MEGANGVGESESERKPLSEVVGDCVQRWFQDAYKEARKGDIANQVLVAQMFFSGYGTPKNEYKGKQWMDRASRFRSSALKVGMKRPGYNASDSDSDDDANDDANQ

SEQ ID NO: 6751 - DNA, 873 bp, Zea mays
  misc_feature: Ceres CLONE ID no. 1281011
  misc_feature: Ceres CDNA ID no. 25446529
  CDS (96)..(581): REFERENCED BY SEQ ID NO: 6752
gtttcgttccctctccttggccttcgtctccgccttccgacttcctctagaattcgattccctttcccaagaaaccaagaacccagccccccaccatgacgagctcctcctctccttccagaaaggcgctgagcaagatcgcttgcaatcggctgcagaaagagctcgccgagtggcagcaaaacccccccgccgggttcaagcacaaggtctccgataacctccaaaggtgggtaattgaggtcaccggagcggcgggcaccctttacgccggcgaggcttaccagttgcaggttgacttccctgagcattatcctatggaggcacctcaggtcatttttctcaatccagcgccaatgcatccacacatttacagcaacgggcacatctgcttagatattctgtatgactcgtggtcaccagcgatgaccgtgagctctgtctgtatcagtatcctgtctatgttgtctagttcgccagcaaagcaacgcccggcggacaatgaccgctatgttaggaactgccgcaacgggaggtcgccaaaggagactagatggtggttccatgacgacacggtgtaatgatctccgtggcattgcctgtcagccttctgtactgtgaactgtgatatatctcttcaagggggagatgagatgatttaggcctatttctaagcagccctctattggattgcgaagcttaccttgctgtggtggtatgtaaatgagttgctcacatgtgtcagtctgggaatatgtgttatcaccatcaatgatataatatatagaataaagcaagattgtaccctgcctgagtcactgaaacgagctcaaaagtaatgtgcaggtttgactatgaaaaaaaaaaaaaaaa

SEQ ID NO: 6752 - protein, 161 aa, Zea mays
  misc_feature: Ceres CLONE ID no. 1281011
  misc_feature: Ceres CDNA ID no. 25446529
  misc_feature (19)..(158): Pfam Name: UQ_con PFAM Desc: Ubiquitin
  misc_feature: Homolog of GI Number: 57164486 NR Desc: putative ubiquitin
  misc_feature: Homolog of GI Number: 22658 NR Desc: ubiquitin
  misc_feature: Homolog of GI Number: 51971711 NR Desc: At1g45050
  misc_feature: Homolog of GI Number: 20856300 NR Desc: AT5g42990/MBD2_19
  misc_feature: Homolog of GI Number: 20259617 NR Desc: putative ubiquitin
  misc_feature: Homolog of GI Number: 4090259 NR Desc: ubiquitin
  misc_feature: Homolog of GI Number: 2801444 NR Desc: ubiquitin
  misc_feature: Homolog of GI Number: 21593655 NR Desc: E2
  misc_feature: Homolog of GI Number: 34897008 NR Desc: putative ubiquitin
  misc_feature: Homolog of GI Number: 31712068 NR Desc: putative  ubiquitin
  misc_feature: Useful for making shorter plants
  misc_feature: Useful for modifying plant structure
MTSSSSPSRKALSKIACNRLQKELAEWQQNPPAGFKHKVSDNLQRWVIEVTGAAGTLYAGEAYQLQVDFPEHYPMEAPQVIFLNPAPMHPHIYSNGHICLDILYDSWSPAMTVSSVCISILSMLSSSPAKQRPADNDRYVRNCRNGRSPKETRWWFHDDTV

SEQ ID NO: 6753 - DNA, 602 bp, Zea mays
  misc_feature: Ceres CLONE ID no. 1281184
  misc_feature: Ceres CDNA ID no. 29191706
  CDS (179)..(544): REFERENCED BY SEQ ID NO: 6754
acacagacacagacacggacagagcaaccaacaagtcgtccaacgtccaggcttttctgttttgtttctctctcacgcaagtcgcaaagcaaagcgtcccccaccatggcttccacgacgacgacggcatccaacaacctggcgggcgtgtggctcggcgagctctcgtcggcgctgcatgggacgtggcaggcggtggccgtggccgtggccgccacccacgggctcggcgaggacgacgacccgcggctgccgtgccagcagcagcagaggccgtggcgaggcgacgacaggagcagcagcaacaacaaggcgttgcgaggagccgcggcggccgggacggacaggcgggagggggacgtcgcgagatgcggcggcgccatgtccgacaccacgctctacctcctcctcgaccggttcgcgcccagctgagcgggccccttgctcacccgccgccgccgctgccgctgccgccgccgcgatcgatcggcgcgtgctgtactgtacaggcggaataactgcacgccatggtttctgtaaataaatgctgtatataaactgcaatggcatcttgtgttgctttctgaaaaaaaaaaaaaaaa

SEQ ID NO: 6754 - protein, 121 aa, Zea mays
  misc_feature: Ceres CLONE ID no. 1281184
  misc_feature: Ceres CDNA ID no. 29191706
MGRGRRWPWPWPPPTGSARTTTRGCRASSSRGRGEATTGAAATTRRCEEPRRPGRTGGRGTSRDAAAPCPTPRSTSSSTGSRPAERAPCSPAAAAAAAAAAIDRRVLYCTGGITARHGFCK

SEQ ID NO: 6755 - DNA, 867 bp, Zea mays
  misc_feature: Ceres CLONE ID no. 1281221
  misc_feature: Ceres CDNA ID no. 40351715
  CDS (56)..(700): REFERENCED BY SEQ ID NO: 6756
gtttccgatctgatctggttccgtgctggtgctagggattgtgaggtaaagcgtgatggcagcgccgccggcgagggctcgagccgactacgactacctaatcaaactgctcctcatcggagacagcggcgttggaaaaagttgcctcctgttacggttttcagatggatcattcaccactagcttcattaccactattggcattgacttcaagataagaactgttgagttggatggcaaaaggattaagttgcagatctgggatactgcaggccaagaacgtttccgcacaattaccactgcctactacaggggagcaatgggcatcttacttgtgtatgatgtcacagacgagtcatctttcaataacataagaaattggatcagaaacattgaacaacatgcttcggataatgtgaacaaaattctggtggggaataaagctgatatggatgaaagcaaacgggctgtgcccacttcaaagggacaagctctcgcagacgaatatgggataaagttctttgaaacgagcgcaaagacaaacctgaacgtcgagcaggttttcttttctatagcaagggatatcaaacagagactttcagagactgattccaagcctgaggatcgaactatcaagatcaaggctgaaggggaagctgatgcagcagaggcgcagaaatcagcttgctgcggctcttgaacggttgtggccgcaggatagtttcataatttttattctttgccagcaagtctctccttgtgcttgagctatcacaattgttgtggtttggacaagtgggtgttacgtcagaactaattacttgctatattgtggaaaccctgctcttgataaaaaaaaaaaaaaaa

SEQ ID NO: 6756 - protein, 214 aa, Zea mays
  misc_feature: Ceres CLONE ID no. 1281221
  misc_feature: Ceres CDNA ID no. 40351715
  misc_feature: null
  misc_feature: Useful for making plants with altered Lignin content
  misc_feature (1)..(177): Pfam Name: Arf PFAM Desc: ADP
MAAPPARARADYDYLIKLLLIGDSGVGKSCLLLRFSDGSFTTSFITTIGIDFKIRTVELDGKRIKLQIWDTAGQERFRTITTAYYRGAMGILLVYDVTDESSFNNIRNWIRNIEQHASDNVNKILVGNKADMDESKRAVPTSKGQALADEYGIKFFETSAKTNLNVEQVFFSIARDIKQRLSETDSKPEDRTIKIKAEGEADAAEAQKSACCGS

SEQ ID NO: 6757 - DNA, 863 bp, Zea mays
  misc_feature: Ceres CLONE ID no. 1281243
  misc_feature: Ceres CDNA ID no. 29191425
  CDS (65)..(724): REFERENCED BY SEQ ID NO: 6758
atttttcgaccgccgccgcccccagtccccgatccgaagctgtgcctcgtaccatttcgatccaatggcgccgacgtcgaagctgtcgacgggcatcaagcgcgcttcgcggtcgcacacgtaccatcgccgtgggctgtgggccatcaaggccaagaacggcggcgccttccccaaggccgacaaggccgccgccgccgtggaacccaagttctaccctgccgacgacgtcaagccccgcgttcccagcacccgcaagcctaagcctaccaagctcaggtcgagcatcacgcctgggacggtgctgatcctcctcgcagggcgcttcatggggaagagagtggtgtttctcaagcagctcaagtctggcctgctccttatctctgggcctttcaagatcaatggagtaccgatccgccgtgtgaaccagacctatgtcattgctacatcaaccaaagttgacatctctggtgttgatgtcgccaagtttgatgacaagtactttgccagggagaagaagcagaaggtgaagaagaccgagggcgagctttttgagacagaaaaggaggcatccaagtcactgcctgacttcaagaaggatgaccagaaggctgtggattctgctctgatcaaggctatcgaggctgtcctggagctgaaaacctatcttggcgcccggttctctctcagggatggtgacaagccccatgagatggtattctaagtttctagttttggagttcgtaggaagctgttttgtctgtgttcttgtacttctgagttttgtaccagtagcgaacgtttcattgtgattgaagtcttcctgccaaatattataagatctaagaaaaaaaaaaaaaaaa

SEQ ID NO: 6758 - protein, 219 aa, Zea mays; identical to SEQ ID NO: 4
  misc_feature: Ceres CLONE ID no. 1281243
  misc_feature: Ceres CDNA ID no. 29191425
  misc_feature: null
  misc_feature: Useful for making plants with modulated nitrogen use efficiency
  misc_feature (1)..(49): Pfam Name: Ribosomal_L6e_N PFAM Desc: Ribosomal protein L6
  misc_feature (112)..(219): Pfam Name: Ribosomal_L6e PFAM Desc: Ribosomal protein L6e
  misc_feature: Homolog of GI Number: 50925014 NR Desc: OSJNBb0022F23.11
  misc_feature: Homolog of GI Number: 50909993 NR Desc: putative 60S ribosomal protein L6
  misc_feature: Homolog of GI Number: 57471700 NR Desc: ribosomal protein L6
  misc_feature: Homolog of GI Number: 21592925 NR Desc: putative 60S ribosomal protein L6
  misc_feature: Homolog of GI Number: 27311965 NR Desc: putative 60S ribosomal protein L6
  misc_feature: Homolog of GI Number: 19539 NR Desc: ribosomal protein YL16
  misc_feature: Homolog of GI Number: 9795602 NR Desc: Putative  60S ribosomal protein L6
  misc_feature: Homolog of GI Number: 21593910 NR Desc: 60S ribosomal protein L6
  misc_feature: Homolog of GI Number: 7208784 NR Desc: 60S ribosomal protein L6
  misc_feature: Homolog of GI Number: 57999636 NR Desc: 60S ribosomal protein L6 CgRPL6

SEQ ID NO: 6759 - DNA, 972 bp, Zea mays
  misc_feature: Ceres CLONE ID no. 1281337
  misc_feature: Ceres CDNA ID no. 25446530
  CDS (131)..(808): REFERENCED BY SEQ ID NO: 6760
gggaacaaactagcaactgaagcgtaccaacaaaaaacgcccgattcgcctcgcaaaatcgccgccgccatcgcctactccaccagacgccgatagttccgccttcctttcctgctgcgcgcctgtcgccatggtgaagcggtggcttcccctcgaggccaaccccgacgtcatgaaccagttcatgtggggactgggggtccccgaggacgtggggttctgcgacgtgtacggcctcgatgacgagttgctcgccatggtgccccagccggtgctcgcggtcctacttctctacccccaggaccggagcaaggagtcccaagcttcagctacctcgtcggtggagaccaaggagcccagcaagaacgtatatttcacaaagcaaactgttgggaatgcctgtggcacagttggtattattcatgcactggggaatgctacttccagaatcaagttaggtgaggggtcatattttgatagattttataaacgaactgctgacatggatcctatccagcgtgctgcatttcttgaggaggacgaggaaatggagaatgctcattccattgccgctactgctggtgacacagaggccaaggacggtgtaattgaacattacatttgtttctcttgtgtcgatggagagctttatgagcttgatggggggacatcacagccaataccccatgggccttccactcctgataccttgttgcaggatgctgcagaagttataaaagcaagaatcgccatgtattcgcagtcaaacaacttcaatgtcatggctctttcaggcaaagcgatatagcattatagcactttcagtcataggcacttgatatcccacatttgctttgcagctgccttagcccaacactgcagcatgttctattgttttcttgccttcgttttattatttaaacacgttaaaacaagataaataaaagcgtggctacaaaaaaaaaaaaaaaa

SEQ ID NO: 6760 - protein, 225 aa, Zea mays
  misc_feature: Ceres CLONE ID no. 1281337
  misc_feature: Ceres CDNA ID no. 25446530
  misc_feature (4)..(209): Pfam Name: Peptidase_C12 PFAM Desc: Ubiquitin carboxyl
  misc_feature: Homolog of GI Number: 50927490 NR Desc: OSJNBa0079A21.11
  misc_feature: Homolog of GI Number: 50911393 NR Desc: carboxyl
  misc_feature: Homolog of GI Number: 28973167 NR Desc: putative carboxyl
  misc_feature: Homolog of GI Number: 50929477 NR Desc: OSJNBa0043A12.3
  misc_feature: Homolog of GI Number: 7268503 NR Desc: carboxyl
  misc_feature: Homolog of GI Number: 54695588 NR Desc: ubiquitin carboxyl
  misc_feature: Homolog of GI Number: 28913414 NR Desc: Ubiquitin carboxyl
MVKRWLPLEANPDVMNQFMWGLGVPEDVGFCDVYGLDDELLAMVPQPVLAVLLLYPQDRSKESQASATSSVETKEPSKNVYFTKQTVGNACGTVGIIHALGNATSRIKLGEGSYFDRFYKRTADMDPIQRAAFLEEDEEMENAHSIAATAGDTEAKDGVIEHYICFSCVDGELYELDGGTSQPIPHGPSTPDTLLQDAAEVIKARIAMYSQSNNFNVMALSGKAI

SEQ ID NO: 6761 - DNA, 945 bp, Zea mays
  misc_feature: Ceres CLONE ID no. 1281476
  misc_feature: Ceres CDNA ID no. 29191426
  CDS (83)..(730): REFERENCED BY SEQ ID NO: 6762
gtttccatcccattttctctcctctctccgtcgccgcctcgggccaaaccctacgcagggagttgattgatcgattgcagccatgagtaagttgcattccgagcttctcaaggattgcatctcccagatagttcaggatgccaagaagaataggaagttcactgagactgttgagcttcagattagtctgaagaattatgatccacaaaaggacaagcgtttcagtggctctgttaagttgcctcacatccctcgtccaaagatgaaggtgtgcatgcttggtgatgcccagcacgttgaggaggctgagaagatgggacttgactacatggatgttgaggccctcaagaaaatgaacaagaacaagaagcttgttaagaagcttgccaagaagtaccatgcttttttggcatcagagaccatcatcaagcaaattccccgtctccttggtcctggtctcaacaaggcaggcaagttccccactctggtcactcaccaggaatccctggaatccaaggtgaatgagacgaaggctacagtcaagtttcaactgaagaaagtcctttgcatgggtgtcgcggtcggtaacctgtctatggaggagaagcagatccaacagaacatccagatgagcatcaacttcctcgtgtctcttctgaagaagaactggcagaatgtaagatgtctctacatcaagagcaccatggggaaaccattcaggattttctaagtctgtttttttgtgaagtctgctctttatgatatttggtttttgaaccgaggttgtcttgaactaaaactcttgttagatcatgtttggttggtaggatatttgagtctgggcaggtgtcttactcttgcgccatgtctttgtaatctctctatataagttttttgagaggctcagtataatatgcgtattatacgttaaaaaaaaaaaaaaaa

SEQ ID NO: 6762 - protein, 215 aa, Zea mays
  misc_feature: Ceres CLONE ID no. 1281476
  misc_feature: Ceres CDNA ID no. 29191426
  misc_feature (22)..(211): Pfam Name: Ribosomal_L1 PFAM Desc: Ribosomal protein L1p/L10e family
  misc_feature: Homolog of GI Number: 50948455 NR Desc: putative 60S ribosomal protein L10A
  misc_feature: Homolog of GI Number: 57471702 NR Desc: ribosomal protein L10A
  misc_feature: Homolog of GI Number: 50252685 NR Desc: putative ribosomal protein L10a
  misc_feature: Homolog of GI Number: 56785395 NR Desc: putative 60S ribosomal protein L10A
  misc_feature: Homolog of GI Number: 9757825 NR Desc: 60S ribosomal protein L10A
  misc_feature: Homolog of GI Number: 21386915 NR Desc: putative ribosomal protein L10
  misc_feature: Homolog of GI Number: 15810665 NR Desc: putative 60S ribosomal protein L10A
  misc_feature: Homolog of GI Number: 25294932 NR Desc: 60S ribosomal protein L10A
  misc_feature: Homolog of GI Number: 47026982 NR Desc: 60S ribosomal protein L10A
  misc_feature: Homolog of GI Number: 70909669 NR Desc: ribosomal protein L10Ae
MSKLHSELLKDCISQIVQDAKKNRKFTETVELQISLKNYDPQKDKRFSGSVKLPHIPRPKMKVCMLGDAQHVEEAEKMGLDYMDVEALKKMNKNKKLVKKLAKKYHAFLASETIIKQIPRLLGPGLNKAGKFPTLVTHQESLESKVNETKATVKFQLKKVLCMGVAVGNLSMEEKQIQQNIQMSINFLVSLLKKNWQNVRCLYIKSTMGKPFRIF

SEQ ID NO: 6763 - DNA, 610 bp, Zea mays
  misc_feature: Ceres CLONE ID no. 1281489
  misc_feature: Ceres CDNA ID no. 29191427
  CDS (1)..(300): REFERENCED BY SEQ ID NO: 6764
aatcccgctgttcgcgagccactccctctcacgagtgacgacgaaaccctaggccatggcttggcgcggcgccgcctcccgctccattatcgccgccgtccgtgctcgcgccgcatccccgtcttccaccgccgcctcgcgcctccgctcgacggctccacttcccgccccctcgcgccggtccgtccccgccttcgctttcgcgaccgcgaggccgttggcggcgatgtcggggtccccggcggcggccgtggtgaagctcaccgggcactcggcgacgagcgtgcgggcgtgctgtgagctctcccagggaaatgacgacgatgcatgatgcttgggaagcaattttaaagcatggaaaaggcacttaatgcgcacctttgtccttaaatgcaaggattggattctttggaggttgcatcccttggaaactcatcgggcttgcgtccttttccatgcattttgcagagtacttagcgcctcgtgtgtcggcaaacggacagtatatctgctgtaacttacataaataatcatatgttagcctgctgctactcactgccccgcatcgattggaactaagttgatgtttggttcaaaaaaaaaaaaaaaa

SEQ ID NO: 6764 - protein, 91 aa, Zea mays
  misc_feature: Ceres CLONE ID no. 1281489
  misc_feature: Ceres CDNA ID no. 29191427
MAWRGAASRSIIAAVRARAASPSSTAASRLRSTAPLPAPSRRSVPAFAFATARPLAAMSGSPAAAVVKLTGHSATSVRACCELSQGNDDDA

SEQ ID NO: 6765 - DNA, 649 bp, Zea mays
  misc_feature: Ceres CLONE ID no. 1281501
  misc_feature: Ceres CDNA ID no. 25445903
  CDS (38)..(445): REFERENCED BY SEQ ID NO: 6766
actgcggcttcaggactcgacctcttgcgccgccgccatgaccttcaagcgccgcaacggcggccgcaacaagcatggccgcggtcacgtcaagtacatccggtgctcaaactgcgccaagtgctgccccaaggacaaggcgatcaagaggtttcaggtgaggaacatcgtggaacaggcggccatcagggacgtccaggaagcatgcgtctatgatggctacgtcctcccgaagctgtacgccaaggtgcaccactgcgtctcgtgcgcgatccacgctcacatcgtccgcgtccgatcccgtgagaagcgcagggaccgcaagccgccggagcgcttcaggcgcagggaggataggcctgctggtggacaaggaggcccccgccctggtcctggtgctgctgctacagctccagctccagcaccggttgctgctcgcccataggctttagcttttcgaccgtgttaagtcttctgcccactcagtttcggagttgtcccccgtgcgtgtgtgaagctgctatattagagttactttttgtctaaagtctgaacattttcgaagaatttgaatatctgaacatttgaatgtttgtgctgagtttttcaaagaatttgaatatctgaacaaataaaaaaaaaaaaaaaa

SEQ ID NO: 6766 - protein, 135 aa, Zea mays
  misc_feature: Ceres CLONE ID no. 1281501
  misc_feature: Ceres CDNA ID no. 25445903
  misc_feature (1)..(117): Pfam Name: Ribosomal_S26e PFAM Desc: Ribosomal protein S26e
  misc_feature: Homolog of GI Number: 57900258 NR Desc: putative ribosomal protein S26
  misc_feature: Homolog of GI Number: 50931777 NR Desc: putative 40S ribosomal protein S26
  misc_feature: Homolog of GI Number: 7440567 NR Desc: probable ribosomal protein S31
  misc_feature: Homolog of GI Number: 5706704 NR Desc: ribosomal protein S26
  misc_feature: Homolog of GI Number: 56236112 NR Desc: At2g40510
  misc_feature: Homolog of GI Number: 20466414 NR Desc: 40S ribosomal protein S26
  misc_feature: Homolog of GI Number: 24111313 NR Desc: At2g40590/T2P4.6
  misc_feature: Homolog of GI Number: 22137298 NR Desc: AT3g56340/F18O21_300
  misc_feature: Homolog of GI Number: 3885515 NR Desc: similar to ribosomal protein S26
  misc_feature: Homolog of GI Number: 61654752 NR Desc: S26
MTFKRRNGGRNKHGRGHVKYIRCSNCAKCCPKDKAIKRFQVRNIVEQAAIRDVQEACVYDGYVLPKLYAKVHHCVSCAIHAHIVRVRSREKRRDRKPPERFRRREDRPAGGQGGPRPGPGAAATAPAPAPVAARP

SEQ ID NO: 6767 - DNA, 735 bp, Zea mays
  misc_feature: Ceres CLONE ID no. 1281519
  misc_feature: Ceres CDNA ID no. 36705539
  CDS (3)..(611): REFERENCED BY SEQ ID NO: 6768
aaaccgtctcctcagtcctcatcctcactcgcatgccaagaatgacgtgccgagtggcactcgccgccgtcctcctgtgcgcggccgtggcggcggccttggggggcaagcgggcgcccatcccggacgacctgcgcgacgtgatagacgacgaggaggacgacgagtggcgccgttatggcgcgcccccgtcgcgaggcccgggccgtggcgacggcccaccgcctgacctttcaaggatggatccagccgccctccaggacgagctcctccgcggccaaaccggcccgtcgttcggcttcgtgaagctccgcccgggcaccgcccgctcacgggaggatgtggtggggatcgcgacgaggtggagcaatgtgctgcggacgggatcggtggacgccaaattcgtggcggttaattttggaacgctcatgttcaccatggagagagggcgagacatactcgagctgaaggagtttatcttgagccaggacgaggcctacgagttcaagattggcgatcggattttccgcaggcctggagacccacccctggaccaagttcttgataagccacagaaaaagaagcgtcataagtctagagacgaactgtagattcatttgctaactaatctgttctacatgtcctgttatttttgttcgtccgctctttctcttcgtctacttcagtttttgtttccatagcagttttaaaaaaaaaataaaaaaaaaaaaaaaa

SEQ ID NO: 6768 - protein, 192 aa, Zea mays
  misc_feature: Ceres CLONE ID no. 1281519
  misc_feature: Ceres CDNA ID no. 36705539
MPRMTCRVALAAVLLCAAVAAALGGKRAPIPDDLRDVIDDEEDDEWRRYGAPPSRGPGRGDGPPPDLSRMDPAALQDELLRGQTGPSFGFVKLRPGTARSREDVVGIATRWSNVLRTGSVDAKFVAVNFGTLMFTMERGRDILELKEFILSQDEAYEFKIGDRIFRRPGDPPLDQVLDKPQKKKRHKSRDEL

SEQ ID NO: 6769 - DNA, 591 bp, Zea mays
  misc_feature: Ceres CLONE ID no. 1281534
  misc_feature: Ceres CDNA ID no. 36505076
  CDS (138)..(371): REFERENCED BY SEQ ID NO: 6770
acggatccaccggagagatctggtctgccattccctcgctccttcccgtgaaccacaaacctaacgcggagcggcgcgggccggccgccgggcgaggtgcgcgtagctgccgtcgattgtcgccggatccatccaccatgggcggtggcaacggccagaagtccaagatggcccgcgagcgcaacttggagaagaacaagggggccaaggggagccagctcgagaccaacaagaaggccatgagcatccagtgcaaagtgtgcatgcaaacattcatgtgtaccacgactgaagtgaagtgccgggagcacgccgaggccaagcatcccaagacagacgtgtaccagtgcttcccccatctgaagaagtgaaaggcctgaacttagcaaccagtgctggtttggtcactacgatcgggccagggggcgttccttgtgttgagggtgttcattccgtgttatcttcccgtcagtcatgcgtcctgtcctatgttaacctacataagaaagcgatgtggtgtccacttctagtgaaactactgtctgctgttaaaacctggttggtttcagaacgataaaaaaaaaaaaaaaa

SEQ ID NO: 6770 - protein, 77 aa, Zea mays
  misc_feature: Ceres CLONE ID no. 1281534
  misc_feature: Ceres CDNA ID no. 36505076
  misc_feature: Homolog of GI Number: 58177252 NR Desc: Chain A
  misc_feature: Homolog of GI Number: 32422715 NR Desc: predicted protein
MGGGNGQKSKMARERNLEKNKGAKGSQLETNKKAMSIQCKVCMQTFMCTTTEVKCREHAEAKHPKTDVYQCFPHLKK

SEQ ID NO: 6771 - DNA, 1719 bp, Zea mays
  misc_feature: Ceres CLONE ID no. 1281886
  misc_feature: Ceres CDNA ID no. 36591226
  CDS (220)..(1386): REFERENCED BY SEQ ID NO: 6772
ctcgagtagggcgaggtccgggctccgctcccggtttccggggagagtgcggaggacccccatcgtgcgcgccattgaactctgctcccggctgctcgccggggagagggcggaggacccgatcgtgccgtctcaacccgctccgcacccgcgcggccgcgggcgtggtgctcccgcgccttccgggcgcctcctgcttctccgtgcgccctcggctccatggaggccggctactgcaaccgcaagaagaccgacggcatctgcgagtcagtctgcgacagcgagtttggctcgaagtcagtcctgagcatgtcaaggctgaagtgcgcactgcggggatttgatctgagggttctcttgatcctactgattggtgtgccaattttgatctttgccatatatgtgcatggccagaaggtgacttacttcctccgaccaatctgggagaagcccccaaagcccttcacaatactccctcactattaccatgaaaatgtctcgatgggtaacctatgcaagttgcatggatggaaagtcagggagactccacgccgtgtctttgatgccgtgctcttcagcaatgagcttgacatccttgatatccgctggcacgagcttagcccgtatgtgtcagaatttgtgctgcttgagtccaattcaacttttaccggcataaagaaggaccttcacttcaaggaaaaccgccaacggtttggctttgcagagtcacggttgacctatggcatgataggtggaaggtttgtgaagggagagaacccatttgtcgaggagtcgtatcaaagggttgctctcgaccagctcattaagattgcgggcatcacggatgacgacctgctaatcatgtctgatgttgatgagatcccaagtggacacaccatcgacctcttgagatggtgcgatgacgttccggagatactccatctccagctcaggaactacctctactcgttccaattcctacttgacgacaagagctggagggcttcagtgcacagatacagagctgggaagacgaggtatgcacatttccggcagacggacgacctcctggctgattcagggtggcactgcagcttctgcttccgctacataaacgacttcatcttcaagatgaaagcctacagccacgtcgaccggatcagattcaagtacttcctgaacccgaagaggattcagcatgtgatttgcgaaggggctgaccttttcgacatgcttcccgaagagtacacgttccaagagatcatcgccaagctggggcctatcccgagtacattctccgccgttcatctccctgcctatctgctggagcaattcgatcggtacaggtaccttctcccaggcaactgcgttagagagagtggctaggcagctggctgcccgccgtctgcatcatgaccctgaggcgcacggacgtcgctctctcgcggatgtctgtcttatggcggcgggggttgtgtccgatacgattggctgacttagttgagtgatcgcttggctgctggttgagttcatatgggatttttgtgtaccgtgtaacagaaaccatggaaggcctgacggctgcgtagcgcagcgcgtgcttgatcgctgctgcgttcttgtttggcagaggagagctgagagctttttgttcgttgcttccatgattgatatatgatgaactcagaacctgttgtagatctaaaaaaaaaaaaaaaa

SEQ ID NO: 6772 - protein, 388 aa, Zea mays
  misc_feature: Ceres CLONE ID no. 1281886
  misc_feature: Ceres CDNA ID no. 36591226
  misc_feature (28)..(387): Pfam Name: Glyco_transf_17 PFAM Desc: Glycosyltransferase family 17
  misc_feature: Homolog of GI Number: 50925145 NR Desc: OSJNBa0044K18.7
  misc_feature: Homolog of GI Number: 61845111 NR Desc: beta 1
  misc_feature: Homolog of GI Number: 30683061 NR Desc: glycosyl transferase family 17 protein
  misc_feature: Homolog of GI Number: 50910059 NR Desc: glycosyl transferase
  misc_feature: Homolog of GI Number: 50910063 NR Desc: glycosyl transferase
  misc_feature: Homolog of GI Number: 45433905 NR Desc: putative N
  misc_feature: Homolog of GI Number: 47028351 NR Desc: N
  misc_feature: Homolog of GI Number: 9506897 NR Desc: mannoside acetyl glucosaminyltransferase 3
  misc_feature: Homolog of GI Number: 61252085 NR Desc: Beta
  misc_feature: Homolog of GI Number: 56078802 NR Desc: Mannoside acetylglucosaminyltransferase 3
MEAGYCNRKKTDGICESVCDSEFGSKSVLSMSRLKCALRGFDLRVLLILLIGVPILIFAIYVHGQKVTYFLRPIWEKPPKPFTILPHYYHENVSMGNLCKLHGWKVRETPRRVFDAVLFSNELDILDIRWHELSPYVSEFVLLESNSTFTGIKKDLHFKENRQRFGFAESRLTYGMIGGRFVKGENPFVEESYQRVALDQLIKIAGITDDDLLIMSDVDEIPSGHTIDLLRWCDDVPEILHLQLRNYLYSFQFLLDDKSWRASVHRYRAGKTRYAHFRQTDDLLADSGWHCSFCFRYINDFIFKMKAYSHVDRIRFKYFLNPKRIQHVICEGADLFDMLPEEYTFQEIIAKLGPIPSTFSAVHLPAYLLEQFDRYRYLLPGNCVRESG

SEQ ID NO: 6773 - DNA, 757 bp, Zea mays
  misc_feature: Ceres CLONE ID no. 1281939
  misc_feature: Ceres CDNA ID no. 40351716
  CDS (68)..(604): REFERENCED BY SEQ ID NO: 6774
ctctatcatcatccaatccagatcagcaaagcggcagtgcgtagagaggatcgtcgaacagaacagcatgaagatggtcatcgttctcgtcgtgtgcctggctctgtcagctgccagcgcctctgcaatgcagatgccctgcccctgcgcggggctgcagggcttgtacggcgctggcgccggcctgacgacgatgatgggcgccggcgggctgtacccctacgcggagtacctgaggcagccgcagtgcagcccgctggcggcggcgccctactacgccgggtgtgggcagccgagcgccatgttccagccgctccggcaacagtgctgccagcagcagatgaggatgatggacgtgcagtccgtcgcgcagcagctgcagatgatgatgcagcttgagcgtgccgctgccgccagcagcagcctgtacgagccagctctgatgcagcagcagcagcagctgctggcagcccagggtctcaaccccatggccatgatgatggcgcagaacatgccggccatgggtggactctaccagtaccagctgcccagctaccgcaccaacccctgtggcgtctccgctgccattccgccctactactgattcatgatatttgggaaatctcctctatccatctctctctatctatatatgtaataatgcagtaagacgacacacattatcatgtgtggtatgaccaataatatatgcatggtcataataaagttttggttttaacgaaaaaaaaaaaaaaaa

SEQ ID NO: 6774 - protein, 178 aa, Zea mays
  misc_feature: Ceres CLONE ID no. 1281939
  misc_feature: Ceres CDNA ID no. 40351716
MKMVIVLVVCLALSAASASAMQMPCPCAGLQGLYGAGAGLTTMMGAGGLYPYAEYLRQPQCSPLAAAPYYAGCGQPSAMFQPLRQQCCQQQMRMMDVQSVAQQLQMMMQLERAAAASSSLYEPALMQQQQQLLAAQGLNPMAMMMAQNMPAMGGLYQYQLPSYRTNPCGVSAAIPPYY

SEQ ID NO: 6775 - DNA, 636 bp, Zea mays
  misc_feature: Ceres CLONE ID no. 1281952
  misc_feature: Ceres CDNA ID no. 25445562
  CDS (154)..(441): REFERENCED BY SEQ ID NO: 6776
attcgattcccaagccactaaggcccttggaggaacaacagaatccagaaaccgaaaagaggcctcactgctgccgcctgggccaagtcgtcgtcttgcttgccaatccgtcgctccacctgaacacaccggcgaagaggaggcgaagaagcgatgggcgtgaccaaggaggacgtcgaggcggccatcacctccgctctcagcccttccaatctcgtggtgacggacacgtccggagggtgtggcgcgagctacgagatcgaggtggtgtcggagaagttcgaggggaagcggctgctggagaggcaccggatggtgaacaccgcgctggcgtctcacatggcggagatccacgccgtctccatcaagaaggcgctcaccccggctcaggcccagccccaggcccagccggagccggccgccgataagccccaggcttaagtgcttaacaccccccaaaacggtttgatcccatatgccgatgcacgattacattggctatctgcttgaataatgcggcggatgcacttgctaaattgcaggatgttatccttgactgattagaaacttctgcaccgtgcatttaacttctgtgtcactgtgtgtgtgttctggatgctaaaaaaaaaaaaaaaa

SEQ ID NO: 6776 - protein, 95 aa, Zea mays; identical to SEQ ID NO: 94
  misc_feature: Ceres CLONE ID no. 1281952
  misc_feature: Ceres CDNA ID no. 25445562
  misc_feature (3)..(80): Pfam Name: BolA PFAM Desc: BolA
  misc_feature: Homolog of GI Number: 34908592 NR Desc: P0505D12.24
  misc_feature: Homolog of GI Number: 56785200 NR Desc: BolA
  misc_feature: Homolog of GI Number: 66559220 NR Desc:  similar to GA17237
  misc_feature: Homolog of GI Number: 55643705 NR Desc:  similar to My016 protein
  misc_feature: Homolog of GI Number: 57087917 NR Desc:  similar to My016 protein
  misc_feature: Homolog of GI Number: 45188270 NR Desc: ADR398Wp
  misc_feature: Homolog of GI Number: 34870138 NR Desc: similar to Chain A

SEQ ID NO: 6777 - DNA, 963 bp, Zea mays
  misc_feature: Ceres CLONE ID no. 1281960
  misc_feature: Ceres CDNA ID no. 29191428
  CDS (46)..(705): REFERENCED BY SEQ ID NO: 6778
acctacctccgcttctctccaagtgaggaaccccaagccctcgccatggcgtcgcggatcctggcccgatccaagtcccttcacctcgtcgccgccctcacccctgccgctgccaaagcagcaacgcctatcgccggagcccgcgcgctctcgtccctgccccgctacccgtctgccccgtcgccccatgggctcggcaaggttctgggatatgaaccaacatctcacctcagtggaccacaagttttacctcgttggttttcctctctagcatccaatggatctcaggtgcagaagtcacagatctctgagacatacaagtcaggtggtgaaatgaaacagtctgagacacggaaatcaagtgaggaagccacaccaaaagttgtggcgttcagtccgctagaagcagctatcgctaaacctagaagtagtcccctgacaagtgagagttctaaagtaaggcgatcagagatagcaacccaagtcaccttttacatgatcccagccctgcttcttgcctccaagaacagcataagtacctcccttctggtcggcgccgtgttccatcaagtatacatgttccacaaggagattcttctggactacgtgcaccatgatatcaccagaaagtgggctttgatttacttcaagctgcttttgctggtgatggcgaaggacaccatcatgtacttcaatctgttctaagctcaccttttcagtttctcaaatatccagcaatgcatccgtctctgcactcgtagaataatgatgatggatgaattatgcagccttcgttcttgtattctccctaatgagcttgcttttttccagctgccagtttcactcttgttaagtatatcagtctggatgggattgattagtgaccagtcagatgatatccctgattctgcacctctgtaataatgattaatgtcaattgtgcaactaaaaaaaaaaaaaaaa

SEQ ID NO: 6778 - protein, 219 aa, Zea mays
  misc_feature: Ceres CLONE ID no. 1281960
  misc_feature: Ceres CDNA ID no. 29191428
  misc_feature: Homolog of GI Number: 15420575 NR Desc: succinate dehydrogenase subunit 4
  misc_feature: Homolog of GI Number: 34907206 NR Desc: P0492G09.23
  misc_feature: Homolog of GI Number: 57231039 NR Desc: succinate oxido
  misc_feature: Homolog of GI Number: 15021578 NR Desc: succinate dehydrogenase subunit 4
  misc_feature: Homolog of GI Number: 15021584 NR Desc: succinate dehydrogenase subunit 4
  misc_feature: Homolog of GI Number: 57231045 NR Desc: succinate oxido
  misc_feature: Homolog of GI Number: 57231047 NR Desc: succinate oxido
  misc_feature: Homolog of GI Number: 57231041 NR Desc: succinate oxido
  misc_feature: Homolog of GI Number: 57231053 NR Desc: succinate oxido
MASRILARSKSLHLVAALTPAAAKAATPIAGARALSSLPRYPSAPSPHGLGKVLGYEPTSHLSGPQVLPRWFSSLASNGSQVQKSQISETYKSGGEMKQSETRKSSEEATPKVVAFSPLEAAIAKPRSSPLTSESSKVRRSEIATQVTFYMIPALLLASKNSISTSLLVGAVFHQVYMFHKEILLDYVHHDITRKWALIYFKLLLLVMAKDTIMYFNLF

SEQ ID NO: 6779 - DNA, 638 bp, Zea mays
  misc_feature: Ceres CLONE ID no. 1281999
  misc_feature: Ceres CDNA ID no. 36591124
  CDS (27)..(449): REFERENCED BY SEQ ID NO: 6780
gattgggtccaacaccagccgccgccatgtcgaagcgaggcaggggaggttcggcggggaacaagttccgcatgtcgctgggtctgccggttgccgcgacggtgaactgcgcggacaacacgggcgccaagaacctctacatcatctccgtcaagggcatcaagggccgcctcaaccgcctcccgtccgcctgcgttggcgacatggtcatggccaccgtcaagaaggggaagcccgacctcaggaagaaggtgatgcccgccgtcatcgtccgccagcgcaagccgtggcgccgcaaggacggtgtctacatgtacttcgaagataatgctggagtgattgtgaatcccaagggtgagatgaaaggttccgctatcactggacctatcggcaaggagtgtgctgatctttggcctaggattgctagcgcagcaaacgccatcgtttgagagcttgttggaatatgttcagacttctatatgatcatcttattatcagttgctaagagtgctattgggcttaatgggccctttatgtttgttcactcaattttgtagtaaacagaatttggtataccaaggggatctatatatcaatgtatgccataaattgtctgactaccaaaaaaaaaaaaaaaa

SEQ ID NO: 6780 - protein, 140 aa, Zea mays; identical to SEQ ID NO: 288
  misc_feature: Ceres CLONE ID no. 1281999
  misc_feature: Ceres CDNA ID no. 36591124
  misc_feature: The plant is abnormally small.
  misc_feature: Useful for making plants with modulated biomass
  misc_feature (19)..(140): Pfam Name: Ribosomal_L14 PFAM Desc: Ribosomal protein L14p/L23e
  misc_feature: Homolog of GI Number: 32400871 NR Desc: ribosomal Pr 117
  misc_feature: Homolog of GI Number: 50915826 NR Desc: 60S ribosomal protein L17
  misc_feature: Homolog of GI Number: 57471720 NR Desc: ribosomal protein L17
  misc_feature: Homolog of GI Number: 13430182 NR Desc: ribosomal protein L17
  misc_feature: Homolog of GI Number: 7547099 NR Desc: ribosomal protein L17
  misc_feature: Homolog of GI Number: 7440849 NR Desc: ribosomal protein L17
  misc_feature: Homolog of GI Number: 21618149 NR Desc: putative 60S ribosomal protein L17
  misc_feature: Homolog of GI Number: 2982289 NR Desc: 60S ribosomal protein L17
  misc_feature: Homolog of GI Number: 4574244 NR Desc: ribosomal protein L17
  misc_feature: Homolog of GI Number: 55645299 NR Desc:  similar to ribosomal protein L23

SEQ ID NO: 6781 - DNA, 861 bp, Zea mays
  misc_feature: Ceres CLONE ID no. 1282033
  misc_feature: Ceres CDNA ID no. 40351717
  CDS (146)..(607): REFERENCED BY SEQ ID NO: 6782
agcaaaaccgcgccccaccgctttcccgttccccaccccgaccgactgctccccctcccccgcaccagcctcaagccctcaaggcctcaaggcatcgccggcgccgcaacttcgctgaggaagcccgcacccctgcccggatccgatggccaacagcaacctcccgcggcggatcatcaaggagactcagcggctgctcagcgagccagcaccggggatcagcgcgtcgccctcggaggagaacatgcgctacttcaacgttatgatccttgggccggcgcagtcgccctatgaaggtggagtttttaagcttgaactctttttacctgaggaatatccaatggctgccccaaaggttaggtttctgacaaagatttatcatcccaacatcgacaagcttggtaggatatgcctcgacattctcaaggacaaatggagcccagcacttcagattcgaacagttcttttgagtatacaggctctactgagtgcgccaaatccagacgaccctctttcggataacattgcaaagcactggaaagccaatgaagtagaagctgtcgaaacagctaaggagtggactcgcctgtatgcgagcggtgcatgagaacgcagtgatgttcttgatgtaataacccatcatacttcagtcctcatctattgccatttgcttgataaaaaataggctggagatatttgccatggaatgaagtctctacatgactatcactctgaattgtttggttgtacacctgtggtcggttccctttaccttggggcacctttgacaaatcagtatctgtggtagaacttgctgatactgtaatatatttgttacttcatgtaaaaaaaaaaaaaaaa

SEQ ID NO: 6782 - protein, 153 aa, Zea mays
  misc_feature: Ceres CLONE ID no. 1282033
  misc_feature: Ceres CDNA ID no. 40351717
  misc_feature (9)..(146): Pfam Name: UQ_con PFAM Desc: Ubiquitin
MANSNLPRRIIKETQRLLSEPAPGISASPSEENMRYFNVMILGPAQSPYEGGVFKLELFLPEEYPMAAPKVRFLTKIYHPNIDKLGRICLDILKDKWSPALQIRTVLLSIQALLSAPNPDDPLSDNIAKHWKANEVEAVETAKEWTRLYASGA

SEQ ID NO: 6783 - DNA, 940 bp, Zea mays
  misc_feature: Ceres CLONE ID no. 1282037
  misc_feature: Ceres CDNA ID no. 29191429
  CDS (3)..(740): REFERENCED BY SEQ ID NO: 6784
gcacgagcgcgaacacgaacacgaacaccataacgcttaacgcggcggtcatggtgggcggcggcggcgacccaaggccggaggacgagcccttctccgacggagacgccacggagtcggacaccgacgagtctcctccgcaggggattagtgctcgccgccccggcgccaccaccaacccgatcctgactcgcctcgcggtgtcgcggaacccgagcccgctggccgcggccaccgcggcccccggggtgtgcctcctccgcttcgcctgggagtccgccgcgggatccctcgtcggcgccgttgtcggatacggtaaaggtctggtcatgaggaagggttttaaaggatcatttcctgatgctgcttcgtctgctaagatatttgctgtccttgctggcgtacaaagtttggtagcctgctctttgcgaaaactacgtggaaaagatgatggtatcaatgcaggagtggcaggctgttgcactggccttgcgctgagctttccaggtgcaccgcaaactctgattcagagctgcctgacctttgggactttctcgtacatcatagagacgctaaacaagcagcagcccgcactggcgctaccactggctaaagggattaaggatcaaaaggctggacaaagtgttcttcctcccttcacgctccctcttccgcaggatgcgatggatggattttctaagttccagaactttttgtcgtcgaaatttcagggaaaatgagtcaccttatggagtgacgtttagttgccttgtaaatgcgtcaatctgagcccttttttgggtttatttctctgcaaatgtatgtttctaaggtagtgtcttgttaatgttaatgattctacacctttctgtgatagttttgcgaataagaggagcacctcatcctttgttcaggtgttgtaagaaaaaaaaaaaaaaaa

SEQ ID NO: 6784 - protein, 229 aa, Zea mays
  misc_feature: Ceres CLONE ID no. 1282037
  misc_feature: Ceres CDNA ID no. 29191429
  misc_feature (61)..(179): Pfam Name: Tim17 PFAM Desc: Tim17/Tim22/Tim23 family
  misc_feature: Homolog of GI Number: 50897226 NR Desc: At5g55510
  misc_feature: Homolog of GI Number: 42568553 NR Desc: mitochondrial import inner membrane translocase subunit Tim17/Tim22/Tim23 family protein
  misc_feature: Homolog of GI Number: 18398755 NR Desc: mitochondrial import inner membrane translocase subunit Tim17/Tim22/Tim23 family protein
  misc_feature: Homolog of GI Number: 42562146 NR Desc: mitochondrial import inner membrane translocase subunit Tim17/ Tim22/Tim23 family protein
MVGGGGDPRPEDEPFSDGDATESDTDESPPQGISARRPGATTNPILTRLAVSRNPSPLAAATAAPGVCLLRFAWESAAGSLVGAVVGYGKGLVMRKGFKGSFPDAASSAKIFAVLAGVQSLVACSLRKLRGKDDGINAGVAGCCTGLALSFPGAPQTLIQSCLTFGTFSYIIETLNKQQPALALPLAKGIKDQKAGQSVLPPFTLPLPQDAMDGFSKFQNFLSSKFQGK

SEQ ID NO: 6785 - DNA, 917 bp, Zea mays
  misc_feature: Ceres CLONE ID no. 1282041
  misc_feature: Ceres CDNA ID no. 40351718
  CDS (73)..(744): REFERENCED BY SEQ ID NO: 6786
ccatcaccaccactgggtcttcagaccattagctttatctactccagagcgcagaagaacccgatcgacaccatgagggtgttgctcgttgccctcgctctcctggctctcgctgcgagcgccacctccacgcatacaagcggcggctgcggctgccagccaccgccgccggttcatctaccgccgccggtgcatctgccacctccggttcacctgccacctccggtgcatctcccaccgccggtccacctgccgccgccggtccacctgccaccgccggtccatgtgccgccgccggttcatctgccgccgccaccatgccactaccctactcaaccgccccggcctcagcctcatccccagccacacccatgcccgtgccaacagccgcatccaagcccgtgccagctgcagggaacctgcggcgttggcagcaccccgatcctgggccagtgcgtcgagttcctgaggcatcagtgcagcccgacggcgacgccctactgctcgcctcagtgccagtcgttgcggcagcagtgttgccagcagctcaggcaggtggagccgcagcaccggtaccaggcgatcttcggcttggtcctccagtccatcctgcagcagcagccgcaaagcggccaggtcgcggggctgttggcggcgcagatagcgcagcaactgacggcgatgtgcggcctgcagcagccgactccatgcccctacgctgctgccggcggtgtcccccactgaagaaactatgtgctgtagtatagccgctggctagctagctagttgagtcatttagcggcgatgattgagtaataatgtgtcacgcatcaccatgggtggcagtgtcagtgtgagcaatgacctgaatgaacaattgaaatgaaaagaaaaaagtattgttccaaaaaaaaaaa

SEQ ID NO: 6786 - protein, 223 aa, Zea mays; identical to SEQ ID NO: 4224
  misc_feature: Ceres CLONE ID no. 1282041
  misc_feature: Ceres CDNA ID no. 40351718
  misc_feature (128)..(213): Pfam Name: Tryp_alpha_amyl PFAM Desc: Protease inhibitor/seed storage/LTP family

SEQ ID NO: 6787 - DNA, 813 bp, Zea mays
  misc_feature: Ceres CLONE ID no. 1282048
  misc_feature: Ceres CDNA ID no. 25445563
  CDS (136)..(495): REFERENCED BY SEQ ID NO: 6788
aaaatacgaaagggacttttaaatccgtggctctaatccgtaaccctaaacccccaccaaaacccctcctcgcctccctcccctccatccaatcctcgaaacgagcgcgcgggcgaggaggtccccctctccgagatggctagggtttttcgcgggtccctcctcctgatgtccccggcggcggcggcggcggcggcggcggcggcaggggccaagaaggcggcctccacgaagccgagggcgccggccgggatcacgaagccgatgccggtctccgaagcgttccgcaggttcgccggcggcgcgcgcgaggtcgcacgctccgaggccatcaagctcgtctggacccacatcaaggcccacggcctccagaacccgtccaacaaaaccgagatcaactgtgacgcgacgctcaagagcttgtttggtgggagggacaagatcgggatgatggaggtctcgaagctactgagccctcacttcctgaagaactagcaagcggtgcatggagccggcggcagcgcttcgcggttgatttgggaaatgtttagtctgctaatggcaaatctcagtccacgttcatcccagtctttgattcgtggtcttagcgtcatgttcgtatgcgtggggttgcgttctttccgatttgtatagtcggtctgcagcatgttatatgatatgcttgaagtttgcactcctcccttgtcatcgctggatgcctggataaacaaaaccagctgttgactgactctgtaagttgtacctctgttgcttacgaaatattacttcccttctcgaaaaaaaaaaaaaaaa

SEQ ID NO: 6788 - protein, 119 aa, Zea mays
  misc_feature: Ceres CLONE ID no. 1282048
  misc_feature: Ceres CDNA ID no. 25445563
  misc_feature (40)..(117): Pfam Name: SWIB PFAM Desc: SWIB/MDM2 domain
  misc_feature: Homolog of GI Number: 50905011 NR Desc: putative SWIb domain
  misc_feature: Homolog of GI Number: 77555897 NR Desc: SWIB/MDM2 domain
  misc_feature: Homolog of GI Number: 33667910 NR Desc: SWIb domain
  misc_feature: Homolog of GI Number: 42565723 NR Desc: SWIB complex BAF60b domain
  misc_feature: Homolog of GI Number: 45185215 NR Desc: ABL015Cp
  misc_feature: Homolog of GI Number: 50947369 NR Desc: parathymosin
  misc_feature: Homolog of GI Number: 54028104 NR Desc: COG0550: Topoisomerase IA
MARVFRGSLLLMSPAAAAAAAAAAGAKKAASTKPRAPAGITKPMPVSEAFRRFAGGAREVARSEAIKLVWTHIKAHGLQNPSNKTEINCDATLKSLFGGRDKIGMMEVSKLLSPHFLKN

SEQ ID NO: 6789 - DNA, 861 bp, Zea mays
  misc_feature: Ceres CLONE ID no. 1282087
  misc_feature: Ceres CDNA ID no. 29191334
  CDS (58)..(759): REFERENCED BY SEQ ID NO: 6790
atcgcacatattattgagaccaactagcaacatagaaagcacaatagtgtaccaacaatggcagccaaaatattttgcttccttatgctccttggtctttctgcaagtgttgctaccgcaaccattttcccacaatgctcacaagctcctatagcttcccttcttcccccatacctctcaccagcggtgtcttcaatgtgtgaaaacccaattgttcaaccctacaggatccaacaggcaatcgcaacaggcatcttaccattatcacccttgttcctccaacaaccgtcagccctattacagcagttacctttggtccatttggtggcacaaaacatcagggcacaacaactacaacaacttgtgctagcaaaccttgctgcatactctcagcaacatcagtttcttccattcaaccaactggctgcattgaactctgctgcttatttgcaacaacaattaccattcagccagctagttgctgcctacccccagcaatttcttccattcaaccaactagcagcattgaactctgctgcttatttacagcagcaacaactactaccattcagccagctagctgatgtgagccctgctgccttcttgacacaacaacagttgttgccgttctacctgcacgctatgcctaacgctggcaccctcttacaactgcaacaattgctgccattcaaccaacttgctttgacaaactcaacagtgttctaccaacaacccatcattggtggtgccctcttttagattgcttatgagttatagttcaataatgaagttttttggatgatgtttgtggcgtcccagaaataagaaagtacatttctagattgaaaaaaaaaaaaaaaa

SEQ ID NO: 6790 - protein, 233 aa, Zea mays
  misc_feature: Ceres CLONE ID no. 1282087
  misc_feature: Ceres CDNA ID no. 29191334
  misc_feature (1)..(98): Pfam Name: Zein PFAM Desc: Zein seed storage protein
  misc_feature: Homolog of GI Number: 22448 NR Desc: 19 kDa zein
  misc_feature: Homolog of GI Number: 16073 NR Desc: zein protein
  misc_feature: Homolog of GI Number: 535021 NR Desc: zein Zd1
  misc_feature: Homolog of GI Number: 535020 NR Desc: zein Zd1
  misc_feature: Homolog of GI Number: 72316 NR Desc: 19K zein precursor
  misc_feature: Homolog of GI Number: 22446 NR Desc: 19 kDa zein
  misc_feature: Homolog of GI Number: 16305125 NR Desc: 19kD alpha zein B1
  misc_feature: Homolog of GI Number: 224509 NR Desc: zein E19
  misc_feature: Homolog of GI Number: 72315 NR Desc: 19K zein precursor
MAAKIFCFLMLLGLSASVATATIFPQCSQAPIASLLPPYLSPAVSSMCENPIVQPYRIQQAIATGILPLSPLFLQQPSALLQQLPLVHLVAQNIRAQQLQQLVLANLAAYSQQHQFLPFNQLAALNSAAYLQQQLPFSQLVAAYPQQFLPFNQLAALNSAAYLQQQQLLPFSQLADVSPAAFLTQQQLLPFYLHAMPNAGTLLQLQQLLPFNQLALTNSTVFYQQPIIGGALF

SEQ ID NO: 6791 - DNA, 734 bp, Zea mays
  misc_feature: Ceres CLONE ID no. 1282094
  misc_feature: Ceres CDNA ID no. 40351719
  CDS (116)..(466): REFERENCED BY SEQ ID NO: 6792
ccccgtccagagcgcgagcaaccaacgccgccccgctgtctccgccggtccgcccccgtccctcccctcccccgaatcgcgtcgtcccgtctcctgctgccgcggaaccctcgccatggcggaggcgcccgagaccgccgcccccacccagccgcctcccgcgccggcggcttcgtccccgcctcccaagtcggggatcccgccgcggtacgacctggacgccaagtgggacgcgtgcctcgacctctccatccgccgcgtcgcctactcctccctcggcggcgccttcgcgggcctcctcctcttccgtagccctactactcgctgggcatcagttgcccttggagctggtgtggggataggggctgcatacactgaatgctcatacttattcaatggtgctccaaagtgttcacccaaagtatcaactattccctctgcacactctgatgggggagataagtaaacccttgctgttggattggtccatctcggtggagtttttgtatgtgtgaagtaccggttgtttcatgctggatattgcgctacttgtggccatagtatgtcattgaagctagatgcgcctcacttgagagttttgttgcaaacctattccaattgtggtctgatgacccctggcaaagagcttttgcaagctgacgttgaaacggtggcttggtgaccgctaataaattttccatcatgtgaacttgttctcaaaaaaaaaaaaaaaa

SEQ ID NO: 6792 - protein, 116 aa, Zea mays
  misc_feature: Ceres CLONE ID no. 1282094
  misc_feature: Ceres CDNA ID no. 40351719
MAEAPETAAPTQPPPAPAASSPPPKSGIPPRYDLDAKWDACLDLSIRRVAYSSLGGAFAGLLLFRSPTTRWASVALGAGVGIGAAYTECSYLFNGAPKCSPKVSTIPSAHSDGGDK

SEQ ID NO: 6793 - DNA, 747 bp, Zea mays
  misc_feature: Ceres CLONE ID no. 1282109
  misc_feature: Ceres CDNA ID no. 29191430
  CDS (71)..(460): REFERENCED BY SEQ ID NO: 6794
attcctcggagagggagaagccgccgccgcagcaatcacagcagcccggagaaagcccaggtccgacaagatgcagatcttcgtgaagacgctgacagggaagaccatcaccctcgaggtcgagagcagcgacaccatcgacaatgtcaaggccaagatccaggacaaggaagggatcccgccggaccagcagcggctgatctttgccgggaagcagctggaggatggccgcacccttgcggactataacatccaaaaggagtctacgcttcacctcgtgcttaggctccgcggtggcatcattgagccctcgctgcaggcgctcgctcgcaagtacaaccaggacaagatgatctgccgcaaatgctatgcacgactgcaccctagggctgtcaactgccgcaagaagaagtgtggtcacagcaaccagctgagggccaagaagaagatcaagaactgaggtgctgctcctagtcagtttcatggacaatgttgggctgtattgctgtgtggttgttgaaccgtgtttgtttacccaacatttgggccttctgttatgttttaccttgttgtcgatgacacaatactatatgacaatagcaactctgttattgtagttttggtcactgttcacctgatatgtgccatatttcggtaagtatcgttagtgggcaaccggaactgtgtcctttctacttattccattttaaattattgaacttttatttagcaaaaaaaaaaaaaaaa

SEQ ID NO: 6794 - protein, 129 aa, Zea mays; identical to SEQ ID NO: 434
  misc_feature: Ceres CLONE ID no. 1282109
  misc_feature: Ceres CDNA ID no. 29191430
  misc_feature (1)..(74): Pfam Name: ubiquitin PFAM Desc: Ubiquitin family
  misc_feature (77)..(128): Pfam Name: Ribosomal_L40e PFAM Desc: Ribosomal L40e family
  misc_feature: Homolog of GI Number: 52077170 NR Desc: ubiquitin / ribosomal protein CEP52
  misc_feature: Homolog of GI Number: 71040673 NR Desc: ubiquitin fusion protein
  misc_feature: Homolog of GI Number: 322750 NR Desc: ubiquitin / ribosomal protein CEP52
  misc_feature: Homolog of GI Number: 16323384 NR Desc: putative ubiquitin extension protein UBQ1
  misc_feature: Homolog of GI Number: 395079 NR Desc: ubiquitin/ribosomal protein
  misc_feature: Homolog of GI Number: 76559884 NR Desc: TPA: ubiquitin
  misc_feature: Homolog of GI Number: 50920549 NR Desc: Putative ubiquitin / ribosomal protein CEP52
  misc_feature: Homolog of GI Number: 13569612 NR Desc: ubiquitin A
  misc_feature: Homolog of GI Number: 73954303 NR Desc:  similar to ubiquitin A
  misc_feature: Homolog of GI Number: 498793 NR Desc: ubiquitin

SEQ ID NO: 6795 - DNA, 927 bp, Zea mays
  misc_feature: Ceres CLONE ID no. 1282128
  misc_feature: Ceres CDNA ID no. 25445569
  CDS (183)..(671): REFERENCED BY SEQ ID NO: 6796
aaacgagacagttgtcatctcactccaccgcaccgtccgcgcacggctcgccggccgtcagtcacagcacgacaccatccgttcctggccttcctcctgtgcaactaccactcgcgtcaccgcggaaattaaccccgaaatccagcgccttcggcacgagcacgatcaggcctgcgcaggagatggggcggagaggggagccctactacgtcgaggcggtgccgccggtggacgtgaacaagaacacagagtggttcatgtacccgggcgtctggaccacctacatcctcatgctcttcttcgcctggcttctcgtcctctccgtctctggttgctccccgggggcagcctggaccgtcgtcaacctcgcgcacttcgccatcacttaccacttcttccattggaagaaaggaaccccttttgctgctgatgaccaaggcatctacagcagattgacatggtgggagcaaattgacaatggtcagcagcttactcggaacaggaagtttttaactgtggtacctgtggtgctgtatcttattgcgtcgcacttgaccgactacaagcagccgatgttttttctcaacacgattgcagttttcgtgctggtcgtggcaaaattgccgaacatgcacaaggtccgcatatttggaatcaatgcagacatctgaggacggctgcaagaagtacatggatgcgatgccatgatgttatgaacaagcagtgtgtttctcaaactcgacacaactgcctgtaatatatgtacaggtttagaaagaactgtaaatgaatgatactctaggatacaaggtttgcctgcagactgctctgtgttgccgttgccgctgctttcttttgagtttcactgaaagtggaaaccataacttgggtaaatgtaacgttcggtttccaaaaaaaaaaaaaaaa

SEQ ID NO: 6796 - protein, 162 aa, Zea mays
  misc_feature: Ceres CLONE ID no. 1282128
  misc_feature: Ceres CDNA ID no. 25445569
  misc_feature (18)..(161): Pfam Name: ORMDL PFAM Desc: ORMDL family
  misc_feature: Homolog of GI Number: 50936787 NR Desc: putative ORMDL2
  misc_feature: Homolog of GI Number: 50928015 NR Desc: OSJNBa0005N02.9
  misc_feature: Homolog of GI Number: 50253201 NR Desc: ORMDL family protein
  misc_feature: Homolog of GI Number: 62657013 NR Desc:  similar to LRRGT00183
  misc_feature: Homolog of GI Number: 45478206 NR Desc: LRRGT00183
  misc_feature: Homolog of GI Number: 57091097 NR Desc:  similar to LRRGT00183
  misc_feature: Homolog of GI Number: 55638233 NR Desc:  similar to ORMDL2
  misc_feature: Homolog of GI Number: 57230856 NR Desc: response to unfolded
  misc_feature: Homolog of GI Number: 6321475 NR Desc: Evolutionarily conserved protein with similarity to Orm2p
MGRRGEPYYVEAVPPVDVNKNTEWFMYPGVWTTYILMLFFAWLLVLSVSGCSPGAAWTVVNLAHFAITYHFFHWKKGTPFAADDQGIYSRLTWWEQIDNGQQLTRNRKFLTVVPVVLYLIASHLTDYKQPMFFLNTIAVFVLVVAKLPNMHKVRIFGINADI

SEQ ID NO: 6797 - DNA, 759 bp, Zea mays
  misc_feature: Ceres CLONE ID no. 1282141
  misc_feature: Ceres CDNA ID no. 25445570
  CDS (76)..(438): REFERENCED BY SEQ ID NO: 6798
ctttctcttagactatctgccgctccagcctttcgctagggtttaaccaccggcggcgcgcgcgacggcggcaagatggtgcagcgtctgacctaccgcaagcggcacagctatgccacgaagtccaaccagacgcgggtcgtcaagacccctggtggcaagctcgtgtaccagtacaccaagaagagagccagcgggcccaagtgtcccgtgaccgggaagaagatccagggcattccccatctgaggccagctgagtacaaaaggtccaggttgtctaggaaccgcagaactgtgaaccgtccctatgggggagtactatctggaactgcagttagagaaaggatcatccgtgctttcctggttgaagagcagaagattgtcaagaaggtgttgaaattacagaagaccaaagacaagacttcctcaaaaaagtaactctgaaacagaagtgagccactcttctgcagcaagggaagacatttttgtcgacagttattatcaatggcttagtctcttctagctgttctattgttcttgtatcttgagcggacaactggtttctagggcaccttgaaatctgtctacgagatctctaagattatgagatgacatatgaccccctattgcttttgttcactttgctaaaactgaaagtccgagttcacatgagttgggcatcagttggtgtttatttcctgcttgttgggtcttgcgtctgaattgggaatcagtttgtgtttaaaaaaaaaaaaaaaa

SEQ ID NO: 6798 - protein, 120 aa, Zea mays
  misc_feature: Ceres CLONE ID no. 1282141
  misc_feature: Ceres CDNA ID no. 25445570
  misc_feature (5)..(103): Pfam Name: Ribosomal_L34e PFAM Desc: Ribosomal protein L34e
  misc_feature: Homolog of GI Number: 50946109 NR Desc: putative ribosomal protein
  misc_feature: Homolog of GI Number: 50941301 NR Desc: putative ribosomal protein L34
  misc_feature: Homolog of GI Number: 57471712 NR Desc: ribosomal protein l34
  misc_feature: Homolog of GI Number: 1076636 NR Desc: ribosomal protein L34
  misc_feature: Homolog of GI Number: 2119150 NR Desc: ribosomal protein L34
  misc_feature: Homolog of GI Number: 47824936 NR Desc: Ribosomal protein L34e
  misc_feature: Homolog of GI Number: 21436403 NR Desc: putative 60S ribosomal protein L34
  misc_feature: Homolog of GI Number: 21594659 NR Desc: 60s ribosomal protein L34
  misc_feature: Homolog of GI Number: 13194822 NR Desc: putative 60S ribosomal protein L34
  misc_feature: Homolog of GI Number: 20259165 NR Desc: putative 60S ribosomal protein L34
MVQRLTYRKRHSYATKSNQTRVVKTPGGKLVYQYTKKRASGPKCPVTGKKIQGIPHLRPAEYKRSRLSRNRRTVNRPYGGVLSGTAVRERIIRAFLVEEQKIVKKVLKLQKTKDKTSSKK

SEQ ID NO: 6799 - DNA, 699 bp, Zea mays
  misc_feature: Ceres CLONE ID no. 1282161
  misc_feature: Ceres CDNA ID no. 25445637
  CDS (139)..(435): REFERENCED BY SEQ ID NO: 6800
gctgcgccggcgtctgtccataaaaccctaaaacctccggctgatcggttggtgttgaggcgagtggaagcttcgagttttttttttcttccttttggcttactgcgcaagaagaagggtaacaagaggacggcggcgatggcgaagaggctgctcccatctctgaaccgggtgctggttgagaagctggtgcagcccaagaagaccgccggcggcatcctcctcccggaaacatccaagcagctgaatgctgctaaagtggtggctgttggccctggtgagcgcgacaaggcaggcaatctgatcccagttgctctgaaggaaggtgacactgttctcctgccagagtatggtggaactgaagttaagcttgcagctgataaagagtacctcctcttcagagagcacgacattttgggcacacttgtggactgattcagagcatcagcaagcctgtcactagtcgttggttctagacttctagtgtgagatgcgtagtatcagattctgggatcaaaatccctaagaactctgaactgtcgtgatgtcatagattttgtgatgaaacatcataattgcctgcttcttgttgcaagcgaacttttgcgtttaaaatggttccctaatattgtgttcgccactctgtccctggttgcaatgctctctagtttacgttggctgttaaaaaaaaaaaaaaaa

SEQ ID NO: 6800 - protein, 98 aa, Zea mays; identical to SEQ ID NO: 1102
  misc_feature: Ceres CLONE ID no. 1282161
  misc_feature: Ceres CDNA ID no. 25445637
  misc_feature (4)..(96): Pfam Name: Cpn10 PFAM Desc: Chaperonin 10 Kd subunit
  misc_feature: Homolog of GI Number: 2267597 NR Desc: 10 kDa chaperonin
  misc_feature: Homolog of GI Number: 50939543 NR Desc: 10 kDa chaperonin
  misc_feature: Homolog of GI Number: 21554204 NR Desc: putative 10kd chaperonin
  misc_feature: Homolog of GI Number: 20258951 NR Desc: putative chaperonin CPN10 protein
  misc_feature: Homolog of GI Number: 1519241 NR Desc: 10 kDa chaperonin
  misc_feature: Homolog of GI Number: 25300327 NR Desc: probable 10kd chaperonin
  misc_feature: Homolog of GI Number: 51011554 NR Desc: heat shock protein 10
  misc_feature: Homolog of GI Number: 47938870 NR Desc: Heat shock 10kD protein 1
  misc_feature: Homolog of GI Number: 46249459 NR Desc: MGC79030 protein
  misc_feature: Homolog of GI Number: 68366462 NR Desc:  similar to Heat shock 10kD protein 1

SEQ ID NO: 6801 - DNA, 692 bp, Zea mays
  misc_feature: Ceres CLONE ID no. 1282165
  misc_feature: Ceres CDNA ID no. 25445571
  CDS (52)..(573): REFERENCED BY SEQ ID NO: 6802
accaaagcaaaccgaagccgcactctaccgcgctcctcccgaaccacagctatgctcgcccaccgcctcctcctcctcctcgccgtcgccgcggcgagcggcaccgccttcgctaagccgacggcgtacgaagccctcgctgactacgacttcccgccggggatcctccccaagggcgtggtcgcctacacgctcgacaacgccacgggcgccttcacggccacgctcgacgcctccgcgtccggcagcgggtcctccgtctgcgagttctccatccagggctcctactcgctccgctaccagaccaagatcaccggaaagatcgcccccgaccacctcaccgacctcgagggcgtctccgtcaaggtcctcttcttctggctcaacatcgtcgaggtcacccggcgcggcgacaacctcgagttctccgtcggcatcgtctccgcggacttcgggattgaaaacttcctcgagtgccccacctgtggctgcgggttcgactgcaacaacctgctcatgctgcagaagcccggcgccgccaccgccaagctgcgcctgcggggtgccttctagaactccacttctgcagatttggtgactgctgctgtaagctgcctcgactagtagtgctgtatgtctagtagatgtgggttaataaagagggcaaacttgaaagaaaaaaaaaaaaaaaa

SEQ ID NO: 6802 - protein, 173 aa, Zea mays
  misc_feature: Ceres CLONE ID no. 1282165
  misc_feature: Ceres CDNA ID no. 25445571
  misc_feature: null
  misc_feature: Useful for making plants with altered terpenoid content
  misc_feature: Homolog of GI Number: 11359723 NR Desc: proteophosphoglycan
  misc_feature: Homolog of GI Number: 2429362 NR Desc: proline rich protein
  misc_feature: Homolog of GI Number: 13592175 NR Desc: ppg3
  misc_feature: Homolog of GI Number: 5420387 NR Desc: proteophosphoglycan
  misc_feature: Homolog of GI Number: 55740439 NR Desc: hydroxyproline
  misc_feature: Homolog of GI Number: 50933659 NR Desc: putative high
  misc_feature: Homolog of GI Number: 46226738 NR Desc: uncharacterized secreted protein with thr rich regions
  misc_feature: Homolog of GI Number: 12018147 NR Desc: vegetative cell wall protein gp1
MLAHRLLLLLAVAAASGTAFAKPTAYEALADYDFPPGILPKGVVAYTLDNATGAFTATLDASASGSGSSVCEFSIQGSYSLRYQTKITGKIAPDHLTDLEGVSVKVLFFWLNIVEVTRRGDNLEFSVGIVSADFGIENFLECPTCGCGFDCNNLLMLQKPGAATAKLRLRGAF

SEQ ID NO: 6803 - DNA, 915 bp, Zea mays
  misc_feature: Ceres CLONE ID no. 1282182
  misc_feature: Ceres CDNA ID no. 29191431
  CDS (157)..(768): REFERENCED BY SEQ ID NO: 6804
ctcttttcatttcccatctctctctgcgccgtcccgtgctccctccgctagttctcccaattccttccccacctcctcggtcgtcgcctcccccagagagcaggagccgcctcgtccctgccggtcccgacccccatcccgtccgcgtccaacgccatgaatcccgagtacgactacctcttcaagctgctcctcatcggcgactccggtgttgggaagtcttgcctgctgctgaggtttgcggatgattcatatctggagagctatatcagtactattggagttgattttaaaatccgcaccgttgagcaagatgggaagacaataaagctacagatttgggatactgctggccaagaacgctttaggaccatcacaagcagctactaccgtggagctcatggcattattgttgtgtatgatgtaactgaccaggagagctttaacaatgtcaagcagtggctgaatgaaattgataggtatgccagtgaaaatgtgaacaagcttttggtggggaacaagtgtgacctggctgagaacagagtagtttcttacgaggctggcaaggcccttgctgatgacatcggaataccattccttgagactagtgccaaggatgcaacaaatgtggagaaggcattcatgaccatggcaggggagataaagaacaggatggcaagtcaaccagctgcaagtggtgctagtaggcctgcaactgtgcaaatgcggggtcagcctgtttctcagcaaagcagctgctgctcttgatcgtctgtctagatcacagtagtgtgattgtgcagcaagcaaaacttaaattggttgctccctgtacattaagcctattactgtcccaaaaaactcgatgttatctatccgatactggaagtctgtctatcaaaaaaaaaaaaaaaa

SEQ ID NO: 6804 - protein, 203 aa, Zea mays
  misc_feature: Ceres CLONE ID no. 1282182
  misc_feature: Ceres CDNA ID no. 29191431
  misc_feature: null
  misc_feature: Useful for making plants with altered Lignin content
  misc_feature (1)..(169): Pfam Name: Arf PFAM Desc: ADP
  misc_feature: Homolog of GI Number: 57900421 NR Desc: Ras
  misc_feature: Homolog of GI Number: 34914060 NR Desc: putative RIC1_ORYSA RAS
  misc_feature: Homolog of GI Number: 730510 NR Desc: Ras
  misc_feature: Homolog of GI Number: 1370166 NR Desc: RAB1C
  misc_feature: Homolog of GI Number: 4586580 NR Desc: rab
  misc_feature: Homolog of GI Number: 51468996 NR Desc: RAB1
  misc_feature: Homolog of GI Number: 303750 NR Desc: GTP
  misc_feature: Homolog of GI Number: 50911379 NR Desc: putative GTP
  misc_feature: Homolog of GI Number: 7643790 NR Desc: small GTP
  misc_feature: Homolog of GI Number: 287835 NR Desc: yptm2
  misc_feature: Useful for delaying flowering time
  misc_feature: Useful for making ornamental plants with modified leaves
  misc_feature: Useful for making plants with altered leaf shape eg curled leaves
  misc_feature: Useful for making plants with increased biomass
  misc_feature: Useful for making shorter plants
MNPEYDYLFKLLLIGDSGVGKSCLLLRFADDSYLESYISTIGVDFKIRTVEQDGKTIKLQIWDTAGQERFRTITSSYYRGAHGIIVVYDVTDQESFNNVKQWLNEIDRYASENVNKLLVGNKCDLAENRVVSYEAGKALADDIGIPFLETSAKDATNVEKAFMTMAGEIKNRMASQPAASGASRPATVQMRGQPVSQQSSCCS

SEQ ID NO: 6805 - DNA, 826 bp, Zea mays
  misc_feature: Ceres CLONE ID no. 1282185
  misc_feature: Ceres CDNA ID no. 35383378
  CDS (107)..(559): REFERENCED BY SEQ ID NO: 6806
atcacaagctgtcacaaactcagcacacaatcacactgacacacacaccaccaccacggcaccgctagtgagaagcggagcgggaggacacgcggcgcggactgcgatggctcgtgcgctcggcgcttgcgtgctgctcgccgtcctgctcggtgccctggcgccggcggcggccgcgcgcgcccacgacgaccagggcagcggggccggcatacggcagccgagcggcgagtaccgcgggaggaaggtgggggccaggacggaggtgcgggacgtggagggcgacggcgaggtgcaggagctcggccggttctccgtcgccgagtacaaccggcagctccgagaaggtggcggcggcggcggcaggctcgagttcggcagggtggtggcggcgcagcggcaggtggtgtcggggctcaagtactacctccgcgtcgtggccgtggaggagggcggcgcggggaacggcggcgagcgcgtgttcgacgccgtcgtcgtcgtcaagccctggctcgactcgcgcaccctgctcacgttcgcgccggcggccgccaagtaagcgcggcgctaccgccggtgtagacgtctagtgtagtatctctggtctgcccttctcggagaccatggacgctgaataaagtcttgtgtgttttgtataagcgaagcgtactagagagtgaagatggacgaactctgcgctgccgcgcgcagatcgatgttttttttttcaaaggctgttgcacaaatagaggagacgagagtctgagactgagagagaataattaaatcgctgtgcttctataccaaatcaaaaaaaaaaaaaaaa

SEQ ID NO: 6806 - protein, 150 aa, Zea mays
  misc_feature: Ceres CLONE ID no. 1282185
  misc_feature: Ceres CDNA ID no. 35383378
  misc_feature (49)..(148): Pfam Name: Cystatin PFAM Desc: Cystatin domain
  misc_feature: Homolog of GI Number: 71061130 NR Desc: TPA: putative cystatin
  misc_feature: Homolog of GI Number: 71794651 NR Desc: putative cystatin
  misc_feature: Homolog of GI Number: 34906946 NR Desc: cysteine proteinase inhibitor Scb
  misc_feature: Homolog of GI Number: 56784937 NR Desc: putative cystatin
  misc_feature: Homolog of GI Number: 32489926 NR Desc: OSJNBa0038P21.11
  misc_feature: Homolog of GI Number: 27728729 NR Desc: cystatin
  misc_feature: Homolog of GI Number: 7438233 NR Desc: cysteine proteinase inhibitor
  misc_feature: Homolog of GI Number: 1706277 NR Desc: Cysteine proteinase inhibitor B
  misc_feature: Homolog of GI Number: 7438236 NR Desc: cysteine proteinase inhibitor
  misc_feature: Homolog of GI Number: 21593036 NR Desc: putative cysteine proteinase inhibitor B
MARALGACVLLAVLLGALAPAAAARAHDDQGSGAGIRQPSGEYRGRKVGARTEVRDVEGDGEVQELGRFSVAEYNRQLREGGGGGGRLEFGRVVAAQRQVVSGLKYYLRVVAVEEGGAGNGGERVFDAVVVVKPWLDSRTLLTFAPAAAK

SEQ ID NO: 6807 - DNA, 695 bp, Zea mays
  misc_feature: Ceres CLONE ID no. 1282195
  misc_feature: Ceres CDNA ID no. 25445572
  CDS (114)..(530): REFERENCED BY SEQ ID NO: 6808
acgggagaaaatctccaaacgcagcagagcccctagcgccgccggtctcttcagcctcgcagcacaccgccgccagcccgagtgaccgctgcagcctagggtttccggcggcgatggcgggtaagggagggaagggtctgctggcggccaagacgacggcggccaagagcaccgacaaggacaaggacaggaagaaggcccccgtgtcgcgctcctcccgcgccggcctccagttcccggtgggtcgcatccaccgccagctcaagtcgcgtgcctccgcgcacggccgcgtcggcgccaccgccgccgtctattccgccgccatcctcgagtacctcaccgccgaggtcctcgagctggccggcaacgccagcaaggacctcaaggtcaagcgcatcaccccgcgccacctgcagctcgccatccgcggggacgaggagctcgacaccctcatcaagggcaccatcgccggtggcggcgtcatcccgcacatccacaagtcgctcatcaacaagaccgccaaggagtgaatccaggccgtgctgctgcttctgcctgactacagtcccatctcgttctgtacttgtgctatcttagtttaagtgcatgttggcacagttctagtaaactcatcttgttcacctatgttaatttaagctctcttccgcgagctttttggaaaaaaaaaaaaaaaa

SEQ ID NO: 6808 - protein, 138 aa, Zea mays; identical to SEQ ID NO: 6708
  misc_feature: Ceres CLONE ID no. 1282195
  misc_feature: Ceres CDNA ID no. 25445572
  misc_feature (33)..(109): Pfam Name: Histone PFAM Desc: Core histone H2A/H2B/H3/H4
  misc_feature: Homolog of GI Number: 34902610 NR Desc: Putative histone H2A
  misc_feature: Homolog of GI Number: 31432099 NR Desc: putative histone H2A
  misc_feature: Homolog of GI Number: 50918585 NR Desc: putative histone H2A protein
  misc_feature: Homolog of GI Number: 6319146 NR Desc: H2A protein
  misc_feature: Homolog of GI Number: 21592838 NR Desc: histone H2A.F/Z
  misc_feature: Homolog of GI Number: 21595470 NR Desc: histone H2A
  misc_feature: Homolog of GI Number: 21536635 NR Desc: putative histone H2A
  misc_feature: Homolog of GI Number: 30024110 NR Desc: putative histone H2A
  misc_feature: Homolog of GI Number: 62664724 NR Desc:  similar to H2A histone family
  misc_feature: Homolog of GI Number: 50798533 NR Desc:  similar to H2A histone family
  misc_feature: Useful for making ornamental plants with modified flowers

SEQ ID NO: 6809 - DNA, 764 bp, Zea mays
  misc_feature: Ceres CLONE ID no. 1282201
  misc_feature: Ceres CDNA ID no. 25445564
  CDS (126)..(596): REFERENCED BY SEQ ID NO: 6810
aaaaccctagccgccttcccgtccttttcctttcataaaccccaagccgcgccgcaatagctcgccccctcgttcgccgcctctcctgctcctaccgcagctctccctcaggtttagtgttcgcaatggcggccttcaacaagcttggtggccttctaaggcacagtgctctggtgagcggtatcactggtggctcttctcctgcagtgttcaatgctgcacggctcatgtctaccaagctatttattggtggtcttgactggggtgttgatgacgtgaaactaagagaagcatttagcagctttggagaggttactgaagcgagggtgatcacagacagggagactgggaggtcaagaggctttggctttgtgaactactccgacagtgatgctgccaaggaagctatttctgcaatggatggcaaggaaattgatgggcggcaggtacgtgtcaacatggctaatgagagacctgctgggaaccgtggtggtggtggctatggcggcggcggctatggaggtggtggctacggaggtggcggcggctacggaggtggtggctatggtggtggcagccaaagctatgatgcttgaggggggcaggatcctattaggtgcattatcaaccaagatatttgaaataatgaactttaggacttggtatgacgttttatgttaagcgttgtcaggttttgctattcgtgttatgctgaattgttggaactcctagatgcagaatcttacgcaaaaaaaaaaaaaaaa

SEQ ID NO: 6810 - protein, 156 aa, Zea mays
  misc_feature: Ceres CLONE ID no. 1282201
  misc_feature: Ceres CDNA ID no. 25445564
  misc_feature (39)..(110): Pfam Name: RRM_1 PFAM Desc: RNA recognition motif.
  misc_feature: Homolog of GI Number: 34906972 NR Desc: putative glycine
  misc_feature: Homolog of GI Number: 21553749 NR Desc: glycine
  misc_feature: Homolog of GI Number: 30682622 NR Desc: glycine
  misc_feature: Homolog of GI Number: 77555842 NR Desc: RNA
  misc_feature: Homolog of GI Number: 2826811 NR Desc: AtGRP2
  misc_feature: Homolog of GI Number: 829254 NR Desc: glycine
  misc_feature: Homolog of GI Number: 76160996 NR Desc: RNA binding protein
  misc_feature: Homolog of GI Number: 1778374 NR Desc: glycine
  misc_feature: Homolog of GI Number: 7439995 NR Desc: RNA binding protein 3
  misc_feature: Homolog of GI Number: 20453303 NR Desc: AT3g23830/F14O13_2
  misc_feature: Useful for delaying flowering time
  misc_feature: Useful for making larger plants
  misc_feature: Useful for making ornamental plants with modified flowers
  misc_feature: Useful for sterility
MAAFNKLGGLLRHSALVSGITGGSSPAVFNAARLMSTKLFIGGLDWGVDDVKLREAFSSFGEVTEARVITDRETGRSRGFGFVNYSDSDAAKEAISAMDGKEIDGRQVRVNMANERPAGNRGGGGYGGGGYGGGGYGGGGGYGGGGYGGGSQSYDA

SEQ ID NO: 6811 - DNA, 834 bp, Zea mays
  misc_feature: Ceres CLONE ID no. 1282224
  misc_feature: Ceres CDNA ID no. 25445573
  CDS (116)..(487): REFERENCED BY SEQ ID NO: 6812
acaacaccagaatccgcgaatcacagacgcgtctatctcagcttgctgcactgcactaccctgccctgccatcatatcgtacgtgagcccggccgagcgagagcgagggagaggcatggctgctccgaagctcgcgacgctggcgctggccgtgctcctggcggcgaccgtggtggctcccccggccgcggtgcgcgcggcgatgtcgtgctccaccgtgtacagcacgctgatgccgtgcctgccgttcgtccagatgggcggggccatgccgccccagccgtgctgcggcggcatccgcagcctgctgcagcaggccaacaacacccccgaccgccgcaccatctgcggctgcctcaagaacgtcgccaacggcgccaacgggagcggcacctacatcagccgcgccgccgcgctgcccagcaagtgcggcgtcgccctgccgtacaagatcagcaccaacgttaactgcaacacgattaattaagtgatgaggcgtcctgtgcgcgtccgggcgaggaatgcatgcatggcgctggcggagagtaataaaataatgctactggtattttaagctatatcgaggtgtgcctgtctctagtcatttattatggtgtttaggaatggtctacacagttcgtaacggtgtatcgtggatgcatgttgccgcgagcagagtacgtaggcatgaaccgatgtgtgcgcttctgtctgtttactctctctatgtagtaatgtgtgggtgctttgatccagatgtattcgctcgtgagtcgtggaagtagatcgtttcagtatcattaccgtgtgttctttctaaaaaaaaaaaaaaaa

SEQ ID NO: 6812 - protein, 123 aa, Zea mays
  misc_feature: Ceres CLONE ID no. 1282224
  misc_feature: Ceres CDNA ID no. 25445573
  misc_feature (32)..(119): Pfam Name: Tryp_alpha_amyl PFAM Desc: Protease inhibitor/seed storage/LTP family
  misc_feature: Homolog of GI Number: 57900252 NR Desc: putative lipid transfer protein
  misc_feature: Homolog of GI Number: 34907830 NR Desc: putative lipid transfer protein
  misc_feature: Homolog of GI Number: 56713109 NR Desc: type 1 non
  misc_feature: Homolog of GI Number: 6492243 NR Desc: lipid transfer protein
  misc_feature: Homolog of GI Number: 42374744 NR Desc: lipid
  misc_feature: Homolog of GI Number: 48526017 NR Desc: lipid transfer protein 1 precursor
  misc_feature: Homolog of GI Number: 49659943 NR Desc: lipid transfer protein
  misc_feature: Homolog of GI Number: 6782436 NR Desc: lipid
  misc_feature: Homolog of GI Number: 77553487 NR Desc: nonspecific lipid
  misc_feature: Homolog of GI Number: 49659947 NR Desc: lipid transfer protein
MAAPKLATLALAVLLAATVVAPPAAVRAAMSCSTVYSTLMPCLPFVQMGGAMPPQPCCGGIRSLLQQANNTPDRRTICGCLKNVANGANGSGTYISRAAALPSKCGVALPYKISTNVNCNTIN

SEQ ID NO: 6813 - DNA, 892 bp, Zea mays
  misc_feature: Ceres CLONE ID no. 1282225
  misc_feature: Ceres CDNA ID no. 25445565
  CDS (105)..(614): REFERENCED BY SEQ ID NO: 6814
tcatttctgctcttctgccgtctagtcctttgtactgaccggcgctccggtcgtctcctcgcgcttgcgggttccccgtccccaccccacgccgggggcaagagatggagaacgcggtggtgctccgggagtggtttgaccgcgtcgacgccggccgcaccggcaacatcaccgctgcccagctccagggcgcgctcgctgtcggcaacctcaacttccccatctccgtcgtgcagcagatgattaggatgtatgacttcgatcggaatggcaccatgaacttcgaagagtttctggctcttaacaaattcctacagaaggtgcaaaatgtgttttccaccctggataggggtcgtggatttctaagtcttgaggaggtgtaccaggcattaatcaaacttggtttctcgttggattcaccagccttctatactgtttgtgagagctttgacaagagcaagaagggcatgattcaattggatgagtttatatcactctgcatttttgttcagtcagctcgtaacctgttcaattcgttcgatacaagcaagcaaggaagagtgactttagattttaaccaattcgtgtactgcacggcaaactgcaggatataatgtggttgtacatgggcgcccaaacaaaaaggttagcagtgtgaagtgctaaccgttcgccaatcaaacttcgtttctgaaccggcagctgggtattgcaattcactgttcgccatctaaggcttgttgtaccatcattttgcctgaatgtattcttggtcacctattggtcaatccgtgtccagttttctgacatcctgggctgtatatacagaataagacttggcaatttgtggctgtatttatataaaatatttcaagtaaaaaaaaaaaaaaaa

SEQ ID NO: 6814 - protein, 169 aa, Zea mays
  misc_feature: Ceres CLONE ID no. 1282225
  misc_feature: Ceres CDNA ID no. 25445565
  misc_feature (6)..(34): Pfam Name: efhand PFAM Desc: EF hand
  misc_feature: Homolog of GI Number: 76152553 NR Desc: SJCHGC06474 protein
  misc_feature: Homolog of GI Number: 55770946 NR Desc: apoptosis
  misc_feature: Homolog of GI Number: 41055656 NR Desc: similar to programmed cell death 6
  misc_feature: Homolog of GI Number: 1655733 NR Desc: sorcin
  misc_feature: Homolog of GI Number: 60594505 NR Desc: Chain B
  misc_feature: Homolog of GI Number: 8745028 NR Desc: probable possible programmed cell death protein
  misc_feature: Homolog of GI Number: 68125189 NR Desc: programmed cell death 6 protein
  misc_feature: Homolog of GI Number: 28277280 NR Desc: Pdcd6
  misc_feature: Homolog of GI Number: 51703353 NR Desc: Pdcd6
MENAVVLREWFDRVDAGRTGNITAAQLQGALAVGNLNFPISVVQQMIRMYDFDRNGTMNFEEFLALNKFLQKVQNVFSTLDRGRGFLSLEEVYQALIKLGFSLDSPAFYTVCESFDKSKKGMIQLDEFISLCIFVQSARNLFNSFDTSKQGRVTLDFNQFVYCTANCRI

SEQ ID NO: 6815 - DNA, 945 bp, Zea mays
  misc_feature: Ceres CLONE ID no. 1282246
  misc_feature: Ceres CDNA ID no. 25445820
  CDS (90)..(755): REFERENCED BY SEQ ID NO: 6816
atatagggtctcacttgtgtaccccaacgagaagagcggcggcgcgggcggacaaggagcaggcggaggaggagctgtgccaagccacaatgggtatctcgcgtgactcgatgcacaagcgccgggccaccggtggaaagcagaaggcctggaggaagaagcgaaagtatgagcttggtcgccagccagccaacaccaagttgtcaagcaataagacagtgaggagggtccgtgttcgtggaggtaatgtgaaatggagggctcttcgccttgatactggtaactactcatggggaagtgaagctgttacccgcaagacccgtatcctcgacgtggtctacaatgcatcaaacaatgagcttgtgaggacacaaacccttgtgaagagtgccattgtgcaagttgatgctgccccattcaagcagtggtacctcactcactatggagttgacattggtaggaagaagaaaacccctgctgcaaagaaggataatgctgagggacaagaggttgaggcagcagctgaggaaacgaaaaagagcaaccatgtcacgaggaagcttgagaagcgcaaggagggacgtacccttgacccacacattgaggagcaatttggcagtggacggttgctggcatgcatttcttcccgccctggacagtgtggccgagctgatgggtacatccttgagggtaaagagcttgagttctacatgaagaagctacagaggaagaagggcaagagcgctgtagcttagagcattctcatggattgtcttgcaccgaaatgtgtgttctgatgagtacactttttttggttagtcgtctcaagttcagagcgttatgccatgttttcagacctgattagtacactgttttctaaaagcgattgagctctagtccaatgtattgataatatctgctgttgtcctaaaaaaaaaaaaaaaa

SEQ ID NO: 6816 - protein, 221 aa, Zea mays
  misc_feature: Ceres CLONE ID no. 1282246
  misc_feature: Ceres CDNA ID no. 25445820
  misc_feature (1)..(199): Pfam Name: Ribosomal_S8e PFAM Desc: Ribosomal protein S8e
  misc_feature: Homolog of GI Number: 1498053 NR Desc: ribosomal protein S8
  misc_feature: Homolog of GI Number: 32489919 NR Desc: OSJNBa0038P21.4
  misc_feature: Homolog of GI Number: 50908507 NR Desc: putative 40S ribosomal protein S8
  misc_feature: Homolog of GI Number: 7440236 NR Desc: probable ribosomal protein S8
  misc_feature: Homolog of GI Number: 3264759 NR Desc: 40S ribosomal protein S8
  misc_feature: Homolog of GI Number: 82400150 NR Desc: putative 40S ribosomal protein S8
  misc_feature: Homolog of GI Number: 28416637 NR Desc: At5g59240
  misc_feature: Homolog of GI Number: 61654716 NR Desc: S8
  misc_feature: Homolog of GI Number: 29539344 NR Desc: ribosomal protein S8
MGISRDSMHKRRATGGKQKAWRKKRKYELGRQPANTKLSSNKTVRRVRVRGGNVKWRALRLDTGNYSWGSEAVTRKTRILDVVYNASNNELVRTQTLVKSAIVQVDAAPFKQWYLTHYGVDIGRKKKTPAAKKDNAEGQEVEAAAEETKKSNHVTRKLEKRKEGRTLDPHIEEQFGSGRLLACISSRPGQCGRADGYILEGKELEFYMKKLQRKKGKSAVA

SEQ ID NO: 6817 - DNA, 737 bp, Zea mays
  misc_feature: Ceres CLONE ID no. 1282288
  misc_feature: Ceres CDNA ID no. 25445734
  CDS (123)..(482): REFERENCED BY SEQ ID NO: 6818
ctgttgccccccaagccaaccatatccactctcggcggcgccgcgcatctctcctctcttcttgcccttccttcccccaacccacacagcctcactaggggtctaccggcggcggcaacgagatggtgcagcgcctcacctaccgaaagcgtcacagctacgcgacaaaatccaatcagacccgggtcgtgaagaccccaggtgggaagcttgtgtaccaatacaccaagaagagggcgagcggtcccaagtgccccgtcaccgggaagaagatccaggggatcccccacttgagacctgccgagtacaagaggtccaggttgtctaggaaccacaggactgttaaccgtccttatggtggagtactctctggaattgctgttagggagagaattatccgtgctttcttggttgaggagcagaagattgtcaagaaggtcctgaaaatacagaaaaccaaggacaagacagctgcaaagtagagctccaggaatggaagcctagacactgcgagaagtaattttggtggatggaaaatatgtttgccttgtgtcgagcatttagcatgtgagacatgcctgttgaagtgtttgagtttagagaccggaatccctttcacctttgaattgttgctatgtcgggacatctgctcccctagttgctttgttatgaattgagatcatatctgggtaagataatcttgtctaacaccttggcttgtaaaaaaaaaaaaaaaa

SEQ ID NO: 6818 - protein, 119 aa, Zea mays; identical to SEQ ID NO: 4906
  misc_feature: Ceres CLONE ID no. 1282288
  misc_feature: Ceres CDNA ID no. 25445734
  misc_feature (5)..(103): Pfam Name: Ribosomal_L34e PFAM Desc: Ribosomal protein L34e
  misc_feature: Homolog of GI Number: 50946109 NR Desc: putative ribosomal protein
  misc_feature: Homolog of GI Number: 50941301 NR Desc: putative ribosomal protein L34
  misc_feature: Homolog of GI Number: 57471712 NR Desc: ribosomal protein l34
  misc_feature: Homolog of GI Number: 2119150 NR Desc: ribosomal protein L34
  misc_feature: Homolog of GI Number: 1076636 NR Desc: ribosomal protein L34
  misc_feature: Homolog of GI Number: 47824936 NR Desc: Ribosomal protein L34e
  misc_feature: Homolog of GI Number: 20259165 NR Desc: putative 60S ribosomal protein L34
  misc_feature: Homolog of GI Number: 21436403 NR Desc: putative 60S ribosomal protein L34
  misc_feature: Homolog of GI Number: 21594659 NR Desc: 60s ribosomal protein L34
  misc_feature: Homolog of GI Number: 13194822 NR Desc: putative 60S ribosomal protein L34

SEQ ID NO: 6819 - DNA, 696 bp, Zea mays
  misc_feature: Ceres CLONE ID no. 1282294
  misc_feature: Ceres CDNA ID no. 25445821
  CDS (83)..(535): REFERENCED BY SEQ ID NO: 6820
aaacaacagcgaacacatctcctcgcatttcttcccatccgatccccccttcgcaactaaaaccccaactcgccccgcatcgatggcgcccaaggccgagaagaaacccgcggcgaagaagccggcggaggaggagcccgcggccgagaaggcgcccgccgggaagaagccgaaggcggagaagcgggtccccgctggcaagtccgctgccaaggaaggcggcgagggcaagaggggcaagaagaagggcaagaagagcgtggagacctacaagatctacatcttcaaggtgctgaagcaggtgcacccggacattggcatctcctccaaggccatgtccatcatgaactccttcattaacgatatcttcgagaagctcgctgctgaggccgccaagctcgcgcgctataacaagaagcctaccatcacctcccgtgagatccagacctccgtgcgcctcgtccttcccggggagctcgccaagcacgccgtctccgagggcaccaaggccgtcaccaagttcacctcggcctaggctgcgcggccgccgcttgcaggattctctcctgtgttcacgtctcttgctgtagttaggtgctgctgcctgctggcttctatgtatgttatctatctgtctgtagcaactgtgttatctgataggaccgtaatggtgcttattcaaaaaaaaaaaaaaaa

SEQ ID NO: 6820 - protein, 150 aa, Zea mays
  misc_feature: Ceres CLONE ID no. 1282294
  misc_feature: Ceres CDNA ID no. 25445821
  misc_feature: No seed is being produced by the plant
  misc_feature: The plant flowers significantly late compared to wild-type.
  misc_feature: Useful for biocontainment applications
  misc_feature: Useful for making plants with modulated flowering time
  misc_feature (57)..(129): Pfam Name: Histone PFAM Desc: Core histone H2A/H2B/H3/H4
  misc_feature: Homolog of GI Number: 22325 NR Desc: H2B histone
  misc_feature: Homolog of GI Number: 577825 NR Desc: H2B histone
  misc_feature: Homolog of GI Number: 21801 NR Desc: histone H2B
  misc_feature: Homolog of GI Number: 22323 NR Desc: H2B histone
  misc_feature: Homolog of GI Number: 50932769 NR Desc: putative histone H2B
  misc_feature: Homolog of GI Number: 1708107 NR Desc: Histone H2B
  misc_feature: Homolog of GI Number: 34895904 NR Desc: putative histone H2B
  misc_feature: Homolog of GI Number: 34895900 NR Desc: putative histone H2B
  misc_feature: Homolog of GI Number: 34895838 NR Desc: putative histone H2B
  misc_feature: Homolog of GI Number: 34895908 NR Desc: putative histone H2B
MAPKAEKKPAAKKPAEEEPAAEKAPAGKKPKAEKRVPAGKSAAKEGGEGKRGKKKGKKSVETYKIYIFKVLKQVHPDIGISSKAMSIMNSFINDIFEKLAAEAAKLARYNKKPTITSREIQTSVRLVLPGELAKHAVSEGTKAVTKFTSA

SEQ ID NO: 6821 - DNA, 898 bp, Zea mays
  misc_feature: Ceres CLONE ID no. 1282295
  misc_feature: Ceres CDNA ID no. 40351720
  CDS (96)..(566): REFERENCED BY SEQ ID NO: 6822
atctatcgcactcgtagtcgtagctcaagcatcagcggcaggagctctgggcagcgtgcgcacgtggggtacctagctcgctctgctagcctaccatggctgatcaccaccggggtgcgacgggaggtggcgggggctacggcgacctccagcgcgggggcggcatgcacggcgaggcgcagcagcagcagaagcagggcgccatgatgacggcgctcaaggccgcgacggccgcgaccttcggcgggtcgatgctggtgctgtccgggctgatcctggccggcaccgtgatcgcgctcacggtggccacccccgtgctggtgatcttcagcccggtgctggtgccggccgccatcgcgctggcgctcatggcggccgggttcgtcacctccggcggcctcggcgtcgctgcgctgtccgtgttctcctggatgtacaagtacctgacgggcaagcacccgccgggcgccgaccagctggaccacgccaaggcgaggctggcgtccaaggcccgcgacatcaaggatgcagcacagcaccgcatcgaccaggcgcaggggtcttgagagaagaaccacactcgagcggaccgcgcgcgcgacctccttgaaccactgccggcgcggcggcatatggcccttaaaggcggtggctgctgctacgtacgctgccgtagagtctcggtcgccgcgatagctctagctagtcgtttatgtgttgtgctttgtgtgtgcatgcttgtgtctggaggcatgcagtgcagtgcagtactatatgctgtatgcgtctctctttgatcggagaggcggatgtacagcatgctcgatatgtctagtttggatgtcatgtttatgatgaggaataaaatgcagtgttcaggtgaaaaaaaaaaaaaaaa

SEQ ID NO: 6822 - protein, 156 aa, Zea mays
  misc_feature: Ceres CLONE ID no. 1282295
  misc_feature: Ceres CDNA ID no. 40351720
  misc_feature (36)..(146): Pfam Name: Oleosin PFAM Desc: Oleosin
MADHHRGATGGGGGYGDLQRGGGMHGEAQQQQKQGAMMTALKAATAATFGGSMLVLSGLILAGTVIALTVATPVLVIFSPVLVPAAIALALMAAGFVTSGGLGVAALSVFSWMYKYLTGKHPPGADQLDHAKARLASKARDIKDAAQHRIDQAQGS

SEQ ID NO: 6823 - DNA, 1045 bp, Zea mays
  misc_feature: Ceres CLONE ID no. 1282865
  misc_feature: Ceres CDNA ID no. 29191313
  CDS (102)..(863): REFERENCED BY SEQ ID NO: 6824
aacaagcagcgaaatccaatctagaagcgcccctctccctctctctctctctcttcgccgtccgaagctccgcaccccaatctaatcgacacctcgccgagatgggccgcaagttcttcgtcggtggcaactggaaatgcaatggaaccacagatcaggtcgagaagattgtcaaaaccctgaatgaaggacaggttcccccttcagatgttgtggaggtcgttgtcagccctccttatgtcttccttcctgtggtcaagagccagctgcgccaagagttccatgttgcggctcagaactgctgggttaagaagggaggtgctttcaccggtgaagtcagtgctgagatgctcgtcaaccttggtgttccctgggtcattcttggacactctgaaaggagagctctgctgggagaatcaaatgaatttgttggagacaaggttgcgtatgccctgtctcagggactaaaggtcattgcatgtgttggtgagacacttgagcagagggaggctgggtctaccatggaggttgttgctgcacaaacaaaagcaattgctgagaagatcaaggactggagcaacgtagttgttgcctatgaaccagtttgggctattggaactggtaaagttgccaccccagctcaggctcaggaagtgcacgcctccctgagggattggctaaagaccaacgtcagccctgaggttgctgaatctactaggatcatttacggaggctctgtaactgccgcgaactgcaaagagctagcagcacagcctgatgtcgatgggtttcttgtcggtggagcttctttgaagcctgagttcatcgacatcatcaacgcggccaccgtgaagtccgcttaagatgttacgctgaagacgaacatactttttttttgctcaactgtgctatgtaagctagtagcttttgcgcaggagcagagactgttttgcctgcccccaacttttagcttgagcttgctaataatgtttacctctggacgtatcaataatggtgcttatgtaccccaaaaaaaaaaaaaaaa

SEQ ID NO: 6824 - protein, 253 aa, Zea mays; identical to SEQ ID NO: 4700
  misc_feature: Ceres CLONE ID no. 1282865
  misc_feature: Ceres CDNA ID no. 29191313
  misc_feature (5)..(245): Pfam Name: TIM PFAM Desc: Triosephosphate isomerase
  misc_feature: Homolog of GI Number: 168647 NR Desc: triosephosphate isomerase 1
  misc_feature: Homolog of GI Number: 50900728 NR Desc: putative triosephosphate isomerase
  misc_feature: Homolog of GI Number: 407525 NR Desc: triosephosphate isomerase
  misc_feature: Homolog of GI Number: 11124572 NR Desc: triosephosphat
  misc_feature: Homolog of GI Number: 1785948 NR Desc: cytosolic triosephosphate isomerase
  misc_feature: Homolog of GI Number: 38112662 NR Desc: triose phosphate isomerase cytosolic isoform
  misc_feature: Homolog of GI Number: 77745458 NR Desc: triose phosphate isomerase cytosolic isoform
  misc_feature: Homolog of GI Number: 602590 NR Desc: triosephosphate isomerase
  misc_feature: Homolog of GI Number: 553107 NR Desc: triosephosphate isomerase
  misc_feature: Homolog of GI Number: 556171 NR Desc: triosephosphate isomerase
  misc_feature: Useful for making lethal plants for genetic confinement systems
  misc_feature: Useful for making plants with increased biomass and foliage
  misc_feature: Useful for sterility

SEQ ID NO: 6825 - DNA, 627 bp, Zea mays
  misc_feature: Ceres CLONE ID no. 1283075
  misc_feature: Ceres CDNA ID no. 36705278
  CDS (154)..(375): REFERENCED BY SEQ ID NO: 6826
ggcgaaacgcgttgttttcctcttttccccaaggcaaccaaaccatctcgattctcgactcgtggggaagtttcgctctcgccggcgtcgacggcctagggttcgaggaacgtccgtccgtccgtccggggaaggagcggtagggaggcggagatgatcgaggtggtgctcaacgaccgcctggggaagaaggtgcgggtcaagtgcaacgaggacgacaccatcggcgacctcaagaagctggtggcggcgcagacggggacgcgccccgagaagatccgcatccagaagtggtacaacatctacaaggaccacatcaccctcaaggactacgaggtccacgacggcatgggcctcgagctctactacaactgagccgccgcccctctctccctctcgtcaggttggtctgaattctgaagtcatgggtgcaattcgcttcgcggtgatctcttaagctcatcacatatataaaagcaacctcagtgggctatgtaagacatggcgtgccaaactatcagtgaccactgacagctttgcaatacgttgttgtatggtcaacctgcaaacttggtgtactgctactcgtactataaataacatagggttttaaaaaaaaaaaaaaaa

SEQ ID NO: 6826 - protein, 73 aa, Zea mays
  misc_feature: Ceres CLONE ID no. 1283075
  misc_feature: Ceres CDNA ID no. 36705278
  misc_feature (2)..(71): Pfam Name: ubiquitin PFAM Desc: Ubiquitin family
  misc_feature: Homolog of GI Number: 77553656 NR Desc: Ubiquitin family
  misc_feature: Homolog of GI Number: 77548651 NR Desc: Ubiquitin family
  misc_feature: Homolog of GI Number: 10177015 NR Desc: ubiquitin
  misc_feature: Homolog of GI Number: 50910751 NR Desc: ubiquitin
  misc_feature: Homolog of GI Number: 56501213 NR Desc: ubiquitin
  misc_feature: Homolog of GI Number: 23509060 NR Desc: ubiquitin
  misc_feature: Homolog of GI Number: 71026115 NR Desc: ubiquitin
  misc_feature: Homolog of GI Number: 55648207 NR Desc:  similar to ubiquitin
  misc_feature: Homolog of GI Number: 65303474 NR Desc: ubiquitin
  misc_feature: Homolog of GI Number: 63635477 NR Desc:  similar to Chain A
MIEVVLNDRLGKKVRVKCNEDDTIGDLKKLVAAQTGTRPEKIRIQKWYNIYKDHITLKDYEVHDGMGLELYYN

SEQ ID NO: 6827 - DNA, 782 bp, Zea mays
  misc_feature: Ceres CLONE ID no. 1283482
  misc_feature: Ceres CDNA ID no. 25445566
  CDS (118)..(576): REFERENCED BY SEQ ID NO: 6828
accaaggaaattcacaaagagatactagtccctaccaaagcatacttcctgaaacactcttgcaatccactgagtcctgtttgttgagacttgagacgcatagagctagcgtcgacaatgtcgctcgtgaggcgcagcaacgtgttcgaccccttctccatggacctctgggaccccttcgacaccatgttccgctccatcgtcccgtcggcggtctccaccaactccgagaccgccgccttcgccagcgcccgcatcgactggaaggagacgcccgaggcgcacgtgttcaaggccgacctccccggcgtcaagaaggaggaggtcaaggtcgaggtcgaggacggcaacgtgctggtcatcagcggccagcgcagcagggagaaggaggacaaggacgacaagtggcaccgcgtcgagcgcagcagcggccagttcgtcaggcgcttccgtctgccggagaacgccaaggtggaccaggtcaaggctggcctcgagaatggcgtgctcacggtcaccgtgcccaaggcggaggagaagaagcctgaggtgaaggctattgagatctctggttgagcatccaatccaatatggacgtggacggaaggtgtactgctgctggtctgtggctgtcgttgtcctgtgtggatgtttcctgtgtcttctactatatatataatgtacttccgtctgtttcgtttcgtatgtacaatcttccgggtatcgttcatgtatccctttgaataataacaaataaattcgggttaaaaaaaaaaaaaaaa

SEQ ID NO: 6828 - protein, 152 aa, Zea mays
  misc_feature: Ceres CLONE ID no. 1283482
  misc_feature: Ceres CDNA ID no. 25445566
  misc_feature (48)..(151): Pfam Name: HSP20 PFAM Desc: Hsp20/alpha crystallin family
  misc_feature: Homolog of GI Number: 22335 NR Desc: heat shock protein 17.2
  misc_feature: Homolog of GI Number: 1122315 NR Desc: heat shock protein 17.0
  misc_feature: Homolog of GI Number: 1122313 NR Desc: heat shock protein 16.9
  misc_feature: Homolog of GI Number: 50900608 NR Desc: putative heat shock protein
  misc_feature: Homolog of GI Number: 50900610 NR Desc: putative heat shock protein
  misc_feature: Homolog of GI Number: 50900606 NR Desc: putative heat shock protein
  misc_feature: Homolog of GI Number: 1536911 NR Desc: 17 kDa class I small heat shock protein
  misc_feature: Homolog of GI Number: 1763972 NR Desc: heat shock protein
  misc_feature: Homolog of GI Number: 17942919 NR Desc: Chain D
  misc_feature: Homolog of GI Number: 16930753 NR Desc: small heat shock protein
  misc_feature: Useful for delaying flowering time
  misc_feature: Useful for increasing chlorophyll and photosynthetic capacity
  misc_feature: Useful for making ornamental plants with modified flowers
  misc_feature: Useful for making ornamental plants with modified leaves
  misc_feature: Useful for making plants with increased biomass
  misc_feature: Useful for making plants with increased biomass and foliage
  misc_feature: Useful for making plants with increased biomass and foliage
  misc_feature: Useful for making plants with increased biomass and foliage
  misc_feature: Useful for making shorter plants
  misc_feature: Useful for making stronger plants
MSLVRRSNVFDPFSMDLWDPFDTMFRSIVPSAVSTNSETAAFASARIDWKETPEAHVFKADLPGVKKEEVKVEVEDGNVLVISGQRSREKEDKDDKWHRVERSSGQFVRRFRLPENAKVDQVKAGLENGVLTVTVPKAEEKKPEVKAIEISG

SEQ ID NO: 6829 - DNA, 852 bp, Zea mays
  misc_feature: Ceres CLONE ID no. 1283536
  misc_feature: Ceres CDNA ID no. 40351721
  CDS (55)..(756): REFERENCED BY SEQ ID NO: 6830
acacatattattgagaccaactagcaacatagaaagcacaatagtgtaccaacaatggcagccaaaatattttgcttccttatgctccttggtctttctgcaagtgctgctaccgcaaccattttcccacaatgctcacaagctcctatagcttcctttcttcccccatacctctcaccagcggtgtcttcagtatgtgaaaacccaattcttcaaccctacaggatccaacaggcaatcgcagcaggcatcttacctttatcacccttgttcctccaacaaccgtcagccctattacagcagttacctttggtgcatttgttggcacaaaacatcaaggcacaacaactacaacaacttgtgctaggaaaccttgctgcctactctcagcaacagcagtttcttccattcaaccaactggctgcattgaactctgctgcttatttgcaacaacaactaccattcagtcagctagctgctgcctacccccagcaatttcttccattcaaccaactggcagcattgaactctgctgcttatttacaacagcaacagctaccaccattcagccagctagctgatgtgagccctgttgccttcttgacacaacaacagttgttgccgttctacctgcacgctgcgcctaacgctggcaccctcttacaactgcaacaattgctgccattcaaccaacttgctttgacaaacccaacaacgttctaccaacaacccatcattggcggtgccctcttttagattgcttatgagttatagttcaataatgaagttttttggatgatgtttgtggcttcccagaaataagaaagtacatttccaaaaaaaaaaaaaaaa

SEQ ID NO: 6830 - protein, 233 aa, Zea mays
  misc_feature: Ceres CLONE ID no. 1283536
  misc_feature: Ceres CDNA ID no. 40351721
  misc_feature (99)..(145): Pfam Name: Zein PFAM Desc: Zein seed storage protein
MAAKIFCFLMLLGLSASAATATIFPQCSQAPIASFLPPYLSPAVSSVCENPILQPYRIQQAIAAGILPLSPLFLQQPSALLQQLPLVHLLAQNIKAQQLQQLVLGNLAAYSQQQQFLPFNQLAALNSAAYLQQQLPFSQLAAAYPQQFLPFNQLAALNSAAYLQQQQLPPFSQLADVSPVAFLTQQQLLPFYLHAAPNAGTLLQLQQLLPFNQLALTNPTTFYQQPIIGGALF

SEQ ID NO: 6831 - DNA, 676 bp, Zea mays
  misc_feature: Ceres CLONE ID no. 1283538
  misc_feature: Ceres CDNA ID no. 25446531
  CDS (59)..(442): REFERENCED BY SEQ ID NO: 6832
gccaagtttttttaactatacaatccaggaaggaagtcactgtcacttggtgagatcgatggcccgcgtcgccgccgtcctcgttgctctcctcgccctctttgccgtcgcggccacggcgcaggcccctgccgcgtcgcccaagcgcgccccagcccctgcgccacccaagatggcccctctcccgccgccgccgaccagggcccccatggcctccccgccctcgcctcccacgatgtcgccggcgtccgccccctccgccgacgctccagccacgagccccgccggtgcgggatttggcgacgcgatggccccggcgggagcctccgctctgactccggccgccgcgcccgtcacggagaagagcacagccgcatctgcctccgccatcagcttcgtcgccatcgccggcgctgtggcagccgccgccgtcgtgttctagacatccggaagtggatctgaggagctgcagctgcacctgagccgctctgctgttgttgatagatgccctctgtttgctctgttttacgatccattgtttatttatttatttgtttgtttgtcatttagaggtctgagacagagatgaggatgtgtaatcctatcaattttctgaacgggagttgtttctatgctccgcaagcaaacatatgacactgcaaaaaaaaaaaaaaaa

SEQ ID NO: 6832 - protein, 127 aa, Zea mays
  misc_feature: Ceres CLONE ID no. 1283538
  misc_feature: Ceres CDNA ID no. 25446531
  misc_feature: Homolog of GI Number: 50924618 NR Desc: OSJNBa0086B14.8
  misc_feature: Homolog of GI Number: 488731 NR Desc: chitinase
  misc_feature: Homolog of GI Number: 27363326 NR Desc: At5g10430/F12B17_220
  misc_feature: Homolog of GI Number: 50940371 NR Desc: putative pherophorin
  misc_feature: Homolog of GI Number: 6523547 NR Desc: hydroxyproline
  misc_feature: Homolog of GI Number: 30140331 NR Desc: putative arabinagalactan protein
  misc_feature: Homolog of GI Number: 21992 NR Desc: extensin
  misc_feature: Homolog of GI Number: 58388035 NR Desc: ENSANGP00000010844
  misc_feature: Homolog of GI Number: 34905768 NR Desc: P0401G10.10
  misc_feature: Homolog of GI Number: 34872074 NR Desc: similar to Ser/Arg
MARVAAVLVALLALFAVAATAQAPAASPKRAPAPAPPKMAPLPPPPTRAPMASPPSPPTMSPASAPSADAPATSPAGAGFGDAMAPAGASALTPAAAPVTEKSTAASASAISFVAIAGAVAAAAVVF

SEQ ID NO: 6833 - DNA, 770 bp, Zea mays
  misc_feature: Ceres CLONE ID no. 1283542
  misc_feature: Ceres CDNA ID no. 29191432
  CDS (110)..(571): REFERENCED BY SEQ ID NO: 6834
cttctaaaccctacccgactccgccgccgctccgccgccgctccgcctcagcgcatcgccctccgccacagcgtaccgcgacctcatcgatcaccttcaactttcaatcatggcggacgtcgatgtcgaaccggaggttgccgccggcgctcccaagaagaggacgttccgcaagtacagctaccgcggcgtcgacctagatgcgcttctcgacatgtccacggacgacctcgtccagctcttccccgcgcgcgccaggagaaggttccagaggggtctgaagaggaagcccatggcactcatcaagaagctgcgcaaggcgaaaaaggatgctcctgctggtgagaagccagagccagtcaagacacatctccgtaacatgatcattgtccctgagatgattgggagcattgttggggtctacaacggcaaaacattcaaccaggttgagatcaagcctgagatgatcggccactaccttgctgagttctccatctcctataagccggtcaagcatggcaggcccggtatcggtgccacccactcctcgcggtttattcctctgaaatgagctgttacccgtctctgtagtctcccaagagtccgttggcaatgtccattcagcttttctacttgttttgaacaagttaaatgcccaagacattttgttttgttccattccagctcaagaattcaaagctaagcattgcacatttatgctgttttgttggaggtatttgagttaatcatacctaaaaaaaaaaaaaaaa

SEQ ID NO: 6834 - protein, 153 aa, Zea mays
  misc_feature: Ceres CLONE ID no. 1283542
  misc_feature: Ceres CDNA ID no. 29191432
  misc_feature (55)..(136): Pfam Name: Ribosomal_S19 PFAM Desc: Ribosomal protein S19
  misc_feature: Homolog of GI Number: 50919151 NR Desc: putative 40S ribosomal protein S15
  misc_feature: Homolog of GI Number: 50934735 NR Desc: putative 40S ribosomal protein S15
  misc_feature: Homolog of GI Number: 15425963 NR Desc: 40S ribosomal protein S15
  misc_feature: Homolog of GI Number: 20465567 NR Desc: putative ribosomal protein S15
  misc_feature: Homolog of GI Number: 20147171 NR Desc: At1g04270/F19P19_29
  misc_feature: Homolog of GI Number: 1107485 NR Desc: 40S ribosomal protein S15
  misc_feature: Homolog of GI Number: 82621162 NR Desc: 40S ribosomal protein S15
  misc_feature: Homolog of GI Number: 2982268 NR Desc: probable 40S ribosomal protein S15
  misc_feature: Homolog of GI Number: 81076490 NR Desc: 40S ribosomal protein S15
  misc_feature: Homolog of GI Number: 79316582 NR Desc: RPS15
MADVDVEPEVAAGAPKKRTFRKYSYRGVDLDALLDMSTDDLVQLFPARARRRFQRGLKRKPMALIKKLRKAKKDAPAGEKPEPVKTHLRNMIIVPEMIGSIVGVYNGKTFNQVEIKPEMIGHYLAEFSISYKPVKHGRPGIGATHSSRFIPLK

SEQ ID NO: 6835 - DNA, 1067 bp, Zea mays
  misc_feature: Ceres CLONE ID no. 1283552
  misc_feature: Ceres CDNA ID no. 25445567
  CDS (90)..(692): REFERENCED BY SEQ ID NO: 6836
aaaaaaatcacccactaaaagcaccttcctcttcctcttcctccgcccccaatccccctcgtctcacaaccctagctgcccccgaatccatggatcctaacaaatccagcaccccgccgccgcctccagtcatgggtgcccccgttgcctaccctccgcctgcgtaccctcccggtgtggccgccggcgccggcgcctacccgccgcagctctacgcaccgccggctgctgccgcggcccagcaggcggcggccgcgcagcagcagcagctgcagatattctgggcggagcagtaccgcgagatcgaggccactaccgacttcaagaatcacaacctcccgctcgcccgcatcaagaagatcatgaaagccgacgaggacgtccgcatgatcgccgccgaggctcccgtggtgttcgcccgggcctgcgagatgttcatcctcgagctcacccatcgcggctgggcgcacgccgaagagaacaagcgccgcacgctccagaaatccgacattgccgctgccatcgcccgcaccgaggtattcgacttccttgtggacatcgttccgcgcgacgacggtaaagacgctgatgcggcggccgccgcagctgccgcggctgccgggatcccgcgccccgccgccggagtaccagccaccgaccctctcgcctactactacgtgcctcagcagtaatgtatcatcatcacgttattgttccgtctatgtgcctgagcaataatgtatcatcattgccttattgttccggggcagttgtgttatttgtgtctgtttagttgctgctgctgttaccgcgtaatagcatatgtgttatctgtgtctgtttagttgctgctgctgttgccgcgtaataaaacttggtcatttacggggctccctcaagattaagaattgagttgtttgatggtagaatcctggtaaggttgttgtaactggggggcgcctttgtttgggctggtagtgtatgcctaggcctcacttatctgatgctgtaatgcgacaagtattatgtggttgtctggtaattattgtccaaacaaaaaaaaaaaa

SEQ ID NO: 6836 - protein, 200 aa, Zea mays
  misc_feature: Ceres CLONE ID no. 1283552
  misc_feature: Ceres CDNA ID no. 25445567
  misc_feature: Useful for making plants with modulated growth and phenotype characteristics
  misc_feature: The sequence is a functional homolog of  SEQ ID NO 1108 in the  10/374,780 US patent application
  misc_feature: The sequence is a functional homolog of  SEQ ID NO 1109 in the  10/374,780 US patent application
  misc_feature (75)..(150): Pfam Name: Histone PFAM Desc: Core histone H2A/H2B/H3/H4
  misc_feature: Homolog of GI Number: 50947247 NR Desc: putative heme activated protein
  misc_feature: Homolog of GI Number: 50905597 NR Desc: putative heme activated protein
  misc_feature: Homolog of GI Number: 46250701 NR Desc: CCAAT
  misc_feature: Homolog of GI Number: 52076535 NR Desc: putative CCAAT
  misc_feature: Homolog of GI Number: 23198020 NR Desc: transcription factor Hap5a
  misc_feature: Homolog of GI Number: 45544869 NR Desc: CONSTANS interacting protein 2b
  misc_feature: Homolog of GI Number: 21554251 NR Desc: transcription factor Hap5a
  misc_feature: Homolog of GI Number: 23505813 NR Desc: At1g08970/F7G19_16
  misc_feature: Homolog of GI Number: 6289057 NR Desc: heme activated protein
  misc_feature: Useful for making ornamental plants with modified leaves
  misc_feature: Useful for making shorter plants
  misc_feature: Useful for making stronger plants
  misc_feature: Useful for sterility
  misc_feature: Useful for sterility
MDPNKSSTPPPPPVMGAPVAYPPPAYPPGVAAGAGAYPPQLYAPPAAAAAQQAAAAQQQQLQIFWAEQYREIEATTDFKNHNLPLARIKKIMKADEDVRMIAAEAPVVFARACEMFILELTHRGWAHAEENKRRTLQKSDIAAAIARTEVFDFLVDIVPRDDGKDADAAAAAAAAAAGIPRPAAGVPATDPLAYYYVPQQ

SEQ ID NO: 6837 - DNA, 844 bp, Zea mays
  misc_feature: Ceres CLONE ID no. 1283561
  misc_feature: Ceres CDNA ID no. 25445594
  CDS (193)..(579): REFERENCED BY SEQ ID NO: 6838
actaccaaactctgctcctccctgcttccgtcacgcgagagcactccactcccacgcgaaccctagcagtggttctccctcggggccccgctaagcagcttggttccaagctgtagaagcatctccgatcccatccgcggcgggttgaggccatcagctccggtttctgcagccggatttgggatccgcgagatgtcttggtccgcgcccgacgacatcctcctctccacctccctcgccggcttcttggacaagaaacttattgtcctgctaagagatggacggaaactgcttggcaccctctgctcatttgatcagtttgcaaatgttgttcttcagggtgcttgtgaacgagtgattgtgggggaacaatattgtgatgttcctcttgggctgtacgtaatccggggagagaacgttgttttaatcggagaattggatcgcgaaaaggatgaactccctgctcacatgacctgtgtttcagaagcagaaataagaaaggctgaaaaggcagaacgggaagccagagatctgaaagggacgatgaggaaacggatggagttcctggacttcgattaacaccgtcaccgcggccgttgccgctccccattgtggcggaatctttagtggcggcctgtgtgccatacatgcctggtgaccgcgccggcgcaccttggattgctggagggtttagcgaacagtttctttttaactagcagtgctgttttatactctcgtggccacagaccctttgagcgcctcctgatacagctttgtcaccactctgatcattgcctcgatgaattttatatacctgacgttttggataaaaaaaaaaaaaaaa

SEQ ID NO: 6838 - protein, 128 aa, Zea mays
  misc_feature: Ceres CLONE ID no. 1283561
  misc_feature: Ceres CDNA ID no. 25445594
  misc_feature (13)..(81): Pfam Name: LSM PFAM Desc: LSM domain
  misc_feature: Homolog of GI Number: 50924582 NR Desc: OSJNBa0027P08.15
  misc_feature: Homolog of GI Number: 21536995 NR Desc: Sm protein
  misc_feature: Homolog of GI Number: 20334848 NR Desc: At1g19120/F14D16_26
  misc_feature: Homolog of GI Number: 8778287 NR Desc: F14D16.28
  misc_feature: Homolog of GI Number: 66529526 NR Desc:  similar to CG4279
  misc_feature: Homolog of GI Number: 66853150 NR Desc: small nuclear ribonucleoprotein
  misc_feature: Homolog of GI Number: 54637105 NR Desc: GA18077
  misc_feature: Homolog of GI Number: 24656769 NR Desc: CG4279
  misc_feature: Homolog of GI Number: 66770685 NR Desc: IP04948p
  misc_feature: Useful for increasing chlorophyll and photosynthetic capacity
  misc_feature: Useful for increasing seed/fruit yield or modifying fruit content
  misc_feature: Useful for making ornamental plants with modified flowers
  misc_feature: Useful for making ornamental plants with modified leaves
  misc_feature: Useful for making plants with altered leaf shape eg curled leaves
  misc_feature: Useful for making plants with increased biomass
  misc_feature: Useful for making plants with increased biomass and foliage
  misc_feature: Useful for making plants with increased biomass and foliage
  misc_feature: Useful for sterility
MSWSAPDDILLSTSLAGFLDKKLIVLLRDGRKLLGTLCSFDQFANVVLQGACERVIVGEQYCDVPLGLYVIRGENVVLIGELDREKDELPAHMTCVSEAEIRKAEKAEREARDLKGTMRKRMEFLDFD

SEQ ID NO: 6839 - DNA, 1345 bp, Zea mays
  misc_feature: Ceres CLONE ID no. 1283568
  misc_feature: Ceres CDNA ID no. 25445953
  CDS (139)..(1188): REFERENCED BY SEQ ID NO: 6840
atccattatcacgctcagggtcagggtcaggctcgtggtcgtgttcctcctgcttccccttgcgcgcactcgcatgcaaccgactacgctgcagcaggcgatcgaagcaaactaagaagcgaacaggccgtcgacaccatggcgccggatctggtgaacggcgtgctcaactgggtggggacgccggccatggtggccagcctgctgctcttctacccgccctactacctcttcaagacatgctactccttcctttcctggctcttccccgaggacctcgccggcaaggtcgtcctcatcaccggcgcttcctccggcatcggcgagcaactggcctaccagtacgcgctgaatcgggcgtccctcgccctcgtcgcgagaagggagtcgagcctccggcacgtcgccgaccgagcactcgagctcggcgcgcgcgacgtcgtcgtcctcccaggcgacgtctccgcccccgacgactgcgacaggttcgttcggaccgcgatcagtcactacgaccgattggaccatctcgtgtgcaatgctggcgtcgcgagcgtcggcgcgttcgaggagatcccggacgtcaccagctacagctcccagcttgacgtcaatttctggggttccgttcaaacaaccttcgctgccctgcctcacctgaagaggagccgaggaagaatcgtggtgacggcatctgcaaccggatggaacccagttcctagaatgagcatctacaacgctgccaacgctgcgctcatcaacttcttcgagacgctgcggaccgagctagggaaccaggtcgggatcacggtggtgacgcccgggtgggtcgagtccgagatgtccagagggaagttcctcaaggagcacggccaagtggaggtcgatcaagagatgcgcgacgctcagatcggcctgttcccggtggagtacgccaagaactgcgccaaggccatggtgcaggcggcgcggcaaggcgagcggtacctcaccgtgccggcgtggttcggggcgatgtacctgtggcggctgttcgcgccggaggtggtggaggcctgctaccgcctcctgtacatgcacggccatggcgccaggcaggccgacgcgcccagcaggaccatggccgaggcgggtggcaagcagctgctgtacccgacctcgctgcgctctgaggagattaaggagtgacctaactgccaactgttgtgtgtgtgtgtgtgtgtgtgtgtttgtgtgtgcagcagagctctcagaacacctgtggtcatgtttaatatgtgctagctgtgtgccttgacaatgaataagctgctgctctctcttttgcataaaaaaaaaaaaaaaa

SEQ ID NO: 6840 - protein, 349 aa, Zea mays
  misc_feature: Ceres CLONE ID no. 1283568
  misc_feature: Ceres CDNA ID no. 25445953
  misc_feature (50)..(218): Pfam Name: adh_short PFAM Desc: short chain dehydrogenase
  misc_feature: Homolog of GI Number: 77555350 NR Desc: 11
  misc_feature: Homolog of GI Number: 50923873 NR Desc: OSJNBa0055C08.3
  misc_feature: Homolog of GI Number: 20148649 NR Desc: 11
  misc_feature: Homolog of GI Number: 16033752 NR Desc: steroleosin
  misc_feature: Homolog of GI Number: 77551032 NR Desc: beta
  misc_feature: Homolog of GI Number: 21311775 NR Desc: steroleosin
  misc_feature: Homolog of GI Number: 77551033 NR Desc: beta
  misc_feature: Homolog of GI Number: 50908893 NR Desc: putative steroleosin
  misc_feature: Homolog of GI Number: 4539005 NR Desc: putative oxidoreductase
  misc_feature: Homolog of GI Number: 50908889 NR Desc: putative steroleosin
  misc_feature: Useful for making ornamental plants with modified leaves
  misc_feature: Useful for making plants with increased biomass and foliage
MAPDLVNGVLNWVGTPAMVASLLLFYPPYYLFKTCYSFLSWLFPEDLAGKVVLITGASSGIGEQLAYQYALNRASLALVARRESSLRHVADRALELGARDVVVLPGDVSAPDDCDRFVRTAISHYDRLDHLVCNAGVASVGAFEEIPDVTSYSSQLDVNFWGSVQTTFAALPHLKRSRGRIVVTASATGWNPVPRMSIYNAANAALINFFETLRTELGNQVGITVVTPGWVESEMSRGKFLKEHGQVEVDQEMRDAQIGLFPVEYAKNCAKAMVQAARQGERYLTVPAWFGAMYLWRLFAPEVVEACYRLLYMHGHGARQADAPSRTMAEAGGKQLLYPTSLRSEEIKE

SEQ ID NO: 6841 - DNA, 1004 bp, Zea mays
  misc_feature: Ceres CLONE ID no. 1283569
  misc_feature: Ceres CDNA ID no. 25445595
  CDS (1)..(483): REFERENCED BY SEQ ID NO: 6842
gatttgacccatctcccaacccctacactcccggcggcggcgcaggagcagcagcaccagcacccgaggatggtgaagttcctcaagcccggcaaggccgtgatcctcctgcagggccggttcgccggcaggaaggcggtgatcgtgcgcgtgttcgaggagggcacccgcgaccgcccctacggccactgcctcgtcgccggcctcgccaagtaccccaagaaggtggtccgcagggactcggccaagaagacggcgaagaagtcgcgcgtcaagtgcttcatcaagctcgtcaacttcacccacctcatgcccacccgctacaccctcgacgtcgacttcaaggacgtggccaccggcgggcccgacgcgctctccacccgcgacaagaaggtcgccgcatgcaaggccgccaaggcgcgcctcgaggagaggttcaagaccggcaagaacaggtggttctttaccaagctccgcttctagatggtcggcgtcccgaatggtgaccgtcggtttcttgtatgggacacactccaagccatgtctcttttcgtattgccatgaagacttcttcgtgtttagtcctggggctctcaggtatattgtgcgtgtgtacttcgaatgtttggtcttggagtcctactgaattgatgaatgttcaatttatgtcttcaggattaacagcgaatattgtttacaatcttatttatcccattggttagtttgttaaacttttaatattgagttgattgtgaactgtcatagtagcctatgaaagtactgtcattgctgatacttatcttgcttcactctatttgcccactcaagtagtcatttgtcctctcaaataggcattcaaggacattgttacatgagtgtcctgctttccattatcgtttagtaagaatttctctcctggcccttgtaataatactgttgttttacactgtagacatcactgcagagtttagtagaacatatgaaaaataaaaaaaaaaaaaaaa

SEQ ID NO: 6842 - protein, 137 aa, Zea mays; identical to SEQ ID NO: 494
  misc_feature: Ceres CLONE ID no. 1283569
  misc_feature: Ceres CDNA ID no. 25445595
  misc_feature (5)..(40): Pfam Name: KOW PFAM Desc: KOW motif
  misc_feature (52)..(137): Pfam Name: Ribosomal_L27e PFAM Desc: Ribosomal L27e protein family
  misc_feature: Homolog of GI Number: 50906961 NR Desc: putative 60S ribosomal protein L27
  misc_feature: Homolog of GI Number: 37536910 NR Desc: putative ribosomal protein L27
  misc_feature: Homolog of GI Number: 20466061 NR Desc: putative ribosomal protein
  misc_feature: Homolog of GI Number: 8131701 NR Desc: ribosomal protein L27
  misc_feature: Homolog of GI Number: 23198420 NR Desc: putative ribosomal protein L27
  misc_feature: Homolog of GI Number: 21554529 NR Desc: ribosomal protein L27
  misc_feature: Homolog of GI Number: 7441035 NR Desc: ribosomal protein L27
  misc_feature: Homolog of GI Number: 7441033 NR Desc: ribosomal protein L27
  misc_feature: Homolog of GI Number: 20768 NR Desc: ribosomal protein L27
  misc_feature: Homolog of GI Number: 7441034 NR Desc: ribosomal protein L27
  misc_feature: Useful for making taller plants and plants with longer inflorescences

SEQ ID NO: 6843 - DNA, 670 bp, Zea mays
  misc_feature: Ceres CLONE ID no. 1283579
  misc_feature: Ceres CDNA ID no. 29191335
  CDS (61)..(513): REFERENCED BY SEQ ID NO: 6844
atcggcctcagtcgcacatatctactatactatactctaggaagcaaggacaccaccgccatggcagccaagatgcttgcattgttcgctctcctagctctttgtgcaagcgccactagtgcgacccatattccagggcacttgccaccagtcatgccattgggtaccatgaacccatgcatgcagtactgcatgatgcaacaggggcttgccagcttgatggcgtgtccgtccctgatgctgcagcaactgttggccttaccgcttcagacgatgccagtgatgatgccacagatgatgacgcctaacatgatgtcaccattgatgatgccgagcatgatgtcaccaatggtcttgccgagcatgatgtcgcaaatgatgatgccacaatgtcactgcgacgccgtctcgcagattatgctgcaacagcagttaccattcatgttcaacccaatggccatgacgattccacccatgttcttacagcaaccctttgttggtgctgcattctagatagaaatatttgtgttgtatcgaataatgagttgacatgccatcgcgtgtgactcattattaacaataaaacaagtttcctcttattatcttttaaaaaaaaaaaaaaaaaaaaaaaaaaaaaaaaaaaaaaaaaaaaagaaaaaaaaaaaaaaaa

SEQ ID NO: 6844 - protein, 150 aa, Zea mays
  misc_feature: Ceres CLONE ID no. 1283579
  misc_feature: Ceres CDNA ID no. 29191335
  misc_feature (1)..(63): Pfam Name: Zein PFAM Desc: Zein seed storage protein
  misc_feature: Homolog of GI Number: 511870 NR Desc: zein protein
  misc_feature: Homolog of GI Number: 18087509 NR Desc: 11 kDa methionine
  misc_feature: Homolog of GI Number: 1084475 NR Desc: 10k zein protein
  misc_feature: Homolog of GI Number: 847834 NR Desc: 10 kDa zein
  misc_feature: Homolog of GI Number: 57021071 NR Desc: delta kafirin
  misc_feature: Homolog of GI Number: 14906664 NR Desc: seed storage protein delta kafirin
  misc_feature: Homolog of GI Number: 15983739 NR Desc: modified zein precursor
  misc_feature: Homolog of GI Number: 16305117 NR Desc: 18kD delta zein
  misc_feature: Homolog of GI Number: 984525 NR Desc: DZS18
  misc_feature: Homolog of GI Number: 72307 NR Desc: 22K zein precursor
MAAKMLALFALLALCASATSATHIPGHLPPVMPLGTMNPCMQYCMMQQGLASLMACPSLMLQQLLALPLQTMPVMMPQMMTPNMMSPLMMPSMMSPMVLPSMMSQMMMPQCHCDAVSQIMLQQQLPFMFNPMAMTIPPMFLQQPFVGAAF

SEQ ID NO: 6845 - DNA, 668 bp, Zea mays
  misc_feature: Ceres CLONE ID no. 1283603
  misc_feature: Ceres CDNA ID no. 36707171
  CDS (85)..(492): REFERENCED BY SEQ ID NO: 6846
atccacagcaagcagcaacagcttgcagccggcagtcctcgcctccgcctcctccaccctgaccgtcaacagaggaagacgaggatgtcgggatccaaggtgtacaccctcgaggaggtggccaagcacaacaccaaggacgactgctggctcgtcatcggcggcaaggtgtacaatgtgaccaagtttctggaggatcaccctggaggcgatgatgttctgctgtcttccactgccaaggatgctaccgatgatttcgaagatgtggggcacagcagcactgcccgtgcaatgatggacgagtacttagtgggtgagattgatgcagccacgatacccaccaaggtgaagtacacgccccccaagcagccgcattacaaccaggacaagacccaggagttcgtcatcaagatcctccagtttttggtccccctcgcaatactgggtctggccgtcgctgtaaggatgtacaccaagtcggaatctgcctagtctcttgtcatcaacgctgcaaacataacatcatccacaaactgaataagttagtgttaaaatgctgcaaagatcattaattctgaaacttgagtctttgctgtcgtgtgagacgtacgtctattagtataaaatcacttctattttaaaaaaaaaaaaaaaaaaaaaaaaaaaaa

SEQ ID NO: 6846 - protein, 135 aa, Zea mays; identical to SEQ ID NO: 524
  misc_feature: Ceres CLONE ID no. 1283603
  misc_feature: Ceres CDNA ID no. 36707171
  misc_feature (6)..(80): Pfam Name: Cyt PFAM Desc: Cytochrome b5
  misc_feature: Homolog of GI Number: 34905998 NR Desc: putative cytochrome B5
  misc_feature: Homolog of GI Number: 52353573 NR Desc: cytochrome b5
  misc_feature: Homolog of GI Number: 414705 NR Desc: cytochrome b5
  misc_feature: Homolog of GI Number: 23197754 NR Desc: putative cytochrome b5
  misc_feature: Homolog of GI Number: 1345882 NR Desc: Cytochrome b5
  misc_feature: Homolog of GI Number: 296386 NR Desc: cytochrome b5
  misc_feature: Homolog of GI Number: 50844677 NR Desc: cytochrome b5 isoform Cb5
  misc_feature: Homolog of GI Number: 510539 NR Desc: cytochrome b5
  misc_feature: Homolog of GI Number: 1345879 NR Desc: Cytochrome b5
  misc_feature: Homolog of GI Number: 2647949 NR Desc: cytochrome b5

SEQ ID NO: 6847 - DNA, 744 bp, Zea mays
  misc_feature: Ceres CLONE ID no. 1283629
  misc_feature: Ceres CDNA ID no. 25445596
  CDS (135)..(455): REFERENCED BY SEQ ID NO: 6848
cctagtcgaaaaattttttcgactttcgagcgcagaaacgagagggccggagcagccgcagtcccggcgatcccgccgccggtcgccctcatacttcctcgtcactgccttcgtttctctttccaacaatcaagatgagccgtggcggtagcgcgggtggtggtcaaagttctctgggttacctctttggaagcggtgagccccccaaaccagcagtggcaccagctgtaagtgctccacctgctgctgcaggtgctccacctgctgagaaaccacctgctgcaaagcctgatggcaccagtcagattgctgctggggttaccagccaaaccaataactaccacagggccgacggtcagaacaccggaaacttccttacggaccgtccttcgaccaaggtccacgctgctcctggcggtggctcttccctgggatacctgtttggtggcaactgatgccgctcaccaagctatcaccccccactgtcgccgcatgctttttctgaatcgtgaacagccgttgtcatttcatgtgtacccaaacctcccgtcccgcgtgggcccgtaagctgcgcctagatttcagggctaatcgtgtgcctgaaccctcatcataagtcgtctctgtacccagcttctcgtttcgtttgcacccgtgatggtatggtttggttgttgcccgctggacctatctattctttgcatttttcctttgaaaaaaaaaaaaacaaaaaaaaaaaaaaaa

SEQ ID NO: 6848 - protein, 106 aa, Zea mays; identical to SEQ ID NO: 324
  misc_feature: Ceres CLONE ID no. 1283629
  misc_feature: Ceres CDNA ID no. 25445596
  misc_feature: Homolog of GI Number: 21592628 NR Desc: putative nitrilase
  misc_feature: Homolog of GI Number: 2765837 NR Desc: NAP16kDa protein
  misc_feature: Homolog of GI Number: 21280823 NR Desc: putative nitrilase
  misc_feature: Homolog of GI Number: 21592782 NR Desc: nitrilase associated protein
  misc_feature: Homolog of GI Number: 28827480 NR Desc: putative nitrilase associated protein

SEQ ID NO: 6849 - DNA, 1039 bp, Zea mays
  misc_feature: Ceres CLONE ID no. 1283652
  misc_feature: Ceres CDNA ID no. 25445597
  CDS (240)..(788): REFERENCED BY SEQ ID NO: 6850
agaaaaaatagcgcggctcgcacggccgagccccgacattctaccgcactccttccgctgcacccctttccattctaccgccggcgacgccaaagttcttgggcctcctcatcggctacttttccgccggcgacaggaaacaacgaaccaaaccacttctctgtcgagaggcttcgcgctcctctcttcgccctctgctgttatttttcttaacccggctttccctcgattgctgcgtaatgaggaagctcaagttccatgagcagaagctcctcaagaggcacaatttcttggagtacaagagggagggcggccaccgcgaggcgctcgtcacacagcgctaccgcctcgtggagagggacgactacaagaagtacaatgggatatgcttaatggtgcaaaagctcgttaacatcataaagcagatggacccaagagaccctttcagaatccagatgacagacttgattctcgataagctgtataatatgggtgtaatttcaacaaaagagagcttgttaaagtgtgagaaactttcagtgagcgccttctgcaggcggagacttgcaacagttatggtgaagctcaagtttgcagagcaccttaaggaggctgtgacgtacatcgaacaggggcatgtgcgtgtcggtccagatgcagtcacggacccagcctttcttgtgaccagaaacatggaggacttcatcacctgggtggattcctcaaagatcaagaggaaggtcatggagtacaatgatgcattagatgattatgatgccatgttctgagaaaatcattctgcagaaatttatgtgcccgtcagtagtgtaatcttaagcctgccacatatgggtcttttctgaagaaatctgtgggagttgtcttctgcagggctacttgcatttgtattgcacctgcagatgtgatgcaattttgtggttggttgaaggcacattataaattcatatctgatgtagttgtgcaattgtctttgttaaagagcgggtttgcccggatttccccaaaaaaaaaaaaaaaa

SEQ ID NO: 6850 - protein, 182 aa, Zea mays
  misc_feature: Ceres CLONE ID no. 1283652
  misc_feature: Ceres CDNA ID no. 25445597
  misc_feature (1)..(106): Pfam Name: Ribosomal_S4 PFAM Desc: Ribosomal protein S4/S9 N
  misc_feature (107)..(154): Pfam Name: S4 PFAM Desc: S4 domain
  misc_feature: Homolog of GI Number: 50929391 NR Desc: OSJNBa0084K01.7
  misc_feature: Homolog of GI Number: 51968508 NR Desc: ribosomal protein
  misc_feature: Homolog of GI Number: 21554411 NR Desc: ribosomal protein
  misc_feature: Homolog of GI Number: 9755620 NR Desc: ribosomal protein
  misc_feature: Homolog of GI Number: 47940277 NR Desc: MGC81216 protein
  misc_feature: Homolog of GI Number: 49250357 NR Desc: MGC69249 protein
  misc_feature: Homolog of GI Number: 72114624 NR Desc:  similar to RIKEN cDNA 1190002L16
  misc_feature: Homolog of GI Number: 57108685 NR Desc:  similar to U3 snoRNP protein 3 homolog
  misc_feature: Homolog of GI Number: 19527196 NR Desc: RIKEN cDNA 1190002L16
  misc_feature: Homolog of GI Number: 61862070 NR Desc:  similar to U3 small nucleolar ribonucleoprotein protein IMP3 homolog
MRKLKFHEQKLLKRHNFLEYKREGGHREALVTQRYRLVERDDYKKYNGICLMVQKLVNIIKQMDPRDPFRIQMTDLILDKLYNMGVISTKESLLKCEKLSVSAFCRRRLATVMVKLKFAEHLKEAVTYIEQGHVRVGPDAVTDPAFLVTRNMEDFITWVDSSKIKRKVMEYNDALDDYDAMF

SEQ ID NO: 6851 - DNA, 488 bp, Zea mays
  misc_feature: Ceres CLONE ID no. 1283655
  misc_feature: Ceres CDNA ID no. 25445598
  CDS (78)..(353): REFERENCED BY SEQ ID NO: 6852
atactatatattagacataccggtattattgttcttagacatcgcacaagactcttgtcaacaagaccaacaacaggatgaggactgccgtgcatgctgcgctttgcattgtgcttgtgataatgtcttcaacactgtcatcttgcgaggacgatgagaaggtatctatcgcatgtgacacaggatgcaatgccgcgatctcccgtctcaaatgcttcctgatggcctattctgaagggaaagtgttggtcagcagcaactgcgaaacgccgaccaggtgcggctgcgtgtttcgtcacaaacaagatgcagcccttatcgccggcgacgttggcaacaaaaagggatactgatggcagacgtgtacttcttggttgaataatactgctagaattaatatgggcaccaacgaaatatctataatgttattcttcagtgtaatgcttccagcatgttctgatttagtttaactaaaaaaaaaaaaaaaa

SEQ ID NO: 6852 - protein, 91 aa, Zea mays; identical to SEQ ID NO: 5620
  misc_feature: Ceres CLONE ID no. 1283655
  misc_feature: Ceres CDNA ID no. 25445598

SEQ ID NO: 6853 - DNA, 597 bp, Zea mays
  misc_feature: Ceres CLONE ID no. 1283673
  misc_feature: Ceres CDNA ID no. 25445579
  CDS (161)..(385): REFERENCED BY SEQ ID NO: 6854
cccacaagcagcatccgcacactcccaattcccctcgagcgccgcagcgagcccaagaagccgaccgccgagccccctctccagtccagtccgcggtctcggtttcttgcttgcccggcgcccaatcttcagagagagctccttctcgtcgtctgtctccatggccgcctcgaccaagaccgtcgccgtcctcctcgccgcggtgctcctcgcgctggtcgcgtccgcggcagccagcaggaagctggaggaggacgcacttctgggaagcctggccccagcccccgcgccggccgttggcggtgccgcggggctgcctggcggcaagccgggggcgtgggccgtcgccgctctggtctctctcgtcgccttcctcgtgatctgagggcgtggggatcgtgctgcgcatcgcgggagatggagggacgaatcctgcgatctggatcgcagagagagaggagagggggatatttatgttcgttctgtttgttctagggtgcctctcttttgcctgtataagagaggatcatgattttttttatataataataccgtttatttgtcattctttttataatatgaaaaaaaaaaaaaaaa

SEQ ID NO: 6854 - protein, 74 aa, Zea mays
  misc_feature: Ceres CLONE ID no. 1283673
  misc_feature: Ceres CDNA ID no. 25445579
  misc_feature: Homolog of GI Number: 34909666 NR Desc: OJ1414_E05.10
MAASTKTVAVLLAAVLLALVASAAASRKLEEDALLGSLAPAPAPAVGGAAGLPGGKPGAWAVAALVSLVAFLVI

SEQ ID NO: 6855 - DNA, 1009 bp, Zea mays
  misc_feature: Ceres CLONE ID no. 1283704
  misc_feature: Ceres CDNA ID no. 25445599
  CDS (93)..(752): REFERENCED BY SEQ ID NO: 6856
ctctctgtctctctagggtttttgattttagccgccgccgctgctcatctcacatccctcgagaagacgcctgctactcgccgatcgatacgatggccgtcttctccgacctccacaccgccgacggcctcaagtccctcgaggctcacctcgccggcaaaacctatgtgtctggtgacgccattagtaaggatgacattaaggtcttcgccgcggtgccgtcgaagcctggcgctgagtttcctaatgccgcccgctggtacgagaccgtctctgcggctgtagcctcaagattccctggtaaggctgttggtgtaaatctgcctgcgggatcagctcctgcggcagctgctcctgcggatgaggctgaggatgatgatgaccttgatctttttggtgatgaaactgaggaggacaagaaggcagctgatgagcgtgccgccgctgccaaggcctcttctaaaaagaaagaaagtggtaaatcctccgtccttatggatgtcaaaccatgggacgatgagactgatatgaagaagctggaggaggctgtccgcagtgtccagatggagggtctgacttggggagcatcaaagcttgtgcctgttggatacggcatcaagaagatgactatcatgttgacaattgtcgacgatcttgtgtccatcgacactctaattgaggaccaccttacgcaagagcccatcaatgagtacgtccagagttgcgacattgtggctttcaacaagatctagagttcagtttctgagattgggcaacggcagcggctcagctcgtcaagtttgtgctgggatgccagtttatcccttctagtctattacagaaatgttgttcggagctgagtctattataaacatcttggtctgagtttattgttgagtggtgccagtttttttcaatatacatttatcttaaaaacagcggtactgatgtttttttgtctaaagttaatgagtttgcaatggttctgagtctaaaaaaaaaaaaaaaa

SEQ ID NO: 6856 - protein, 219 aa, Zea mays
  misc_feature: Ceres CLONE ID no. 1283704
  misc_feature: Ceres CDNA ID no. 25445599
  misc_feature (130)..(219): Pfam Name: EF1_GNE PFAM Desc: EF
  misc_feature: Homolog of GI Number: 50882147 NR Desc: putative translation elongation factor eEF
  misc_feature: Homolog of GI Number: 218161 NR Desc: elongation factor 1 beta'
  misc_feature: Homolog of GI Number: 218341 NR Desc: elongation factor 1 beta'
  misc_feature: Homolog of GI Number: 15810631 NR Desc: putative elongation factor 1B alpha
  misc_feature: Homolog of GI Number: 48209911 NR Desc: putative elongation factor
  misc_feature: Homolog of GI Number: 77416959 NR Desc: putative elongation factor 1B alpha
  misc_feature: Homolog of GI Number: 76161000 NR Desc: elongation factor
  misc_feature: Homolog of GI Number: 9759378 NR Desc: elongation factor 1B alpha
  misc_feature: Homolog of GI Number: 27754711 NR Desc: putative elongation factor 1B alpha
  misc_feature: Homolog of GI Number: 4874292 NR Desc: putative  elongation factor beta
MAVFSDLHTADGLKSLEAHLAGKTYVSGDAISKDDIKVFAAVPSKPGAEFPNAARWYETVSAAVASRFPGKAVGVNLPAGSAPAAAAPADEAEDDDDLDLFGDETEEDKKAADERAAAAKASSKKKESGKSSVLMDVKPWDDETDMKKLEEAVRSVQMEGLTWGASKLVPVGYGIKKMTIMLTIVDDLVSIDTLIEDHLTQEPINEYVQSCDIVAFNKI

SEQ ID NO: 6857 - DNA, 863 bp, Zea mays
  misc_feature: Ceres CLONE ID no. 1283744
  misc_feature: Ceres CDNA ID no. 40351722
  CDS (89)..(691): REFERENCED BY SEQ ID NO: 6858
ttttccatttgctcctttcaattaccaccaaccaaacaggtggcggcagcggcggcggggtagcatttgtgctacgagggcttttgcaatggcggcttcggggttcggcggcggcgaggcgttccggctctcggccgcaccaggggccggcttactgaagctgcacaagggcgacatcaccctctggtccgtcgactgcgccaccgacgccatcgttaatgctgctaataagcgaatgttaggtggcggaggtgttgatggagctatacatcaagctgctggaccagagctagtgcaagcatgccggaaagttccagaggtcaaaccaggagttcgttgtcctactggagaagctaggattactcctgcttttgagcttcctgcctctcgggtgattcacactgttggccctatatatgatttggacaagcatcctgaggtgtcattaaagaaggcctatgaaaatagcttgaagcttgctaaagataatggcattcagtacatcgcattccctgctatatcttgtggtgtttatcgttatcctcccaaggaagcatcaaaaatagctgtttctaccgcacagaaattttcagaggatatcaaagaggtgcattttgttctgttctcggatgacctttacaatatatggcgcgagactgcccagcagttgctatcacagtttgagaaatgaatggtccataggcagtttgctagcactagcagttgcccagcagtcgttgtctagtgttgagatgtgagcgccataggcagtttgcctggtgtaataaaaatgggtgtatcagacaacgtttaaatcttgatgaaaccgtgtattgcacctgtggtataaaaaaaaaaaaaaa

SEQ ID NO: 6858 - protein, 200 aa, Zea mays
  misc_feature: Ceres CLONE ID no. 1283744
  misc_feature: Ceres CDNA ID no. 40351722
  misc_feature (43)..(161): Pfam Name: A1pp PFAM Desc: Appr
MAASGFGGGEAFRLSAAPGAGLLKLHKGDITLWSVDCATDAIVNAANKRMLGGGGVDGAIHQAAGPELVQACRKVPEVKPGVRCPTGEARITPAFELPASRVIHTVGPIYDLDKHPEVSLKKAYENSLKLAKDNGIQYIAFPAISCGVYRYPPKEASKIAVSTAQKFSEDIKEVHFVLFSDDLYNIWRETAQQLLSQFEK

SEQ ID NO: 6859 - DNA, 795 bp, Zea mays
  misc_feature: Ceres CLONE ID no. 1283816
  misc_feature: Ceres CDNA ID no. 40351723
  CDS (58)..(414): REFERENCED BY SEQ ID NO: 6860
ctcttgtttcgccgaaccccaaaccctagcttcgctcgttgcggcggcgagccggcgatggcgaagtctctgcgatccaaacgcgagaagcggcttcggacgttgcgccgggagatagcggagccgttctacgacaagaaggaggccgccaagctcgccgcgcaggccgccgccctagctgctgccccgctcccggtccgcgggcccccgccatcccaggatgccggcagctcccgcgcagctagctcggcctcggctatggatgtggagatgtctgatgcagggaacaacaggtctaagaccttcttgaggccacttggcagcattagcaagaagaaggtgcagcttcatttgaagatcaagaaagacaagagaaaagctaggaagaagggaaagttttcttttaagaagtagaggagtgtatgataaatcatgcagttttgttcccagtttgtaaaacaaacgcactgcagtcatgtcatgtggtgcacctacctaagtccattcgtgggtgacctactattaaatatgttgaaatgggtacgaaaaaaggatagtgctgacctatcagctgtttctgttctgcgggtataaatgtcaagtactcaaattgctgagatttggtttcattttcacattgtatcgtggtgaaccatgtttggaaacaatggccttgtttggcacagctgctgcttgttgaaaaactggtaaaaagcagcttctgtttgttggctgtttttagtgtattttgagaagcagctgaactgataagctgctgcaaaaaaaaaaaaaaaa

SEQ ID NO: 6860 - protein, 118 aa, Zea mays
  misc_feature: Ceres CLONE ID no. 1283816
  misc_feature: Ceres CDNA ID no. 40351723
MAKSLRSKREKRLRTLRREIAEPFYDKKEAAKLAAQAAALAAAPLPVRGPPPSQDAGSSRAASSASAMDVEMSDAGNNRSKTFLRPLGSISKKKVQLHLKIKKDKRKARKKGKFSFKK

SEQ ID NO: 6861 - DNA, 718 bp, Zea mays
  misc_feature: Ceres CLONE ID no. 1283821
  misc_feature: Ceres CDNA ID no. 36695019
  CDS (77)..(544): REFERENCED BY SEQ ID NO: 6862
ctagactacacccccatcccgcagcagccaaaacctacctagccgccgccgcaggcggccccccatcgccgccaagatgcagatctttgtgaagactctgacggggaagaccatcactttggaggtggagtcctcggacaccattgacaatgtgaaggccaagatccaggacaaggagggcatccccccggaccagcagcggctcatcttcgccggcaagcagctcgaggacggtcgcaccctcgccgactacaacattcagaaggagtccaccctccacctggtgctccgcctccgcggtggcgccaagaagcgtaagaagaagacgtacaccaagcccaagaagatcaagcacaagcacaagaaggtgaagctctccgtgctgcagttctataaggtggacgacgccacaggcaaggtgacccgcctccgcaaggagtgccccaacacagagtgcggcgcgggcgtcttcatggccaaccacttcgaccgccactactgcggcaagtgcggcctcacctatgtctacaaccagaaggcgtaattgcttgccccgatttgctttatccgccaacctatcaagcattcagatgttggttactcaaattgtatctcatttagatctgtctgaggttgaaacttaaatggagcagtagtatctatcatattggtacccctgttactgagtataattttgttttcaaaaaaaaaaaaaaaa

SEQ ID NO: 6862 - protein, 155 aa, Zea mays
  misc_feature: Ceres CLONE ID no. 1283821
  misc_feature: Ceres CDNA ID no. 36695019
  misc_feature (1)..(74): Pfam Name: ubiquitin PFAM Desc: Ubiquitin family
  misc_feature (101)..(148): Pfam Name: Ribosomal_S27 PFAM Desc: Ribosomal protein S27a
  misc_feature: Homolog of GI Number: 82733 NR Desc: ubiquitin / ribosomal protein S27a
  misc_feature: Homolog of GI Number: 50932205 NR Desc: putative ubiquitin / ribosomal protein S27a
  misc_feature: Homolog of GI Number: 902525 NR Desc: ubiquitin fusion protein
  misc_feature: Homolog of GI Number: 167073 NR Desc: ubiquitin
  misc_feature: Homolog of GI Number: 34894792 NR Desc: ubiquitin / ribosomal protein S27a
  misc_feature: Homolog of GI Number: 167075 NR Desc: ubiquitin
  misc_feature: Homolog of GI Number: 1044940 NR Desc: ORF
  misc_feature: Homolog of GI Number: 34581769 NR Desc: ubiquitin extension protein
  misc_feature: Homolog of GI Number: 438109 NR Desc: ubiquitin extension protein
  misc_feature: Homolog of GI Number: 21601 NR Desc: ubiquitin monomer/ribosomal protein
MQIFVKTLTGKTITLEVESSDTIDNVKAKIQDKEGIPPDQQRLIFAGKQLEDGRTLADYNIQKESTLHLVLRLRGGAKKRKKKTYTKPKKIKHKHKKVKLSVLQFYKVDDATGKVTRLRKECPNTECGAGVFMANHFDRHYCGKCGLTYVYNQKA

SEQ ID NO: 6863 - DNA, 899 bp, Zea mays
  misc_feature: Ceres CLONE ID no. 1283826
  misc_feature: Ceres CDNA ID no. 40351724
  CDS (78)..(575): REFERENCED BY SEQ ID NO: 6864
aaatcgaatcgagcccatccatctccatttccgccgccgccgccgccgagagaccccaaccccacccatccaccaccatgtggcgccgcctccacaccctagcccccgccttgcgcagggctaccgccgccgccgccggggcccctgcggcgtccgcctcctctgcagcccgcgccgccccgctctcctcggcggccgccgctttccgccgcaccagcccgctcctctcaggggacaagccggcgagtgtggaggacgtcatgcccatcgccacggggctcgagcgggaggagctggaggccgagctcaaggggaagaagcggtttgacatggatcccctggtcggccccttcggtaccaaggaggaaccatctgtagttgagtcctactataacaagcggatagtcggctgccctggtggtgagggagaggatgaacacgatgttgtatggttctggttgaaaaaagatgagccgcatgagtgtccagtctgctcgcaatactttgtgcttaaggtcattggtgatggtggtgatccagatggtcatgacgatgaagatgatggacatcactaaggatgccttgtggttctgaaaataagaatttggtgaggcagatgaatccaatacacttctttttctagaaccagactgctccacggcatccttgtttatgaaaagacagttggccatcaagcaggtggtagttttcacctaggtattttgtccaaacaaaagctgtttgagatttgacccttgcgtttctttaagagcatcgtcgaataaaagatgactgcagtcagattgctttcttttgatacctcatattggcccatcgggtgtgatggacatgtaatattcagtaatggaacagccccatttctaaaaaaaaaaaaaaaa

SEQ ID NO: 6864 - protein, 165 aa, Zea mays
  misc_feature: Ceres CLONE ID no. 1283826
  misc_feature: Ceres CDNA ID no. 40351724
  misc_feature (51)..(151): Pfam Name: COX5B PFAM Desc: Cytochrome c oxidase subunit Vb
MWRRLHTLAPALRRATAAAAGAPAASASSAARAAPLSSAAAAFRRTSPLLSGDKPASVEDVMPIATGLEREELEAELKGKKRFDMDPLVGPFGTKEEPSVVESYYNKRIVGCPGGEGEDEHDVVWFWLKKDEPHECPVCSQYFVLKVIGDGGDPDGHDDEDDGHH

SEQ ID NO: 6865 - DNA, 731 bp, Zea mays
  misc_feature: Ceres CLONE ID no. 1283832
  misc_feature: Ceres CDNA ID no. 40351725
  CDS (133)..(480): REFERENCED BY SEQ ID NO: 6866
atcgctcgctcttctcttggtcttgcaactccagtgctgctcactgccactgccagcagatcgagctgctccgcctcactagccctcttgctttgctgctgcacctgcaagtctgcaaccgcgcacagagagatgtcgacggtgagccgtgcgtccctcgaccagaagctcgccctcgccaagcgctgctcccgagaggcgaccctcgccggagccaaggcggcagcggtggcgactatcgcctccgcgatccccaccctggccagcgtgcggatgctgccatgggccaaggccaacatcaaccccaccggccaggcgctcatcgtctccacggtggctgggatggcatacttcatcgccgccgacaagaagatcctgtcgctggcgaggcgccactcgttcgagcaagcccctgagcacctcaagaacacctccttccagggcaccggccgtccccacccggctttcttcaggccgtgagacgtggcctccgtcgagctagctacctacctctttcagttcgatcgtcagtgcaaagcaccaccaatgcctgaataaatttaaatttatctacgaggctagctgctgaacatcgatctgctagtattactacggcgaggctgctgaacagcgctgttgagtagtattggtgctcagttcggaatgtatgtataatctgaatgccaagtttaattttatgttacttctaccgattaaaaaaaaaaaaaaaa

SEQ ID NO: 6866 - protein, 115 aa, Zea mays
  misc_feature: Ceres CLONE ID no. 1283832
  misc_feature: Ceres CDNA ID no. 40351725
  misc_feature (11)..(89): Pfam Name: ENOD93 PFAM Desc: Early nodulin 93 ENOD93 protein
MSTVSRASLDQKLALAKRCSREATLAGAKAAAVATIASAIPTLASVRMLPWAKANINPTGQALIVSTVAGMAYFIAADKKILSLARRHSFEQAPEHLKNTSFQGTGRPHPAFFRP

SEQ ID NO: 6867 - DNA, 789 bp, Zea mays
  misc_feature: Ceres CLONE ID no. 1283836
  misc_feature: Ceres CDNA ID no. 25445587
  CDS (3)..(569): REFERENCED BY SEQ ID NO: 6868
aaaaccctcacagcgaaggacacaaaaacacaggtagggttaggcgacgcggcggcgagagcgcgagagtaggaggaggcgtcggccatgacggggaaggcgaagccgaagaagcacacggcgaaggagatcgccgcgaagatcgacgcggcgacgacgaaccggggcggcggcaaggtcgggcaggcggatcggctagggcaggacaagggcgggcacgcgaagctggcgtgcccgctctgccgcaccccggcgcccgacatcaagtccatgcagatccaccacgaggcgcgtcatcccaagctccctttcgagccggagaagctcgtcaacctgcactcctccacccccgccgccgccgaggccaccacctccaagcccaagcccggggtccgcggcagcctcaagaagtagctggctggcttgcctgcctgactgcctggggtaattcccttcgatttcaatcccatccaccgacccgatctacaatcaatcaaagtaccgcccgccctccggcctgcggtgtactgttagtctgctgctgcttcttatcgttgttatattgctgatacatgtctcgcgtgatagatgtgtcaactatatatcaggctcgtcgccggcaacactggcatgcttaaacatgtgtcgctgctgctccgtgatgccggcgacggctgctagtagtgttaatgttagtgtcgatcgggtctccttgaacaatggcaggaatctgttgcttgtttactttcttctaatggcaagtaaagttccccaaaaaaaaaaaaaaaa

SEQ ID NO: 6868 - protein, 108 aa, Zea mays
  misc_feature: Ceres CLONE ID no. 1283836
  misc_feature: Ceres CDNA ID no. 25445587
  misc_feature: Homolog of GI Number: 53792608 NR Desc: zinc finger protein
  misc_feature: Homolog of GI Number: 62642082 NR Desc: C2H2 type zinc finger family protein
  misc_feature: Homolog of GI Number: 55665385 NR Desc: serine\/arginine repetitive matrix 1
MTGKAKPKKHTAKEIAAKIDAATTNRGGGKVGQADRLGQDKGGHAKLACPLCRTPAPDIKSMQIHHEARHPKLPFEPEKLVNLHSSTPAAAEATTSKPKPGVRGSLKK

SEQ ID NO: 6869 - DNA, 883 bp, Zea mays
  misc_feature: Ceres CLONE ID no. 1283941
  misc_feature: Ceres CDNA ID no. 36591281
  CDS (103)..(735): REFERENCED BY SEQ ID NO: 6870
atctcttctttctactttcttgtaacccaagacgaactcggtgaactctttctcctcgcgcagcaccggagcacaatcaaggattccagtccagtcctgccaatggagtgcgttttgggcttggttggccgcgacttcgcggtggtggcggccgacacctccgccgtgcagagtatcctcgtccacaagactgacgaggacaaagtaatggtcctcgactcgcacaagctgttgggcgcttcaggggagcctggtgaccgggtgcagtttacggagttcatacagaagaacctccacctgtaccagttccgcaacaccatcccgctgtcaaccgccgctgccgccaacttcacacgcggcgagctcgccacagcccttcgtaagaatccatacatggtcaatgttattctcggtggttacgataaggatgttggcgcctcactgtactacatcgactacattgcgaccttgcacaagatcgacaagggcgcttttgggtacggatcgtatttctgcctgtctctgatggacaagctgtaccgcccggacatgaccgttgaggaagcggtagacctcgttgataagtgcattaaggagatccggctgcggctggttgtggcgccccagaacttcgtgatcaagatcgtcgacaaggacggggccagggagtacgcgaggcgtgaactcgtcggcgacagtgcacctgctgaagctgcagctacggttgccgcctgaggcatgaaacttgtttgtgttagttgtttgtttctcagcgaggctactatgtaatcaaatggatactggtgggggtcccacagctgttttttaatcaattttagcccagacatgtaattctgtttctgcactaaaaaaaaaaaaaaaa

SEQ ID NO: 6870 - protein, 210 aa, Zea mays
  misc_feature: Ceres CLONE ID no. 1283941
  misc_feature: Ceres CDNA ID no. 36591281
  misc_feature (1)..(182): Pfam Name: Proteasome PFAM Desc: Proteasome A
  misc_feature: Homolog of GI Number: 53771821 NR Desc: putative beta 4 proteasome subunit
  misc_feature: Homolog of GI Number: 52548238 NR Desc: 20S proteasome beta 4 subunit
  misc_feature: Homolog of GI Number: 50917941 NR Desc: 20S proteasome beta 4 subunit
  misc_feature: Homolog of GI Number: 17380213 NR Desc: Proteasome subunit beta type 2
  misc_feature: Homolog of GI Number: 23505793 NR Desc: At3g22630/F16J14_20
  misc_feature: Homolog of GI Number: 21592467 NR Desc: proteasome chain protein
  misc_feature: Homolog of GI Number: 14594929 NR Desc: putative beta4 proteasome subunit
  misc_feature: Homolog of GI Number: 49119183 NR Desc: MGC80364 protein
  misc_feature: Homolog of GI Number: 47125243 NR Desc: MGC84496 protein
MECVLGLVGRDFAVVAADTSAVQSILVHKTDEDKVMVLDSHKLLGASGEPGDRVQFTEFIQKNLHLYQFRNTIPLSTAAAANFTRGELATALRKNPYMVNVILGGYDKDVGASLYYIDYIATLHKIDKGAFGYGSYFCLSLMDKLYRPDMTVEEAVDLVDKCIKEIRLRLVVAPQNFVIKIVDKDGAREYARRELVGDSAPAEAAATVAA

SEQ ID NO: 6871 - DNA, 613 bp, Zea mays
  misc_feature: Ceres CLONE ID no. 1283950
  misc_feature: Ceres CDNA ID no. 36707085
  CDS (61)..(513): REFERENCED BY SEQ ID NO: 6872
atcggcctcagtcgcacatatctactatactatactctaggaagcaaggacaccaccgccatggcagccaagatgcttgcattgttcgctctcctagctctttgtgcaagcgccactagtgcgacccatattccagggcacttgccaccagtcatgccattgggtaccatgaacccatgcatgcagtactgcatgatgcaacaggggcttgccagcttgatggcgtgtccgtccctgatgctgcagcaactgttggccttaccgcttcagacgatgccagtgatgatgccacagatgatgacgcctaacatgatgtcaccattgatgatgccgagcatgatgtcaccaatggtcttgccgagcatgatgtcgcaaatgatgatgccacaatgtcactgcgacgccgtctcgcagattatgctgcaacagcagttaccattcatgttcaacccaatggccatgacgattccacccatgttcttacagcaaccctttgttggtgctgcattctagatagaaatatttgtgttgtatcgaataatgagttgacatgccatcgcgtgtgactcattattaacaataaaacaagtttcctctaaaaaaaaaaaaaaaa

SEQ ID NO: 6872 - protein, 150 aa, Zea mays; identical to SEQ ID NO: 6844
  misc_feature: Ceres CLONE ID no. 1283950
  misc_feature: Ceres CDNA ID no. 36707085
  misc_feature (1)..(63): Pfam Name: Zein PFAM Desc: Zein seed storage protein
  misc_feature: Homolog of GI Number: 511870 NR Desc: zein protein
  misc_feature: Homolog of GI Number: 18087509 NR Desc: 11 kDa methionine
  misc_feature: Homolog of GI Number: 1084475 NR Desc: 10k zein protein
  misc_feature: Homolog of GI Number: 847834 NR Desc: 10 kDa zein
  misc_feature: Homolog of GI Number: 57021071 NR Desc: delta kafirin
  misc_feature: Homolog of GI Number: 14906664 NR Desc: seed storage protein delta kafirin
  misc_feature: Homolog of GI Number: 15983739 NR Desc: modified zein precursor
  misc_feature: Homolog of GI Number: 16305117 NR Desc: 18kD delta zein
  misc_feature: Homolog of GI Number: 984525 NR Desc: DZS18
  misc_feature: Homolog of GI Number: 168686 NR Desc: 26.99 kd zein protein

SEQ ID NO: 6873 - DNA, 908 bp, Zea mays
  misc_feature: Ceres CLONE ID no. 1283974
  misc_feature: Ceres CDNA ID no. 25445600
  CDS (127)..(642): REFERENCED BY SEQ ID NO: 6874
atatacacaatctttcgcgctcctaccgccgcggcttccttctctacccttcttccctcgcgccgccgccaccgcaagagtatctcaactccgcctcgagaccttcccccctcgctggtctcagccatggtgaaatattcgacggagccgaccaaccccaccaagtccgccaaggccatgggccgtgacctacgtgttcacttcaagaacacacgtgagacagcttttgcccttaggaagttgtcactcaccaaggccaaaagttaccttgaggatgtgatcgcccacaagcaggccatcccgttccgcaggtattgtggtggtgttgggcgtactgctcaggctaagtctcgccactcaaatggtcagggacgctggcctgccaagtctgctaaattcattctagaccttctcaagaatgcagagagcaatgctgaggtgaaaggacttgatgtggataccctctatgtgtcgcacattcaagttaatcaggctcagaagcagcgacgcaggacataccgtgctcatggacgcatcaacccttacatgtcctccccatgccacatagagctcatcttgtcggagaaggaagagccagtgaagaaagaggctgagtctcagatcgcaaccaggaaggcttagagaaggggctctatcttctgtgattggcttagtacaagttttggctgattgtttgttgtctcatactgtttacctgagtattgtttgcaagtgctttatcactgtccgaactgtgcatgcaattcactggtctagagaattgttcgtggattgtttcatatttgtgcgtatggctcatgtctgttgctttgctttaatctgtaccgaacattaagtgtagcattaacaatctgaagcgaacattaagagcaaaaaaaaaaaaaaaa

SEQ ID NO: 6874 - protein, 171 aa, Zea mays
  misc_feature: Ceres CLONE ID no. 1283974
  misc_feature: Ceres CDNA ID no. 25445600
  misc_feature (17)..(153): Pfam Name: Ribosomal_L22 PFAM Desc: Ribosomal protein L22p/L17e
  misc_feature: Homolog of GI Number: 50899126 NR Desc: putative ribosomal protein L17
  misc_feature: Homolog of GI Number: 2668748 NR Desc: ribosomal protein L17
  misc_feature: Homolog of GI Number: 12240036 NR Desc: ribosomal protein L17
  misc_feature: Homolog of GI Number: 421985 NR Desc: ribosomal protein L17.1
  misc_feature: Homolog of GI Number: 19102 NR Desc: ribosomal protein L17
  misc_feature: Homolog of GI Number: 50947889 NR Desc: putative ribosomal protein L17
  misc_feature: Homolog of GI Number: 19104 NR Desc: ribosomal protein L17
  misc_feature: Homolog of GI Number: 421987 NR Desc: ribosomal protein L17.2
  misc_feature: Homolog of GI Number: 15824574 NR Desc: ribosomal protein
  misc_feature: Homolog of GI Number: 40287468 NR Desc: ribosomal protein PETRP
  misc_feature: Useful for delaying flowering time
  misc_feature: Useful for making stronger plants
  misc_feature: Useful for sterility
MVKYSTEPTNPTKSAKAMGRDLRVHFKNTRETAFALRKLSLTKAKSYLEDVIAHKQAIPFRRYCGGVGRTAQAKSRHSNGQGRWPAKSAKFILDLLKNAESNAEVKGLDVDTLYVSHIQVNQAQKQRRRTYRAHGRINPYMSSPCHIELILSEKEEPVKKEAESQIATRKA

SEQ ID NO: 6875 - DNA, 1017 bp, Zea mays
  misc_feature: Ceres CLONE ID no. 1284015
  misc_feature: Ceres CDNA ID no. 36707050
  CDS (27)..(749): REFERENCED BY SEQ ID NO: 6876
aaaaggcccaaactcaccacctcccaatggagaacggcgacgaaaccctcgcctcccccacggccgccgccgagacggacgcgctcaacggcggcgtcgcggaggaggagcaggtccccatcacccaccccgcaaagtcctacgtcacgctcgccgacgacaaccccgctcctaacggcggcgtcgtgaaagaggaggagggcggtgcccacaccaccgcgaagtcctacgcagctgtcgccgcccaagccgagatcgaggacctccgcgccgccaagctcgacctggaggagaagctcgctgaggcccgccgtgagaacaagtccctcgccgaggagacgcaccgcagcgaggggatcttcacgcaggcccgggaggaggtcaccatcgccgagttcgccgccacctctgccgagaaggaggtcgcctcgctccgcgcggaggtcgaacgcctcgatgctgttctcaggatcgagaagggcgagcacgagctggacaagcagagacacgagaaggtcgccaaggaggtggatgccgtgcgccaggagaagctcaagctagaggaggagatcagagccctgaaggcttccgccaccgccgccgccaccaccaaggagagggaagctgcgccggcttctgaggccccgaaggaaggggaagtcgcgtggctggggatggcggtggctgcggctgccggcgccgccggcacggctgccatcatgctagtttatctccgccttaagaggtaggtgttctggtgctcggttgcgtagcagtaaagggagttttcgtcgtgatgctgctattactgaactgggaggtatgcgacttctatgagtagttgcttattagcctacagaaaatatagggatctggagactggttatgtttcatggctgttcttctttcaccggtaccattttatgacgaacgttgtatgactgattatcttcttgtttacgttactgctacggcatggcctcatgacccttttttgatctaaaaaaaaaaaaaaaa

SEQ ID NO: 6876 - protein, 240 aa, Zea mays
  misc_feature: Ceres CLONE ID no. 1284015
  misc_feature: Ceres CDNA ID no. 36707050
  misc_feature: Homolog of GI Number: 6996142 NR Desc: VIP1 protein
  misc_feature: Homolog of GI Number: 50901988 NR Desc: OJ1116_H09.21
  misc_feature: Homolog of GI Number: 50932619 NR Desc: putative VIP1 protein
  misc_feature: Homolog of GI Number: 47087423 NR Desc: serine/arginine repetitive matrix 1
  misc_feature: Homolog of GI Number: 66780099 NR Desc: PE
  misc_feature: Homolog of GI Number: 72082973 NR Desc:  similar to Splicing factor
  misc_feature: Homolog of GI Number: 55740439 NR Desc: hydroxyproline
  misc_feature: Homolog of GI Number: 67987177 NR Desc: 4Fe
  misc_feature: Homolog of GI Number: 73950193 NR Desc:  similar to serine/arginine repetitive matrix 1 isoform 2
MENGDETLASPTAAAETDALNGGVAEEEQVPITHPAKSYVTLADDNPAPNGGVVKEEEGGAHTTAKSYAAVAAQAEIEDLRAAKLDLEEKLAEARRENKSLAEETHRSEGIFTQAREEVTIAEFAATSAEKEVASLRAEVERLDAVLRIEKGEHELDKQRHEKVAKEVDAVRQEKLKLEEEIRALKASATAAATTKEREAAPASEAPKEGEVAWLGMAVAAAAGAAGTAAIMLVYLRLKR

SEQ ID NO: 6877 - DNA, 586 bp, Zea mays
  misc_feature: Ceres CLONE ID no. 1284050
  misc_feature: Ceres CDNA ID no. 25447049
  CDS (1)..(378): REFERENCED BY SEQ ID NO: 6878
atgaagcgtgacgttaatccctctcctccctctcctcccctctgctccccatcaactcttcacctcgcccaacgatccccaattcctccttcggatttcacattcaatgcaactcaattggctgttctgcaggtggtaaagaaagcagacatagaggaatggggctcgcgtttgggaagctcttcagccggctcttcgtcgataaggatatgcagatccttatggtcggcatcgataccactggtaaaaccaccatcctctacaagctcaagcttggcgagatcgccatggtcaaggaacacattggacaaggttttggacactgttgcagaaggaggaggacagatctcaagtaagatggggatgtcgtgtgcttgagacgacaaggatggagatcttttcaagtaatggctagtctttttatcatagattgagtgcttgaatttgtgaaatctttgtcgaacctgatattttcgttccaaagtggaaccaccatgtttgtgaatttgaatagccacatgtatcaaccgataccgaagctggaatattaataatattcccttttctaataaaaaaaaaaaaaaaa

SEQ ID NO: 6878 - protein, 65 aa, Zea mays
  misc_feature: Ceres CLONE ID no. 1284050
  misc_feature: Ceres CDNA ID no. 25447049
  misc_feature (4)..(43): Pfam Name: Arf PFAM Desc: ADP
  misc_feature: Homolog of GI Number: 34900346 NR Desc: ADP
  misc_feature: Homolog of GI Number: 47026876 NR Desc: ADP
  misc_feature: Homolog of GI Number: 21592942 NR Desc: ADP
  misc_feature: Homolog of GI Number: 3182917 NR Desc: ADP
  misc_feature: Homolog of GI Number: 37791223 NR Desc: ARF
  misc_feature: Homolog of GI Number: 76160984 NR Desc: ARF
  misc_feature: Homolog of GI Number: 21553518 NR Desc: ADP
  misc_feature: Homolog of GI Number: 47026845 NR Desc: ADP
  misc_feature: Homolog of GI Number: 29028258 NR Desc: ADP
  misc_feature: Homolog of GI Number: 29028256 NR Desc: ARF1
MGLAFGKLFSRLFVDKDMQILMVGIDTTGKTTILYKLKLGEIAMVKEHIGQGFGHCCRRRRTDLK

SEQ ID NO: 6879 - DNA, 1284 bp, Zea mays
  misc_feature: Ceres CLONE ID no. 1284141
  misc_feature: Ceres CDNA ID no. 25445925
  CDS (337)..(1041): REFERENCED BY SEQ ID NO: 6880
cccgacccgtcccaccctatcagttgcgggcgcgcgtccctgtttcgctcgtgccgttgcgctgcgccaagcctccccacctctctcgtctcttctccacccgccgccctcgtgggagtgaaaccctagctagggttctgcccgccgccgccttcgatcaagacgcctgcagccttagcgcgagcccgccatggacacaggacgcaagcgcatcgcgccggggggcgccaacggcgcgggcggcccgaagcgcgcgagagcactgcgggttgtccctttggttcaaattgccattttctccataacttcccgggtggctacctggcggtttcaaagatgaccaacttgggtgggccacctgttccggctcccccaggaaggatgcctatgggacctggtggtcctgatgggccaccttcacctgctctgaagactcgcttgtgtaacaagtacaacactgcagaaggatgtaaatgggggagcaaatgccactttgctcatggagagagggagcttggaaagcccctgcagatggacaactcgatgggagctcctccaatgggtccagggccaaacggtcacttcatgccacctccaatgcctatcccagacatggttcctcactccacattcggtgcttcggccacagccaagatcagtgtcgatgcatcccttgctggcgccatcattgggaagagtggtatcaacacaaagcatatatcccgagtgactggggccaagttagccatccgggacaatgaggctgatcccaaccataaaaacatcgagctcgagggaacgtttgaccagatcaagcacgctagcgcaatggtcacagagttgattgtccgcatcagtggtaaggtgcctccacaagcaaagaacaacccaggcagggggcctggttctcatgctgggggtcctgcaagcaacttcaagaccaagttgtgcgagaacttcaacaaaggctcctgcacctttggagacaggtgccactttgcccatggcgaaagtgagttgcgcaaacctgctgctgcttgatagatgtgtttagtgtggcttgcggtgattactctgcctgtgtggctgaataacaccacagtcgcctatggtgagatgtactgggccacgtgctgcctgagagagatcatttccatcgcttgcgtagagacaatggccgttttttaggatttgtaggattgccgtattgttctgttcgatttatatctaaccctgccagaatcctatttttgtaccgtttcttagctaaaaaaaaaaaaaaaa

SEQ ID NO: 6880 - protein, 234 aa, Zea mays
  misc_feature: Ceres CLONE ID no. 1284141
  misc_feature: Ceres CDNA ID no. 25445925
  misc_feature (104)..(166): Pfam Name: KH_1 PFAM Desc: KH domain
  misc_feature (31)..(57): Pfam Name: zf PFAM Desc: Zinc finger C
  misc_feature: Homolog of GI Number: 51090454 NR Desc: KH domain
  misc_feature: Homolog of GI Number: 50905911 NR Desc: KH domain
  misc_feature: Homolog of GI Number: 50929447 NR Desc: OSJNBa0087O24.9
  misc_feature: Homolog of GI Number: 18129298 NR Desc: similarity to the EST C99174
  misc_feature: Homolog of GI Number: 50941347 NR Desc: putative zinc finger protein
  misc_feature: Useful for delaying flowering time
  misc_feature: Useful for increasing chlorophyll and photosynthetic capacity
  misc_feature: Useful for making ornamental plants with modified flowers
  misc_feature: Useful for making plants that grow better in shade
MTNLGGPPVPAPPGRMPMGPGGPDGPPSPALKTRLCNKYNTAEGCKWGSKCHFAHGERELGKPLQMDNSMGAPPMGPGPNGHFMPPPMPIPDMVPHSTFGASATAKISVDASLAGAIIGKSGINTKHISRVTGAKLAIRDNEADPNHKNIELEGTFDQIKHASAMVTELIVRISGKVPPQAKNNPGRGPGSHAGGPASNFKTKLCENFNKGSCTFGDRCHFAHGESELRKPAAA

SEQ ID NO: 6881 - DNA, 555 bp, Zea mays
  misc_feature: Ceres CLONE ID no. 1284249
  misc_feature: Ceres CDNA ID no. 29191433
  CDS (107)..(340): REFERENCED BY SEQ ID NO: 6882
gcaccgctacttgtgctcccccaacgctactaccgccgctagctggttcaagtgcggcgagcggagccggagaccggtagaggaaattaagaggcgtcgatcgggcatggggtgcgacgacaagtgcgggtgcgccgtgccgtgccccggcggcaaagactgcaggtgcacgtcggggagcggcgggcagcgggagcacacgacttgcggctgcggggagcactgcgagtgcagcccgtgcacgtgtggccgggccacgatgccgtccggccgcgagaacaggagggctaactgctcctgcggggcgtcctgcaactgcgcatcctgcgcctcggcctgatccatgcgcctcgccctcgtgctaccgcgctgcctagtggagggagttgtctagtgaggctctggagacgaagcaactagcactacttctaataaaggggcttgtgtcatgctcgccagacgcatcacgcgctgcatctgcatcgtggtatcgtgtagtaagtttgtgtatgaataaacactaccactttatgtctcgcaaaaaaaaaaaaaaaa

SEQ ID NO: 6882 - protein, 77 aa, Zea mays
  misc_feature: Ceres CLONE ID no. 1284249
  misc_feature: Ceres CDNA ID no. 29191433
  misc_feature (2)..(76): Pfam Name: Metallothio_PEC PFAM Desc: Plant PEC family metallothionein
  misc_feature: Homolog of GI Number: 987123 NR Desc: class II metallothionein with homology to wheat Ec
  misc_feature: Homolog of GI Number: 21724 NR Desc: Ec protein
  misc_feature: Homolog of GI Number: 29786355 NR Desc: metallothionein
  misc_feature: Homolog of GI Number: 21728 NR Desc: Ec protein
  misc_feature: Homolog of GI Number: 37536538 NR Desc: putative zinc
  misc_feature: Homolog of GI Number: 45862033 NR Desc: class II metallothionein
  misc_feature: Homolog of GI Number: 10834829 NR Desc: metallothionein
  misc_feature: Homolog of GI Number: 4105810 NR Desc: PGPS/NH21
  misc_feature: Homolog of GI Number: 2642439 NR Desc: metallothionein
  misc_feature: Homolog of GI Number: 2306979 NR Desc: metallothionein
MGCDDKCGCAVPCPGGKDCRCTSGSGGQREHTTCGCGEHCECSPCTCGRATMPSGRENRRANCSCGASCNCASCASA

SEQ ID NO: 6883 - DNA, 791 bp, Zea mays
  misc_feature: Ceres CLONE ID no. 1284285
  misc_feature: Ceres CDNA ID no. 25445601
  CDS (186)..(569): REFERENCED BY SEQ ID NO: 6884
atatatagcgcgaaggaaccctaaccgcctccagcctcggcctctgctcccggctcccccacggtactccagccgctagcctgcgattccgccagtacgccaccaccaccgagcctggactaccgccgccgcccttcgccgatatcttcagcggcgaacagcgcccaccagatcccgcccctgcgatggagtccgtggtgaacccgaaggcatacccgctggctgatgcgcagctgacgatgggtatcctcgatatcatccagcaggccgccaactacaaacagcttaagaagggagcgaatgaagcgacgaagaccctgaataggggcatatcggagtttgtagtgatggcggcggacacagagcctctcgagatcctgctccacctccccttgttagctgaggataagaacgtgccatatgtgtttgttccatcgaagcaagctcttggccgtgcttgtggtgtgacaagaccggttattgcttgctcagtgaccagtaatgagggtagccagctgaaactacagatacagggtctcaaggactccattgagaagcttctcatctgatctgccgaagacctttcagtgtgatgggcctcagcgacacttttttcagaggcttggactggtgatggtgtcttgtttactttgcgcttttcaaactatatttgaacactgttaagtcgatcatacttgaattgtactgcatcttatgtttgtgattgtcatgtaatctgaagatgcctctgtattgtggtggcttgtttctgctgaaaaaaaaaaaaaaaa

SEQ ID NO: 6884 - protein, 127 aa, Zea mays
  misc_feature: Ceres CLONE ID no. 1284285
  misc_feature: Ceres CDNA ID no. 25445601
  misc_feature (19)..(113): Pfam Name: Ribosomal_L7Ae PFAM Desc: Ribosomal protein L7Ae/L30e/S12e/Gadd45 family
  misc_feature: Homolog of GI Number: 21592866 NR Desc: Ribosomal protein L7Ae
  misc_feature: Homolog of GI Number: 21592608 NR Desc: ribosomal protein L7Ae
  misc_feature: Homolog of GI Number: 21554922 NR Desc: Ribosomal protein L7Ae
  misc_feature: Homolog of GI Number: 47027071 NR Desc: ribosomal protein L7
  misc_feature: Homolog of GI Number: 13605585 NR Desc: AT4g12600/T1P17_190
  misc_feature: Homolog of GI Number: 30687670 NR Desc: ribosomal protein L7Ae/L30e/S12e/Gadd45 family protein
  misc_feature: Homolog of GI Number: 55661284 NR Desc:  similar to NHP2
  misc_feature: Homolog of GI Number: 28302201 NR Desc: Hoip
  misc_feature: Homolog of GI Number: 51764844 NR Desc: similar to NHP2
  misc_feature: Homolog of GI Number: 62667523 NR Desc:  similar to NHP2
  misc_feature: Useful for making ornamental plants with modified flowers
MESVVNPKAYPLADAQLTMGILDIIQQAANYKQLKKGANEATKTLNRGISEFVVMAADTEPLEILLHLPLLAEDKNVPYVFVPSKQALGRACGVTRPVIACSVTSNEGSQLKLQIQGLKDSIEKLLI

SEQ ID NO: 6885 - DNA, 617 bp, Zea mays
  misc_feature: Ceres CLONE ID no. 1284378
  misc_feature: Ceres CDNA ID no. 25445588
  CDS (86)..(484): REFERENCED BY SEQ ID NO: 6886
cccgcacaccggttgcgatccgccgccatcgcttcaagcagcgaaccctagccgccctcagcgacggattgcagatctcccagccatgacgttcaagcggaggaacggcggacgcaacaagcacgggcgcggccacgtcaagtacatacgctgctccaactgcgccaagtgctgtccaaaggataaggctatcaagcggttcttggtgaggaacattgttgagcaggctgctgtgagggacgtgcaggaggcttgtgtgcatgatggatatgttcttcccaaattgtacgcaaaggttcatcactgtgtctcatgcgcaatccatgcgcacattgtccgtgtccgctctcgtgagaacaggaggaaccgtgagcccccgcagcgtttcaggcgccgggatgatggcccaaggccaggtcagggcccaccgcgcccaggtgctgctgccacagcagctccccctgctgccgctcctcgtacctaagttcaggaatgcgtttcagggcttagttctctcacctatgggataatggacttttcctgttttgaaaaccaatgtactgtacccccttgatgtcaaaattttagcacaatttgtggtaaaaaaaaaaaaaaaa

SEQ ID NO: 6886 - protein, 132 aa, Zea mays
  misc_feature: Ceres CLONE ID no. 1284378
  misc_feature: Ceres CDNA ID no. 25445588
  misc_feature (1)..(117): Pfam Name: Ribosomal_S26e PFAM Desc: Ribosomal protein S26e
  misc_feature: Homolog of GI Number: 57900258 NR Desc: putative ribosomal protein S26
  misc_feature: Homolog of GI Number: 50931777 NR Desc: putative 40S ribosomal protein S26
  misc_feature: Homolog of GI Number: 7440567 NR Desc: probable ribosomal protein S31
  misc_feature: Homolog of GI Number: 5706704 NR Desc: ribosomal protein S26
  misc_feature: Homolog of GI Number: 56236112 NR Desc: At2g40510
  misc_feature: Homolog of GI Number: 22137298 NR Desc: AT3g56340/F18O21_300
  misc_feature: Homolog of GI Number: 20466414 NR Desc: 40S ribosomal protein S26
  misc_feature: Homolog of GI Number: 24111313 NR Desc: At2g40590/T2P4.6
  misc_feature: Homolog of GI Number: 3885515 NR Desc: similar to ribosomal protein S26
  misc_feature: Homolog of GI Number: 61654752 NR Desc: S26
MTFKRRNGGRNKHGRGHVKYIRCSNCAKCCPKDKAIKRFLVRNIVEQAAVRDVQEACVHDGYVLPKLYAKVHHCVSCAIHAHIVRVRSRENRRNREPPQRFRRRDDGPRPGQGPPRPGAAATAAPPAAAPRT

SEQ ID NO: 6887 - DNA, 934 bp, Zea mays
  misc_feature: Ceres CLONE ID no. 1284396
  misc_feature: Ceres CDNA ID no. 25445602
  CDS (168)..(638): REFERENCED BY SEQ ID NO: 6888
gaaaatcgttaaacccagaagcctcctcgtcctctctctgactctctctcaccctctcccctccctcggggtcgcggttgcttcctcgcggccgattcgtatcttccgtggcagcagggagggtacggtactcctccggccggcgggaggagaagaggagcttcgagatgggggcgtccctcgcttccgcgggcttggtgaactacccgcttgtcgcggcgctcctcgcgttcgctctcgcgcagtcctccaagttcttcaccacctggtacaaagaaggtcggtgggatgccagacaacttatagcttctggcgggatgccatcatcccactcagctacagtgacagcactttcagtggcagtgggaatccaagaaggctttcgtagtgcaacatttgcaactgcactagtctttgcatgtgtggttatgcatgatgcttttggagttcggttacatgccggaaagcaggcagaggtgctgaatcaaattgtctatgagctgccagaggaacacccattatcagagacaaagccactgcgtgaaatccttggacatactgttcctcaggtcgtggccggttgcatccttggaatcctcatggctgtcgttatgcttttggctctcgggaggtcttagtcaagtgttgttcaccctatatctcactggtgatggctacaaagcataaaaacatgatctccccatggttctggctgtccaagtgttcgatagtacaaagttctaaccgaatttagatctggactgtaggtttcaggttgtagctcgagttggttgctgtaaatctgaaagggtcacttttaattccaaccacggtgtaatggaagctttgttatacaatcagcagcggtaagatcattttgcggatcagtatggtcgataccatgccgtcgcatttgctaaaaaaaaaaaaaaaa

SEQ ID NO: 6888 - protein, 156 aa, Zea mays
  misc_feature: Ceres CLONE ID no. 1284396
  misc_feature: Ceres CDNA ID no. 25445602
  misc_feature (7)..(152): Pfam Name: DUF212 PFAM Desc: Divergent PAP2 family
  misc_feature: Homolog of GI Number: 50925313 NR Desc: OJ991113_30.3
  misc_feature: Homolog of GI Number: 62463813 NR Desc: COG1963: Uncharacterized protein conserved in bacteria
  misc_feature: Useful for making bigger plants
  misc_feature: Useful for making plants with increased biomass and foliage
  misc_feature: Useful for making smaller plants
MGASLASAGLVNYPLVAALLAFALAQSSKFFTTWYKEGRWDARQLIASGGMPSSHSATVTALSVAVGIQEGFRSATFATALVFACVVMHDAFGVRLHAGKQAEVLNQIVYELPEEHPLSETKPLREILGHTVPQVVAGCILGILMAVVMLLALGRS

SEQ ID NO: 6889 - DNA, 682 bp, Zea mays
  misc_feature: Ceres CLONE ID no. 1284421
  misc_feature: Ceres CDNA ID no. 25445694
  CDS (100)..(486): REFERENCED BY SEQ ID NO: 6890
agatccgtgttccgtgtccgcgtccagtgtgtccgctactccgctccccctcagtcctcagttcctcacctagcggtagcgtgcgcgcgggagacgtagatggcggcttcggaggcggcagcggcggcggcaacaccggtgacgccgacagaggggacggtgatcgcgatccacagcctggaggagtggagcatccagatcgaggaggccaacagcgccaagaagctggtggtgattgacttcactgcaacatggtgtcctccgtgccgcgccatggctccaatttttgctgatatggccaagaagtccccaaatgttgttttcctgaaagttgatgtggatgaaatgaagaccattgctgagcaattcagcgtagaggccatgccaacattcctgttcatgagggagggcgacgtcaaggacagggtcgttggcgcagcaaaggaagagctagcaaggaagcttgaactacacatggcctcgtagatcagtgatgccgtaatgtagtattcgcctaaataagaggacgcctcgcctcaactctgagaaaactagtgcttctgtgatggtaattcgtatgagagagtgccccctttggtggtacttcttcgtatgtagtattaactcctgtcttaatatgttgccctgcttgtgcttttcatacctaaaaaaaaaaaaaaaa

SEQ ID NO: 6890 - protein, 128 aa, Zea mays; identical to SEQ ID NO: 6674
  misc_feature: Ceres CLONE ID no. 1284421
  misc_feature: Ceres CDNA ID no. 25445694
  misc_feature (21)..(127): Pfam Name: Thioredoxin PFAM Desc: Thioredoxin
  misc_feature: Homolog of GI Number: 66841002 NR Desc: thioredoxin h1 protein
  misc_feature: Homolog of GI Number: 50932277 NR Desc: putative thioredoxin H
  misc_feature: Homolog of GI Number: 12082335 NR Desc: thioredoxin h
  misc_feature: Homolog of GI Number: 2995380 NR Desc: thioredoxin H
  misc_feature: Homolog of GI Number: 8980491 NR Desc: thioredoxin h
  misc_feature: Homolog of GI Number: 32186042 NR Desc: thioredoxin h isoform 2
  misc_feature: Homolog of GI Number: 21537330 NR Desc: thioredoxin
  misc_feature: Homolog of GI Number: 14532808 NR Desc: putative thioredoxin
  misc_feature: Homolog of GI Number: 1388084 NR Desc: thioredoxin h
  misc_feature: Homolog of GI Number: 21617958 NR Desc: thioredoxin h
  misc_feature: Useful for making larger plants
  misc_feature: Useful for sterility

SEQ ID NO: 6891 - DNA, 614 bp, Zea mays
  misc_feature: Ceres CLONE ID no. 1284433
  misc_feature: Ceres CDNA ID no. 25445589
  CDS (1)..(513): REFERENCED BY SEQ ID NO: 6892
atcggcctcagtcgcacatatctactatactatactctaggaagcaaggacaccaccgccatggcagccaagatgcttgcattgttcgctctcctagctctttgtgcaagcgccactagtgcgacccatattccagggcacttgccaccagtcatgccattgggtaccatgaacccatgcatgcagtactgcatgatgcaacaggggcttgccagcttgatggcgtgtccgtccctgatgctgcagcaactgttggccttaccgcttcagacgatgccagtgatgatgccacagatgatgacgcctaacatgatgtcaccattgatgatgccgagcatgatgtcaccaatggtcttgccgagcatgatgtcgcaaatgatgatgccacaatgtcactgcgacgccgtctcgcagattatgctgcaacagcagttaccattcatgttcaacccaatggccatgacgattccacccatgttcttacagcaaccctttgttggtgctgcattctagatagaaatatttgtgttgtaccgaataatgaattgacatgccatcgcgtgtgactcattattaacaataaaacaagtttcctctcaaaaaaaaaaaaaaaa

SEQ ID NO: 6892 - protein, 150 aa, Zea mays; identical to SEQ ID NO: 6844
  misc_feature: Ceres CLONE ID no. 1284433
  misc_feature: Ceres CDNA ID no. 25445589
  misc_feature (1)..(63): Pfam Name: Zein PFAM Desc: Zein seed storage protein
  misc_feature: Homolog of GI Number: 511870 NR Desc: zein protein
  misc_feature: Homolog of GI Number: 18087509 NR Desc: 11 kDa methionine
  misc_feature: Homolog of GI Number: 1084475 NR Desc: 10k zein protein
  misc_feature: Homolog of GI Number: 847834 NR Desc: 10 kDa zein
  misc_feature: Homolog of GI Number: 57021071 NR Desc: delta kafirin
  misc_feature: Homolog of GI Number: 14906664 NR Desc: seed storage protein delta kafirin
  misc_feature: Homolog of GI Number: 15983739 NR Desc: modified zein precursor
  misc_feature: Homolog of GI Number: 16305117 NR Desc: 18kD delta zein
  misc_feature: Homolog of GI Number: 984525 NR Desc: DZS18
  misc_feature: Homolog of GI Number: 72307 NR Desc: 22K zein precursor

SEQ ID NO: 6893 - DNA, 934 bp, Zea mays
  misc_feature: Ceres CLONE ID no. 1284476
  misc_feature: Ceres CDNA ID no. 36707172
  CDS (265)..(672): REFERENCED BY SEQ ID NO: 6894
gtagtctgtactcacatctttccctcccgtcggccagcagccttccggttcaggccccgtcgcatctctcctcgtcggccagctgcagggcacctagcgcgtggtcggcgagcgcgcgggcgggcggcagggggcgccgcggcggcgagcgcgcaggcccccactcacagacgactgggccggccttcactgctacttcggccccttcgtcgccgacgagaaccaccgcttgttcgggggaattttttctaggtgctggttggaatggcaagtacagcatgctttgtgattgtcagtaagaatgacatcccaatctatgaggcagaagttggatctgcacccaaaaaagaagatttgtcttatcaccatcagtttattctgcatgctgcattagatgttgttcaggatctagcatggacaacaaatgcaatgttcctgaagtcagttgatagattcaatgaccttgtggtgtctgtttatgtaactgctggtcataccagattcatgctgcttcatgactcgcgtagcgaggatggaataaaaagcttttttcaagaggtccatgaactttacatcaagatattcctcaacccgctttacctgcccggctctcgcatcacatcctctcatttcgataccaaggtgagggcgctcgcgaggaggtacctgtaatacgggcatatgctggggtttcatcgtaaagcaggcacgccgatttttttgtgccatcatcatctgataacacatacgtctaatttttcttggcgttggctttgttatgaccgacctatggatcattttttttttcgagaacaaaatgacttgtctaatttttcttggcgttggctttgttatgaccgacctatggatcatttttttttcgagaacaaaatgacttggcgataatgttcaaactttaaaaaaaaaaaaaaaa

SEQ ID NO: 6894 - protein, 135 aa, Zea mays
  misc_feature: Ceres CLONE ID no. 1284476
  misc_feature: Ceres CDNA ID no. 36707172
  misc_feature: null
  misc_feature: Useful for biocontainment applications
  misc_feature (3)..(77): Pfam Name: Sedlin_N PFAM Desc: Sedlin
  misc_feature: Homolog of GI Number: 50926262 NR Desc: OSJNBa0014K14.9
  misc_feature: Homolog of GI Number: 49659792 NR Desc: putative TRAPP subunit
  misc_feature: Homolog of GI Number: 50910439 NR Desc: putative spondyloepiphyseal dysplasia
  misc_feature: Homolog of GI Number: 70663924 NR Desc: OSJNBa0014K14.10
  misc_feature: Homolog of GI Number: 57111631 NR Desc:  similar to Sedlin
  misc_feature: Homolog of GI Number: 58533179 NR Desc: trafficking protein particle complex 2
  misc_feature: Homolog of GI Number: 38174617 NR Desc: Trafficking protein particle complex 2
  misc_feature: Homolog of GI Number: 51477744 NR Desc:  similar to Sedlin
  misc_feature: Homolog of GI Number: 55666336 NR Desc:  similar to Sedlin
MASTACFVIVSKNDIPIYEAEVGSAPKKEDLSYHHQFILHAALDVVQDLAWTTNAMFLKSVDRFNDLVVSVYVTAGHTRFMLLHDSRSEDGIKSFFQEVHELYIKIFLNPLYLPGSRITSSHFDTKVRALARRYL

SEQ ID NO: 6895 - DNA, 850 bp, Zea mays
  misc_feature: Ceres CLONE ID no. 1284502
  misc_feature: Ceres CDNA ID no. 25445795
  CDS (53)..(754): REFERENCED BY SEQ ID NO: 6896
acatattattgagaccaactagcaacatagaaagcacaatagtgtaccaacaatggcagccaaaatattttgcttccttatgctccttggtctttctgcaagtgttgctaccgcaaccattttcccacaatgctcacaagctcctatagcttcccttcttcccccatacctctcaccagcggtgtcttcaatgtgtgaaaacccaattgttcaaccctacaggatccaacaggcaatcgcaacaggcatcttaccattatcacccttgttcctccaacaaccgtcagccctattacagcagttacctttggtccatttggtggcacaaaacatcagggcacaacaactacaacaacttgtgctagcaaaccttgctgcatactctcagcaacatcagtttcttccattcaaccaactggctgcattgaactctgctgcttatttgcaacaacaattaccattcagccagctagttgctgcctacccccagcaatttcttccattcaaccaactagcagcattgaactctgctgcttatttacagcagcaacaactactaccattcagccagctagctgatgtgagccctgctgccttcttgacacaacaacagttgttgccgttctacctgcacgctatgcctaacgctggcaccctcttacaactgcaacaattgctgccattcaaccaacttgctttgacaaactcaacagtgttctaccaacaacccatcattggtggtgccctcttttagattgcttatgagttatagttcaataatgaagttttttggatgatgtttgtggcgtcccagaaataagaaagtacatttccaaaaaaaaaaaaaaaa

SEQ ID NO: 6896 - protein, 233 aa, Zea mays; identical to SEQ ID NO: 6790
  misc_feature: Ceres CLONE ID no. 1284502
  misc_feature: Ceres CDNA ID no. 25445795
  misc_feature (1)..(98): Pfam Name: Zein PFAM Desc: Zein seed storage protein
  misc_feature: Homolog of GI Number: 22448 NR Desc: 19 kDa zein
  misc_feature: Homolog of GI Number: 16073 NR Desc: zein protein
  misc_feature: Homolog of GI Number: 535021 NR Desc: zein Zd1
  misc_feature: Homolog of GI Number: 535020 NR Desc: zein Zd1
  misc_feature: Homolog of GI Number: 72316 NR Desc: 19K zein precursor
  misc_feature: Homolog of GI Number: 22446 NR Desc: 19 kDa zein
  misc_feature: Homolog of GI Number: 16305125 NR Desc: 19kD alpha zein B1
  misc_feature: Homolog of GI Number: 224509 NR Desc: zein E19
  misc_feature: Homolog of GI Number: 72315 NR Desc: 19K zein precursor

SEQ ID NO: 6897 - DNA, 772 bp, Zea mays
  misc_feature: Ceres CLONE ID no. 1284534
  misc_feature: Ceres CDNA ID no. 25445854
  CDS (140)..(490): REFERENCED BY SEQ ID NO: 6898
atccatcctcgctagctcgctcgctctccttgcaactccagtgctgctcactgccactgccagcagatcgagctgctccgtctcacaaaccctcttgctttgctgctgcacctgcaagtctgcaaccgcgcacacagagatgtcgacgacggtgagccgtgcgtccctcgaccagaagctcgccctcgccaagcgttgctcccgagaggcgaccctcgccggagccaaggcggcagcggtggcgactatcgcctccgcgatccccaccctggccagcgtgcggatgctgccatgggccaaggccaacatcaaccccaccggccaggcgctcatcgtctccacggtggctgggatggcctacttcatcgccgccgacaagaagatcctgtcgctggcgaggcgccactcgttcgagcaagcccctgagcacctcaagaacacctccttccagggcaccggccgtccccacccagccttcttcaggccgtgagacgagacctccgtccagagctagctacctacctctttttccagtttgccaatgcaagcaccaaatgcccaccgatgcatgcctgaataaactactgtaattgcgaggctgctgaacgtcgatgcgctagtataactactactactacgaggctagctgcgcgctgaacacagcgctgtaaagtagtgttggtgtgctaaattcagaatgtgtaagtttaatttatgttattaccagttaaccaactttgtgtgtgctaaaaaaagaaaaaaaaaaaaaaaa

SEQ ID NO: 6898 - protein, 116 aa, Zea mays; identical to SEQ ID NO: 4910
  misc_feature: Ceres CLONE ID no. 1284534
  misc_feature: Ceres CDNA ID no. 25445854
  misc_feature (12)..(90): Pfam Name: ENOD93 PFAM Desc: Early nodulin 93 ENOD93 protein
  misc_feature: Homolog of GI Number: 50948753 NR Desc: putative early nodulin
  misc_feature: Homolog of GI Number: 50948737 NR Desc: putative early nodulin
  misc_feature: Homolog of GI Number: 50948739 NR Desc: putative early nodulin
  misc_feature: Homolog of GI Number: 50948751 NR Desc: putative early nodulin
  misc_feature: Homolog of GI Number: 50948749 NR Desc: putative early nodulin
  misc_feature: Homolog of GI Number: 50948755 NR Desc: putative early nodulin
  misc_feature: Homolog of GI Number: 4809191 NR Desc: early nodulin
  misc_feature: Homolog of GI Number: 218262 NR Desc: early nodulin
  misc_feature: Homolog of GI Number: 4731119 NR Desc: root
  misc_feature: Homolog of GI Number: 50948733 NR Desc: Similar to OsENOD93a gene for early nodulin

SEQ ID NO: 6899 - DNA, 715 bp, Zea mays
  misc_feature: Ceres CLONE ID no. 1284546
  misc_feature: Ceres CDNA ID no. 40351726
  CDS (133)..(537): REFERENCED BY SEQ ID NO: 6900
acatattcacatcgcatcaagcttgatttacttcgatccaagaaagccacctgctaatcacctcacctgagataccaaacgttcacgaaccgccagccgaaggcctgaagccacagctaaggagcgagatccatggggaactcatacagcgggggtggctcggcgccggcgccggcggcactggaagtgccgctgcacctgtgcttcttcctgctggtgctgctcctcttcctggcctgctcgtggtacacgagctacgagtcggccgcggagtcgttcgcctaccaggcgcgcatcgtgctcatggcgtcgccgttcgcgctgctgctggccgtgcggctgctgtccagcgtctctggcgagggcgcgggccggagcgtgggtcacctgctggcggtgccgatgcctgagcgggactccatccaccgcgccggcgggtcgccgtggggcgtcggggtcctgctcctgctgctcctcgtcatggtttcctaccagtccaacttccgggagaaatggttcccgctcgcaagcaggtgagctgaaccatccatgcatggcgcggttggtgccgggagacgtccatgtatgtaaacaaacgcttgccgattgtggcggtgcgcttgaggctttcacgtctacttgtctgtaactgtaaaagtgtacgtgatgagttatatccgcggtaaatgcaatctccaattgccaaaaaaaaaaa

SEQ ID NO: 6900 - protein, 134 aa, Zea mays
  misc_feature: Ceres CLONE ID no. 1284546
  misc_feature: Ceres CDNA ID no. 40351726
MGNSYSGGGSAPAPAALEVPLHLCFFLLVLLLFLACSWYTSYESAAESFAYQARIVLMASPFALLLAVRLLSSVSGEGAGRSVGHLLAVPMPERDSIHRAGGSPWGVGVLLLLLLVMVSYQSNFREKWFPLASR

SEQ ID NO: 6901 - DNA, 1020 bp, Zea mays
  misc_feature: Ceres CLONE ID no. 1284563
  misc_feature: Ceres CDNA ID no. 36707173
  CDS (97)..(858): REFERENCED BY SEQ ID NO: 6902
acaagcagcgaaatccaatctagaagcacccctctccctctctctctcttcgccgtccgaagctccgcaccccaatctaatcgacacctcaccgagatgggccgcaagttcttcgtcggtggcaactggaaatgcaatggaaccacagatcaggtcgagaagattgtcaaaaccctgaatgaaggacaggttcccccttcagatgttgtcgaggtcgttgtcagccctccttatgtcttccttcctgtggtcaagagccagctgcgccaagagttccatgttgctgctcagaactgctgggtgaagaagggaggtgctttcactggtgaagtcagtgctgagatgctcgtcaaccttggtgttccctgggtcattcttggacactctgaaaggagagctctgctgggagaatcaaatgaatttgttggagacaaggttgcgtatgccctgtctcagggactaaaggtcattgcatgtgttggtgagacccttgagcagagggaggctgggtctaccatggatgttgttgctgcacaaacaaaagcaattgctgagaagatcaaggactggagcaacgtagttgttgcctatgaaccagtttgggctattggaactggtaaagttgccaccccagctcaggctcaggaagtgcacgcctccctgagggattggctaaagaccaatgccagccctgaggttgctgaatctactaggatcatctacggaggctctgtaactgctgcgaactgcaaagagctagcagcacagcctgatgtcgatggttttcttgtcggtggagcttctttgaagcctgagttcatcgacatcatcaacgcggccaccgtgaagtccgcttaagatgctacgctgaagacgaacatactttttttttgctcactgtgctatgtaagctagtagcttttgcgcaggagcagagactgttttgcctgcccccaacttctagcttgagcttgctaataatgtttacctctggacgtatcaataaaaaaaaaaaaaaaa

SEQ ID NO: 6902 - protein, 253 aa, Zea mays; identical to SEQ ID NO: 4734
  misc_feature: Ceres CLONE ID no. 1284563
  misc_feature: Ceres CDNA ID no. 36707173
  misc_feature (5)..(245): Pfam Name: TIM PFAM Desc: Triosephosphate isomerase
  misc_feature: Homolog of GI Number: 168647 NR Desc: triosephosphate isomerase 1
  misc_feature: Homolog of GI Number: 50900728 NR Desc: putative triosephosphate isomerase
  misc_feature: Homolog of GI Number: 11124572 NR Desc: triosephosphat
  misc_feature: Homolog of GI Number: 407525 NR Desc: triosephosphate isomerase
  misc_feature: Homolog of GI Number: 1785948 NR Desc: cytosolic triosephosphate isomerase
  misc_feature: Homolog of GI Number: 38112662 NR Desc: triose phosphate isomerase cytosolic isoform
  misc_feature: Homolog of GI Number: 77745458 NR Desc: triose phosphate isomerase cytosolic isoform
  misc_feature: Homolog of GI Number: 602590 NR Desc: triosephosphate isomerase
  misc_feature: Homolog of GI Number: 553107 NR Desc: triosephosphate isomerase
  misc_feature: Homolog of GI Number: 556171 NR Desc: triosephosphate isomerase

SEQ ID NO: 6903 - DNA, 879 bp, Zea mays
  misc_feature: Ceres CLONE ID no. 1284567
  misc_feature: Ceres CDNA ID no. 40351727
  CDS (17)..(514): REFERENCED BY SEQ ID NO: 6904
acggccagctgtgcccatgtcttcgtcgggccctttgctggcgacgggaacccaccacaccggccgccaacctgaggttttgtgggctcagcgctccgagaagattttcttgactatctcattgccagatgcgaaagatgttgtgttaaagaccgatcctaagggcctctttaacttctctgctgttgtccatggggaaccttttagcttcactttggagctttttgattcaatactgtcagagggaagtaaaacgaagacaaagatgggcctgcgaaacataatctgctcaatccagaaagaaaagaaaggttggtggaagcgcttgctaaagtcagaggaaaagcatccatacatcaaagttgactggaacaaatggtgcgatgaggatgaagagtctgagttctctggggattcagatggtggctttgatgaggcaaatgaaggagatgaaagtgatgatgatgatgggatgctttatctccccgaccttgaaaagctaaggggcaagtgatctggctgcttcggtgaagggagtagggttgatgtaacaagttaccgttgacgtgacagagtaggcttatcatcgacgtagttggggtcttacttgctgagcatctgcgacggcttgagacttttaggcatgtcttctatctccgaagcactctttcggtctttcctgatcagtgagctagcgctctgaaaacgtagcgatgagctgtcccattttcgactaactatttagtgccagtgaatggcctaattctacaactatcacgatgtgcctatatgttaggggattatggattctgtggtccgtctttgtggtatgggatttccgttggcaggcaggccagtgtgataaaaaaaaaaaaaaaa

SEQ ID NO: 6904 - protein, 165 aa, Zea mays
  misc_feature: Ceres CLONE ID no. 1284567
  misc_feature: Ceres CDNA ID no. 40351727
MSSSGPLLATGTHHTGRQPEVLWAQRSEKIFLTISLPDAKDVVLKTDPKGLFNFSAVVHGEPFSFTLELFDSILSEGSKTKTKMGLRNIICSIQKEKKGWWKRLLKSEEKHPYIKVDWNKWCDEDEESEFSGDSDGGFDEANEGDESDDDDGMLYLPDLEKLRGK

SEQ ID NO: 6905 - DNA, 928 bp, Zea mays
  misc_feature: Ceres CLONE ID no. 1284927
  misc_feature: Ceres CDNA ID no. 40351728
  CDS (1)..(903): REFERENCED BY SEQ ID NO: 6906
aacattaatcacccactctactactcgaagttactaccagcagcttgcttcaacagtagaagagagcgagaggatggcgtcaccgaagccctcgtcggcggccctgctcctcctggcggcggcggccgtgctggcgctggcgcgcgcggacctgacgcacgacaactgcgtgaagaacaagaaggtgacggtgcagaacctgtgcagccacgacgtgacgctgacgctggagccgctggccaacagcccgccgctgttcgcgggcacctacacgctgcacccgcgcagccacgccgagttccccgtgtgctggtggacggggcgcctgcgcgcgcccgacgccgcccaggtggagttccacgtcggcgtcgacggcggctccttctacctggcccccaacgcgcagccgggccagcgcgtcccggtctccgtcaccccgcacggctcgccgctgcagggccgctgccccgccgtcggctgcgccatccagggccgctgctccgtgcaccaggtgcccagcggcgactgccgcaacgtccaggagatgaagatcatctactgcaacccgcacgtgtgatgcgatgcggacatggggtcgtcgcgccatctcgcgacctgtgttgtgctttctttcatgtcgccgtcgccgtcgtgtgtccaaccgccattgtcgttaggttgttgttgattagccgtttgcttcgctcagtagcctcgctctccagtgtattatcactcgcatcgcatgcatgtgatgtgagccactgcacgcgtgagtgtcacatgagtcgtcgtcctgtctcgtctcatgtgtttgaaattgtaggcagcagaggatcgagatgcgtgtctgctttgttcgtgttcactgctgtcagtctgtcaccgagttcaataatttagctttgtttcatcgggaaaaaaaaaa

SEQ ID NO: 6906 - protein, 167 aa, Zea mays
  misc_feature: Ceres CLONE ID no. 1284927
  misc_feature: Ceres CDNA ID no. 40351728
MASPKPSSAALLLLAAAAVLALARADLTHDNCVKNKKVTVQNLCSHDVTLTLEPLANSPPLFAGTYTLHPRSHAEFPVCWWTGRLRAPDAAQVEFHVGVDGGSFYLAPNAQPGQRVPVSVTPHGSPLQGRCPAVGCAIQGRCSVHQVPSGDCRNVQEMKIIYCNPHV

SEQ ID NO: 6907 - DNA, 1138 bp, Zea mays
  misc_feature: Ceres CLONE ID no. 1285281
  misc_feature: Ceres CDNA ID no. 40351729
  CDS (123)..(929): REFERENCED BY SEQ ID NO: 6908
aaagcacccatcccttcaacaaacctcgagtcgagagagagagaagagagcagacaacaagagacaccaacgaacagaggcaaaccggctcacgcctgtctcggtgcggtggccggctaatcatggccaccgtggggcagtccggggccctgagaagggtcaccgtgcactacgccagctcgcccacgcgcggcgcagtggtagaggtgagcctcgacgacctcgacgacgagctgctccagtttgtgctcgccgatcttcttcccggccaggagggtttacaccagtcgatcttggaaggagcacacggcagcaaccaggagaactatatgagaggcgcaggatccagtgcgccgtcacaggaataccatgcacagagcagcaccgctgctgcggcagcagctgcttcgtccaggaggaatccaggcacggatgacgcccagatcgcctcggacttcgagtacgccacgaagctgcagcaggagatggagggcctcagcgtcgacgacgacggcgacggtgtcagctgcgtgccgtctccgtctgactctgacgacgggcacgaccatcaaaacgaagaggacgaggaggaggaggatggtaatggtggtggtgatgatgatgatgatccagacaacatgacttatgagcaaagacaggcacttgtagagtctgtggggtctgaggacagaggcttatccgacgagctcatctcctacctgcagccatggaagtacaaggcatcagggtttttctcccggaaaacaaaccatgacgactgccctatctgcctgtcaactttcaggaaccgagagactatgataacgttgccgtgcatgcatcactaccacgcagcttgcgtcaccaaatggctcagggtcaacaagacatgccctgtatgcaaatatgaactgttcggaccttgctagcatccgacaatgggctgataagacaaggtgatggggcgtcacactcacacccagctggttgcatcatctacttttttttgcaccaagaaaaaagaaaatgaaaaacaatccaaaaagagaagggaaaaaagttaggaagtgtagatcttgatcacacaagaaaaagaagaaaaaaaaaactgaaatttatgtcaaaaaaaaaaaaaaaa

SEQ ID NO: 6908 - protein, 268 aa, Zea mays
  misc_feature: Ceres CLONE ID no. 1285281
  misc_feature: Ceres CDNA ID no. 40351729
  misc_feature: null
  misc_feature: Useful for making plants with altered terpenoid content
  misc_feature (220)..(260): Pfam Name: zf PFAM Desc: Zinc finger
MATVGQSGALRRVTVHYASSPTRGAVVEVSLDDLDDELLQFVLADLLPGQEGLHQSILEGAHGSNQENYMRGAGSSAPSQEYHAQSSTAAAAAAASSRRNPGTDDAQIASDFEYATKLQQEMEGLSVDDDGDGVSCVPSPSDSDDGHDHQNEEDEEEEDGNGGGDDDDDPDNMTYEQRQALVESVGSEDRGLSDELISYLQPWKYKASGFFSRKTNHDDCPICLSTFRNRETMITLPCMHHYHAACVTKWLRVNKTCPVCKYELFGPC

SEQ ID NO: 6909 - DNA, 773 bp, Zea mays
  misc_feature: Ceres CLONE ID no. 1285837
  misc_feature: Ceres CDNA ID no. 40351730
  CDS (107)..(550): REFERENCED BY SEQ ID NO: 6910
aactccattatttgcttgatccttgagaagagagaggaagacgagagctagaagcgaaggagaaaagcagttcttcagctaggcaggagggcacaggaaggaggagatggcgtcaaagaggattcagaaggagctcaaggatctgcagaaggaccctcccacctcgtgcagtgcaggtcctgttggtgaagacatgttccactggcaggcaacaataatgggtccatctgatagcccatattctggtggagttttcctagttacaatccattttcctcctgattatcctttcaaaccaccaaaggtggcatttcgcactaaggtgttccatccaaacatcaacagcaacgggagcatttgcctcgacatcttgaaggaccagtggagtccggcactaaccatctccaaggtgctgctgtccatctgttccctgctgactgatccgaaccccgacgaccctttggtccccgagatagctcacatgtacaagacggaccggcacaagtacgagaacaccgcgaggacctggacccagaggtatgccatgtagtattttctctacctggcctttggggtcgctgctgcgttgtgttgccgggacctggacgtgcctccatgtattcgttctatccttcctgtataatgatgaaccgaattgggtttgcagtacagtgccgcgtgtggtgctgaatgctgctgtattgtgtcacttggaagctgtaattctcagtgtcaaaaaaaactggtacttggaaccaaaaaaaaaaaaaaaa

SEQ ID NO: 6910 - protein, 147 aa, Zea mays
  misc_feature: Ceres CLONE ID no. 1285837
  misc_feature: Ceres CDNA ID no. 40351730
  misc_feature: The plant produces a reduced number of seeds.
  misc_feature: Useful for biocontainment applications
  misc_feature (5)..(142): Pfam Name: UQ_con PFAM Desc: Ubiquitin
MASKRIQKELKDLQKDPPTSCSAGPVGEDMFHWQATIMGPSDSPYSGGVFLVTIHFPPDYPFKPPKVAFRTKVFHPNINSNGSICLDILKDQWSPALTISKVLLSICSLLTDPNPDDPLVPEIAHMYKTDRHKYENTARTWTQRYAM

SEQ ID NO: 6911 - DNA, 775 bp, Zea mays
  misc_feature: Ceres CLONE ID no. 1285851
  misc_feature: Ceres CDNA ID no. 36591091
  CDS (340)..(588): REFERENCED BY SEQ ID NO: 6912
aactttctgttctaaactttctaggtgcatggtaccgatccacccacccacccctcctcgcctgtctgccacgcacgggatcggaggaggttgtccttgacgtcgtctcgagtcgacgacgagctcgcagcaccggccgctagctggcctcacgcggtgcggtggcagcaggtggcagggagcgagccgccacgtgccgcgctgccacgtgagtataagtaccctgctctgctatatagagctcgcaactcgctggccatagatccattgattgatcggacggacgcgcgtctccggtcccgtccgtaataacactgatccgatccacgccggccggcgatggagctcatcaagtccagggcgaccgtgtgcgcgctcctcctggcgctgctcctgctctcacactacgacggcgggacgacgacgacgatggtggcggaggcccgggtgtgcatgggcaagagccagcaccactcgttcccctgcatctccgaccgcctctgcagcaacgagtgcgtcaaggaggacggcgggtggaccgccggctactgccacctccgctactgcaggtgccagaaggcgtgctaagcaaagctcttcaaacacccttggcttgccagaactgaactctagtagtactaagtaacacccttggctagctgtgcacaacctacgtaccgtgcatgcatgtaatgtggtgtcatgtaacgtgacagcaataaatagtattaataataataacacggcatgtagccaagcaaaaaaaaaaaaaaaa

SEQ ID NO: 6912 - protein, 82 aa, Zea mays; identical to SEQ ID NO: 4784
  misc_feature: Ceres CLONE ID no. 1285851
  misc_feature: Ceres CDNA ID no. 36591091
  misc_feature (36)..(82): Pfam Name: Gamma PFAM Desc: Gamma
  misc_feature: Homolog of GI Number: 2130034 NR Desc: gamma
  misc_feature: Homolog of GI Number: 2501197 NR Desc: Gamma
  misc_feature: Homolog of GI Number: 1173436 NR Desc: Small protein inhibitor of insect alpha
  misc_feature: Homolog of GI Number: 7451437 NR Desc: gamma
  misc_feature: Homolog of GI Number: 7451438 NR Desc: omega

SEQ ID NO: 6913 - DNA, 671 bp, Zea mays
  misc_feature: Ceres CLONE ID no. 1285906
  misc_feature: Ceres CDNA ID no. 25445638
  CDS (40)..(447): REFERENCED BY SEQ ID NO: 6914
ctactgcggcttcaggactcgacctcttgcgccgccgccatgaccttcaagcgccgcaacggcggccgcaacaagcatggccgcggtcacgtcaagtacatccggtgctcaaactgcgccaagtgctgccccaaggacaaggcgatcaagaggtttcaggtgaggaacatcgtggaacaggcggccatcagggacgtccaggaagcatgcgtctatgatggctacgtcctcccgaagctgtacgccaaggtgcaccactgcgtctcgtgcgcgatccacgctcacatcgtccgcgtccgatcccgtgagaagcgcagggaccgcaagccgccggagcgcttcaggcgcagggaggataggcctgctggtggacaaggaggcccccgccctggtcctggtgctgctgctacagctccagctccagcaccggttgctgctcgcccataggctttagcttttcgaccgtgttaagtcttctgcccactcagtttcggagttgtcccccgtgcgtgtgtgaagctgctatattagagttactttttgtctaaagtctgaacattttcgaagaatttgaatatctgaacatttgaatgtttgtgctgagtttttcaaagaatttgaatatctgaacaattgaatatctcacttgaacgttaaaaaaaaaaaaaaaa

SEQ ID NO: 6914 - protein, 135 aa, Zea mays; identical to SEQ ID NO: 6766
  misc_feature: Ceres CLONE ID no. 1285906
  misc_feature: Ceres CDNA ID no. 25445638
  misc_feature (1)..(117): Pfam Name: Ribosomal_S26e PFAM Desc: Ribosomal protein S26e
  misc_feature: Homolog of GI Number: 57900258 NR Desc: putative ribosomal protein S26
  misc_feature: Homolog of GI Number: 50931777 NR Desc: putative 40S ribosomal protein S26
  misc_feature: Homolog of GI Number: 7440567 NR Desc: probable ribosomal protein S31
  misc_feature: Homolog of GI Number: 5706704 NR Desc: ribosomal protein S26
  misc_feature: Homolog of GI Number: 56236112 NR Desc: At2g40510
  misc_feature: Homolog of GI Number: 20466414 NR Desc: 40S ribosomal protein S26
  misc_feature: Homolog of GI Number: 24111313 NR Desc: At2g40590/T2P4.6
  misc_feature: Homolog of GI Number: 22137298 NR Desc: AT3g56340/F18O21_300
  misc_feature: Homolog of GI Number: 3885515 NR Desc: similar to ribosomal protein S26
  misc_feature: Homolog of GI Number: 61654752 NR Desc: S26

SEQ ID NO: 6915 - DNA, 552 bp, Zea mays
  misc_feature: Ceres CLONE ID no. 1285915
  misc_feature: Ceres CDNA ID no. 25446532
  CDS (52)..(351): REFERENCED BY SEQ ID NO: 6916
aattcgtttatagcgagcacaccagcgaaccagagattcatcagagtggcgatggccccgagcgcgtcgatgctgttcctgagctaccaccagctccacaggccgacggaggtggggacgccgccgccgccgccgcgcagggaggcggctgcccccggtggcttctggaggaggatgagcgtgagcagcgtgctctcacccgctttgttgcagtggcggccggagggggaggcgacactgcacgagcgcgacgccggcgaggagatcaagtcatcggcgccggccgacgctgataaggagctggaaagcaagttcgaggaggcgctgcgcctcagctgctggtcttcatgagcatccatccatcatggggaacggagagacgcgagcgtgccgctgaatcgaagcgacctctcctctaaacagccgtcctgtatatcttcctccgtgtatcaaaatccatccttttgctttagatttttgtacatttgtaatcgtcacatccgctcaaatatgttatatatattttagtttggagcaaaaaaaaaaaaaaaa

SEQ ID NO: 6916 - protein, 99 aa, Zea mays
  misc_feature: Ceres CLONE ID no. 1285915
  misc_feature: Ceres CDNA ID no. 25446532
MAPSASMLFLSYHQLHRPTEVGTPPPPPRREAAAPGGFWRRMSVSSVLSPALLQWRPEGEATLHERDAGEEIKSSAPADADKELESKFEEALRLSCWSS

SEQ ID NO: 6917 - DNA, 766 bp, Zea mays
  misc_feature: Ceres CLONE ID no. 1285947
  misc_feature: Ceres CDNA ID no. 36707051
  CDS (90)..(563): REFERENCED BY SEQ ID NO: 6918
cgtgctctctcagaggtgggctggcttctcctccccctcttaccaagtcctcctcgggttagggttccttagggttttgtggaggggcgatggcggcggctgatgtggagtaccgttgcttcgtcggcgggcttgcctgggccaccagcaacgagtcgctggagaatgccttcgcctcctacggcgagatcctcgactccaaggtcatcaccgaccgggagacggggaggtctcgcggcttcggcttcgttaccttctcctccgagaactccatgctcgacgctatcgagaacatgaacggcaaggagctcgacggccgtaacatcaccgttaaccaggcccagtcccgtggcggtggcggtggcggcggtggctacggcggcggtcgcggcggcggcggctatggtggcgggcgccgtgacggcggttatggcggcggtggcggctacggcggtcggcgcgagggtggtggcggcggctacggaggcggtggcggctacggcggtcggcgcgagggtggtggtggcggctacggcggcggcggcggcggctggagggactgatgtgtgggcccatcctggcttcggccgagttatcttatctatctatagtatcgtgttaccgttcgcttctgtcaccgtgttagtgtccgttctacctttggattaggtgttggtacccctgttgttccctttgtttgctcccgctatgaaacgagacgagagaagaatgagcaaggtttttgttcgcaaaaaaaaaaaaaaaa

SEQ ID NO: 6918 - protein, 157 aa, Zea mays; identical to SEQ ID NO: 156
  misc_feature: Ceres CLONE ID no. 1285947
  misc_feature: Ceres CDNA ID no. 36707051
  misc_feature (10)..(81): Pfam Name: RRM_1 PFAM Desc: RNA recognition motif.
  misc_feature: Homolog of GI Number: 22313 NR Desc: ABA
  misc_feature: Homolog of GI Number: 10799202 NR Desc: glycine
  misc_feature: Homolog of GI Number: 21625 NR Desc: glycine
  misc_feature: Homolog of GI Number: 50881454 NR Desc: glycine
  misc_feature: Homolog of GI Number: 18347 NR Desc: glycine
  misc_feature: Homolog of GI Number: 2331131 NR Desc: glycine
  misc_feature: Homolog of GI Number: 2331133 NR Desc: glycine
  misc_feature: Homolog of GI Number: 22293 NR Desc: glycine
  misc_feature: Homolog of GI Number: 77557139 NR Desc: glycine
  misc_feature: Homolog of GI Number: 2267593 NR Desc: glycine

SEQ ID NO: 6919 - DNA, 875 bp, Zea mays
  misc_feature: Ceres CLONE ID no. 1285981
  misc_feature: Ceres CDNA ID no. 36590972
  CDS (202)..(540): REFERENCED BY SEQ ID NO: 6920
aattctctcgtctgcaacccgctgcgtaacggcgaccggcgtgtgagtgccgtgagcacccgagcccgtcccccctccggcatcccccacctgcagccggtgagctgctgtgagcctatccagtggcgattccattcctctccgtgtggacgcaaggactcagtgaaccacttccagatactcgctgcttctcccgtgcccatggctacaccacttatagcaggacttgcagttgcagcagctgcccttgccggtagatatagcatccaagcttggaatgcttataaggcccggcccgtagttccaaggatgcgcaaattctatgaaggtggtttccaacctacgatgacacgaagggaagctgctttaatccttggtgtcagggaaactgccagtgcagagaaggtcaaagaagcacacaagagagtgatggtggccaatcatccagatgcgggtggaagtcattaccttgcttcaaagattaacgaggcaaaggatgtaatgacagggaaaacaaaagggggtgggtctgccttttgatcggtacacggacaacgtgttcttccactgaaagagcaattttgtgtctccagactcgcattagaagatatgccgaaatctttgtgtgttttatgaaaatttgtggacaaaaaaaaagtagtggacctttatggagcaggcaattcgttgcttagtaaagctcggctcagttgtgcttgtgcccgaatcaattggacattgttgctaattgagtcccctgtcctttgtttttccttttttttcattgatatcctgaaattcaccaacacaaagtatcatgaactgccttttattgataaattctgtatctgttttgaccaaaaaaaaaaaaaaaa

SEQ ID NO: 6920 - protein, 112 aa, Zea mays; identical to SEQ ID NO: 5496
  misc_feature: Ceres CLONE ID no. 1285981
  misc_feature: Ceres CDNA ID no. 36590972
  misc_feature (53)..(100): Pfam Name: DnaJ PFAM Desc: DnaJ domain
  misc_feature: Homolog of GI Number: 55770429 NR Desc: putative DNAJ domain
  misc_feature: Homolog of GI Number: 21554024 NR Desc: DNAJ protein
  misc_feature: Homolog of GI Number: 62858503 NR Desc: LOC549696
  misc_feature: Homolog of GI Number: 55621546 NR Desc:  similar to homolog of yeast TIM14 isoform a
  misc_feature: Homolog of GI Number: 27702271 NR Desc: similar to DnaJ
  misc_feature: Homolog of GI Number: 71061474 NR Desc: translocase of the inner mitochondrial membrane 14 isoform 2
  misc_feature: Homolog of GI Number: 6323036 NR Desc: Constituent of the mitochondrial import motor associated with the presequence translocase
  misc_feature: Homolog of GI Number: 53804288 NR Desc: DnaJ domain protein
  misc_feature: Homolog of GI Number: 45201489 NR Desc: AGR393Wp

SEQ ID NO: 6921 - DNA, 934 bp, Zea mays
  misc_feature: Ceres CLONE ID no. 1285993
  misc_feature: Ceres CDNA ID no. 40351731
  CDS (171)..(653): REFERENCED BY SEQ ID NO: 6922
gaaaatacgggggaagaaacacgaaaaaggcaaggaattagaacgggcgaagcggcacgcaattcgcgcagcagcgtagaaactagaaagaccagtccccaaactccccagcgggggcgagtagaggaggaagagtcgccgccgccgccgccgccgccgccgccgccgccatgtctgggggaatcgcccgcggccgcctcgccgaggagcgcaaggcctggcgcaagaaccacccgcacggtttcgtcgcgaagccggagtcgctgcccgacgggacggtgaacctgatgatctggcagtgcaccatccccggcaagcaagggactgactgggaaggtggatatttccctctcacccttcattttagtgaggattaccctagcaagcctcccaagtgcaagttccctcagggtttcttccacccaaatgtgtatccttctggaacagtctgcctttcgattcttaatgaggacagtggttggagaccagctattactgttaagcagattctcgtcgggatccaggacttgctagatcagccaaatcctgctgaccctgctcaaacagacggatatcacctttttatccaggatcccacagaatacaagaggcgcgttagactgcaggcgaagcagtatcctgcattggtctgagagcttcgccctactagggggatccatgctgcacatccgcatagttgttgctagtgtcttgaatgaaagaccaaatgtaacatggtgcttggagaagtaactatcgccattgtggactgtgtgtcttttaacagccttattaactgtttggagtgtgtgttttgcgggatgatgtcaaaaccttgctgtgtcttgttatcaagaattgctgtgtgttgtctgacaaatctaaatatgggaagaaacgcccatgacgtttcagctgaaaaaaaaaaaaaaaa

SEQ ID NO: 6922 - protein, 160 aa, Zea mays
  misc_feature: Ceres CLONE ID no. 1285993
  misc_feature: Ceres CDNA ID no. 40351731
  misc_feature (9)..(153): Pfam Name: UQ_con PFAM Desc: Ubiquitin
MSGGIARGRLAEERKAWRKNHPHGFVAKPESLPDGTVNLMIWQCTIPGKQGTDWEGGYFPLTLHFSEDYPSKPPKCKFPQGFFHPNVYPSGTVCLSILNEDSGWRPAITVKQILVGIQDLLDQPNPADPAQTDGYHLFIQDPTEYKRRVRLQAKQYPALV

SEQ ID NO: 6923 - DNA, 920 bp, Zea mays
  misc_feature: Ceres CLONE ID no. 1286014
  misc_feature: Ceres CDNA ID no. 25445927
  CDS (65)..(715): REFERENCED BY SEQ ID NO: 6924
ctctcgctccgttgctcgcctcgggtcaaaccctaagcagggagttgatttatccgctgcagccatgagtaagttgcagtctgagtctgtcaaggatgccatctcccagattgttggggatgccaaggagaagaataggaagttcactgagactgtggaacttcagattggtctgaagaattatgatccacagaaggacaagcgtttcagtggctctgttaagttgccccatatccctcgtcccaagatgaaggtgtgcatgcttggtgatgcccagcatgttgaggaggccgagaagatgggacttgactacatggatgttgaggctctcaagaaaatgaacaagaacaagaagcttgttaagaggcttgccaagaagtaccatgctttcttggcatcagaggccatcatcaagcagattccccgtctccttggtcctggtctcaacaaggcaggcaagttcccgaccctggttactcaccaggaatccctcgagtccaaggtgaacgagactaaggcaaccgtcaagttccagctcaagaaggttctttgcatgggtgttgccgttggcaacttggcgatggaggagaagcagatccagcagaacatccagatgagcgtcaacttccttgtttcccttctgaagaagaactggcagaatgtgagatgcctctacgtcaagagcaccatggggaagccatacagggtgttctaagtatgctcttttgtgaagtctgctaggttctggcaccgaggttttattgaattaaacttttgttaagagtatgtttttggacgatcctatatttcgtcctggcgctactatgtttcagaatggtggtactactataagtatcctggcgctttaagtattgcttgaaaggatcaatataatttgcgtgccaaaaaaaaaaaaaaaa

SEQ ID NO: 6924 - protein, 216 aa, Zea mays
  misc_feature: Ceres CLONE ID no. 1286014
  misc_feature: Ceres CDNA ID no. 25445927
  misc_feature (9)..(212): Pfam Name: Ribosomal_L1 PFAM Desc: Ribosomal protein L1p/L10e family
  misc_feature: Homolog of GI Number: 50948455 NR Desc: putative 60S ribosomal protein L10A
  misc_feature: Homolog of GI Number: 57471702 NR Desc: ribosomal protein L10A
  misc_feature: Homolog of GI Number: 50252685 NR Desc: putative ribosomal protein L10a
  misc_feature: Homolog of GI Number: 56785395 NR Desc: putative 60S ribosomal protein L10A
  misc_feature: Homolog of GI Number: 21386915 NR Desc: putative ribosomal protein L10
  misc_feature: Homolog of GI Number: 9757825 NR Desc: 60S ribosomal protein L10A
  misc_feature: Homolog of GI Number: 15810665 NR Desc: putative 60S ribosomal protein L10A
  misc_feature: Homolog of GI Number: 25294932 NR Desc: 60S ribosomal protein L10A
  misc_feature: Homolog of GI Number: 47026982 NR Desc: 60S ribosomal protein L10A
  misc_feature: Homolog of GI Number: 6664304 NR Desc: T27G7.6
MSKLQSESVKDAISQIVGDAKEKNRKFTETVELQIGLKNYDPQKDKRFSGSVKLPHIPRPKMKVCMLGDAQHVEEAEKMGLDYMDVEALKKMNKNKKLVKRLAKKYHAFLASEAIIKQIPRLLGPGLNKAGKFPTLVTHQESLESKVNETKATVKFQLKKVLCMGVAVGNLAMEEKQIQQNIQMSVNFLVSLLKKNWQNVRCLYVKSTMGKPYRVF

SEQ ID NO: 6925 - DNA, 523 bp, Zea mays
  misc_feature: Ceres CLONE ID no. 1286022
  misc_feature: Ceres CDNA ID no. 36590955
  CDS (87)..(296): REFERENCED BY SEQ ID NO: 6926
ctctcctatatccgccgccatcgtctcgggctctcatctctaatcttcgggttcgcgtcgcagtgtcttccgcccgggctaccaccatgccgaagcagatccacgagatcaaggacttcctgctgactgcgcggcggaaggacgcacggtcggtgcggatcaagcgggccaaggacgccgtcaagttcaaggtgcgctgctccaggtacctctacaccctctgcgtccacgacgccgacaaggccaacaagctcaagcagtcgctcccgccaggtctgactgtccaggagatttaaggtatcaagccacaaactgtgctttttttgcggtgtcagggacgtttgctccagtgttactttagtttgtaggtgggctccattgctgtgtttgaatgaattatgaagtttgagtttgggatgcgaatgatgtgtcgaacctatgagcctgtgttgtaatggttaccccagaccgcaaaggatggcaatctatcataagttaaactgattaaaaaaaaaaaaaaaaa

SEQ ID NO: 6926 - protein, 69 aa, Zea mays
  misc_feature: Ceres CLONE ID no. 1286022
  misc_feature: Ceres CDNA ID no. 36590955
  misc_feature (2)..(69): Pfam Name: Ribosomal_L38e PFAM Desc: Ribosomal L38e protein family
  misc_feature: Homolog of GI Number: 50931949 NR Desc: putative 60S ribosomal protein L38
  misc_feature: Homolog of GI Number: 50938225 NR Desc: putative 60S ribosomal protein L38
  misc_feature: Homolog of GI Number: 23507773 NR Desc: At3g59540/T16L24_90
  misc_feature: Homolog of GI Number: 313027 NR Desc: ribosomal protein L38
  misc_feature: Homolog of GI Number: 15825507 NR Desc: ribosomal protein L38
  misc_feature: Homolog of GI Number: 27497793 NR Desc: 60S ribosomal protein L38
  misc_feature: Homolog of GI Number: 55645917 NR Desc:  similar to ribosomal protein L38
  misc_feature: Homolog of GI Number: 4506645 NR Desc: ribosomal protein L38
  misc_feature: Homolog of GI Number: 61372160 NR Desc: ribosomal protein L38
  misc_feature: Homolog of GI Number: 82895480 NR Desc:  similar to ribosomal protein L38
MPKQIHEIKDFLLTARRKDARSVRIKRAKDAVKFKVRCSRYLYTLCVHDADKANKLKQSLPPGLTVQEI

SEQ ID NO: 6927 - DNA, 1115 bp, Zea mays
  misc_feature: Ceres CLONE ID no. 1286052
  misc_feature: Ceres CDNA ID no. 36590908
  CDS (149)..(931): REFERENCED BY SEQ ID NO: 6928
accgttagtccattacccaccgaaggcccgcccaaccaccttcgtatccgacggcccaccccgctcgtctatatccgcctctaaaccctagctcttccattcttccccctccggcgccgcctcccccagacacttcgccgccggcaagatgggccgcgtgattcgcgctcagcgcaagggtgcggggtccgtgttcaagtcccatacccatcaccgcaagggccctgcccggttccggtccctcgacttcggcgagcgcaacgggtacctgaagggcgtggtcaccgacgtcatccacgacccgggccgcggcgcgccgctggccaaggtcaccttccgccatccattccggtacaagcaccagaaggagctgttcgtggctgctgagggcatgtacactggccagttcgtttactgcggacgccgtgctacactctccattggcaacgtcctgccgctcagggggatccctgagggtgccgttgtctgcaacgttgagcaccacgtcggggatcgcggtgtcttcgccagggcgtctggggactacgcgatcgttatcagccataacccagacaacggcacatcgaggatcaagctcccctctggtgctaagaagattgtcccaagtagctgccgtgccatgattgggcaggtcgctggtggtggcaggactgagaagccaatgctgaaggctggcaatgcctaccacaagtaccgcgtcaagaggaacagctggcctaaggtgcgtggtgtggccatgaaccctgttgagcatcctcatggaggaggtaaccaccagcacattggtcatgcctctactgtccgccgtgatgctcctcctggccagaaggttggtcttattgccgcaaggagaactggtcgtcttaggggccaagctgctgctactgctgccaaggctgacaaggcctaaatttgcgttacgcagcattagccatcttatatagattaaaaatatttttcctgcatggatcttaattttgtatcattctgatagcgatgaactgatgatactatggaccttccagtttttgttgcaagctattgatgatattttttcttctttaatcaaagttgtactaaaaaaaaaaaaaaaa

SEQ ID NO: 6928 - protein, 260 aa, Zea mays
  misc_feature: Ceres CLONE ID no. 1286052
  misc_feature: Ceres CDNA ID no. 36590908
  misc_feature (11)..(90): Pfam Name: Ribosomal_L2 PFAM Desc: Ribosomal Proteins L2
  misc_feature (96)..(231): Pfam Name: Ribosomal_L2_C PFAM Desc: Ribosomal Proteins L2
  misc_feature: Homolog of GI Number: 77556802 NR Desc: 60s ribosomal protein l2
  misc_feature: Homolog of GI Number: 19343 NR Desc: ribosomal protein L2
  misc_feature: Homolog of GI Number: 81074776 NR Desc: ribosomal protein L2
  misc_feature: Homolog of GI Number: 22135870 NR Desc: 60S ribosomal protein L2
  misc_feature: Homolog of GI Number: 20001 NR Desc: 60S ribosomal protein L2
  misc_feature: Homolog of GI Number: 12054507 NR Desc: ribosomal protein L2
  misc_feature: Homolog of GI Number: 13605569 NR Desc: AT4g36130/F23E13_20
  misc_feature: Homolog of GI Number: 798818 NR Desc: 60S ribosomal protein L2
  misc_feature: Homolog of GI Number: 67633686 NR Desc: 60S ribosomal protein L8
  misc_feature: Homolog of GI Number: 6562271 NR Desc: ribosomal protein L8 homolog
MGRVIRAQRKGAGSVFKSHTHHRKGPARFRSLDFGERNGYLKGVVTDVIHDPGRGAPLAKVTFRHPFRYKHQKELFVAAEGMYTGQFVYCGRRATLSIGNVLPLRGIPEGAVVCNVEHHVGDRGVFARASGDYAIVISHNPDNGTSRIKLPSGAKKIVPSSCRAMIGQVAGGGRTEKPMLKAGNAYHKYRVKRNSWPKVRGVAMNPVEHPHGGGNHQHIGHASTVRRDAPPGQKVGLIAARRTGRLRGQAAATAAKADKA

SEQ ID NO: 6929 - DNA, 789 bp, Zea mays
  misc_feature: Ceres CLONE ID no. 1286061
  misc_feature: Ceres CDNA ID no. 25445855
  CDS (20)..(601): REFERENCED BY SEQ ID NO: 6930
agaagaggaaaaggaatccatggcggcgacgctggcgaggagggcggggcgctccgcggcaacgacgctatggggcgcggcgaggggcttcgcatcggtggggtccgacatcgtctctgcggctcccggcgtgtcgctgcagaaggcgcggtcctgggacgagggcgtcgccaccaagttctccaccacgcctctcaaggacatcttctacgggaagaaggtggtcatcttcggcttgcccggtgcatatacaggggtttgttcacaagcgcacgttcctagttacaagaagaatattgacaagttgaaagcaaaaggaatcgactctgttatctgtgtagctgtgaatgatccgtatgtcctggatggatgggcaaaaaagctagacgctaaagatacaattgagttctatggtgactttgatgggagtttccacaaaagcttggatttggagatagacctttctgctgctttgcttggccgccgttctcacaggtggtccgcctttgttgacgatggtaagatcaagtctttcaatgttgaggaagcaccgtccgactttaaggtttctggtgcggaggtgatcttggaccagatctgagctcctcaatgaacttcggccatcttcagtttgtgcggcatacttcctctgcagcagccgaataaaattaaatctcttacgacccgtgtaagatgttaaagatacgatgcgccccagactgtatggcctcggcctcggcctcggtttttctggaatgaattgatcagtgttcaaaaaaaaaaaaaaaa

SEQ ID NO: 6930 - protein, 193 aa, Zea mays
  misc_feature: Ceres CLONE ID no. 1286061
  misc_feature: Ceres CDNA ID no. 25445855
  misc_feature (31)..(191): Pfam Name: AhpC PFAM Desc: AhpC/TSA family
  misc_feature: Homolog of GI Number: 20466103 NR Desc: AT3g06050/F24F17_3
  misc_feature: Homolog of GI Number: 37783267 NR Desc: peroxiredoxin
  misc_feature: Homolog of GI Number: 47775654 NR Desc: mitochondrial peroxiredoxin
  misc_feature: Homolog of GI Number: 45915458 NR Desc: COG0678: Peroxiredoxin
  misc_feature: Homolog of GI Number: 68191238 NR Desc: Alkyl hydroperoxide reductase/ Thiol specific antioxidant/ Mal allergen
  misc_feature: Homolog of GI Number: 83838401 NR Desc: AhpC/TSA family protein
  misc_feature: Homolog of GI Number: 17987739 NR Desc: THIOL PEROXIDASE
  misc_feature: Homolog of GI Number: 23501379 NR Desc: ahpC/TSA family protein
  misc_feature: Homolog of GI Number: 71281610 NR Desc: antioxidant
MAATLARRAGRSAATTLWGAARGFASVGSDIVSAAPGVSLQKARSWDEGVATKFSTTPLKDIFYGKKVVIFGLPGAYTGVCSQAHVPSYKKNIDKLKAKGIDSVICVAVNDPYVLDGWAKKLDAKDTIEFYGDFDGSFHKSLDLEIDLSAALLGRRSHRWSAFVDDGKIKSFNVEEAPSDFKVSGAEVILDQI

SEQ ID NO: 6931 - DNA, 489 bp, Zea mays
  misc_feature: Ceres CLONE ID no. 1286139
  misc_feature: Ceres CDNA ID no. 40351732
  CDS (74)..(322): REFERENCED BY SEQ ID NO: 6932
attgattgatcggacggacgcgcgtctccggtcccgtccgtaataacactgatccgatccacgccggccggcgatggagctcatcaagtccagggcgaccgtgtgcgcgctcctcctggcgctgctcctgctctcacactacgacggcgggacgacgacgacgatggtggcggaggcccgggtgtgcatgggcaagagccagcaccactcgttcccctgcatctccgaccgcctctgcagcaacgagtgcgtcaaggaggacggcgggtggaccgccggctactgccacctccgctactgcaggtgccagaaggcgtgctaagcaaagctcttcaaacacccttggcttgccagaactgaactctagtagtactaagtaacacccttggctagctgtgcacaacctacgtaccgtgcatgcatgtaatgtggtgtcatgtaacgtgacagcaataaatagtattaataataataaaaaaaaaaaaaaaa

SEQ ID NO: 6932 - protein, 82 aa, Zea mays; identical to SEQ ID NO: 4784
  misc_feature: Ceres CLONE ID no. 1286139
  misc_feature: Ceres CDNA ID no. 40351732
  misc_feature (36)..(82): Pfam Name: Gamma PFAM Desc: Gamma

SEQ ID NO: 6933 - DNA, 1157 bp, Zea mays
  misc_feature: Ceres CLONE ID no. 1286167
  misc_feature: Ceres CDNA ID no. 25446963
  CDS (67)..(861): REFERENCED BY SEQ ID NO: 6934
gactccggacccctaaaaccctagtcgggcttcatacgccgccaccgcgccgcttcctccctcgccatggccctctttgctgccgcacgccgcgccgcggcctcctccgtgcccgttctcctccgtgcctccgcctcctcggggtcccaccgcagcgccgtcctgctccggcccctcgctgccgccgtggcgccgccgaagccccgcgcgatgccgttctcctcggcgcccgcgacgagacccagctccgacgccgagctactcagcgtcatcgactccgagatcaagtacgccgaggactgcgatgaccacgacagggttgaggagattccagaaaatttccctttcaaaatcagcgacgagaaggggacgaatgcagttacccttaaaagaacatatcagggtgagcagattgaggttgtggttcacatgcccagccttgtcactggagatgagcctgatcatgaccgtgatggtgaggatgaggacacggcgggagatgacaatgacgaagatgaaggccagaagcctgaacagtcaagcattcctctcacagtcactatatccaagggtgacggtcctgttcttgaattcacctgcactgcctatcctgacgaggtcatcatcgactccatgtctgtgacacaacaatcaggggatgatgaacgtgacatgattgcatatgagggtcctgatttcaatgaccttgatgagaacctgcagagggaattccacaggtacctggatctgcgtggcatttcacccaggaccacaaatttcttgcacctgtacatgatcaacaaggacagccgtgagtacctgctctggctgagaaagctgaaggatttcttcaagcagtaggtgtgaagacctgaagatcagctttatctctcttttgttcctgctagggccttctcggttattccaattccatgtggattgaagtgtattaaaatggattttgacttgttatggatttaaatcaacttaataccactcaatccacatggattattggtgaaacaaacaagccctagtcgaaattcttgttaagttggtagtttgtcagacccgaaatagagttttttgggtttcgaatggaaacactagacaaaataaaggatttagtatttttttctataaaaaaaaaaaaaaaa

SEQ ID NO: 6934 - protein, 264 aa, Zea mays
  misc_feature: Ceres CLONE ID no. 1286167
  misc_feature: Ceres CDNA ID no. 25446963
  misc_feature (69)..(262): Pfam Name: MAM33 PFAM Desc: Mitochondrial glycoprotein
  misc_feature: Homolog of GI Number: 30102600 NR Desc: At3g55605
  misc_feature: Homolog of GI Number: 50725737 NR Desc: mitochondrial glycoprotein
  misc_feature: Homolog of GI Number: 20334884 NR Desc: At1g15870/F7H2_19
  misc_feature: Homolog of GI Number: 6503284 NR Desc: F23A5.7
  misc_feature: Homolog of GI Number: 13605746 NR Desc: AT4g31930/F10N7_260
  misc_feature: Homolog of GI Number: 12018147 NR Desc: vegetative cell wall protein gp1
  misc_feature: Homolog of GI Number: 19919 NR Desc: Pistil extensin like protein
  misc_feature: Useful for making taller plants and plants with longer flowers
  misc_feature: Useful for sterility
MALFAAARRAAASSVPVLLRASASSGSHRSAVLLRPLAAAVAPPKPRAMPFSSAPATRPSSDAELLSVIDSEIKYAEDCDDHDRVEEIPENFPFKISDEKGTNAVTLKRTYQGEQIEVVVHMPSLVTGDEPDHDRDGEDEDTAGDDNDEDEGQKPEQSSIPLTVTISKGDGPVLEFTCTAYPDEVIIDSMSVTQQSGDDERDMIAYEGPDFNDLDENLQREFHRYLDLRGISPRTTNFLHLYMINKDSREYLLWLRKLKDFFKQ

SEQ ID NO: 6935 - DNA, 598 bp, Zea mays
  misc_feature: Ceres CLONE ID no. 1286200
  misc_feature: Ceres CDNA ID no. 25445590
  CDS (1)..(297): REFERENCED BY SEQ ID NO: 6936
attgtaagttgtaaccctagcttctcatgtctccgcgcctccacctccagtctccagccccaaggagtggcggcggcgcatcgtcagttagcttcgtcaccgttagagcccgaaggactctccctcggccctcgccgcctcgccggctcactgtcattggctgcatccgaagccggcagctcacaacgcctcttgtcaaacttcgacgactgctatctatctgtgctgctcatcgccttgttcgttgccgttgccggcgtgccccacggccacgcgccccacttcccggagtcctgagtgcctgctgaagttgcgtgtttgcgtagcgctcaaaatctgaaaggtcctagctcgcaatcgcaacggagtcttgccgatgaacaggatgtgttgactgctgttattgtgcttcaaacttcagagaatttgctgctgtgcagcctgctatgtcttaccgaagacttatgtccttgttaactctgtgaagactatgttgttagctcgtcagtctatgtctaattgtcaatcatacacttgtatattgtgaactgttctatttaaatttgtattattgcttgtgtcaaaaaaaaaaaaaaaa

SEQ ID NO: 6936 - protein, 93 aa, Zea mays
  misc_feature: Ceres CLONE ID no. 1286200
  misc_feature: Ceres CDNA ID no. 25445590
MSPRLHLQSPAPRSGGGASSVSFVTVRARRTLPRPSPPRRLTVIGCIRSRQLTTPLVKLRRLLSICAAHRLVRCRCRRAPRPRAPLPGVLSAC

SEQ ID NO: 6937 - DNA, 861 bp, Zea mays
  misc_feature: Ceres CLONE ID no. 1286233
  misc_feature: Ceres CDNA ID no. 25445695
  CDS (155)..(640): REFERENCED BY SEQ ID NO: 6938
agattactctacacgagtcacgataggaggaagactggaagaggaggcgagcacgtttgcggtgcccaccctcaccgtccactccagaaccccaaatccagttccgttccaatcgccgagaagggcagcaaaggggagaaaaaaaaggaaatctatggcggcggccggcggcgagaacagcggcgctggcgagggcgagggcgagttctacctgcgctactacgtgggacacaagggcaagttcgggcacgagttcctcgagttcgagttccgccccgacggcaagctccgctacgccaacaactccaactacaagaacgacaccatgatccgcaaggaggtcttcgtctcgccctccgtcctccgcgaggccaggaggatcatccaggagtccgacatcatgaaggaggacgacagcaactggcccgagcccgaccgcatcggccgccaggagctcgagatcgtcatgggcaacgagcacatttcattcaccacttccaagatcggctccctcgtcgatgtccagtccagcaaggacccggagggcctccggatcttctactaccttgtccaggatctgaagtgtttcgtgttctcgctcatcaaccttcacttcaagatcaagccaatccagtcttgagctccatcccaagccttcatgtagctggtttgtgagactgcgagtgttttgagagagaaccttttaaccatgtaagatgatgttgatattgtggacgatgcgtgcgatcggccctgtgtggtgcacttagtggaagtggaacccccctttgcatttgttttgtgcaaactgctgagtagtagtgaacgtgatatttgtgccttttaaaaaaaaaaaaaaaa

SEQ ID NO: 6938 - protein, 161 aa, Zea mays
  misc_feature: Ceres CLONE ID no. 1286233
  misc_feature: Ceres CDNA ID no. 25445695
  misc_feature (17)..(159): Pfam Name: Mago_nashi PFAM Desc: Mago nashi protein
  misc_feature: Homolog of GI Number: 12802873 NR Desc: mago nashi
  misc_feature: Homolog of GI Number: 42565403 NR Desc: mago nashi
  misc_feature: Homolog of GI Number: 58465200 NR Desc: mago nashi
  misc_feature: Homolog of GI Number: 3123515 NR Desc: Mago Nashi
  misc_feature: Homolog of GI Number: 13195558 NR Desc: mago nashi
  misc_feature: Homolog of GI Number: 55587094 NR Desc:  similar to mm
  misc_feature: Homolog of GI Number: 29841420 NR Desc: similar to NM_002370 mago
  misc_feature: Homolog of GI Number: 27715613 NR Desc: similar to mm
  misc_feature: Homolog of GI Number: 34810527 NR Desc: Chain C
  misc_feature: Homolog of GI Number: 57087953 NR Desc:  similar to Conserved oligomeric Golgi complex component 7
  misc_feature: Useful for making shorter plants
  misc_feature: Useful for making stronger plants
MAAAGGENSGAGEGEGEFYLRYYVGHKGKFGHEFLEFEFRPDGKLRYANNSNYKNDTMIRKEVFVSPSVLREARRIIQESDIMKEDDSNWPEPDRIGRQELEIVMGNEHISFTTSKIGSLVDVQSSKDPEGLRIFYYLVQDLKCFVFSLINLHFKIKPIQS

SEQ ID NO: 6939 - DNA, 785 bp, Zea mays
  misc_feature: Ceres CLONE ID no. 1286362
  misc_feature: Ceres CDNA ID no. 36707052
  CDS (161)..(508): REFERENCED BY SEQ ID NO: 6940
ataggggccatcagatccaagaagagggaagagcaccaaggaccttcggcgcccgttcaggatccacatcttcccgagcgagttcttggttgacctcttcctcttcggaccacctccaaggctcttggtgtagcttgccactctcaccaatcaagttttcatgtctgatctcgacattcagatcccaactgccttcgatcccttcgctgaggccaatgctggggactctggtgcggcagcagggtcaaaggactacgtacacgtgcgcatccagcagcgtaatggtcgcaagagcctgaccaccgtccagggattgaagaaggagttcagctacagcaagatcctcaaagatctcaagaaagagttctactgcaatggtacagtggtccaggacccagaacttggacaggtcattcagctccagggtgatcagaggaagaacgtctcgaatttcctcgtccaggccggcattgtgaagaaggagcacatcaagattcatggtttctgagcaaccgccgggtccatagcaaaccaaccctgcatgcagggccagcttattatatataatatctgaggtggagcatatctatctggctgtgtactgcaagcaggcctagtacgccgcctgcgcgttcctcctattacacatataggcccctccctgcgtgtatgcttgttaccgtcgtgtcgaaccttgtactacgaggctccatcgaacatcgatggcttgcttctttatcagaacatgtttgaataaacgctatttggtaaaaaaaaaaaaaaaa

SEQ ID NO: 6940 - protein, 115 aa, Zea mays
  misc_feature: Ceres CLONE ID no. 1286362
  misc_feature: Ceres CDNA ID no. 36707052
  misc_feature: The plant flowers significantly earllier than wild-type.
  misc_feature: The plant is abnormally small.
  misc_feature: null
  misc_feature: Useful for making plants with modulated biomass
  misc_feature: Useful for making plants with modulated flowering time
  misc_feature (27)..(108): Pfam Name: SUI1 PFAM Desc: Translation initiation factor SUI1
  misc_feature: Homolog of GI Number: 2668740 NR Desc: translation initiation factor
  misc_feature: Homolog of GI Number: 50937977 NR Desc: translational initiation factor eIF1
  misc_feature: Homolog of GI Number: 6478142 NR Desc: putative translation initiation factor eIF
  misc_feature: Homolog of GI Number: 21070377 NR Desc: translation initiation factor
  misc_feature: Homolog of GI Number: 53791638 NR Desc: putative translation initiation factor
  misc_feature: Homolog of GI Number: 20218809 NR Desc: putative translation factor
  misc_feature: Homolog of GI Number: 28193048 NR Desc: SUI1 protein
  misc_feature: Homolog of GI Number: 28193050 NR Desc: SUI1 protein
  misc_feature: Homolog of GI Number: 3334346 NR Desc: Protein translation factor SUI1 homolog
MSDLDIQIPTAFDPFAEANAGDSGAAAGSKDYVHVRIQQRNGRKSLTTVQGLKKEFSYSKILKDLKKEFYCNGTVVQDPELGQVIQLQGDQRKNVSNFLVQAGIVKKEHIKIHGF

SEQ ID NO: 6941 - DNA, 764 bp, Zea mays
  misc_feature: Ceres CLONE ID no. 1286395
  misc_feature: Ceres CDNA ID no. 36706432
  CDS (68)..(610): REFERENCED BY SEQ ID NO: 6942
ctctatcatcatccaatccagatcagcaaagcggcagtgcgtagagaggatcgtcgaacagaacagcatgaagatggtcatcgttctcgtcgtgtgcctggctctgtcagctgccagcgcctctgcaatgcagatgccctgcccctgcgcggggctgcagggcttgtacggcgctggcgccggcctgacgacgatgatgggcgccggcgggctgtacccctacgcggagtacctgaggcagccgcagtgcagcccgctggcggcggcgccctactacgccgggtgtgggcagacgagcgccatgtaccagccgctccggcaacagtgctgccagcagcagatgaggatgatggacgtgcagtccgtcgcgcagcagctgcagatgatgatgcagcttgagcgtgccgctgccgccagcagcagcctgtacgagccagctctgatgcagcagcagcagcagctgctggcagcccagggtctcaaccccatggccatgatgatagcgcagaacatgccggccatgggtggactctaccagtaccagtaccagctgcccagctaccgcaccaacccctgtggcgtctccgctgccattccgccctactactgattcatgatatttgggaaatctcctctatccatccctctctatctatatatgtaataatgcagtaagacgacacacattatcatgtgtggtatgaccaataatatatgcatcataataaagttttggttttaaagaattaaaaaaaaaaaaaaaa

SEQ ID NO: 6942 - protein, 180 aa, Zea mays
  misc_feature: Ceres CLONE ID no. 1286395
  misc_feature: Ceres CDNA ID no. 36706432
  misc_feature: Homolog of GI Number: 419803 NR Desc: zein protein
  misc_feature: Homolog of GI Number: 168664 NR Desc: zein protein precursor
  misc_feature: Homolog of GI Number: 141616 NR Desc: ZEIN
  misc_feature: Homolog of GI Number: 16305115 NR Desc: 15kD beta zein
  misc_feature: Homolog of GI Number: 47824794 NR Desc: beta
  misc_feature: Homolog of GI Number: 509748 NR Desc: beta
MKMVIVLVVCLALSAASASAMQMPCPCAGLQGLYGAGAGLTTMMGAGGLYPYAEYLRQPQCSPLAAAPYYAGCGQTSAMYQPLRQQCCQQQMRMMDVQSVAQQLQMMMQLERAAAASSSLYEPALMQQQQQLLAAQGLNPMAMMIAQNMPAMGGLYQYQYQLPSYRTNPCGVSAAIPPYY

SEQ ID NO: 6943 - DNA, 641 bp, Zea mays
  misc_feature: Ceres CLONE ID no. 1286397
  misc_feature: Ceres CDNA ID no. 29191434
  CDS (61)..(345): REFERENCED BY SEQ ID NO: 6944
acgctccccggaacgaacgacgcagcccaacccgttcccaccaaaccagcggcaccacccatggcttcggcggcggcgagatccggtctccggtcgctggcggtgcgcgccgccccgttgaggcgccgcatgtcctcctccgtccacgacgacgcctatgagacggccaagtgggagaagatcacctacgccgggatcgtgacctgcaccctcctggcggcgtacaacctgtccaagggccacccccacttcgatgagccgccggcgtacccctatcttcacatccgcaacaaggagttcccatggggccctgatggcttgtttgagacgaaggaccaccactgagccctgattagcacaccttcaggagctggtgcacgcttaaaagagttatatggttgtttcagtgattttccttttcccttgagacctatttgctgcaacaagaaataagaatgaccaaactcttgtattgacagtgaggttttaactgtgttagctgttaccggcttgtctatttttctttgccgtccacgccatatatggtcacctttaagttggtgttgcccggtgtcaggaaacggcatcacaattatcaaaagctgttatcgtattctgatggcttaaaaaaaaaaaaaaaa

SEQ ID NO: 6944 - protein, 94 aa, Zea mays
  misc_feature: Ceres CLONE ID no. 1286397
  misc_feature: Ceres CDNA ID no. 29191434
  misc_feature (26)..(92): Pfam Name: COX6A PFAM Desc: Cytochrome c oxidase subunit VIa
  misc_feature: Homolog of GI Number: 31745230 NR Desc: putative  cytochrome c oxidase subunit VIa precursor
MASAAARSGLRSLAVRAAPLRRRMSSSVHDDAYETAKWEKITYAGIVTCTLLAAYNLSKGHPHFDEPPAYPYLHIRNKEFPWGPDGLFETKDHH

SEQ ID NO: 6945 - DNA, 735 bp, Zea mays
  misc_feature: Ceres CLONE ID no. 1286415
  misc_feature: Ceres CDNA ID no. 36705254
  CDS (87)..(533): REFERENCED BY SEQ ID NO: 6946
acaacaccaagaagcaagaaaactagaaaaggctcctcccgaccgcaacgcccctcatctccctcgaccccgacatccccgacccgatggcgcccaaggcggagaagaagccagcggagaagaagccggcggccgaggagaaggcggagaagacgaccgcagggaagaagcccaaggccgagaagcggctgcccgcgtccaagtcctccggcaaggagggcggcgagaagaaggggaagaagaaggccaagaagagcgtggagacctacaagatctacatcttcaaggtgctgaagcaggtgcaccccgacatcggcatatcctccaaggccatgtccatcatgaactccttcatcaacgacatctttgagaagctggccggcgaggccgccaagctggcgcggtacaacaagaagcccaccatcacgtcccgcgagatccagacctccgtgcgcctagtcctccccggagagctcgccaagcacgccgtctccgagggaaccaaggccgtcaccaagttcaccagcaactgagcgcgctgcgggatccgcggatctgttagaagggttctttgctgtgtcctttccccagtcccccaccctacccgcctagtagctagcttgcctgctctataaatccggcgcgccggattgtaatggtcctcttagatttgatgtccctgttgtggaatatagttgtatctctccgcttgctattttaaaaaaaaaaaaaaaa

SEQ ID NO: 6946 - protein, 148 aa, Zea mays; identical to SEQ ID NO: 244
  misc_feature: Ceres CLONE ID no. 1286415
  misc_feature: Ceres CDNA ID no. 36705254
  misc_feature: No seed is being produced by the plant
  misc_feature: The plant flowers significantly late compared to wild-type.
  misc_feature: Useful for biocontainment applications
  misc_feature: Useful for making plants with modulated flowering time
  misc_feature (55)..(127): Pfam Name: Histone PFAM Desc: Core histone H2A/H2B/H3/H4
  misc_feature: Homolog of GI Number: 21801 NR Desc: histone H2B
  misc_feature: Homolog of GI Number: 577825 NR Desc: H2B histone
  misc_feature: Homolog of GI Number: 22325 NR Desc: H2B histone
  misc_feature: Homolog of GI Number: 1708107 NR Desc: Histone H2B
  misc_feature: Homolog of GI Number: 22323 NR Desc: H2B histone
  misc_feature: Homolog of GI Number: 50947133 NR Desc: putative Histone H2B.2
  misc_feature: Homolog of GI Number: 34895888 NR Desc: putative histone H2B
  misc_feature: Homolog of GI Number: 34895838 NR Desc: putative histone H2B
  misc_feature: Homolog of GI Number: 34895832 NR Desc: putative histone H2B
  misc_feature: Homolog of GI Number: 34895896 NR Desc: putative histone H2B

SEQ ID NO: 6947 - DNA, 757 bp, Zea mays
  misc_feature: Ceres CLONE ID no. 1286467
  misc_feature: Ceres CDNA ID no. 36705265
  CDS (84)..(542): REFERENCED BY SEQ ID NO: 6948
ccttagccgcgcggacgcccaccagcagctgcccccttgctgtcgccgcctctccgcgcgaccgatctaccgccgccgccaccatgtcgctgatcgccggcgaggacttccaacatattctgcgtctgctgaacaccaacgtggatgggaagcagaagatcatgttcgccatgacctccataaagggtgttgggcgccgcttctccaacatcgtctgcaagaaggccgacatcgacatgaacaagagggccggtgagctgacgcctgaagagctggagcgcctgatgacggtcgtggcgaaccctaggcagttcaaggtgccggactggttcctcaacaggaagaaggattacaaggacggaaggttctcacaggtcgtctccaacgccctcgacatgaagctcagggacgacctcgagaggctcaagaagatcaggaaccaccgtggtctgcgtcactactggggcctccgtgtccgtggccagcacaccaagaccactggcaggcgcggaaaaactgttggtgtctccaagaagcgataagctacatatctatcgacaaatctcagatgtactagtgttggttcatgttcaaactgtcttgatgaagggtttctgttgggacagtttcctgaaattatgttttgccctaggataatcttgcagttatggaaccttattatattgtatcctgcaatttgtttttttgcaacttataagagtaattttatttgatgagtctaaaaaaaaaaaaaaaa

SEQ ID NO: 6948 - protein, 152 aa, Zea mays
  misc_feature: Ceres CLONE ID no. 1286467
  misc_feature: Ceres CDNA ID no. 36705265
  misc_feature (14)..(142): Pfam Name: Ribosomal_S13 PFAM Desc: Ribosomal protein S13/S18
  misc_feature: Homolog of GI Number: 50919149 NR Desc: putative ribosomal protein S18A
  misc_feature: Homolog of GI Number: 50934523 NR Desc: putative ribosomal protein S18
  misc_feature: Homolog of GI Number: 22204120 NR Desc: putative ribosomal protein S18
  misc_feature: Homolog of GI Number: 56236126 NR Desc: At1g22780
  misc_feature: Homolog of GI Number: 40287492 NR Desc: putative ribosomal protein
  misc_feature: Homolog of GI Number: 17978783 NR Desc: S18.A ribosomal protein
  misc_feature: Homolog of GI Number: 67083901 NR Desc: ribosomal protein S18
  misc_feature: Homolog of GI Number: 24266988 NR Desc: ribosomal protein S18
  misc_feature: Homolog of GI Number: 33521690 NR Desc: ribosomal protein S18
MSLIAGEDFQHILRLLNTNVDGKQKIMFAMTSIKGVGRRFSNIVCKKADIDMNKRAGELTPEELERLMTVVANPRQFKVPDWFLNRKKDYKDGRFSQVVSNALDMKLRDDLERLKKIRNHRGLRHYWGLRVRGQHTKTTGRRGKTVGVSKKR

SEQ ID NO: 6949 - DNA, 629 bp, Zea mays
  misc_feature: Ceres CLONE ID no. 1286479
  misc_feature: Ceres CDNA ID no. 25445591
  CDS (105)..(422): REFERENCED BY SEQ ID NO: 6950
aaaagcatctgtccccgccgccgccactcggtgcagcttctcaactggataggtagcaccggagcaggtagaacgctgcacaagccccttccgccgccgccaagatggtgaacgttcctaagaccaagaagacgtactgcaagaacaaagagtgcaagaagcacacactccacaaggtgactcagtataagaagggaaaggatagcctgtctgcccagggaaagcgccgttatgaccgcaagcagtcaggatatggtggtcagaccaagcctgtcttccacaagaaggccaagaccaccaagaagattgttctgaagctgcagtgccagagctgcaagcactactcacagcacgccatcaagagatgcaagcattttgagattggtggggacaagaagggcaagggcacatctctattctaagcttctggtccacctgtctggttgttgagttgaagctgtgggtctactactactgttataaaaacctgtcgccaattttcaatgttaatgtagcaatgaaagcagaccatgctatgtatccaaattccaatgcctgacatttgttctggggtgttggtcgacttttggctaaatgaaagttttgtagcttgaaaaaaaaaaaaaaaa

SEQ ID NO: 6950 - protein, 105 aa, Zea mays
  misc_feature: Ceres CLONE ID no. 1286479
  misc_feature: Ceres CDNA ID no. 25445591
  misc_feature (19)..(95): Pfam Name: Ribosomal_L44 PFAM Desc: Ribosomal protein L44
  misc_feature: Homolog of GI Number: 15281775 NR Desc: 60S ribosomal protein L144
  misc_feature: Homolog of GI Number: 34901296 NR Desc: putative 60S ribosomal protein L44
  misc_feature: Homolog of GI Number: 41152660 NR Desc: 60S ribosomal protein L44
  misc_feature: Homolog of GI Number: 170920 NR Desc: ribosomal protein L41
  misc_feature: Homolog of GI Number: 21553918 NR Desc: ribosomal protein
  misc_feature: Homolog of GI Number: 1553131 NR Desc: ribosomal protein L44 isoform b
  misc_feature: Homolog of GI Number: 82621114 NR Desc: ribosomal protein L41
  misc_feature: Homolog of GI Number: 3128243 NR Desc: ribosomal protein L41
  misc_feature: Homolog of GI Number: 66852786 NR Desc: ribosomal protein L41
  misc_feature: Homolog of GI Number: 12083868 NR Desc: ribosomal protein L41
MVNVPKTKKTYCKNKECKKHTLHKVTQYKKGKDSLSAQGKRRYDRKQSGYGGQTKPVFHKKAKTTKKIVLKLQCQSCKHYSQHAIKRCKHFEIGGDKKGKGTSLF

SEQ ID NO: 6951 - DNA, 963 bp, Zea mays
  misc_feature: Ceres CLONE ID no. 1286499
  misc_feature: Ceres CDNA ID no. 29191435
  CDS (52)..(735): REFERENCED BY SEQ ID NO: 6952
atccgtcttgacagctccactcctaactccagcgaccaccgcgtccccaccatggccgctcgccggagcactagccccgcccggcacggcgtcctccccgccctccttctcatcctatgctcgtccctcccttccctcgccgccgcataccgcccaggcgacatcgtcccgatgctccgctcgggccagtaccacggctcgaggtcggtgtggttcgacgtggtggggcgccattgcccggccttcgcggtcaaccgggaggtgctgatgccgatcccaaagcctacggggttcactggtgctgatccgtacaagataacatttcaaattggacatgaaaagttccatgttccttggctttatgttataaatcgcaaaacctctgaagttccactgatcgatttccatttgaagtactctggaaatgatatacttggggtgacagctaaagttgtggacatgcctcaccactacgtggaagttcatcctgacataaagaagaatttctgggatccacagaattggccaaaatacgttcttgttagatatacatgggaggagcaatcagagatagatgttactggaggattttatgtgttatttggatccgggcttgttttgtccttcattcttgcaatatatgtcctacagtcatctcaagagaagttgacaaggtttgtgcgagaagcagttgcagatagtagcctcccagatggagttgcaaaggtcgagtgatgacctgtctacgatgagctgtcttattacccactaatttctacactgatcagaacctcaagttttttaacagtcaactttcttagctgcggaacgagtaatacaacagagtagcatacatatgaagagctagtggtttatttgattctcttgtgcatgctcttaaaccaactttgcttatatggtggaagtgcataatttcatttccaggcaaaaaaaaaaaaaaaa

SEQ ID NO: 6952 - protein, 227 aa, Zea mays
  misc_feature: Ceres CLONE ID no. 1286499
  misc_feature: Ceres CDNA ID no. 29191435
  misc_feature: Useful for delaying flowering time
  misc_feature: Useful for making plants with altered leaf shape eg curled leaves
  misc_feature: Useful for making plants with altered leaf shape eg curled leaves
  misc_feature: Useful for making plants with increased biomass and foliage
  misc_feature: Useful for making shorter plants
MAARRSTSPARHGVLPALLLILCSSLPSLAAAYRPGDIVPMLRSGQYHGSRSVWFDVVGRHCPAFAVNREVLMPIPKPTGFTGADPYKITFQIGHEKFHVPWLYVINRKTSEVPLIDFHLKYSGNDILGVTAKVVDMPHHYVEVHPDIKKNFWDPQNWPKYVLVRYTWEEQSEIDVTGGFYVLFGSGLVLSFILAIYVLQSSQEKLTRFVREAVADSSLPDGVAKVE

SEQ ID NO: 6953 - DNA, 1103 bp, Zea mays
  misc_feature: Ceres CLONE ID no. 1286956
  misc_feature: Ceres CDNA ID no. 36590990
  CDS (104)..(664): REFERENCED BY SEQ ID NO: 6954
aactactccgtcactttgtttgcaaagctcctcctcgatccatcgatcactgcaccggccggcggcaccgcgctcgcaggggctagccaacgagacggcagcaatggcggaccgtgaccgcagcggcatctacggcggcgcccacgccacctacgggcagcagcagcagcagggaggaggcgggcgcccgatgggtgagcaggtgaagggcatgctccacgacaaggggccgacggcgtcgcaggcgctgacggtggcgacgctgttcccgctgggcgggctgctgctggtgctgtcggggctggcgctgacggcctccgtggtggggctggccgtggccacgccggtgttcctgatcttcagccccgtgctggtccccgccgcgctgctcatcgggacggccgtcatggggttcctcacgtcgggcgcgctggggctcgggggcctgtcctcgctcacgtgcctcgccaacacggcgcggcaggcgttccagcgcaccccggactacgtggaggaggcgcaccgcaggatggcggaggccgcggcgcacgcgggccacaagaccgcgcaggcaggccaggccatccagggcagggcgcaggaggccggcgccgggggaggtgcaggtgccggcgctggcggcggcggcagggcttcctcgtaagcaagtcatccatgcatggattatggatagatgcgcgcgtgcgtgtctatcagtatcagcagccagcagggtcgtcgcggaatgctgtgttcctgtacgtgtgggtgaccgtccttccgtccttcgtctttctccccccgagtgtgtgttacgtatgtcctggtgttcgtcgtgtgtgttcatcgccgctccagttgaattccggtgtctgttcatcgccgctccaggtcgtagatgtgaatatactttgctaggggaataagtgataagtctgtctggaaggtaatgtttgagctttgctagtgtggctgggcactctggtcactggttgtgttgtgcatgcatcagctgtatgatcgtcgtctgttgtggaaaattggtcaatgtattctcttgctgaataatttgtgacatctaattgctaaaaaaaaaaaaaaaa

SEQ ID NO: 6954 - protein, 186 aa, Zea mays; identical to SEQ ID NO: 4702
  misc_feature: Ceres CLONE ID no. 1286956
  misc_feature: Ceres CDNA ID no. 36590990
  misc_feature (44)..(161): Pfam Name: Oleosin PFAM Desc: Oleosin
  misc_feature: Homolog of GI Number: 168509 NR Desc: oleosin KD18
  misc_feature: Homolog of GI Number: 1076818 NR Desc: oleosin 17
  misc_feature: Homolog of GI Number: 50917995 NR Desc: oleosin
  misc_feature: Homolog of GI Number: 4102969 NR Desc: 18 kDa oleosin
  misc_feature: Homolog of GI Number: 963062 NR Desc: high molecular weight oleosin
  misc_feature: Homolog of GI Number: 82051 NR Desc: lipid body
  misc_feature: Homolog of GI Number: 9963897 NR Desc: oleosin
  misc_feature: Homolog of GI Number: 10880961 NR Desc: 19 kDa oleosin
  misc_feature: Homolog of GI Number: 10834827 NR Desc: oleosin
  misc_feature: Homolog of GI Number: 22651523 NR Desc: oleosin

SEQ ID NO: 6955 - DNA, 819 bp, Zea mays
  misc_feature: Ceres CLONE ID no. 1286969
  misc_feature: Ceres CDNA ID no. 40351733
  CDS (132)..(506): REFERENCED BY SEQ ID NO: 6956
gaccaggtcctccaccgcaagtgacagagaaccagagaaaccataagcccatagcaagctaaagcacaggagcgcaagagcccagcaggcgccaagaaaagcaccgcccggctggtccgcgccagcgcagtatggtgacggcgatcgcggtggcgtcggcggggctcgggatgctggcgggcgtcgcgatggccaacaggtcttcgccgccgtccgcgggcgccgcgctgtggaggcccggcgggggccccgcgctgcgctggggcggaggcggaggcgccccgcgctgcgaggcgtgcggggggtcgggcaaggaggactgccgcctctgcgcgcgctggtccgacgccggcgcccgcgggaagaagattagccgctccgggtgcggcgcgtgcgccggcacgcgccggacgccgtgccggtgctgcggcgggtccggtaccggccgacgcgcgcccgtgcggatcgccacgtccgcgcgcgccgcaccgacgactgccaggtgaggtgatgaccgcccgtcgcgccgacgccgacaccgatgccgatgccgagtctctcttcgcctctcctggacccgccggttctcccggatcatggatgaaggcggctctgtgcggcgcgcgggcgacctgctggcacaagggaatgacggcgcggagctcttgctctcttttttggacgaaaaaagatcagagattgagattgtagtagtatttgttagctagcgcgctggattgattagcaaaaattattgaaacgcgctatatttattttgcatagcaagatgagttacgcaacgcaaaaaaaaaaaaaaaa

SEQ ID NO: 6956 - protein, 124 aa, Zea mays
  misc_feature: Ceres CLONE ID no. 1286969
  misc_feature: Ceres CDNA ID no. 40351733
MVTAIAVASAGLGMLAGVAMANRSSPPSAGAALWRPGGGPALRWGGGGGAPRCEACGGSGKEDCRLCARWSDAGARGKKISRSGCGACAGTRRTPCRCCGGSGTGRRAPVRIATSARAAPTTAR

SEQ ID NO: 6957 - DNA, 544 bp, Zea mays
  misc_feature: Ceres CLONE ID no. 1287048
  misc_feature: Ceres CDNA ID no. 25445592
  CDS (1)..(378): REFERENCED BY SEQ ID NO: 6958
aaaagattcccacgggctcgccgctcgcatctcgccagcgcgaacgcagcctccgtgcatatcaccagcctcctcgcgcacccggtcccgcttgcctttccccacctactcgccgtcgcggtgccgtgcgccggtgctgttcagtctagggtttcggccctcgcccgccgatccgtccccccgccggccatgtcgaagcaaggagggaaggccaagccgctgaaggcgcccaaggtcgacaagaaggagtacgacgagagtgatcttgcttatttgcagaagaaaaaagatgaggaaaaggcgctgaaggagctgaaggccaaggcacagaagggcgcaattggaggctcgggtctcaagaaaagtggaaagaaatgagcattgcccacccacccatctccaaaacacctaagagaacgataagacagctgcttatctgtgttgcgcttcactatatgatatatgtggctgtgagacaatgttgcctcttgtattccgtgtttcgcggtgttccagttggtttgcttgaaaaaaaaaaaaaaaa

SEQ ID NO: 6958 - protein, 62 aa, Zea mays
  misc_feature: Ceres CLONE ID no. 1287048
  misc_feature: Ceres CDNA ID no. 25445592
  misc_feature: Homolog of GI Number: 57107095 NR Desc:  similar to ubiquitin
  misc_feature: Homolog of GI Number: 55622606 NR Desc:  similar to Keratin
  misc_feature: Homolog of GI Number: 55661245 NR Desc:  similar to GRB2
MSKQGGKAKPLKAPKVDKKEYDESDLAYLQKKKDEEKALKELKAKAQKGAIGGSGLKKSGKK

SEQ ID NO: 6959 - DNA, 949 bp, Zea mays
  misc_feature: Ceres CLONE ID no. 1287130
  misc_feature: Ceres CDNA ID no. 40351734
  CDS (87)..(617): REFERENCED BY SEQ ID NO: 6960
actactctctctctctgcctgcaaagctgcttgatccatcatcgatcacatcactccaccagccgcagcgcacgaacgtacgactcatggcagatcgcgaccgcagcggcatctacggcggcggcgcctacgggcagcagcaggggggcggccgcccgatgggtgagcaggtgaagggcatgatccacgacaaggggccgacggcgtcccaggcgctgacggtggcgacgctgttccctctgggcgggctgctcctggtgctgtcgggcctggcgctggcggcctccacggtggggctggccctggccacgcccgtgttcctgctcttcagccccgtgctcgtccccgccgcgctgctcatcggcacggccgtcgcggggttcctcacgtcgggcgcgctggggctcggcggcctgtcctcgctcacgtgcctcgccaacacggcgcggcaggcgttccagcgcaccccggactacgtcgaggaggcgcgccgcaggatggcggaggccgcggcgcacgcgggccacaagaccgcgcaggccgggcacggcatccagagcaaggcgcaggaggccggtgctggcactggcgccggcggcggcaggacttcctcgtaaataagcaaatcatccatggatgcgtgcgtgtcaatgtcagcagggtcgtcgtggaatgctcttctctgtacgtgggtaaccgtcttttggtcgtcttccccgagtgcgtgataaatatcctggtgttcgtcgtgtgtggtgctgccctaggctggggcctggggtcggctgtgtaccggtatctgttcatcgccgctccgtcgcgttcggagatgtgaataagtgatgtgaaggttaagtttcagctttgctattgctattgtggcttgtgcatcagcggtttgctcgttgactgttatggaaataagcattggtgaaaaaaaaaaaaaaaa

SEQ ID NO: 6960 - protein, 176 aa, Zea mays; identical to SEQ ID NO: 6718
  misc_feature: Ceres CLONE ID no. 1287130
  misc_feature: Ceres CDNA ID no. 40351734
  misc_feature (39)..(156): Pfam Name: Oleosin PFAM Desc: Oleosin

SEQ ID NO: 6961 - DNA, 652 bp, Zea mays
  misc_feature: Ceres CLONE ID no. 1287136
  misc_feature: Ceres CDNA ID no. 25445856
  CDS (3)..(464): REFERENCED BY SEQ ID NO: 6962
acactcacaccgaaagcgcctcaactctgaaggcgctacagcaacgtcgccacttcactcacgattggagtttcacctcggcagcccagccagccagtggttcctcggctcggaggaacaggcgaacagcaagagcttctgaagatgaaggcgatccccgtggctctcctgctcctcgtcctggttgctgccgcctcctcgttcaagcatctcgccgaggcagcagacggcggcgcggtgccggacggcgtgtgcgacggcaagtgccgcagccggtgctcgctgaagaaggccgggcggtgcatgggcctgtgcatgatgtgctgcggcaagtgccagggctgcgtgccgtcggggccgtacgccagcaaggacgagtgcccctgctacagggacatgaagtcccccaagaaccagcgccccaagtgcccctaggccctaccgctctaagggagggaggatgacccaggatttcgctcgcgatcctgcacagcttctagtcttgtactgctagtttagcgcgccgagcgtcggaatgtcgcgacggttccttccgtgcttgtgtgctgtgtttctcctcggacgtgctataacctagaataataaccaatgcactgtatctgtgtgcttgtctttaaaaaaaaaaaaaaaa

SEQ ID NO: 6962 - protein, 96 aa, Zea mays; identical to SEQ ID NO: 2908
  misc_feature: Ceres CLONE ID no. 1287136
  misc_feature: Ceres CDNA ID no. 25445856
  misc_feature (1)..(96): Pfam Name: GASA PFAM Desc: Gibberellin regulated protein
  misc_feature: Homolog of GI Number: 66731525 NR Desc: GIR1
  misc_feature: Homolog of GI Number: 3355483 NR Desc: similar to gibberellin
  misc_feature: Homolog of GI Number: 14627134 NR Desc: snakin
  misc_feature: Homolog of GI Number: 50901380 NR Desc: putative  gibberellin regulated protein
  misc_feature: Homolog of GI Number: 2129596 NR Desc: gibberellin
  misc_feature: Homolog of GI Number: 28394019 NR Desc: putative gibberellin
  misc_feature: Homolog of GI Number: 44681330 NR Desc: At1g74670
  misc_feature: Homolog of GI Number: 16516821 NR Desc: gibberellin induced protein 3
  misc_feature: Homolog of GI Number: 44889867 NR Desc: GASA
  misc_feature: Homolog of GI Number: 25313155 NR Desc: protein F10A5.6

SEQ ID NO: 6963 - DNA, 642 bp, Zea mays
  misc_feature: Ceres CLONE ID no. 1287194
  misc_feature: Ceres CDNA ID no. 29191436
  CDS (2)..(478): REFERENCED BY SEQ ID NO: 6964
aaaaaaccctactaaccgcgtctcctctccagcgcccgccgtcgccgccgccctcctcttggtcccgccgtccgtcgaggtcatcatggtgagggtcagtgtgctcaacgatgcactcaagtccatgtacaatgcagagaagaggggcaagaggcaggtcatgatcaggccgtcgtccaaggtgatcatcaagttcctgacggtcatgcagcgtcatggatacattggcgagttcgagtacgtggatgaccacagagctgggaagattgtggtggaactgaacggcagactaaacaaatgtggtgtaattagcccccggtttgatgttggggtaaaggaaatcgaaggctggactgccaggctgcttccgtctcgccagtttggctatatcgtgcttacaacttctgcgggaattatggatcacgaggaggcccgacgcaagaacgtcggaggcaaagtccttggtttcttttattaaagggtcgtccaagtttcttctactaaatggtgggtcaaccgagtttttgtttttgtttttggtctgaattgaatagagtgtttgctttgttaagactggaatgtgttatgtgcctttgttaagactggaatgtgggaatctttgagtgaaaaaaaaaaaaaaaa

SEQ ID NO: 6964 - protein, 130 aa, Zea mays
  misc_feature: Ceres CLONE ID no. 1287194
  misc_feature: Ceres CDNA ID no. 29191436
  misc_feature (5)..(130): Pfam Name: Ribosomal_S8 PFAM Desc: Ribosomal protein S8
  misc_feature: Homolog of GI Number: 23397065 NR Desc: putative cytoplasmic ribosomal protein S15a
  misc_feature: Homolog of GI Number: 17863 NR Desc: r
  misc_feature: Homolog of GI Number: 6683481 NR Desc: wrp15a
  misc_feature: Homolog of GI Number: 20259193 NR Desc: putative cytoplasmic ribosomal protein S15a
  misc_feature: Homolog of GI Number: 13560779 NR Desc: cytoplasmic ribosomal protein S15a
  misc_feature: Homolog of GI Number: 50908303 NR Desc: putative ribosomal protein S15
  misc_feature: Homolog of GI Number: 50935123 NR Desc: ribosomal protein S15
  misc_feature: Homolog of GI Number: 2130985 NR Desc: r
  misc_feature: Homolog of GI Number: 3355488 NR Desc: 40S ribosomal protein S15A
  misc_feature: Utility: Cold Growth Useful for making plants with increased tolerance to cold stress
MVRVSVLNDALKSMYNAEKRGKRQVMIRPSSKVIIKFLTVMQRHGYIGEFEYVDDHRAGKIVVELNGRLNKCGVISPRFDVGVKEIEGWTARLLPSRQFGYIVLTTSAGIMDHEEARRKNVGGKVLGFFY

SEQ ID NO: 6965 - DNA, 724 bp, Zea mays
  misc_feature: Ceres CLONE ID no. 1287197
  misc_feature: Ceres CDNA ID no. 25445801
  CDS (186)..(590): REFERENCED BY SEQ ID NO: 6966
gaaatttcatgcgttccttatcttccgttccgctcggaagtctctctaccaccttctccccattccgctgttccgccctctcgcgtcgcgtgcctccaggtccctcctctgcgtaactgggtggccgccgatccgccgccaccgccctgcgtcaggtgttccggtgacaagcgtccacctgcaagatgttggaataccaaaacgcaattggggggagactgaagctgaagggtaaagcgctggacgtaaaggatggtggggtgaagaaaaagaagaagaagtaccagcgtgaggagtcgtctcagattgcgcacgatgagctccacaaaggggggagatctgaatcaccaattgatcccaacaatgagcggattgaatctgacaagaccggagatgaagggaacccacatcctgactatggccatctcacaccagcagagcgacgctacatggaacagaagcagaagatcgacatgcagaagatggccaaagtcgccaacaagtcccatagagaccgcatccaagacttcaatcagtacctggcaaacctaagcgagcactacgacatccccaaagttggtcctggctaacatagccaaactggctgtgttacgcacaacaattgtgtgctgggtctatccatttatgttagcatgttatgtatcgtttaaaacgatttgttgccaccagaaattgatatttaatttcaaaaaaaaaaaaaaaa

SEQ ID NO: 6966 - protein, 134 aa, Zea mays; identical to SEQ ID NO: 262
  misc_feature: Ceres CLONE ID no. 1287197
  misc_feature: Ceres CDNA ID no. 25445801
  misc_feature: Homolog of GI Number: 50912351 NR Desc: CGI
  misc_feature: Homolog of GI Number: 20269115 NR Desc: CGI
  misc_feature: Homolog of GI Number: 50761174 NR Desc:  similar to family with sequence similarity 32
  misc_feature: Homolog of GI Number: 51762906 NR Desc: similar to RIKEN cDNA 2510049I19
  misc_feature: Homolog of GI Number: 61873558 NR Desc:  similar to family with sequence similarity 32
  misc_feature: Useful for making ornamental plants with modified leaves

SEQ ID NO: 6967 - DNA, 1151 bp, Zea mays
  misc_feature: Ceres CLONE ID no. 1287207
  misc_feature: Ceres CDNA ID no. 36590965
  CDS (136)..(849): REFERENCED BY SEQ ID NO: 6968
attcatccgcccgggcccctccgcacgcctgcacacattccgcgcacaccccggcagccgcaaacgccttcgccgtcgcgtcccgctcctccgcccgcccgacgcgacccctaggacctggagagagaggtcggcatggctgccgcagtggtcgacgacgctggtatggacgccgtccagaagcgcctcatgttcgaagacgaatgcattttggtggacgagcaggacaatgttgttggccatgagtcaaagtacaactgccatttgatggaaaagattgattctgagaatctgctacatagggcattcagtgtgttccttttcaactcaaaatatgagctgctacttcagcaaaggtccgcgacaaaggttacctttcctttagtttggaccaatacctgctgcagccaccctctgtaccgtgagtctgagcttatccaggagaactaccttggtgtgagaaatgcagcacagaggaagctactggatgagctgggcatcccagcagaagatgccccagttgaccaattcacccctctgggccgaatgctttacaaggcaccatctgacgggaaatggggggagcatgagcttgactacctgctgttcatcgtccgggacgtgaaggtgcagccgaacccagatgaagtcgctgacgtgaagtacgtgaaccgcgacgagctcaaggagctcatccggaaggctgacgctggcgaggacggggtgaagatctccccctggttcaggctggtggtggacaacttcctcatgggctggtgggaccatgtcgagaaaggcaccctcggcgaggccgtggacatggagaccatccataagctgaaggagtgaggggccgccggccggccggctccgatgacctcaccacctgttgatgttgctgctgctgctgcactgcatgtttatcaaaagttatcgctcctgctcgcggaaagtgagcttgactgttgccggggtggaagtgtcgttttggactgaagatgagtgccgcggaggggtttgttgtttgtttgtttgtttgttcggtgaccgaatcgcgagttggacgcctgtttaatccgtgcttatacatcgtctgagtaaacagcaataagagggacatccgtaagctctttccgaaaaaaaaaaaaaaa

SEQ ID NO: 6968 - protein, 237 aa, Zea mays
  misc_feature: Ceres CLONE ID no. 1287207
  misc_feature: Ceres CDNA ID no. 36590965
  misc_feature (54)..(206): Pfam Name: NUDIX PFAM Desc: NUDIX domain
  misc_feature: Homolog of GI Number: 33340598 NR Desc: isopentenyl pyrophosphate isomerase
  misc_feature: Homolog of GI Number: 6856560 NR Desc: isopentenyl pyrophosphate:dimethyllallyl pyrophosphate isomerase
  misc_feature: Homolog of GI Number: 34898490 NR Desc: putative isopentenyl pyrophosphate: dimethyllallyl pyrophosphate isomerase
  misc_feature: Homolog of GI Number: 35186998 NR Desc: isopentenyl pyrophosphate isomerase
  misc_feature: Homolog of GI Number: 6728984 NR Desc: isopentenyl diphosphate:dimethylallyl diphosphate isomerase
  misc_feature: Homolog of GI Number: 6856552 NR Desc: isopentenyl pyrophosphate:dimethyllallyl pyrophosphate isomerase
  misc_feature: Homolog of GI Number: 6225525 NR Desc: Isopentenyl
  misc_feature: Homolog of GI Number: 6856558 NR Desc: isopentenyl pyrophosphate:dimethyllallyl pyrophosphate isomerase
  misc_feature: Homolog of GI Number: 13603408 NR Desc: isopentenyl diphosphate isomerase 2
  misc_feature: Homolog of GI Number: 6856562 NR Desc: isopentenyl pyrophosphate:dimethyllallyl pyrophosphate isomerase
MAAAVVDDAGMDAVQKRLMFEDECILVDEQDNVVGHESKYNCHLMEKIDSENLLHRAFSVFLFNSKYELLLQQRSATKVTFPLVWTNTCCSHPLYRESELIQENYLGVRNAAQRKLLDELGIPAEDAPVDQFTPLGRMLYKAPSDGKWGEHELDYLLFIVRDVKVQPNPDEVADVKYVNRDELKELIRKADAGEDGVKISPWFRLVVDNFLMGWWDHVEKGTLGEAVDMETIHKLKE

SEQ ID NO: 6969 - DNA, 670 bp, Zea mays
  misc_feature: Ceres CLONE ID no. 1287213
  misc_feature: Ceres CDNA ID no. 36707053
  CDS (61)..(474): REFERENCED BY SEQ ID NO: 6970
atttcctccacttcccaaaccctacccgcggcgcagcagcatcacaaccaccgcccgaagatggtgaagtttctcaagcccggcaaggccgtaatcctcctccagggcaggttcgccggccggaaggcggtgatcgtgcgcgtgttcgaggagggcacccgcgaccgtccctatgggcactgcctcgtcgccggcctggccaagtaccccaagaaggtgatccgcaaggactccgccaagaagacggccaagaagtcccgcgtcaagtgtttcatcaagctcgtcaatttcactcacctcatgcccacccgctacaccctcgacgtcgatttcaaagacgtcgcctcgggcgggcccgacgcgctctccacccgggacaagaaggtcgaagcctgcaaggccgccaaggcgcgcctcgaggagaggttcaagaccggcaagaacaggtggttctttaccaagctccgcttctaggcgccgggcaccccgcatagtgactactttagttgtcaatttgttgtatcggaaaccatttaagctatttctgttttggtattgcgcttgttatggatctcggagaagattttgttaaaaacatgtcgatgatgtgttaaatgatgcccaaaggaaacgtctcgttgaacttttgctgagaaaaaaaaaaaaaaaa

SEQ ID NO: 6970 - protein, 137 aa, Zea mays
  misc_feature: Ceres CLONE ID no. 1287213
  misc_feature: Ceres CDNA ID no. 36707053
  misc_feature (5)..(40): Pfam Name: KOW PFAM Desc: KOW motif
  misc_feature (52)..(137): Pfam Name: Ribosomal_L27e PFAM Desc: Ribosomal L27e protein family
  misc_feature: Homolog of GI Number: 50906961 NR Desc: putative 60S ribosomal protein L27
  misc_feature: Homolog of GI Number: 37536910 NR Desc: putative ribosomal protein L27
  misc_feature: Homolog of GI Number: 20466061 NR Desc: putative ribosomal protein
  misc_feature: Homolog of GI Number: 8131701 NR Desc: ribosomal protein L27
  misc_feature: Homolog of GI Number: 23198420 NR Desc: putative ribosomal protein L27
  misc_feature: Homolog of GI Number: 21554529 NR Desc: ribosomal protein L27
  misc_feature: Homolog of GI Number: 7441035 NR Desc: ribosomal protein L27
  misc_feature: Homolog of GI Number: 7441033 NR Desc: ribosomal protein L27
  misc_feature: Homolog of GI Number: 20768 NR Desc: ribosomal protein L27
  misc_feature: Homolog of GI Number: 6010292 NR Desc: 60S ribosomal protein L27
MVKFLKPGKAVILLQGRFAGRKAVIVRVFEEGTRDRPYGHCLVAGLAKYPKKVIRKDSAKKTAKKSRVKCFIKLVNFTHLMPTRYTLDVDFKDVASGGPDALSTRDKKVEACKAAKARLEERFKTGKNRWFFTKLRF

SEQ ID NO: 6971 - DNA, 769 bp, Zea mays
  misc_feature: Ceres CLONE ID no. 1287227
  misc_feature: Ceres CDNA ID no. 40351735
  CDS (92)..(451): REFERENCED BY SEQ ID NO: 6972
accgatcacaaaaccaatcgcggagattcaatcacgtacgtatacacacggccacacgggcacgtagctagctagcagtcgtagcgtgacgatgagggttctctctgttgcggtcgctctggtcgtggtggtggccgcggcctgcctcgccgcgccgcggggcgcggacggcgcgggcgagtgcggtgcgacgccgccggacacggtggcgctgaggctggcgccgtgcgcgtcggcggcggaggaccccggctccgcgccgtccggctcctgctgcagcgcggtgcacgccatcgggaagcagagccccaggtgcctctgcgccgtcatgctgtccaacaccgccaggagcgccgggatcaaggccgaggtcgccatcaccatccccaaacgctgcaacctcgccgaccgccccgttggctacaagtgcggagattacactctgccatgagcggcggtgaggtctccaggccggatttgctgcatggcatgcccgagtatcaccgaagcgcgagctcttgtgtcgagcgagtccgtgtctgtcagtcagtctctatgtgttgcccataataaacaaagacatgcgagtaccagacatgtgcaactctagtagcatggtgcgtgtatcactaggtacgcgtactcgtatagttgtgttcagttcagggtctatagagatgtagccctgcattgtcgaaataaatactgtgtccactcgttcgtgaaatgaaaaaaaaggcttgatgctcgaccaaaaaaaaaaaaaaaa

SEQ ID NO: 6972 - protein, 119 aa, Zea mays
  misc_feature: Ceres CLONE ID no. 1287227
  misc_feature: Ceres CDNA ID no. 40351735
  misc_feature (31)..(113): Pfam Name: Tryp_alpha_amyl PFAM Desc: Protease inhibitor/seed storage/LTP family
MRVLSVAVALVVVVAAACLAAPRGADGAGECGATPPDTVALRLAPCASAAEDPGSAPSGSCCSAVHAIGKQSPRCLCAVMLSNTARSAGIKAEVAITIPKRCNLADRPVGYKCGDYTLP

SEQ ID NO: 6973 - DNA, 596 bp, Zea mays
  misc_feature: Ceres CLONE ID no. 1287248
  misc_feature: Ceres CDNA ID no. 36707054
  CDS (95)..(433): REFERENCED BY SEQ ID NO: 6974
cttccaccacgcagtcactcccgggccgccgccgccgccgcctccgcgaaaaaccctagcaggcttcgccgctatcactccaaggggcgcgaccatggtggccacaaagaagacgaagaaatccacggacaacatcaataacaagctgcagcttgttatgaagagtggcaagtacactctcggctacaagaccgtcctcaggactctcaggaactctaagtcgaagctagtgatcatcgctaacaactgcccgccccttcgtaagtctgaaattgagtactatgctatgctggccaaggtcactgtccaccacttccatggaaacaatgtcgaccttggaactgcctgtggtaaatactttcgggtctgctgcctcagcattattgatcctggtgattctgatatcatcaagactacaccgggtgagcagtaaagaagcccctgcagtagggggatcttactgcatttgttcttctgtcttgttaaacagcatttacctgctagtaaactgagttattcggaacattgtcttgaattgaatttttgctccggtgttgacacttaaatcgagctttagcttaaaaaaaaaaaaaaaa

SEQ ID NO: 6974 - protein, 112 aa, Zea mays
  misc_feature: Ceres CLONE ID no. 1287248
  misc_feature: Ceres CDNA ID no. 36707054
  misc_feature (12)..(106): Pfam Name: Ribosomal_L7Ae PFAM Desc: Ribosomal protein L7Ae/L30e/S12e/Gadd45 family
  misc_feature: Homolog of GI Number: 2668750 NR Desc: ribosomal protein L30
  misc_feature: Homolog of GI Number: 50511371 NR Desc: putative 60S ribosomal protein L30
  misc_feature: Homolog of GI Number: 2879811 NR Desc: ribosomal protein L30
  misc_feature: Homolog of GI Number: 57471710 NR Desc: ribosomal protein L30
  misc_feature: Homolog of GI Number: 71042078 NR Desc: Chain C
  misc_feature: Homolog of GI Number: 55297497 NR Desc: putative ribosomal protein L30
  misc_feature: Homolog of GI Number: 6984132 NR Desc: 60S ribosomal protein L30
  misc_feature: Homolog of GI Number: 34909198 NR Desc: putative 60S ribosomal protein L30
  misc_feature: Homolog of GI Number: 21280849 NR Desc: putative ribosomal protein L30
  misc_feature: Homolog of GI Number: 83003184 NR Desc:  similar to ribosomal protein L30
MVATKKTKKSTDNINNKLQLVMKSGKYTLGYKTVLRTLRNSKSKLVIIANNCPPLRKSEIEYYAMLAKVTVHHFHGNNVDLGTACGKYFRVCCLSIIDPGDSDIIKTTPGEQ

SEQ ID NO: 6975 - DNA, 735 bp, Zea mays
  misc_feature: Ceres CLONE ID no. 1287327
  misc_feature: Ceres CDNA ID no. 25445696
  CDS (93)..(449): REFERENCED BY SEQ ID NO: 6976
accccccattcgaacgccggagctcgacaaggacgaccgacgacgcacgcggagatccggcgtactgcaaattttgaaaactgaactgtaagatggcatcagcagagctttcccgtgaggaaaatgtgtacatggcgaagctcgctgagcaggcggagaggtacgaggagatggttgagttcatggagaaggtagccaagactgttgactcggaggagctcactgtggaggagcgaaacctcttgtctgttgcatacaagaacgtcattggagcccgccgcgcctcatggcgcatcatctcctccatcgagcagaaggaggagggccgaggcaatgaggaccgagtaacactcatcaaggattatcgtggcaagattgagactgagctgaccaagatctgtgatggcatcctcaagctgcttgagacccatcttgtgcctagaaactagtagctagtgtttgctgctgtcgaatgacactatgcaatgtgatctggaacctggtttcttgggtgcgacgcttgtagccgtgttatgactgtcgtccgtaaaatttgggggctccccgtaagggatgctgcctggcaaggcctcggtgtcccacctcgtctgtggcgtggggcgctggagcccggtctggttgggttgggaagccctttaaactgttgtcacttgcattttaccttttccatcgctgtttattgtgagtggtcctatatcaaaaaaaaaaaaaaaa

SEQ ID NO: 6976 - protein, 118 aa, Zea mays
  misc_feature: Ceres CLONE ID no. 1287327
  misc_feature: Ceres CDNA ID no. 25445696
  misc_feature (8)..(118): Pfam Name: 14 PFAM Desc: 14
  misc_feature: Homolog of GI Number: 998430 NR Desc: GF14
  misc_feature: Homolog of GI Number: 998432 NR Desc: GF14
  misc_feature: Homolog of GI Number: 50924834 NR Desc: OSJNBa0072F16.20
  misc_feature: Homolog of GI Number: 52548256 NR Desc: 14
  misc_feature: Homolog of GI Number: 2266662 NR Desc: 14
  misc_feature: Homolog of GI Number: 1070354 NR Desc: Hv14
  misc_feature: Homolog of GI Number: 7271253 NR Desc: 14
  misc_feature: Homolog of GI Number: 6179981 NR Desc: 14
  misc_feature: Homolog of GI Number: 2921512 NR Desc: GF14 protein
  misc_feature: Homolog of GI Number: 8515888 NR Desc: 14
MASAELSREENVYMAKLAEQAERYEEMVEFMEKVAKTVDSEELTVEERNLLSVAYKNVIGARRASWRIISSIEQKEEGRGNEDRVTLIKDYRGKIETELTKICDGILKLLETHLVPRN

SEQ ID NO: 6977 - DNA, 870 bp, Zea mays
  misc_feature: Ceres CLONE ID no. 1287691
  misc_feature: Ceres CDNA ID no. 36707055
  CDS (61)..(720): REFERENCED BY SEQ ID NO: 6978
atttttcgcccgccgcccccagtcccgatccgaagctgtgcctcgtaccatttcgatccaatggcgccgacgtcgaagctgtcgacgggcatcaagcgcgcttcgcggtcgcacgcgtaccatcgccgtgggctgtgggccatcaaggccaagaacggcggcgccttccccaaggccgacaaggccgccgccgccgtggaacccaagttctaccctgccgacgacgtcaagccccgcgttcccagcacccgcaagcctaagcctaccaagctcaggtcgagcatcacgcctgggacggtgctgatcctcctcgcagggcgcttcatggggaagagagtggtgtttctcaagcagctcaagtccggcctgctccttatctctgggcctttcaagatcaatggagtaccgatccgccgtgtgaaccagacctatgtcattgctacatcaaccaaagttgacatctctggtgttgatgtcgccaagtttgatgacaagtactttgccagggagaagaagcagaaggtgaagaagaccgagggcgaactttttgagacagaaaaggaggcatccaagtcactgcctgacttcaagaaggatgaccagaaggctgtggattctgctctgatcaaggctattgaggctgttccggagctgaaaacctatcttggcgcccggttctctctcagggatggtgacaagccccatgagatggtcttctaagctcttagttttggagttcggaggaagctgttttgtctgtgttcttgtacttctgagttttgtaccagtagcgaatgtttcattgtggttgaagtcttcctgccaaatattataagatctaagaaagttctatcaaaaaaaaaaaaaaaa

SEQ ID NO: 6978 - protein, 219 aa, Zea mays
  misc_feature: Ceres CLONE ID no. 1287691
  misc_feature: Ceres CDNA ID no. 36707055
  misc_feature: null
  misc_feature: Useful for making plants with modulated nitrogen use efficiency
  misc_feature (1)..(49): Pfam Name: Ribosomal_L6e_N PFAM Desc: Ribosomal protein L6
  misc_feature (112)..(219): Pfam Name: Ribosomal_L6e PFAM Desc: Ribosomal protein L6e
  misc_feature: Homolog of GI Number: 50925014 NR Desc: OSJNBb0022F23.11
  misc_feature: Homolog of GI Number: 50909993 NR Desc: putative 60S ribosomal protein L6
  misc_feature: Homolog of GI Number: 57471700 NR Desc: ribosomal protein L6
  misc_feature: Homolog of GI Number: 21592925 NR Desc: putative 60S ribosomal protein L6
  misc_feature: Homolog of GI Number: 27311965 NR Desc: putative 60S ribosomal protein L6
  misc_feature: Homolog of GI Number: 19539 NR Desc: ribosomal protein YL16
  misc_feature: Homolog of GI Number: 9795602 NR Desc: Putative  60S ribosomal protein L6
  misc_feature: Homolog of GI Number: 21593910 NR Desc: 60S ribosomal protein L6
  misc_feature: Homolog of GI Number: 7208784 NR Desc: 60S ribosomal protein L6
  misc_feature: Homolog of GI Number: 57999636 NR Desc: 60S ribosomal protein L6 CgRPL6
MAPTSKLSTGIKRASRSHAYHRRGLWAIKAKNGGAFPKADKAAAAVEPKFYPADDVKPRVPSTRKPKPTKLRSSITPGTVLILLAGRFMGKRVVFLKQLKSGLLLISGPFKINGVPIRRVNQTYVIATSTKVDISGVDVAKFDDKYFAREKKQKVKKTEGELFETEKEASKSLPDFKKDDQKAVDSALIKAIEAVPELKTYLGARFSLRDGDKPHEMVF

SEQ ID NO: 6979 - DNA, 599 bp, Zea mays
  misc_feature: Ceres CLONE ID no. 1287697
  misc_feature: Ceres CDNA ID no. 29191437
  CDS (141)..(407): REFERENCED BY SEQ ID NO: 6980
aatctctgcgccgccgctgttctgtgtcgttcttcgcccgccgtcgttccgtgtcgttcttagcccgccgccgtttgtagtcgcggcttcatcgtcgcgtaccgatccccaccgcccccactgccactagaggtgtctacatgtctcagaacaacccctcccagcttctcccctcagagctgatcgaccggtgcatcgggtccaagatctgggtgatcatgaagggggacaaggagctcgttggcaccctctgcggctttgatgtctacgtcaatatggtgctggaggacgtcaccgagtatgaatacactgctgaagggcgccgtattacaaaacttgaccagatcctcctgaacggcaacaacatagccattttggttcctggtggttcaccacctgatgtgtaatgaacttttgcttcccagagtatcattcgtggtgaaggcagccccgtgaactttgcaccttatattttttaatcattggatgtttcctcatctcggatgtgtttctcctgttcatgattataccgaagtttattgttaactctgtcagcatggaatctctcctctgtattgaacttaaaaaaaaaaaaaaaa

SEQ ID NO: 6980 - protein, 88 aa, Zea mays; identical to SEQ ID NO: 346
  misc_feature: Ceres CLONE ID no. 1287697
  misc_feature: Ceres CDNA ID no. 29191437
  misc_feature (13)..(81): Pfam Name: LSM PFAM Desc: LSM domain
  misc_feature: Homolog of GI Number: 54287604 NR Desc: putative snRNA associated protein
  misc_feature: Homolog of GI Number: 9758886 NR Desc: U6 snRNA
  misc_feature: Homolog of GI Number: 62647334 NR Desc:  similar to LSM5 homolog
  misc_feature: Homolog of GI Number: 68394601 NR Desc:  similar to LSM5 homolog
  misc_feature: Homolog of GI Number: 73967234 NR Desc:  similar to LSM5 homolog
  misc_feature: Homolog of GI Number: 50732968 NR Desc:  similar to LSM5 homolog
  misc_feature: Homolog of GI Number: 51873770 NR Desc: MGC85219 protein
  misc_feature: Homolog of GI Number: 72143300 NR Desc:  similar to LSM5 homolog
  misc_feature: Homolog of GI Number: 63706049 NR Desc:  similar to LSM5 homolog
  misc_feature: Homolog of GI Number: 21358059 NR Desc: CG6610

SEQ ID NO: 6981 - DNA, 636 bp, Zea mays
  misc_feature: Ceres CLONE ID no. 1287975
  misc_feature: Ceres CDNA ID no. 29191438
  CDS (32)..(376): REFERENCED BY SEQ ID NO: 6982
aagtccacaaccgtaccagcaccaccgcgccatggcgtcctccgccgatcccgatgccgccacgccaccatccgcgccgcagccggagcccgcacggaaggcagtccgcgtggtggtgaaggggagcgtcacgggggtggggttccgcgactggacggcgtccacggccgagtcgctcggtctcgccggctgggtccgcaaccgccgtgacggcagtgtggaggccctcctctccggagaccccgcgaagatcgaagacatgataacccgccgcctccccgtcggccccccagccgccaccgtcaccgccgtcgtcccgtccacggccgagcccgtggatccgtccaccgggttcgagatcaagttcaccgtctgatccccccgtcccgcgacaggttcgcgtctcgccgcgcgttcttggacggtctattcgtgcactactactgcgaatctgcgattaaagatcagaggcgacatctaatgtaccgtagtctgtttacctgaaaagctccgctatctgcttgggttggaattcatgccagattgtgggtgcaaacctgtttccttactacctagtgtccaagtcggaatattaataagctatgccaggattcagatcgaaaaaaaaaaaaaaaa

SEQ ID NO: 6982 - protein, 114 aa, Zea mays
  misc_feature: Ceres CLONE ID no. 1287975
  misc_feature: Ceres CDNA ID no. 29191438
  misc_feature (21)..(110): Pfam Name: Acylphosphatase PFAM Desc: Acylphosphatase
  misc_feature: Homolog of GI Number: 29028786 NR Desc: At5g03370
  misc_feature: Homolog of GI Number: 77691789 NR Desc: Acylphosphatase
  misc_feature: Homolog of GI Number: 45510165 NR Desc: COG1254: Acylphosphatases
  misc_feature: Homolog of GI Number: 69930730 NR Desc: Acylphosphatase
  misc_feature: Homolog of GI Number: 27380376 NR Desc: putative acylphosphatase
  misc_feature: Homolog of GI Number: 68172920 NR Desc: Hydrogenase maturation protein HypF
  misc_feature: Homolog of GI Number: 53804353 NR Desc:
  misc_feature: Homolog of GI Number: 67987177 NR Desc: 4Fe
MASSADPDAATPPSAPQPEPARKAVRVVVKGSVTGVGFRDWTASTAESLGLAGWVRNRRDGSVEALLSGDPAKIEDMITRRLPVGPPAATVTAVVPSTAEPVDPSTGFEIKFTV

SEQ ID NO: 6983 - DNA, 841 bp, Zea mays
  misc_feature: Ceres CLONE ID no. 1288003
  misc_feature: Ceres CDNA ID no. 25446030
  CDS (3)..(626): REFERENCED BY SEQ ID NO: 6984
aatcgaaaacccaccgcaccctttcatcagcctgcctgtccactgttggcttggtgacttcctccgctccgctccgctcccctccgctcccgaacggtcgatctttgcatggcagcagcagctggctccaaggggcgggcgatcgctggaagcttcgtcagccgcgtcctcgccggcaaggccgcctcgccgaggagggccgtgcacgcctcggcgtacgacaagaacctggaggaccaggtgcgcccggcgttcgtgccggacgatgtgatcggcagcgccgggagccccgacaagtactggagcccccaccccaagaccggcgtcttcggcccggcggcggtggaccccaagctggccgctggtggcgcgccggacgccggcgcggatgctgcaggaggcacggtgctggaccagaaggtgtggttccgcccgctcgaggacgtcgagaagccgccccccgccgcgtgagccgcgcggcgctgctaggccagcccacactgctgctcgctcataaaaagggcggcgggagagcctggcagtggcaggcactctgctcgtgctcggccgggctgggctccctgcttatatcactgcaatattatactactagtagtggtgcttgatagcagtgtgtggctgtgctaataccagtataatactggttctactataatacagtcgtatcaggcatggcgtgcatcaggactggttgtgatagtagcaacgtgatgctcgtgcctgtaataagaacaagcaggcgatgtgtgcctgtgatgtaccggtgtcgtcagtgttataagtacttgggtcaatggtttctgcaaaaaaaaaaaaaaaa

SEQ ID NO: 6984 - protein, 120 aa, Zea mays; identical to SEQ ID NO: 678
  misc_feature: Ceres CLONE ID no. 1288003
  misc_feature: Ceres CDNA ID no. 25446030
  misc_feature: Homolog of GI Number: 50900502 NR Desc: OSJNBa0093F12.14
  misc_feature: Homolog of GI Number: 32395571 NR Desc: seed specific protein Bn15D1B

SEQ ID NO: 6985 - DNA, 889 bp, Zea mays
  misc_feature: Ceres CLONE ID no. 1288171
  misc_feature: Ceres CDNA ID no. 36591085
  CDS (69)..(794): REFERENCED BY SEQ ID NO: 6986
atcaaccatattattgagaccaacaagcaacatagaaagtggaatacagtagcaacaatagagcaacaatggcggccaagatattttccatccttatgctccttgctctttctgcatgtgttgctaacgcgaccatttttcctcaatactcacaagctcctatagctgcccttcttcccccataccttccatcaatgaccgcttcagtatgtgaaaacccagcccttcaaccctacaggctccaacaagcaatcgcaacaagcaacttacctttatcacccctgttctttcaacaatcgccagccctatctttggtgcagtcattggtacaaaccatcagggcacaacagctgcagcaactcgtgctaccagtgatcagccaagtagctctggcaaacctttctccctactctcagcaacaacaatttcttccattcaaccaactgtctacactgaaccctgctgcttatttgcagcaacaacaactactaccattcagccagctagctactgcctactctcagcagcaacaatttcttccatttaaccaattcgccgcactgaacccctctgcttatttccagcagcaaatactactaccatttggccagctagctacaacaagccccgcttccttcttgacacaacaacaattgcttccgttctaccagcagtttgtggctaaccccgcaacccttttacaactgcaacagttgctgccctttgtccaacttgctttgacaaacccagcagccttctaccaacaacacatcattggcggtgccctcttttagattgcttattagttgtcattcaataatgaagttttttggctgatgtatgtggcctcctagaaataagaagttatatttccaaaaaaaaaaaaaaa

SEQ ID NO: 6986 - protein, 241 aa, Zea mays
  misc_feature: Ceres CLONE ID no. 1288171
  misc_feature: Ceres CDNA ID no. 36591085
  misc_feature: null
  misc_feature: Useful for making plants with modulated nitrogen use efficiency
  misc_feature (1)..(97): Pfam Name: Zein PFAM Desc: Zein seed storage protein
  misc_feature: Homolog of GI Number: 7442067 NR Desc: 19K zein precursor
  misc_feature: Homolog of GI Number: 72310 NR Desc: 19K zein precursor
  misc_feature: Homolog of GI Number: 224508 NR Desc: zein A20
  misc_feature: Homolog of GI Number: 16305129 NR Desc: 19kD alpha zein B3
  misc_feature: Homolog of GI Number: 40287950 NR Desc: mutant 19 kDa S15P alpha
  misc_feature: Homolog of GI Number: 168699 NR Desc: zein
  misc_feature: Homolog of GI Number: 224513 NR Desc: zein M6
  misc_feature: Homolog of GI Number: 22538 NR Desc: zein precursor
  misc_feature: Homolog of GI Number: 168697 NR Desc: zein
  misc_feature: Homolog of GI Number: 22583 NR Desc: alpha
MAAKIFSILMLLALSACVANATIFPQYSQAPIAALLPPYLPSMTASVCENPALQPYRLQQAIATSNLPLSPLFFQQSPALSLVQSLVQTIRAQQLQQLVLPVISQVALANLSPYSQQQQFLPFNQLSTLNPAAYLQQQQLLPFSQLATAYSQQQQFLPFNQFAALNPSAYFQQQILLPFGQLATTSPASFLTQQQLLPFYQQFVANPATLLQLQQLLPFVQLALTNPAAFYQQHIIGGALF

SEQ ID NO: 6987 - DNA, 901 bp, Zea mays
  misc_feature: Ceres CLONE ID no. 1288202
  misc_feature: Ceres CDNA ID no. 36591161
  CDS (76)..(630): REFERENCED BY SEQ ID NO: 6988
tccataggcagacgccgcgctcccccaacgccgctccgccgaccccagtcatatctcccgcccccagctgaggcaatggggtcctcgtcctcgccgtcgccgccgccgccgcccatgatcgggcgggccgggaacctcaccgtcttcatcacgccgccgtctcctgctagcacgccgcggggcgctttgcgcacgccgccgcccgagtctccgcgctcggatttctctacacccacccgacagaggatagccccgtcgccctccccttctccctcgccgcagaaacacgagagcccgttcgcggcgcctgcggtggtgttcaccccgcccccgccgtcggctcctgtgaaggtcgcgccgccgccggtgcaggtgccgccgccgcagtacgagaaggcgtccgcgggaggcaagcacgacggatcggcgtttggcttcttctgggacgccgtcgcgcgcgtccaggaagcgcacgccagcctcgacgagtacatggctacctggttcgggttggatcagtccaagtaccagtgggcgctcaacgactactacgaggccacaggcaaggacgtggattgtgtaaagggtagtaagctgaaggagcttactactaaagtgcagaaagtctgaaaaaaaagcaactttgttttgtgttgaagaggtgtagcttgtagcgtatgtctggagaagcatgttccattagttacattttggtgggggccttcttgaaaagtggccatctctgcttcgccaggcagttggacaactggaggccgcggttgaatcaaaggagcggccgttgtttcgttccggtgtttaggatctgctgtaatcctaaggttatgtcaaaacacagaatgggtcttatttgcaatggttctaatcaaaaaaaaaaaaaaaa

SEQ ID NO: 6988 - protein, 184 aa, Zea mays
  misc_feature: Ceres CLONE ID no. 1288202
  misc_feature: Ceres CDNA ID no. 36591161
  misc_feature: Homolog of GI Number: 50908007 NR Desc: hydroxyproline
  misc_feature: Homolog of GI Number: 50922385 NR Desc: OSJNBa0019J05.14
  misc_feature: Homolog of GI Number: 55740439 NR Desc: hydroxyproline
  misc_feature: Homolog of GI Number: 22330504 NR Desc: arabinogalactan
  misc_feature: Homolog of GI Number: 21992 NR Desc: extensin
  misc_feature: Homolog of GI Number: 600118 NR Desc: extensin
  misc_feature: Homolog of GI Number: 4033606 NR Desc: Extensin
  misc_feature: Homolog of GI Number: 25056007 NR Desc: extensin
  misc_feature: Homolog of GI Number: 7488999 NR Desc: extensin class I
MGSSSSPSPPPPPMIGRAGNLTVFITPPSPASTPRGALRTPPPESPRSDFSTPTRQRIAPSPSPSPSPQKHESPFAAPAVVFTPPPPSAPVKVAPPPVQVPPPQYEKASAGGKHDGSAFGFFWDAVARVQEAHASLDEYMATWFGLDQSKYQWALNDYYEATGKDVDCVKGSKLKELTTKVQKV

SEQ ID NO: 6989 - DNA, 851 bp, Zea mays
  misc_feature: Ceres CLONE ID no. 1288242
  misc_feature: Ceres CDNA ID no. 40351736
  CDS (181)..(615): REFERENCED BY SEQ ID NO: 6990
ggccgaaccagagccctgtcccaacccgaccacctctcttctctacggcgcgaggaagggcagcgcccaccgcagcgtcggcgggaaccgggcctcgctctccccatctcttcggctttctggaatcacatttcttaagaactatctgttggagagctaaactaggctcttgttcatattatggatcagcaagctatgattgatgctgattttcttgaaccaactgtactcttagatgagacacattaccaggaggggtacagaaatggctacaatgatggtttggcatctggaaaggaagaggggaggcaggttggtttaaagatgggtttccaggtcggtgaagaactgggtttctttcacggctgtctggatgtgtggacgtctgcaattctcattgatcagaatgccttcacagctcgggtcaggaagaatattgagcaactggctgcactggtgggcagctatccgctgtccgatccggagaatgaacaaattcgagacgtgatggagaagataaggctgaaattcagggtcatcactgcaagcttaggggtgaagttagagtatgaagggcaccccaaatcatctaaacaggatgctgaggatctgtgagcggtgattgaaattacattttagtttctccgcccttgctgtttaaagctcttcaactcattggcatcatggggaactgtcgtgagacatcaatggtcagagtctgaccataaccacatatatagttttaacaatgtctcaagttttgtgttattacctgttgtctgctgtctgccatatgtaatagtttcctttcacaagtcaaaagcacttccttcccaaaaaaaaaaaaaaaa

SEQ ID NO: 6990 - protein, 144 aa, Zea mays
  misc_feature: Ceres CLONE ID no. 1288242
  misc_feature: Ceres CDNA ID no. 40351736
MDQQAMIDADFLEPTVLLDETHYQEGYRNGYNDGLASGKEEGRQVGLKMGFQVGEELGFFHGCLDVWTSAILIDQNAFTARVRKNIEQLAALVGSYPLSDPENEQIRDVMEKIRLKFRVITASLGVKLEYEGHPKSSKQDAEDL

SEQ ID NO: 6991 - DNA, 627 bp, Zea mays
  misc_feature: Ceres CLONE ID no. 1288303
  misc_feature: Ceres CDNA ID no. 25445857
  CDS (3)..(602): REFERENCED BY SEQ ID NO: 6992
ccggccggtgttggtttaagcttgtattcccacactctgtcgcagcgtcgcccgtcgccgctgagatcctagctaggaagaaatggagctctctcgcaagctcttcacggccgtcctcctcgtcatgctgctgctgctgtccgcagaggtcgggccggtggcggtggcggaggcgcggacgtgccagtcgcagagccacaggttccggggcccctgcctccgccggtccaactgcgccaacgtctgcaggaccgaggggttccccggcggcaggtgccgcggcttccgccgccgctgcttctgcaccacgcactgccactgattcgctcgcccagcggccggctggcgtcgccgtcgatcgcgcgcgtcgcgaccagtccatggctccatgcatgaataacaagggtgtgcggtttgtgatgccaaattgtatcctctcgtcgtgtgttgaagcgttcgatcgtcggtctagtagtgtgcctgtgagcagcggcgtgctgttgtacgtacgtctgcctctgttgttccatgtttcgggattttccgtagcaaatgcatgcgtcgagatctactccgaaagaaattcgatagaattcgcataatttccattcaaaaaaaaaaaaaaaa

SEQ ID NO: 6992 - protein, 79 aa, Zea mays
  misc_feature: Ceres CLONE ID no. 1288303
  misc_feature: Ceres CDNA ID no. 25445857
  misc_feature (32)..(78): Pfam Name: Gamma PFAM Desc: Gamma
  misc_feature: Homolog of GI Number: 16225423 NR Desc: putative gamma
  misc_feature: Homolog of GI Number: 32400845 NR Desc: proteinase inhibitor Rgpi9
  misc_feature: Homolog of GI Number: 7939581 NR Desc: thionin like protein
  misc_feature: Homolog of GI Number: 8099184 NR Desc: defensin SD2
  misc_feature: Homolog of GI Number: 50948925 NR Desc: ESTs AU069800
  misc_feature: Homolog of GI Number: 13878185 NR Desc: putative protease inhibitor II
  misc_feature: Homolog of GI Number: 24306004 NR Desc: defensin EGAD1
  misc_feature: Homolog of GI Number: 3915102 NR Desc: Gamma
  misc_feature: Homolog of GI Number: 533692 NR Desc: protease inhibitor
  misc_feature: Homolog of GI Number: 28624546 NR Desc: defensin protein 1
MELSRKLFTAVLLVMLLLLSAEVGPVAVAEARTCQSQSHRFRGPCLRRSNCANVCRTEGFPGGRCRGFRRRCFCTTHCH

SEQ ID NO: 6993 - DNA, 870 bp, Zea mays
  misc_feature: Ceres CLONE ID no. 1288335
  misc_feature: Ceres CDNA ID no. 40351737
  CDS (31)..(759): REFERENCED BY SEQ ID NO: 6994
accgatcccattccccaggcccaagcgcccatggatcccaagcccgacgccagcgcgcccgccgcggtgccagcggagcacgcggcgtacccgaggctgtcaccggaggacatcgccccgccgccgccgcctgtcgtgccgccgtccggcgccaacccctacgtgctctccgccccgtcgcctaacccgcccgccaagagcgctagggagaatctgagggagatgttcggcatggtggggaagaagttcaacgaggccgcgcgcaagaccgagggcatcgccggcgacgtctggcagcatctgaaaactggacccagcatcactgatactgccatggggaggattgctcagatatccaaggttatatctgagggtggctacgacaagatatttcagcagacttttgagtgctcgcctgatgagaagctcaacaaggcatatgtgtgctacctatcaacgtcgcatggaccaatcatgggcgtcctgtatctctcgactgtcaagattgcattcggtagcgacagccctgtgaaatatgtgactgagaacaacaaaactgagtcatccttttataaggttgttttaccccttcatcacctgagatcagttactcccacagcaagtcagcaaaaccctgcagagaggtacattcaggtcgtttcagtcgacaactacgagttctggttcatgggtttcgtgaactatgatagcgctgtaaagaatcttcaggagtctgttcgagttgttcacggggcctagaggttgcccatcacttttcctctatgtggatgtagtatgcccgtgtaaatgtatttgtgcatggcacctgtaaagttgtgtgttgaaattggtacaaaaaaaaaaaaaaaa

SEQ ID NO: 6994 - protein, 141 aa, Zea mays
  misc_feature: Ceres CLONE ID no. 1288335
  misc_feature: Ceres CDNA ID no. 40351737
  misc_feature (18)..(96): Pfam Name: GRAM PFAM Desc: GRAM domain
MGRIAQISKVISEGGYDKIFQQTFECSPDEKLNKAYVCYLSTSHGPIMGVLYLSTVKIAFGSDSPVKYVTENNKTESSFYKVVLPLHHLRSVTPTASQQNPAERYIQVVSVDNYEFWFMGFVNYDSAVKNLQESVRVVHGA

SEQ ID NO: 6995 - DNA, 1004 bp, Zea mays
  misc_feature: Ceres CLONE ID no. 1288363
  misc_feature: Ceres CDNA ID no. 25445697
  CDS (69)..(869): REFERENCED BY SEQ ID NO: 6996
atcacctataatattttgagcattcagaaacacaccaagcgaagcacattagcaacaacctaacaacaatggctaccaagatattatccctccttgcgcttcttgcgctttttgcgagcgcaacaaatgcgttcattattccacaatgctcacttgctccaagttccattattacacagttcctcccaccagttacttcaatgggcttcgaacacccagctgtgcaagcctataggctacaacaagcaattgcggcgagcgtcttacaacaaccaatttcccagttgcaacaacaatccttggcacatctaacaatacaaaccatcgcaacgcaacagcaacaacaattcctaccagcactgagccacctagccatggtgaaccctgccgcctacttgcaacagcagttgcttgcatcaaacccacttgctctggcaaacgtagttgcaaaccagccacaacaacagctgcaacagtttctgccagcgctcagtcaactagccatggtgaaccctgtcgcctacctacaacagcaacaactgctttcatctagcccgctcgctgtagccaatgcacctacatacctgcaacaacaattgttgcaacagattgtaccagctctgactcagctagttgtggcaaaccctgctgcctacttgcaacagctgcttccattcaaccaactgactatgtcgaactctgctgcgtacctacaacagcgacaacagttacttaatccactagcagtggctaacccattggtcgctgccttcctacagcagcaacaattgctgccatacaaccagttctctttgataaaccctgtcttgtcgaggcagcaacccatcgttggaggtgccatcttttagattacatatgagatgtactcgataatggtgccctcattccggcatgtgtttcctagaaataatcaatatattgattgagatttatctcaaaaaaaaaaaaaataaaaaaaaaaaaaaataaaaaaaaaaaaaaaa

SEQ ID NO: 6996 - protein, 266 aa, Zea mays
  misc_feature: Ceres CLONE ID no. 1288363
  misc_feature: Ceres CDNA ID no. 25445697
  misc_feature (1)..(266): Pfam Name: Zein PFAM Desc: Zein seed storage protein
  misc_feature: Homolog of GI Number: 22216 NR Desc: 22kD zein
  misc_feature: Homolog of GI Number: 2832243 NR Desc: 22
  misc_feature: Homolog of GI Number: 13606088 NR Desc: azs22
  misc_feature: Homolog of GI Number: 72307 NR Desc: 22K zein precursor
  misc_feature: Homolog of GI Number: 100939 NR Desc: zein precursor
  misc_feature: Homolog of GI Number: 13775591 NR Desc: azs22
  misc_feature: Homolog of GI Number: 468517 NR Desc: zein
  misc_feature: Homolog of GI Number: 141615 NR Desc: Zein
  misc_feature: Homolog of GI Number: 13606090 NR Desc: azs22
  misc_feature: Homolog of GI Number: 13606091 NR Desc: zp22/6
MATKILSLLALLALFASATNAFIIPQCSLAPSSIITQFLPPVTSMGFEHPAVQAYRLQQAIAASVLQQPISQLQQQSLAHLTIQTIATQQQQQFLPALSHLAMVNPAAYLQQQLLASNPLALANVVANQPQQQLQQFLPALSQLAMVNPVAYLQQQQLLSSSPLAVANAPTYLQQQLLQQIVPALTQLVVANPAAYLQQLLPFNQLTMSNSAAYLQQRQQLLNPLAVANPLVAAFLQQQQLLPYNQFSLINPVLSRQQPIVGGAIF

SEQ ID NO: 6997 - DNA, 689 bp, Zea mays
  misc_feature: Ceres CLONE ID no. 1288399
  misc_feature: Ceres CDNA ID no. 29191439
  CDS (74)..(526): REFERENCED BY SEQ ID NO: 6998
actcatacatttcgactctcaactcccaaggtccctttttttttctcgatctggaagcgccgcagtagcagccatggacgtgagcggagcaggcggtaaggcgaagaagggcgcggcggggcgcaaggccggcgggccgacgaagaagtcggtgtcgcggtcctccagggccgggctgcagttccccgtcagccgcgtcgggcggtacctcaaaaagggccggtacgcgcagcgtgtaggcacgggtgcccccgtctacctcgccgccgtcctggagtacctcgcggccgaggtgctcgagctcgccggcaacgcggcaagggacaacaagaagacgcgcatcatcccgcgccacgtgctcctcgccatccgcaacgacgaggagctcggcaagctgctggccggcgtcaccatcgcccacggcggcgtcctccccaacatccacactgtgctcctccccaagaaggtggccgagaaggcggccaaggagcccaagaaggccgctaagtcccccaagaaggcgtagagtgatctcctgtcttagaacaatattaccattagcaatcgtgcagttagactagatcatgtttagtgtagatccgcaatgttcttgtccctgcagccatctggaacggtttatctagtacatccgtgcactttccttgctaattgcaaaaaaaaaaaaaaaa

SEQ ID NO: 6998 - protein, 150 aa, Zea mays; identical to SEQ ID NO: 104
  misc_feature: Ceres CLONE ID no. 1288399
  misc_feature: Ceres CDNA ID no. 29191439
  misc_feature (29)..(104): Pfam Name: Histone PFAM Desc: Core histone H2A/H2B/H3/H4
  misc_feature: Homolog of GI Number: 729671 NR Desc: Histone H2A
  misc_feature: Homolog of GI Number: 34914498 NR Desc: putative histone H2A
  misc_feature: Homolog of GI Number: 47026919 NR Desc: histone H2A
  misc_feature: Homolog of GI Number: 47026912 NR Desc: histone H2A
  misc_feature: Homolog of GI Number: 7649159 NR Desc: histone H2A
  misc_feature: Homolog of GI Number: 122006 NR Desc: Histone H2A
  misc_feature: Homolog of GI Number: 121982 NR Desc: Histone H2A.2.2
  misc_feature: Homolog of GI Number: 50931693 NR Desc: putative histone H2A
  misc_feature: Homolog of GI Number: 121974 NR Desc: Histone H2A.2.1
  misc_feature: Homolog of GI Number: 68441405 NR Desc:  similar to histone H2A

SEQ ID NO: 6999 - DNA, 878 bp, Zea mays
  misc_feature: Ceres CLONE ID no. 1288616
  misc_feature: Ceres CDNA ID no. 25445698
  CDS (89)..(619): REFERENCED BY SEQ ID NO: 7000
actactctctctctctctgcctgcaaagctgcttgatccatcatcgatcacatcactccaccagccgcagcgcacgaacgtacgactcatggcagatcgcgaccgcagcggcatctacggcggcggcgcctacgggcagcagcaggggggcggccgcccgatgggtgagcaggtgaagggcatgatccacgacaaggggccgacggcgtcccaggcgctgacggtggcgacgctgttccctctgggcgggctgctcctggtgctgtcgggcctggcgctggcggcctccacggtggggctggccctggccacgcccgtgttcctgctcttcagccccgtgctcgtccccgccgcgctgctcatcggcacggccgtcgcggggttcctcacgtcgggcgcgctggggctcggcggcctgtcctcgctcacgtgcctcgccaacacggcgcggcaggcgttccagcgcaccccggactacgtcgaggaggcgcgccgcaggatggcggaggccgcggcgcacgcgggccacaagaccgcgcaggccgggcacggcatccagagcaaggcgcaggaggccggtgctggcactggcgccggcggcggcaggacttcctcgtaaataagcaaatcatccatggatgcgtgcgtgtcaatgtcagcagggtcgtcgtggaatgctcttctctgtacgtgggtaaccgtcttttggtcgtcttccccgagtgcgtgataaatatcctggtgttcgtcgtgtgtggtgctgccctaggctggggcctggggtcggctgtgtaccggtatctgttcatcgccgctccgtcgcgttcggagatgtgaataagtgatgtgaaggttaagtttcaaaaaaaaaaaaaaaa

SEQ ID NO: 7000 - protein, 176 aa, Zea mays; identical to SEQ ID NO: 6718
  misc_feature: Ceres CLONE ID no. 1288616
  misc_feature: Ceres CDNA ID no. 25445698
  misc_feature (39)..(156): Pfam Name: Oleosin PFAM Desc: Oleosin
  misc_feature: Homolog of GI Number: 1076818 NR Desc: oleosin 17
  misc_feature: Homolog of GI Number: 100904 NR Desc: oleosin 18
  misc_feature: Homolog of GI Number: 50917995 NR Desc: oleosin
  misc_feature: Homolog of GI Number: 4102969 NR Desc: 18 kDa oleosin
  misc_feature: Homolog of GI Number: 963062 NR Desc: high molecular weight oleosin
  misc_feature: Homolog of GI Number: 82051 NR Desc: lipid body carroti|259453|gb|AAB24078.1| lipid body membrane protein
  misc_feature: Homolog of GI Number: 9963897 NR Desc: oleosin
  misc_feature: Homolog of GI Number: 10880961 NR Desc: 19 kDa oleosin
  misc_feature: Homolog of GI Number: 22651523 NR Desc: oleosin
  misc_feature: Homolog of GI Number: 61658202 NR Desc: OLE

SEQ ID NO: 7001 - DNA, 752 bp, Zea mays
  misc_feature: Ceres CLONE ID no. 1289072
  misc_feature: Ceres CDNA ID no. 25445699
  CDS (64)..(600): REFERENCED BY SEQ ID NO: 7002
atcatcatccaatccagatcagcaaagcggcagtgcgtagagaggatcgtcgaacagaacagcatgaagatggtcatcgttctcgtcgtgtgcctggctctgtcagctgccagcgcctctgcaatgcagatgccctgcccctgcgcgaggctgcagggcttgtacggcgctggcgccggcctgacgacgatgatgggcgccggcgggctgtacccctacgcggagtacctgaggcagccgcagtgcagcccgctggcggcggcgccctactacgccgggtgtgggcagccgagcgccatgttccagccgctccggcaacagtgctgccagcagcagatgaggatgatggacgtgcagtccgtcgcgcagcagctgcagatgatgatgcagcttgagcgtgccgctgccgccagcagcagcctgtacgagccagctctgatgcagcagcagcagcagctgctggcagcccagggtctcaaccccatggccatgatgatggcgcagaacatgccggccatgggtggactctaccagtaccagctgcccagctaccgcaccaacccctgtggcgtctccgctgccattccgccctactactgattcatgatatttgggaaatctcctctatccatctctctctatctatatatgtaataatgcagtaagacgacacacattatcatgtgtggtatgaccaataatatatgcatggtcataataaagttttggttttaataaaaaaaaaaaaaaaa

SEQ ID NO: 7002 - protein, 178 aa, Zea mays
  misc_feature: Ceres CLONE ID no. 1289072
  misc_feature: Ceres CDNA ID no. 25445699
  misc_feature: Homolog of GI Number: 16305115 NR Desc: 15kD beta zein
  misc_feature: Homolog of GI Number: 419803 NR Desc: zein protein
  misc_feature: Homolog of GI Number: 168664 NR Desc: zein protein precursor
  misc_feature: Homolog of GI Number: 141616 NR Desc: ZEIN
  misc_feature: Homolog of GI Number: 47824794 NR Desc: beta
  misc_feature: Homolog of GI Number: 509748 NR Desc: beta
MKMVIVLVVCLALSAASASAMQMPCPCARLQGLYGAGAGLTTMMGAGGLYPYAEYLRQPQCSPLAAAPYYAGCGQPSAMFQPLRQQCCQQQMRMMDVQSVAQQLQMMMQLERAAAASSSLYEPALMQQQQQLLAAQGLNPMAMMMAQNMPAMGGLYQYQLPSYRTNPCGVSAAIPPYY

SEQ ID NO: 7003 - DNA, 748 bp, Zea mays
  misc_feature: Ceres CLONE ID no. 1289271
  misc_feature: Ceres CDNA ID no. 29191440
  CDS (50)..(577): REFERENCED BY SEQ ID NO: 7004
accaaacaaaaccgaagccgcactccaccgctctcctccccaatcagctatgctcgcccaccgcttcctcctcctcatcgccgtcgccgcggctgcggcgagcggcatcgcctccgctaagccgacggcgtacgaagccctcgccgactacgacttccccccggggatccttcccaagggcgtggtcgcctacacggtcgacaacgccacgggcgccttcacggccacgctcgatgcctccgcgtccggcgcgggatcctccatctgcgagttctccatcgagggctcctactcgctacgctaccagaccaagatcaccggcaagatctcccccgaccacctcaccgacctccagggtgtctccgtcaaggtcctcttcttctggctcaacatcgtcgaggtcacccgccatggcgataacctcgagttctccgtcggcatcgccgccgcggacttcgggattgacaacttcctcgagtgcccaacctgtggctgcgggttcgactgcaacgacctgctcatgctccagaaggcgggggccgccaccgccaggctgcgcctgcgaggtgccttctagaattccactcatgcaaatccaggatgggatagtaagttcaggactcgattttatgtttcaccaactgtttcagacagttttaggaaagtcaaagatttaattaagatctttcaaatatgtaaacttatatttctctatggaaattgtcttctttcaaaaaaaaaaaaaaaa

SEQ ID NO: 7004 - protein, 175 aa, Zea mays
  misc_feature: Ceres CLONE ID no. 1289271
  misc_feature: Ceres CDNA ID no. 29191440
  misc_feature: null
  misc_feature: Useful for making plants with altered terpenoid content
  misc_feature: Homolog of GI Number: 67987177 NR Desc: 4Fe
  misc_feature: Homolog of GI Number: 188864 NR Desc: mucin
  misc_feature: Homolog of GI Number: 186396 NR Desc: mucin
  misc_feature: Homolog of GI Number: 11359723 NR Desc: proteophosphoglycan
  misc_feature: Homolog of GI Number: 55740439 NR Desc: hydroxyproline
  misc_feature: Homolog of GI Number: 4505285 NR Desc: mucin 2
  misc_feature: Homolog of GI Number: 13592175 NR Desc: ppg3
  misc_feature: Homolog of GI Number: 50933659 NR Desc: putative high
MLAHRFLLLIAVAAAAASGIASAKPTAYEALADYDFPPGILPKGVVAYTVDNATGAFTATLDASASGAGSSICEFSIEGSYSLRYQTKITGKISPDHLTDLQGVSVKVLFFWLNIVEVTRHGDNLEFSVGIAAADFGIDNFLECPTCGCGFDCNDLLMLQKAGAATARLRLRGAF

SEQ ID NO: 7005 - DNA, 954 bp, Zea mays
  misc_feature: Ceres CLONE ID no. 1289363
  misc_feature: Ceres CDNA ID no. 40351738
  CDS (92)..(622): REFERENCED BY SEQ ID NO: 7006
gaaactactctctctctctctgcctgcaaagctgcttgatccatcatcgatcacatcactccaccagccgcagcgcacgaacgtacgactcatggcagatcgcgaccgcagcggcatctacggcggcggcgcctacgggcagcagcaggggggcggccgcccgatgggtgagcaggtgaagggcatgatccacgacaaggggccgacggcgtcccaggcgctgacggtggcgacgctgttccctctgggcgggctgctcctggtgctgtcgggcctggcgctggcggcctccacggtggggctggccctggccacgcccgtgttcctgctcttcagccccgtgctcgtccccgccgcgctgctcatcggcacggccgtcgcggggttcctcacgtcgggcgcgctggggctcggcggcctgtcctcgctcacgtgcctcgccaacacggcgcggcaggcgttccagcgcaccccggactacgtcgaggaggcgcgccgcaggatggcggaggccgcggcgcacgcgggccacaagaccgcgcaggccgggcacggcatccagagcaaggcgcaggaggccggtgctggcactggcgccggcggcggcaggacttcctcgtaaataagcaaatcatccatggatgcgtgcgtgtcaatgtcagcagggtcgtcgtggaatgctcttctctgtacgtgggtaaccgtcttttggtcgtcttccccgagtgcgtgataaatatcctggtgttcgtcgtgtgtggtgctgccctaggctggggcctggggtcggctgtgtaccggtatctgttcatcgccgctccgtcgcgttcggagatgtgaataagtgatgtgaaggttaagtttcagctttgctattgctattgtggcttgtgcatcagcggtttgctcgttgactgttatggaaataagcattggcgaaaaaaaaaaaaaaaa

SEQ ID NO: 7006 - protein, 176 aa, Zea mays; identical to SEQ ID NO: 6718
  misc_feature: Ceres CLONE ID no. 1289363
  misc_feature: Ceres CDNA ID no. 40351738
  misc_feature (39)..(156): Pfam Name: Oleosin PFAM Desc: Oleosin

SEQ ID NO: 7007 - DNA, 999 bp, Zea mays
  misc_feature: Ceres CLONE ID no. 1289434
  misc_feature: Ceres CDNA ID no. 36590176
  CDS (125)..(847): REFERENCED BY SEQ ID NO: 7008
aggaaagcaaagcgcttcgcaagcacaggcagtgatcggtaaccaaatccggacagtcttgagctctctcagtctcagcatttcagttcccagattcacatagccccagcccccaagtagcgaaatggcagctgctccgttcgcgattgccggccggctctcccccgttgcgcgcctcccggtccgcgcctggaggcccgcgcacgggtttgcgtcgtccgggagagcccgctcgctcgccgtggcgtccgcggcgcaggagaacagggacaacagtgtcgacgtacaggttagccagaacggcggcaacaggcagcagggcaacgccgtgcagcgccgcccgcgccgcgcgacagcgctcgacatctccccatccccgttcgggttagttgatccgatgtcgccgatgcggacgatgcggcagatgctggacacgatggacaggctgttcgacgacgccgtggggttccccatggggacacggaggtccccggcgaccaccggcgacgtacgcctgccgtgggacatcgtggaggacgagaaggaggtgaagatgcggatcgacatgccgggcctcgcgcgcgacgaggtgaaggtgatggtggaggacgacacgctggtcatccgaggggagcacaagaaggaggagggcgcggagggcggcagcggtggcgacggcgacgggtggtggaagcagcgcagcgtgagctcctacgacatgcggctggcgctgccggatgagtgcgacaagagcaaggtgcgggccgagctcaagaacggcgtgctcctcgtcaccgtgcccaagaccgaggtggagcgcaaggtcatcgacgtgcaggtccagtagacaaactgagctgtcacgacgggtctttgtgtagcactagcgtgggttgggctcttcgcgccgaccgtatcagtactcgtgacccaacgtgtggaataatgtgaataaataaacgcttcaattctgctattccaagaaaaaaaaaaaaaaaa

SEQ ID NO: 7008 - protein, 240 aa, Zea mays; identical to SEQ ID NO: 352
  misc_feature: Ceres CLONE ID no. 1289434
  misc_feature: Ceres CDNA ID no. 36590176
  misc_feature (134)..(240): Pfam Name: HSP20 PFAM Desc: Hsp20/alpha crystallin family
  misc_feature: Homolog of GI Number: 453670 NR Desc: heat shock protein 26
  misc_feature: Homolog of GI Number: 25987075 NR Desc: chloroplast low molecular weight heat shock protein HSP26.7a
  misc_feature: Homolog of GI Number: 25987077 NR Desc: chloroplast low molecular weight heat shock protein HSP26.7b
  misc_feature: Homolog of GI Number: 25987073 NR Desc: chloroplast low molecular weight heat shock protein HSP26.8
  misc_feature: Homolog of GI Number: 4996284 NR Desc: heat shock protein 26
  misc_feature: Homolog of GI Number: 25987069 NR Desc: chloroplast low molecular weight heat shock protein HSP26.2
  misc_feature: Homolog of GI Number: 21809 NR Desc: heat shock protein 26.6
  misc_feature: Homolog of GI Number: 4028571 NR Desc: heat shock protein HSP26
  misc_feature: Homolog of GI Number: 455619 NR Desc: HSP=26 kda heat shock protein {clone B186}
  misc_feature: Homolog of GI Number: 4028567 NR Desc: heat shock protein HSP26

SEQ ID NO: 7009 - DNA, 745 bp, Zea mays
  misc_feature: Ceres CLONE ID no. 1289529
  misc_feature: Ceres CDNA ID no. 29191441
  CDS (92)..(562): REFERENCED BY SEQ ID NO: 7010
ataaaccccaagccgcgccgcaatagctcgccccctcgttcgccgcctctcctgctcctaccgcagctctccctcaggtttagtgttcgcaatggcggccttcaacaagcttggtggccttctaaggcacagtgctctggtgagcggtatcactggtggctcttctcctgcagtgttcaatgctgcacggctcatgtctaccaagctatttattggtggtcttgactggggtgttgatgacgtgaaactaagagaagcatttagcagctttggagaggttactgaagcgagggtgatcacagacagggagactgggaggtcaagaggctttggctttgtgaactactccgacagtgatgctgccaaggaagctatttctgcaatggatggcaaggaaattgatgggcggcaggtacgtgtcaacatggctaatgagagacctgctgggaaccgtggtggtggcggctatggtggcggcggctatggaggtggtggctacggaggtggtggcggctacggaggtggtggctatggtggtggcagccaaagctatgatgcttgaggggggcaggatcctattaagtgcattatcaaccaagatatttgaaataatgaactttaggacttggtatgacgttttatgttaagcattgtcaggttttgctattcgtgttatgctgaattgttggaactcctagatgcagaatattacgtattggttttggttccaaaaaaaaaaaaaaaa

SEQ ID NO: 7010 - protein, 156 aa, Zea mays; identical to SEQ ID NO: 6810
  misc_feature: Ceres CLONE ID no. 1289529
  misc_feature: Ceres CDNA ID no. 29191441
  misc_feature (39)..(110): Pfam Name: RRM_1 PFAM Desc: RNA recognition motif.
  misc_feature: Homolog of GI Number: 34906972 NR Desc: putative glycine
  misc_feature: Homolog of GI Number: 21553749 NR Desc: glycine
  misc_feature: Homolog of GI Number: 30682622 NR Desc: glycine
  misc_feature: Homolog of GI Number: 77555842 NR Desc: RNA
  misc_feature: Homolog of GI Number: 2826811 NR Desc: AtGRP2
  misc_feature: Homolog of GI Number: 829254 NR Desc: glycine
  misc_feature: Homolog of GI Number: 76160996 NR Desc: RNA binding protein
  misc_feature: Homolog of GI Number: 1778374 NR Desc: glycine
  misc_feature: Homolog of GI Number: 7439995 NR Desc: RNA binding protein 3
  misc_feature: Homolog of GI Number: 20453303 NR Desc: AT3g23830/F14O13_2
  misc_feature: Useful for delaying flowering time
  misc_feature: Useful for making larger plants
  misc_feature: Useful for making ornamental plants with modified flowers
  misc_feature: Useful for sterility

SEQ ID NO: 7011 - DNA, 540 bp, Zea mays
  misc_feature: Ceres CLONE ID no. 1290110
  misc_feature: Ceres CDNA ID no. 40351739
  CDS (66)..(251): REFERENCED BY SEQ ID NO: 7012
attcctcaccggtgaccttcctcacctgcgtcagacagagaaagccgagattagcggcggcggcgatggcactcccggcgtcaagctccggcctcttccgcttcgtctccccccgcagtcgtccccagtccaccgacatcgtggccgctgcctcctggggagtcttcgccggcaccgccggcctctacctcgtccagccatttgactggattaagaagactttcttcgataaacctgaaccagaggcatgagtctccaggcagaaaatgctgcaaatctgcaactttggtacaccacttttgtccgggatgattcctgatgataactcagcaaataatatgagaccctctcgtctttccttgtttgattttattcagatgtaggcattcctcttgcatgtaatcttcacgaggggagtgtgatcatttgacttgtttttcataacacagagaaactgtttggttcaaccgtgttatatgatcttgatggcatttctaaaatattggtccaagatgcatgtgtttaaaaaaaaaaaaaaaa

SEQ ID NO: 7012 - protein, 61 aa, Zea mays
  misc_feature: Ceres CLONE ID no. 1290110
  misc_feature: Ceres CDNA ID no. 40351739
MALPASSSGLFRFVSPRSRPQSTDIVAAASWGVFAGTAGLYLVQPFDWIKKTFFDKPEPEA

SEQ ID NO: 7013 - DNA, 559 bp, Zea mays
  misc_feature: Ceres CLONE ID no. 1290282
  misc_feature: Ceres CDNA ID no. 25446534
  CDS (122)..(352): REFERENCED BY SEQ ID NO: 7014
acttctcccgttgccccccgcgtctctcttctcgttgcgacgactgggcgatccctgccgccccccgtctcccgctccccgccgccaggtgcccaggttgtcgccgggcccttcgccggcgatgagcacccaacaggcggctgcatggattatacttgggatattctcgctcatcagacttcaagctgattaccttctcgttgttggagtttgcttgagcctcagcattgcaaatattattgggttcaccaaatgcaataaagatgcgaagaagaacatccaggattggacaaggaatgcacttctatcaggtagtgtcagatcgcatctgcagtcagcatttggtgtctgaacaataacctatgaccttgttatacgtgtagtgctgtataatttacagataacatgattggttactagagtgcgtctgtttttttttttgttggctatgtgcatcttgctaggcagagtcggaagaacattttcagagccgtgtatcaactcgatgtataatgcagtttgaataaaatcttcctttaacaaaaaaaaaaaaaaaaaa

SEQ ID NO: 7014 - protein, 76 aa, Zea mays
  misc_feature: Ceres CLONE ID no. 1290282
  misc_feature: Ceres CDNA ID no. 25446534
  misc_feature: Homolog of GI Number: 4337178 NR Desc: T31J12.5
MSTQQAAAWIILGIFSLIRLQADYLLVVGVCLSLSIANIIGFTKCNKDAKKNIQDWTRNALLSGSVRSHLQSAFGV

SEQ ID NO: 7015 - DNA, 818 bp, Zea mays
  misc_feature: Ceres CLONE ID no. 1290353
  misc_feature: Ceres CDNA ID no. 29191442
  CDS (108)..(458): REFERENCED BY SEQ ID NO: 7016
aggtattcccccttctcttccctgtctgcagtgcgaaacggagttcccagactctaactctaacctcaagctatttggctattttatgcctactagatccgcccctgatggacaacgtcgagtctgcccctgactcgccggcgcaggcgccgccgtcatccgcctcttctctccccaaggagcaatcgcaggtggaattggagctgaggctgcttcaggctcttgagttctaccctccatcaaaactcaaaggcgttcaccggcattttgttctctatggcctcatggaatatttgcgaaaaagccttgaccgacagttctcttctgacgaagttctacaactcttggaccgcttctttaacctagaaatgctgaaaccagaggatgatgagaaggataacttccgtcagggcgaagaattttcgttgccagagagttttctcaacaaggaagaataatatctagtaacctcgtactttgggtgtcctctggaagagaaatcagaaggctggttcttagtgattccctatttcttgtagcattgtcatctggaacatcggctgcggggagacactgaacactgaagtaaagaaacacatttcctaagctgtggttgtctttactgactgtacagctagcttttgtagactagtgtaatcgaaaataggttgaactgtgtggttgcctggagcgtgaacaaaaagcaaggaggggcaattacaaaagctgctgctgttttacctatcaaacttctctgatcatgactataggtgcagtcctataaagcatccatgattccatgaaaaaaaaaaaaaaaa

SEQ ID NO: 7016 - protein, 116 aa, Zea mays
  misc_feature: Ceres CLONE ID no. 1290353
  misc_feature: Ceres CDNA ID no. 29191442
  misc_feature (30)..(115): Pfam Name: CT20 PFAM Desc: CT20 family
MDNVESAPDSPAQAPPSSASSLPKEQSQVELELRLLQALEFYPPSKLKGVHRHFVLYGLMEYLRKSLDRQFSSDEVLQLLDRFFNLEMLKPEDDEKDNFRQGEEFSLPESFLNKEE

SEQ ID NO: 7017 - DNA, 755 bp, Zea mays
  misc_feature: Ceres CLONE ID no. 1290371
  misc_feature: Ceres CDNA ID no. 25445700
  CDS (1)..(588): REFERENCED BY SEQ ID NO: 7018
aaaattccctacgggaaaacgtggaagcgcagtgctcctcttctttccttccccttcccatctccgccgccgccgccccttcctcctccagagtcgcgcctcttcctcctcctctccagtcgcgcggtcgcgccgtcccattgcgccccttcctcctcgcagtcacggccgcgcggcacgtgctccgcttcgccgtcgccgtcgccgttgccgttgccgtcgccgccgccaagtaaagagagactgggaagcgcagtcgacgggggcgtggtgaggagggagttactcggaggaaggaaggaaggaagggggactgcggccggcggcggactaccatgtcgtctctgggaacttccaaggggatcctggagatcgccaagttcggcgtctacgtctccgtgcccgtcgcactcacctacctcgtcgccaccgactccaagaccctcaagaagctcatgggcctccgcccttacgtggtttacccgcctgaaggcccacgccctccaccgccagaagaactgcgcgaaagggcacgggagattgcccggaagaggcagcagagctgaatgtatgctgtgggttctctaggtgcctgtgtgtgtggctgtgtctatggaacagcacggacgacgaatcttcccatctcacgagaacagccctggtctttagcatcctttcactgctgctgttgttacaataataataataatatactgagaagcgagaatcggctagatataaaaaaaaaaaaaaaa

SEQ ID NO: 7018 - protein, 76 aa, Zea mays
  misc_feature: Ceres CLONE ID no. 1290371
  misc_feature: Ceres CDNA ID no. 25445700
MSSLGTSKGILEIAKFGVYVSVPVALTYLVATDSKTLKKLMGLRPYVVYPPEGPRPPPPEELRERAREIARKRQQS

SEQ ID NO: 7019 - DNA, 1147 bp, Zea mays
  misc_feature: Ceres CLONE ID no. 1290428
  misc_feature: Ceres CDNA ID no. 36590978
  CDS (105)..(1028): REFERENCED BY SEQ ID NO: 7020
accacgatttttctcactactagtcgcaactcgcaagcaaatcgaacgaacccagccgaagcgcgagccgcgagctgagcaaggcggaggcggcggaaccggcgatggagcggctgcagcggatctttggcgcctccggcatggggcagccgccgacggactcgccgctgctcgactcttccgagcaggtctacatctcctccctcgcgcttctcaagatgctcaagcacgggagggccggcgtgcccatggaggtcatgggtctcatgctcggcgagttcgtggatgactacaccgtcagggtcgtcgacgtcttcgccatgccgcagagcgggactggggtcagcgtcgaggccgtcgaccacgtcttccagacaaacatgcttgacatgctcaagcagaccggcaggccagaaatggttgtaggctggtatcactcacatcctggcttcggttgctggctatcaggcgttgatatcaatactcagcagagttttgaagctttgaaccccagggcagttgctgttgtgatagaccccatccagagtgtgaaggggaaggtggttattgatgcattccgcctaattaatcctcagaccatgatgcttggtcaggagccacggcagacgacatcaaatgttgggcacctaaataagccatcgattcaggctcttatccatgggctgaacaggcactactactcaattgcaatcaattaccggaaaaatgagctagaggagaaaatgttgttgaacttgcacaaaaagaaatggacagatggactaattttgaagaggtttgacactcactcaaaaaccaacgagcagactgtccaggaaatgctaaacctagccatcaagtacaacaaggcagtgcaggaggaggacgaactgccacctgagaaacttgctatagcaaatgtgggtcggcaagatgcaaaaaagcatttggaagagcatgtgtccaatttgatgtcatcaaacatagttcagaccctaggaaccatgctcgacacggttgtattttagtctctactaatattgttgttccaaactgaaacatagccacatgcaatgagctcgatgccggatacattttggttctaagatttgtttacgaatggatttgtcgaaaaaaaaaaaaaaaa

SEQ ID NO: 7020 - protein, 307 aa, Zea mays
  misc_feature: Ceres CLONE ID no. 1290428
  misc_feature: Ceres CDNA ID no. 36590978
  misc_feature: Useful for making plants with modulated growth and phenotype characteristics
  misc_feature: null
  misc_feature: The sequence is a functional homolog of  SEQ ID NO 768 in the  10/412,699 US patent application
  misc_feature: Useful for making plants with altered alkaloid content
  misc_feature: Useful for making plants with altered terpenoid content
  misc_feature (24)..(137): Pfam Name: Mov34 PFAM Desc: Mov34/MPN/PAD
  misc_feature: Homolog of GI Number: 21592398 NR Desc: 26S proteasome non
  misc_feature: Homolog of GI Number: 54287494 NR Desc: putative 26S proteasome non
  misc_feature: Homolog of GI Number: 20259105 NR Desc: putative 26S proteasome
  misc_feature: Homolog of GI Number: 5031981 NR Desc: 26S proteasome
  misc_feature: Homolog of GI Number: 27924246 NR Desc: Psmd14
  misc_feature: Homolog of GI Number: 72030199 NR Desc:  similar to proteasome
  misc_feature: Homolog of GI Number: 10946952 NR Desc: proteasome
  misc_feature: Homolog of GI Number: 70871027 NR Desc: proteasome regulatory non
  misc_feature: Homolog of GI Number: 29250286 NR Desc: GLP_111_4773_5777
MERLQRIFGASGMGQPPTDSPLLDSSEQVYISSLALLKMLKHGRAGVPMEVMGLMLGEFVDDYTVRVVDVFAMPQSGTGVSVEAVDHVFQTNMLDMLKQTGRPEMVVGWYHSHPGFGCWLSGVDINTQQSFEALNPRAVAVVIDPIQSVKGKVVIDAFRLINPQTMMLGQEPRQTTSNVGHLNKPSIQALIHGLNRHYYSIAINYRKNELEEKMLLNLHKKKWTDGLILKRFDTHSKTNEQTVQEMLNLAIKYNKAVQEEDELPPEKLAIANVGRQDAKKHLEEHVSNLMSSNIVQTLGTMLDTVVF

SEQ ID NO: 7021 - DNA, 1061 bp, Zea mays
  misc_feature: Ceres CLONE ID no. 1290431
  misc_feature: Ceres CDNA ID no. 36707056
  CDS (242)..(754): REFERENCED BY SEQ ID NO: 7022
atcgatcgtcaatgcaagtttgtccattcgcattggtctgaatactgtagctactagcgcgagtgccactgtgccgcagctgcctgctcgccattactgcaagctgtgttcaatcaaagcttaattaggctccctctacatctgatccagctaagtagctagccagcactacagaagggcgtggcaagaatcaggagagagatagcaggggggctagctagctgagctcgtgcgacgaagaatggccggaattggcaggaacatggtggcgccgctcctggtgctcaacctcatcatgtacatcatcgtcatcggcttcgcgagctggaacctgaaccacttcatcaacgggcagaccaactaccccggcgtggccggcaacggcgcgacgttctacttcctggtgttcgccatcctggccggcgtggtgggcgcggcgtccaagctggcgggcgtgcaccacgtgcgcgcctggcgccacgacagcctggccaccaacgccgcgtcgtcgctcatcgcctgggccatcacggcgctcgccttcgggctggcctgcaaggagatccacatcggcggacaccgcggctggcgcctgcgcgtgctggaggccttcgtcatcatcctcgccttcacgcagctcctctacgtgctcatgctccacacgggcctcttcggcggcagcggtggctaccgggaccacgactacggcgtcggcggcgcggccggcgagcccaagggggtcaccagggtctgaggattctgatcgatgcagctcgtacatgtgtcatcatatcaggcgctgctggagtgtgatgacgtaataagtagtacccatatatatatatggtgtgtgttgacgtaccacgtacactacgtacgtgtgtacctagtagctagctagtcagtccatcgtctgctcatctcgtcaggtcatcagatctctcggttctggtttgtacatcagtacgtgcatgcatgtatcccgtgtcaaatgtatttcgtcacccgtcagtttcagccggtcagtgaccaagtttatttcgtcaaaaaaaaaaaaaaaa

SEQ ID NO: 7022 - protein, 170 aa, Zea mays
  misc_feature: Ceres CLONE ID no. 1290431
  misc_feature: Ceres CDNA ID no. 36707056
  misc_feature (14)..(143): Pfam Name: AWPM PFAM Desc: AWPM
  misc_feature: Homolog of GI Number: 50936401 NR Desc: putative plasma membrane associated protein
  misc_feature: Homolog of GI Number: 6851373 NR Desc: plasma membrane associated protein
  misc_feature: Homolog of GI Number: 1724112 NR Desc: ABA induced plasma membrane protein PM 19
  misc_feature: Homolog of GI Number: 50931285 NR Desc: putative plasma membrane associated protein
  misc_feature: Homolog of GI Number: 310570 NR Desc: a Lea protein with hydrophobic domain
  misc_feature: Homolog of GI Number: 50912431 NR Desc: putative ABA
  misc_feature: Homolog of GI Number: 34911480 NR Desc: putative plasma membrane associated protein
  misc_feature: Homolog of GI Number: 20465529 NR Desc: putative plasma membrane associated protein
  misc_feature: Homolog of GI Number: 56784019 NR Desc: putative ABA induced plasma membrane protein PM 19
  misc_feature: Homolog of GI Number: 67987177 NR Desc: 4Fe
MAGIGRNMVAPLLVLNLIMYIIVIGFASWNLNHFINGQTNYPGVAGNGATFYFLVFAILAGVVGAASKLAGVHHVRAWRHDSLATNAASSLIAWAITALAFGLACKEIHIGGHRGWRLRVLEAFVIILAFTQLLYVLMLHTGLFGGSGGYRDHDYGVGGAAGEPKGVTRV

SEQ ID NO: 7023 - DNA, 1196 bp, Zea mays
  misc_feature: Ceres CLONE ID no. 1290458
  misc_feature: Ceres CDNA ID no. 25445954
  CDS (45)..(836): REFERENCED BY SEQ ID NO: 7024
cttttcaacttcgtcgaaaccctaaccctcccggcgaagtcgccatgtcgaacccgaagggctccaagatgctccagttcatcaactaccgcatgagggtgacgatccaggacggccgccagctcgtgggcaagttcatggcgttcgaccgccacatgaacctcgtcctcggcgactgcgaggagttccgccgcctcccgccctccaagtcctccaaggccaccggcgaacgcgaggagcgccgcacgctcggcctcctcctgcttcgcggcgaggaggtcgtctccatgaccgtcgagggcccgccgccgcccgacgagtcgcgcgccaaggccgcggcggcgggcggagccctcgccggccctggcgtcggccgcgccgctggccgcggcgtgcccaccggcccgctgctccaggcagctccaggccttgctggccctgtgcggggcgtgggtggacccgcccccggcatgatgcagccccagatctcgcgcccgccgatgcccaacctgtcggcccagccggtgtcgtacccgcaggtcgtgcgcccgccgcaggggatgcctccgccaatgcgtcctggaatgccgccgcagatgccgatgcaattccgcccgcctggggcgccgcctgctccgttccctggggcaccgccacaacagtacatgaggggaccgccgccgatggggccgccccaggtgaggcccgggatgccggggccgccaccgcctggaatgaggcctggaatgcctccgccaccattcggacagccgaggccagggatgccgcctccgccacctggtccacagcagcctggacagaacccgccgcagtagcttcctggataagcttcttgcagatacacctatggaagatttttttttatctcgagaggatcataatcgcacctggggaggacctgtgaattgcaccaaagcttcaccattctgtctcgcatcagggcagtagtttcctttgggtattgtgagggaggagaacattgccatttgccagcgtgtgtaccactcatcctttgatgtgagaagggaccttgtacgtagagaggccaggacttgtattttaactgttggtgttggttatgttaggaattatggataactagctgcagtcttgttacggtgttgattcatgctctgtttaagcccttgttttctctctcaaaaaaaaaaaaaaaa

SEQ ID NO: 7024 - protein, 263 aa, Zea mays
  misc_feature: Ceres CLONE ID no. 1290458
  misc_feature: Ceres CDNA ID no. 25445954
  misc_feature (7)..(84): Pfam Name: LSM PFAM Desc: LSM domain
  misc_feature: Homolog of GI Number: 50934399 NR Desc: putative snRNP
  misc_feature: Homolog of GI Number: 28827492 NR Desc: putative snRNP protein
  misc_feature: Homolog of GI Number: 21536707 NR Desc: putative snRNP protein
  misc_feature: Homolog of GI Number: 55653900 NR Desc:  similar to Small nuclear ribonucleoprotein associated protein B
  misc_feature: Homolog of GI Number: 61552980 NR Desc: small nuclear ribonucleoprotein polypeptide B/B' isoform B'
  misc_feature: Homolog of GI Number: 38150007 NR Desc: small nuclear ribonucleoprotein polypeptide B/B' isoform B'
  misc_feature: Homolog of GI Number: 55650590 NR Desc:  similar to Small nuclear ribonucleoprotein associated protein B
  misc_feature: Homolog of GI Number: 5870111 NR Desc: small nuclear ribonucleoprotein B'
  misc_feature: Homolog of GI Number: 48103537 NR Desc: similar to ENSANGP00000007148
  misc_feature: Homolog of GI Number: 34858687 NR Desc: similar to small nuclear ribonucleoprotein B
  misc_feature: Useful for delaying flowering time
  misc_feature: Useful for increasing chlorophyll and photosynthetic capacity
  misc_feature: Useful for making ornamental plants with modified leaves
  misc_feature: Useful for making plants with increased biomass and foliage
  misc_feature: Useful for making plants with increased biomass and foliage
  misc_feature: Useful for making shorter plants
  misc_feature: Useful for making stronger plants
  misc_feature: Useful for making stronger plants
  misc_feature: Useful for sterility
MSNPKGSKMLQFINYRMRVTIQDGRQLVGKFMAFDRHMNLVLGDCEEFRRLPPSKSSKATGEREERRTLGLLLLRGEEVVSMTVEGPPPPDESRAKAAAAGGALAGPGVGRAAGRGVPTGPLLQAAPGLAGPVRGVGGPAPGMMQPQISRPPMPNLSAQPVSYPQVVRPPQGMPPPMRPGMPPQMPMQFRPPGAPPAPFPGAPPQQYMRGPPPMGPPQVRPGMPGPPPPGMRPGMPPPPFGQPRPGMPPPPPGPQQPGQNPPQ

SEQ ID NO: 7025 - DNA, 867 bp, Zea mays
  misc_feature: Ceres CLONE ID no. 1290514
  misc_feature: Ceres CDNA ID no. 25445955
  CDS (68)..(688): REFERENCED BY SEQ ID NO: 7026
aacttcacccacctccgccagccactccaaacacttgcgccgccactgcctcacaggtaaggccgccatggtctccggttcgggcgtgtgcgcgaagcgcatcgtggtggacgcgcgccaccacatgctgggccgtctctcctcgatcatagccaaggagctgctcaatgggcagaaggtggtcgtcgtccgctgcgaggagatctgcatgtcgggcggcctcgtccgtcagaagatgaagtacctccgcttcctccgcaagcggatgaacaccaagccgtcccacgggcccatccacttccgcgcccccgccaagatcctgtggcgcaccatccgcgggatgattccgcacaagaccaagaggggggaggcggctctggcgaggctcaagacgtacgagggcgtcccgccgccgtacgacaagaccaagcgtatggtcatccctgacgctcttaaggttctgaggctacagcctggacacaagtactgcctcctcggcgagctctctaaggaggtcgggtggaactaccatgacaccatcagggaacttgaggagaagaggaaggagaaggccaaggttgcctacgagaggaagaagcaattgaccaagctgcgtgtcaaggccgagaaggcagccgaggagaagttggggtctcagttggagattcttgcccctatcaagtactgaggagctgtgctttgtcatcagttttggggaacatctagtctttgttttaagtgttcggtaacagtttgtgacagtataatctggtaaaccgtgttatttttctgccactcctatttgaacacattttctagctggtgaatgaactgtttggtcgatcttgtccaaaaaaaaaaaaaaaa

SEQ ID NO: 7026 - protein, 206 aa, Zea mays
  misc_feature: Ceres CLONE ID no. 1290514
  misc_feature: Ceres CDNA ID no. 25445955
  misc_feature (11)..(127): Pfam Name: Ribosomal_L13 PFAM Desc: Ribosomal protein L13
  misc_feature: Homolog of GI Number: 21326116 NR Desc: putative 60S ribosomal protein
  misc_feature: Homolog of GI Number: 37718812 NR Desc: putative ribosomal protein L13a
  misc_feature: Homolog of GI Number: 57471706 NR Desc: ribosomal protein L13a
  misc_feature: Homolog of GI Number: 50933743 NR Desc: putative 60S ribosomal protein
  misc_feature: Homolog of GI Number: 76573371 NR Desc: 60S ribosomal protein L13a
  misc_feature: Homolog of GI Number: 21593767 NR Desc: 60S ribosomal protein L13a
  misc_feature: Homolog of GI Number: 23297306 NR Desc: putative 60S ribosomal protein
  misc_feature: Homolog of GI Number: 19423912 NR Desc: putative 60S ribosomal protein
  misc_feature: Homolog of GI Number: 6642654 NR Desc: putative 60S ribosomal protein L13A
  misc_feature: Homolog of GI Number: 4753651 NR Desc: ribosomal protein L13a like protein
MVSGSGVCAKRIVVDARHHMLGRLSSIIAKELLNGQKVVVVRCEEICMSGGLVRQKMKYLRFLRKRMNTKPSHGPIHFRAPAKILWRTIRGMIPHKTKRGEAALARLKTYEGVPPPYDKTKRMVIPDALKVLRLQPGHKYCLLGELSKEVGWNYHDTIRELEEKRKEKAKVAYERKKQLTKLRVKAEKAAEEKLGSQLEILAPIKY

SEQ ID NO: 7027 - DNA, 564 bp, Zea mays
  misc_feature: Ceres CLONE ID no. 1290534
  misc_feature: Ceres CDNA ID no. 29191443
  CDS (167)..(457): REFERENCED BY SEQ ID NO: 7028
acttctaccgttccactctcgtgcgctcttgttttcttctctccgttgccgccctacgtcaggtgcccaattctccattttcgggcccttctccagcgacgagcacccgccaggtccgatccatctcacccggatcttctgtatctcgggttcttggcagaggattatggattggctggggcagaaacgcgcggagatgctgatgcaggtgctgctggtggcgtctgcggtggtggcgttcctggtgggctacgtgcgcgcggacttccagctcatgctgctcgtctacgccggcggcgtcgtgctcacggctctggtcaccgtccccaactggcctttctacaaccgtaacccgctcaagtggctcgacgctgccgaggccgagcgccacccgcggccccaggtcagcgccgcccccgcggcagggggtaagaagaggtccgggaagaacaagtagttggtcgatgtgtgtgttcttggtcgacctgactcaacctgtttaagatctattcgcagaactaatcaattataaaaagagatattgagataaaaaaaaaaaaaaaa

SEQ ID NO: 7028 - protein, 96 aa, Zea mays
  misc_feature: Ceres CLONE ID no. 1290534
  misc_feature: Ceres CDNA ID no. 29191443
  misc_feature (1)..(80): Pfam Name: SPC12 PFAM Desc: Microsomal signal peptidase 12 kDa subunit
  misc_feature: Homolog of GI Number: 77555520 NR Desc: microsomal signal peptidase 12 kda subunit
  misc_feature: Homolog of GI Number: 30102562 NR Desc: At4g40042
  misc_feature: Homolog of GI Number: 50754117 NR Desc:  similar to Microsomal signal peptidase 12 kDa subunit (SPase 12 kDa subunit) (SPC12) (HSPC033)
  misc_feature: Homolog of GI Number: 62860158 NR Desc: LOC549392
  misc_feature: Homolog of GI Number: 5138926 NR Desc: HSPC033
  misc_feature: Homolog of GI Number: 57101164 NR Desc:  similar to Microsomal signal peptidase 12 kDa subunit (SPase 12 kDa subunit) (SPC12) (HSPC033)
  misc_feature: Homolog of GI Number: 16905460 NR Desc: signal peptidase 12kDa subunit
  misc_feature: Homolog of GI Number: 61872928 NR Desc:  similar to Microsomal signal peptidase 12 kDa subunit (SPase 12 kDa subunit) (SPC12) (HSPC033)
  misc_feature: Homolog of GI Number: 66553356 NR Desc:  similar to ENSANGP00000028863
MDWLGQKRAEMLMQVLLVASAVVAFLVGYVRADFQLMLLVYAGGVVLTALVTVPNWPFYNRNPLKWLDAAEAERHPRPQVSAAPAAGGKKRSGKNK

SEQ ID NO: 7029 - DNA, 612 bp, Zea mays
  misc_feature: Ceres CLONE ID no. 1290539
  misc_feature: Ceres CDNA ID no. 25445814
  CDS (1)..(612): REFERENCED BY SEQ ID NO: 7030
ccgacacatgtgacaagcctcatctcagccgtgcaggaccaagtagttttgcttcactccggcattccatccatatccatccatcagaattctcagtctccacagcagcaaggcgcacgaccagcaccagcagccggcaacaaaagacacagcagcgatggcgttcgtgccggtgtgcgtgcagtgcgggacgcggagcaacccgtgccggtgcaaggtggtcgggccgacgctggggttcgtcgcgttcgtggtggccggggtcatcgagtggccgctgggggccgccgtgtacctgttccgccaccgcaagggacgacgcatcatggcgcacccggccaccgtcgtgtacccgcgcgttaccagggccatcccgatctaatcggccgaccgatcagccaggtcgcggtttcatgtccgggtttgtgtcgccaacgtactgagatgtcgtcagtccaaatttgtgaatccttttacacccgcctgcctttctttctcaataagagtcgcaaatgtgtgtggtttcagtttgcgtacatttgtactccgattgtaagcatcgccgtcaatgtacgtaatactatgtatgtcatctcaaaaaaaaaaaaaaaa

SEQ ID NO: 7030 - protein, 74 aa, Zea mays
  misc_feature: Ceres CLONE ID no. 1290539
  misc_feature: Ceres CDNA ID no. 25445814
  misc_feature: Homolog of GI Number: 45183575 NR Desc: little protein 1
  misc_feature: Homolog of GI Number: 11762134 NR Desc: AT5g17460
MAFVPVCVQCGTRSNPCRCKVVGPTLGFVAFVVAGVIEWPLGAAVYLFRHRKGRRIMAHPATVVYPRVTRAIPI

SEQ ID NO: 7031 - DNA, 1064 bp, Zea mays
  misc_feature: Ceres CLONE ID no. 1290569
  misc_feature: Ceres CDNA ID no. 29191336
  CDS (181)..(828): REFERENCED BY SEQ ID NO: 7032
gatcgagccagggccaggcaacctggtgctccgcccctcgccgttaccgcgacgcttcggcctctggctccaccgcctgcctctgcctgcctccgtggctccgtgacgagacacgacgccgagaggtcacccccacaccgcgccgaggccaccccgcttgggattgtgaggtaaagcgtgatggcagcgccaccggcgagggcccgagccgactacgactacctcatcaaactgctcctcatcggtgacagcggtgttggaaaaagttgtctcctgttacggttttcagatggatcattcaccactagcttcattaccactattggtattgacttcaagataaggactgtcgagttggatggcaaacggattaagttgcagatctgggacactgcaggccaagaacgtttccgcacgattactactgcttactacaggggcgcaatgggcatcttgcttgtgtacgatgtcacagacgagtcatctttcaataacataagaaattggatcagaaacattgagcaacatgcttcggataacgtgaacaaaattctggtggggaataaagctgatatggatgaaagcaaacgggctgtgcccacttcgaaggggcaagctctcgctgacgaatacgggataaagttttttgaaacgagtgcgaagacaaacctgaatgtcgagcaggttttcttttccatagcaagggacatcaaacagagactttcagagaccgattccaagcctgaggatcgaactatcaagatcaaggcagaaggggaagctgaggcagcggcggcggcgcagaattcagcttgctgtggctcctgagcagttgtcaccgcaagatagtggcgttctcgcgcatgtaattttcatcgtttcattctttgccagcgactctctccttgtgcttcttgagctatcgcagttgctgtggcctggacaaatgggtgttaactgttaagtcagagcagttaattgctgtattgtgggaactctacccatggtaaggcgtgcataatggctgtgcaaagtacctttttacactaaaaaaaaaaaaaaaa

SEQ ID NO: 7032 - protein, 215 aa, Zea mays; identical to SEQ ID NO: 2880
  misc_feature: Ceres CLONE ID no. 1290569
  misc_feature: Ceres CDNA ID no. 29191336
  misc_feature: null
  misc_feature: Useful for making plants with altered Lignin content
  misc_feature (1)..(177): Pfam Name: Arf PFAM Desc: ADP
  misc_feature: Homolog of GI Number: 50919469 NR Desc: ethylene
  misc_feature: Homolog of GI Number: 46326983 NR Desc: ethylene
  misc_feature: Homolog of GI Number: 50935375 NR Desc: putative ethylene
  misc_feature: Homolog of GI Number: 50931689 NR Desc: putative GTP
  misc_feature: Homolog of GI Number: 18447917 NR Desc: ras
  misc_feature: Homolog of GI Number: 18447919 NR Desc: ras
  misc_feature: Homolog of GI Number: 18447921 NR Desc: ras
  misc_feature: Homolog of GI Number: 2808638 NR Desc: small GTP
  misc_feature: Homolog of GI Number: 871510 NR Desc: small GTP
  misc_feature: Homolog of GI Number: 1370194 NR Desc: RAB8C

SEQ ID NO: 7033 - DNA, 989 bp, Zea mays
  misc_feature: Ceres CLONE ID no. 1290669
  misc_feature: Ceres CDNA ID no. 36707168
  CDS (73)..(825): REFERENCED BY SEQ ID NO: 7034
aaacgcaaaccccaatctcggcgtcaccgccccaaatctagcaaacggaaatcccatctcgccgccgccgcgatgtctcgccgctatgacagtcgcacgacgatcttctcgccggaggggcgtctctaccaggtggagtacgcgatggaggcgatcggcaacgccgggtcagccctcgggatcctggcggccgacggcgtagtcctggtcggcgagaagaaggtgacctccaagctcctccagacctcccgctccgccgagaagatgtacaagatcgactcccacctggcgtgcgctgtggcagggatcatgtccgacgccaacatcctcatcaacaccgcccgcctccacgcccagcgctacgcgctctcctaccaggagcccatccccgtcgagcagctcgtccagtccctctgcgacaccaagcagggttacacccagtttggtggcctccgcccctttggggtctccttcctattcgccggttgggacaagcaccacggtttccagctctacatgagcgacccatctggcaactacggcgggtggaaggccgccgctgttggggccaacagccaggccgcgcagtccatgctcaagcaggactacaaggacgccttgacccgcgaggaggccgtcggtctcgcgctcaaggtcctcagcaagaccatggactccaccagcttgactgccgagaagctggagctggccgaggtatttctgcagcccgacaccggggaggtacagtaccaggtgtgctctcctgaggcgctggggaagctgcttgcaaactccggcctgacacagccaacacccgaggcataatgtactggtttgcagtggcatgtgatgccttctactgctcttagacatggtttaagcagttatgcttctgttgtgtgaacttaaatattcgacaattatgtgttctatttttgtgttgagcatccttgatccgttaatgtttcatctgaaaaaaaaaaaaaaaa

SEQ ID NO: 7034 - protein, 250 aa, Zea mays
  misc_feature: Ceres CLONE ID no. 1290669
  misc_feature: Ceres CDNA ID no. 36707168
  misc_feature (28)..(215): Pfam Name: Proteasome PFAM Desc: Proteasome A
  misc_feature: Homolog of GI Number: 34898416 NR Desc: alpha 3 subunit of 20S proteasome
  misc_feature: Homolog of GI Number: 34898478 NR Desc: ESTs AU058081
  misc_feature: Homolog of GI Number: 77999303 NR Desc: proteasome
  misc_feature: Homolog of GI Number: 1262146 NR Desc: proteasome subunit
  misc_feature: Homolog of GI Number: 76160982 NR Desc: proteasome alpha subunit
  misc_feature: Homolog of GI Number: 23197586 NR Desc: 20S proteasome subunit PAC1
  misc_feature: Homolog of GI Number: 2511584 NR Desc: multicatalytic endopeptidase
  misc_feature: Homolog of GI Number: 3608483 NR Desc: proteasome alpha subunit
  misc_feature: Homolog of GI Number: 6984140 NR Desc: proteasome 27 kDa subunit
  misc_feature: Homolog of GI Number: 14039743 NR Desc: 20S proteasome subunit alpha 3
MSRRYDSRTTIFSPEGRLYQVEYAMEAIGNAGSALGILAADGVVLVGEKKVTSKLLQTSRSAEKMYKIDSHLACAVAGIMSDANILINTARLHAQRYALSYQEPIPVEQLVQSLCDTKQGYTQFGGLRPFGVSFLFAGWDKHHGFQLYMSDPSGNYGGWKAAAVGANSQAAQSMLKQDYKDALTREEAVGLALKVLSKTMDSTSLTAEKLELAEVFLQPDTGEVQYQVCSPEALGKLLANSGLTQPTPEA

SEQ ID NO: 7035 - DNA, 782 bp, Zea mays
  misc_feature: Ceres CLONE ID no. 1290722
  misc_feature: Ceres CDNA ID no. 25445701
  CDS (148)..(504): REFERENCED BY SEQ ID NO: 7036
tctctctcacgagcacaacagggcggccagacagggttcccacaggccatcaccacaacacacaaatacagctcagagcaactcacacacaggctcctctcccccgttgcgcaacgcgctttcccccacttcacccgcctcggcgccatggctaagctcgcgctggcgctcctcctcctgctggccgtggcggcgtccgcgtcggccagcagcgggagccacctggatctcgacctgggcttcctctcctctggggaacgccggagggagtgccgcggcacggtggccgagtgcctcgccgaggagtcggatgaggagggccttgacctggctggatcccaccgccgcgcgctctacggcggcgggtacatcagctacggcgcgctgcggcgggacaacgtgccctgctcccgccgcggcgccagctactacaactgccgcccgggcggccaggccaacccctaccaccgcggctgctcccgcatcacccgctgccgcggctgaggcggcgccggatccgccagactgccgaggaaaggtctggtccaggtcccggccctttcgccgacaataatttctttcgccttgttcgttcaggcgctaccgccaccgccaccgctgtttactatagcaccagacctacggattgaattgttgtatggatttgtttggccaaatctttgttctgttgtaaagtaaggggagggattcctgcccctgcgcctgcttaaaatacttatatgaacatatcagtctttcttgttttaaaaaaaaaaaaaaaa

SEQ ID NO: 7036 - protein, 118 aa, Zea mays
  misc_feature: Ceres CLONE ID no. 1290722
  misc_feature: Ceres CDNA ID no. 25445701
  misc_feature (53)..(118): Pfam Name: RALF PFAM Desc: Rapid ALkalinization Factor
  misc_feature: Homolog of GI Number: 77556664 NR Desc: Rapid ALkalinization Factor
  misc_feature: Homolog of GI Number: 28628203 NR Desc: rapid alkalinization factor 1 precursor
  misc_feature: Homolog of GI Number: 28628205 NR Desc: rapid alkalinization factor 2 precursor
  misc_feature: Homolog of GI Number: 37695573 NR Desc: rapid alkalinization factor 2
  misc_feature: Homolog of GI Number: 34907152 NR Desc: P0506E04.27
  misc_feature: Homolog of GI Number: 16566316 NR Desc: RALF precursor
  misc_feature: Homolog of GI Number: 42374767 NR Desc: rapid alkalinization factor preproprotein
  misc_feature: Homolog of GI Number: 2078483 NR Desc: antifreeze glycopeptide AFGP polyprotein precursor
MAKLALALLLLLAVAASASASSGSHLDLDLGFLSSGERRRECRGTVAECLAEESDEEGLDLAGSHRRALYGGGYISYGALRRDNVPCSRRGASYYNCRPGGQANPYHRGCSRITRCRG

SEQ ID NO: 7037 - DNA, 827 bp, Zea mays
  misc_feature: Ceres CLONE ID no. 1290725
  misc_feature: Ceres CDNA ID no. 25445858
  CDS (3)..(608): REFERENCED BY SEQ ID NO: 7038
tctctcgcgccgcacacactgaccaacagcaagctcagctgcacgcactgcacctcccgggccagccgccagccgccggccagcatggaggcggtggtagagtgcgccaagtgcgagtgctgcggcctggtggaggactgcacccgggactacatcctgggcgtgcgcgcggccttcggcgggcggtggctctgcggcctctgctccgaggcggtgcgggacgaggcggccaggggcacgacggcgagaggccccgccgccgccgccgcggggctggaggacgcgctccgggaccacatggccttctgcggcaagtgcaggcggagccccgcgttccgggtcgccgacggcatgcgccagatgctgcgcaggtgctccaagtgactgctggcgccggccgcgtcggcgtcggcgtcggcgttgcacggcgaaaaatcggcagtgcgacccacccgcgtcgtctagcgagcctttgggcatggacaagcaagacaagacaaaggcgaccacgccggccattgctgtgtcgtctccgcgcaatgagctgcttggcaacatcatgtatgtgcaaggaaatggctcggcacggcagtcggcagtattattagggtgtttagtttggtgatctctgagaacccagagactcgtaggtgctgtaaaggtgaagctagaactagaacgccgctacatcagtcagtgccattaggcttggtacattcttcaggctacagctgtttcgtcaataaggaaactacgtgtataatctgcggacggcaggcgaaaatagcacgtagtacaattccattcctacaaaaaaaaaaaaaaaa

SEQ ID NO: 7038 - protein, 99 aa, Zea mays
  misc_feature: Ceres CLONE ID no. 1290725
  misc_feature: Ceres CDNA ID no. 25445858
  misc_feature: Homolog of GI Number: 7715593 NR Desc: F20B17.20
  misc_feature: Homolog of GI Number: 34903640 NR Desc: B1015E06.3
  misc_feature: Homolog of GI Number: 34909436 NR Desc: OSJNBa0014K08.12
  misc_feature: Homolog of GI Number: 4587551 NR Desc: F15I1.18
  misc_feature: Homolog of GI Number: 34909432 NR Desc: OSJNBa0014K08.9
MEAVVECAKCECCGLVEDCTRDYILGVRAAFGGRWLCGLCSEAVRDEAARGTTARGPAAAAAGLEDALRDHMAFCGKCRRSPAFRVADGMRQMLRRCSK

SEQ ID NO: 7039 - DNA, 616 bp, Zea mays
  misc_feature: Ceres CLONE ID no. 1290738
  misc_feature: Ceres CDNA ID no. 25445690
  CDS (170)..(391): REFERENCED BY SEQ ID NO: 7040
cctgaaaatatttcgaatcataattttattactcgaatttctaattatctgaattaccctacccggaaatatcagctcaccccagaccgcccaacaccagctccaccctcgccaccaaccgcccccgcaccacggccagaaccctagtcacttccccgccgcccactccatggaggacgacgccatctcgacgctcatggacatcgacgactcgccgctcagcgctgcgggggccgggttcctcgacgaggaggacggggagggcgagatgttcttcgccccgcaccgcgcggcccgcggcggcgctggcgatgcccgcgggcccctccccttttccgggttcttcaacagcttcgacggcgccgatttcgacgacgacgacctcgcctgagggaactgccgcccggttcggtaacggatgttgttcgtggatcgcgaatcgtgttatgtcgataccgtgatggggtctcttaattagcgcatcgattcagactcgtttgggcaatctgaagatgtttagggatcaacattacctttgtgtacctttgtggcctatggttcgtggatgcacatggatcaatataagtacctttgtgcccaaaaaaaaaaaaaaaaa

SEQ ID NO: 7040 - protein, 73 aa, Zea mays; identical to SEQ ID NO: 1270
  misc_feature: Ceres CLONE ID no. 1290738
  misc_feature: Ceres CDNA ID no. 25445690

SEQ ID NO: 7041 - DNA, 650 bp, Zea mays
  misc_feature: Ceres CLONE ID no. 1290807
  misc_feature: Ceres CDNA ID no. 35383379
  CDS (41)..(379): REFERENCED BY SEQ ID NO: 7042
attcgcttcgatccccagaggcacagacgagacgacagagatgaaggacggaacgtcgtcggggggaggggcgttcgctgcgggcagcgatccaaggcagccgtcgacggcgaagccatacgcgccgccgaagctgtcgccccaggacctacccatcgactatgcaggcttcctcgccgtcgccttcggcgtcctcggcgtcatgctccgctacaaggtgtgctcgtggatcgcaatcatcttctgcgctcagtcgttggcaaacatgaagaactttgagaacgatctgaagcagctttctatggccttcatgtttgctgttatgggtctggtgacgaactattttggccccgctcgtccaggcagtacaaagcgctaaactgcggaagaacatgtgctacattcttcataggactttttggtgcttccgatagctttgccatcggtgctgacattatgtatgtccaatttgagcaaacgtcataggtatgggcatcaaattaatggaccggtacatgtatgatgctcaataatttatttgtgcaatactagtaaacgcatagactgtttgaacgagtacttggtttctccggatatgttgatcaatgttttctggacttgatgcttcggtcttaaaaaaaaaaaaaaaa

SEQ ID NO: 7042 - protein, 112 aa, Zea mays
  misc_feature: Ceres CLONE ID no. 1290807
  misc_feature: Ceres CDNA ID no. 35383379
  misc_feature (12)..(111): Pfam Name: UPF0139 PFAM Desc: Uncharacterised protein family
  misc_feature: Homolog of GI Number: 46250139 NR Desc: MGC81480 protein
  misc_feature: Homolog of GI Number: 12654705 NR Desc: PTD008 protein
  misc_feature: Homolog of GI Number: 62899649 NR Desc: UPF0139 protein CGI
  misc_feature: Homolog of GI Number: 49522721 NR Desc: MGC82186 protein
  misc_feature: Homolog of GI Number: 61837351 NR Desc:  similar to cDNA sequence BC056474
  misc_feature: Homolog of GI Number: 51712614 NR Desc: similar to cDNA sequence BC056474
MKDGTSSGGGAFAAGSDPRQPSTAKPYAPPKLSPQDLPIDYAGFLAVAFGVLGVMLRYKVCSWIAIIFCAQSLANMKNFENDLKQLSMAFMFAVMGLVTNYFGPARPGSTKR

SEQ ID NO: 7043 - DNA, 868 bp, Zea mays
  misc_feature: Ceres CLONE ID no. 1290829
  misc_feature: Ceres CDNA ID no. 36591231
  CDS (174)..(632): REFERENCED BY SEQ ID NO: 7044
tttagggtttgtttggccctattcgcacacacccacgccgtcggatcctcctgccctccccacgtccacctctctccgccgaagaatcggcggcggcggcggcggcggcgagcgccttcccttgtcaaaatccacccggcggcagagcagagcctcgttgctgaagaggggagatggcaggcatgaccgatatgccgatgaggccggcgcggccgggcccgccgatgcagcaccggggccctccgccgatggcgcgcctccgccccgaaccaatcgaccgcgagaagacctgccctctgctgctcagggttttcacaagggttgctggtcaccaccaaaatgaagagttttctgtgagagggaaagaaccaaaggatgaagttcagatttacacatggaaggatgccactctccgtgagcttactgatcttgtgaaagaggttgctcttccagcaaggaaaaggaacgcgaggctttcttttgcatttgtatacccagacaagaatggtcgttttgttgtcagacaggtgggttcgaccttcgcttatggccatggaagaggtgatgatgccaaaactcttgcagagcttgggttccagattggcgattacctgagcgtcgcgatcatgtaagccggtgcccgcaatgagttccggtgactgcaccggatagaactgatgtgatgtaaaaaatgcattggttgcgacgagcaagggaggagtatctgttagcgctaggaagtggaaccaaaactgtctgtaatgccggtactaccaaagttgcctagacactttgaacgatcaaagcgtatggtatggtttcttgttggtatggtgcttgtctgcggtgcctaaaaaaaaaaaaaaaa

SEQ ID NO: 7044 - protein, 149 aa, Zea mays
  misc_feature: Ceres CLONE ID no. 1290829
  misc_feature: Ceres CDNA ID no. 36591231
  misc_feature (27)..(148): Pfam Name: SAP18 PFAM Desc: Sin3 associated polypeptide p18
  misc_feature: Homolog of GI Number: 50904867 NR Desc: putative P18
  misc_feature: Homolog of GI Number: 33667908 NR Desc: P18
  misc_feature: Homolog of GI Number: 21618189 NR Desc: sin3 associated polypeptide p18
  misc_feature: Homolog of GI Number: 57095274 NR Desc:  similar to sin3 associated polypeptide p18
  misc_feature: Homolog of GI Number: 23612496 NR Desc: sin3 associated polypeptide p18
  misc_feature: Homolog of GI Number: 56500149 NR Desc: sin3 associated polypeptide p18
  misc_feature: Homolog of GI Number: 23488356 NR Desc: KED
MTDMPMRPARPGPPMQHRGPPPMARLRPEPIDREKTCPLLLRVFTRVAGHHQNEEFSVRGKEPKDEVQIYTWKDATLRELTDLVKEVALPARKRNARLSFAFVYPDKNGRFVVRQVGSTFAYGHGRGDDAKTLAELGFQIGDYLSVAIM

SEQ ID NO: 7045 - DNA, 429 bp, Zea mays
  misc_feature: Ceres CLONE ID no. 1290916
  misc_feature: Ceres CDNA ID no. 36706977
  CDS (98)..(295): REFERENCED BY SEQ ID NO: 7046
atccctaatcccagcgcagcacaaacaaacaccgcgccgccgccacagctttgccctacagaatccttttactccgaagattctcaagacgcccctgatggctccccgcgtcgcctccgctctgctcttcgtcgtggccgtcctcgtggcctccgcggcggcgcaggagtccatggcgcccgcgtctgctccggcgccgggaccggtcgctggcgcggcctccgctccggcctccgctgtggccgtggtgtcgtccgcactgctgtccctccttatgacggccctgatgcagtagaagtatcatactagatttgagcgggaatttggttcagtgttgctattcctcattctttttgtatcatatatgtctgcgacatttatatatatgaataaagttggatgatctgctgcataaaaaaaaaaaaaaaa

SEQ ID NO: 7046 - protein, 65 aa, Zea mays
  misc_feature: Ceres CLONE ID no. 1290916
  misc_feature: Ceres CDNA ID no. 36706977
MAPRVASALLFVVAVLVASAAAQESMAPASAPAPGPVAGAASAPASAVAVVSSALLSLLMTALMQ

SEQ ID NO: 7047 - DNA, 785 bp, Zea mays
  misc_feature: Ceres CLONE ID no. 1291002
  misc_feature: Ceres CDNA ID no. 29191444
  CDS (139)..(585): REFERENCED BY SEQ ID NO: 7048
gcgattggcgattccatttctaccccgagacctccagccgtccgcccctgaaccctcagccttctccgtcccgcctcggcactcgacggccgccggcacacaccgcgcagtctcgagacaggaaccggaggaacgaggatggaggatgactcgccgctgacgaagacgatgaagggtgcggtgacaggactcgccgcggggaccatctggggcaccgtcgtcgccacctggtacgacgtgccccgtgtggagcgccacgtcgcgctccctggccttatccggacgctcaagatgtgcggcacctacggggccaccttcgccaccatcgggggcctctacatcggcgtcgagcagctcgtgcagagccagcgcaagaagcgcgacttcgtcaacggggccgtcggcgcgttcgttgccggagcctctgtctgcggctacagaggaaagagtattcagtcagccctcatcggaggctcctgtctggctttcacatctgctgtgctggacattggcggcaatacgaccagagttgacaacggcaaagagtactatgcctacacaactgagaagaagcctgcaaattgattccaagtctgcacttctagcaaacaatcttgcacgccatcaactcagtgaatttgaagctgatgtgcagttttatgtttgttttgctgatgcaattagttcttaagcaaatccatggcaacttgtttatcgctgatgcttgagggatggaaatgacactcagaataaatctttgatttgctttaaaaaaaaaaaaaaaa

SEQ ID NO: 7048 - protein, 148 aa, Zea mays
  misc_feature: Ceres CLONE ID no. 1291002
  misc_feature: Ceres CDNA ID no. 29191444
  misc_feature (2)..(129): Pfam Name: Tim17 PFAM Desc: Tim17/Tim22/Tim23 family
  misc_feature: Homolog of GI Number: 79324885 NR Desc: protein translocase/ protein transporter
MEDDSPLTKTMKGAVTGLAAGTIWGTVVATWYDVPRVERHVALPGLIRTLKMCGTYGATFATIGGLYIGVEQLVQSQRKKRDFVNGAVGAFVAGASVCGYRGKSIQSALIGGSCLAFTSAVLDIGGNTTRVDNGKEYYAYTTEKKPAN

SEQ ID NO: 7049 - DNA, 1025 bp, Zea mays
  misc_feature: Ceres CLONE ID no. 1291042
  misc_feature: Ceres CDNA ID no. 36590909
  CDS (57)..(839): REFERENCED BY SEQ ID NO: 7050
cgaaaaattcttccccctccggcgccgcctcccccagacacttcgccgccggcaagatgggccgcgtgattcgcgctcagcgcaagggtgcggggtccgtgttcaagtcccatacccatcaccgcaagggccctgcccggttccggtccctcgacttcggcgagcgcaacgggtacctgaagggcgtggtcaccgacgtcatccacgacccgggccgcggcgcgccgctggccaaggtcaccttccgccatccattccggtacaagcaccagaaggagctgttcgtggctgctgagggcatgtacactggccagttcgtttactgcggacgccgtgctacactctccattggcaacgtcctgccgctcagggggatccctgagggtgccgttgtctgcaacgttgagcaccacgtcggggatcgcggtgtcttcgccagggcgtctggggactacgcgatcgttatcagccataacccagacaacggcacatcgagaatcaagctcccctctggtgctaagaagattgtcccaagtagctgccgtgccatgattgggcaggtcgctggtggtggcaggactgagaagccaatgctgaaggctggcaatgcctaccacaagtaccgcgtcaagaggaacagctggcctaaggtgcgtggtgtggccatgaaccctgttgagcatcctcatggaggaggtaaccaccagcacattggtcatgcctccactgtccgccgtgatgctcctcctggccagaaggttggtcttattgccgcaaggagaactggtcgtcttaggggccaagctgctgctactgctgccaaggctgacaaggcctaaatttgcgttacgcagcattagccatcttatatagattaaaaatatttttcctgcatggatcttaattttgtatcattctgatagcgatgaactgatgatactatggacattccagtttttgttgcaagctattgatgatattttttcttctttaatcaaagttgtactataaaaaaaaaaaaaaaa

SEQ ID NO: 7050 - protein, 260 aa, Zea mays; identical to SEQ ID NO: 6928
  misc_feature: Ceres CLONE ID no. 1291042
  misc_feature: Ceres CDNA ID no. 36590909
  misc_feature (11)..(90): Pfam Name: Ribosomal_L2 PFAM Desc: Ribosomal Proteins L2
  misc_feature (96)..(231): Pfam Name: Ribosomal_L2_C PFAM Desc: Ribosomal Proteins L2
  misc_feature: Homolog of GI Number: 77556802 NR Desc: 60s ribosomal protein l2
  misc_feature: Homolog of GI Number: 19343 NR Desc: ribosomal protein L2
  misc_feature: Homolog of GI Number: 81074776 NR Desc: ribosomal protein L2
  misc_feature: Homolog of GI Number: 22135870 NR Desc: 60S ribosomal protein L2
  misc_feature: Homolog of GI Number: 20001 NR Desc: 60S ribosomal protein L2
  misc_feature: Homolog of GI Number: 12054507 NR Desc: ribosomal protein L2
  misc_feature: Homolog of GI Number: 13605569 NR Desc: AT4g36130/F23E13_20
  misc_feature: Homolog of GI Number: 798818 NR Desc: 60S ribosomal protein L2
  misc_feature: Homolog of GI Number: 67633686 NR Desc: 60S ribosomal protein L8
  misc_feature: Homolog of GI Number: 6562271 NR Desc: ribosomal protein L8 homolog

SEQ ID NO: 7051 - DNA, 783 bp, Zea mays
  misc_feature: Ceres CLONE ID no. 1291487
  misc_feature: Ceres CDNA ID no. 36707057
  CDS (58)..(537): REFERENCED BY SEQ ID NO: 7052
actcatctatttcttttgaatcattgtatactagctagctagctagccagagcttgtatggccactgctcatcatgcggatgaccatcgtgcagggagaagaagcgaggccgtcggagagaactacatgaggggcctctacggcgacgatgactacaacgccacccactacggtcaccagcagcagcagcggccgccgcccgcgcccatggcggtggccaaggcgttagccacagccacggcagccttctccatgttgttgttgtcggggctggcggtgacgggcacggtgctggcgctcatcgtggcgacgccattgatggtgatcttcagccccgtgctggtgccggcggccatcacggtggcgctgctcacggtaggcatcgtttcgtcgggagggttcggcgtggctgcggtggctgtgctggcgtgggtgtaccgctaccttcagaccacgacctcgtcgtcgggtcagcagccgcacatcgtcaaggactgggcgcagcagcaccgtctggagcagacacgcgcgcactgaaataaaaaaaaaagcgtagtacccctccgtttctttttatttgttgctgtttagttcatatttgtcactgtttcgttaaaaatgaactagcgggataacgagaacgggaggtaatatagcttttcatttaatgtaatgtaacgtaatcttatgtttgcagcagtaataatgtgtattatatatttgcagcaataaaagggcgagctcgatcgacccctctacgaataaataaaaaaaaaaaaaaaa

SEQ ID NO: 7052 - protein, 136 aa, Zea mays; identical to SEQ ID NO: 6622
  misc_feature: Ceres CLONE ID no. 1291487
  misc_feature: Ceres CDNA ID no. 36707057
  misc_feature (26)..(122): Pfam Name: Oleosin PFAM Desc: Oleosin
  misc_feature: Homolog of GI Number: 50899460 NR Desc: putative oleosin
  misc_feature: Homolog of GI Number: 1622939 NR Desc: oleosin
  misc_feature: Homolog of GI Number: 5381321 NR Desc: 15 kDa oleosin
  misc_feature: Homolog of GI Number: 963064 NR Desc: low molecular weight oleosin
  misc_feature: Homolog of GI Number: 1076817 NR Desc: oleosin 16
  misc_feature: Homolog of GI Number: 1171352 NR Desc: 16 kDa oleosin
  misc_feature: Homolog of GI Number: 82705 NR Desc: lipid body
  misc_feature: Homolog of GI Number: 2119749 NR Desc: oleosin
  misc_feature: Homolog of GI Number: 460803 NR Desc: oleosin
  misc_feature: Homolog of GI Number: 70663972 NR Desc: OSJNBa0079A21.14

SEQ ID NO: 7053 - DNA, 1037 bp, Zea mays
  misc_feature: Ceres CLONE ID no. 1291513
  misc_feature: Ceres CDNA ID no. 36707058
  CDS (54)..(812): REFERENCED BY SEQ ID NO: 7054
atctgatgccgtaacacaaggctgaatttttgttcggtctagccgacccgacgatggcgtccagcgacgggaaaccactgccaaccccggcctctgtgggcggcggcggcggcagcagcaccgcgccgcccgggcagccgaccacggtagcgtccaaggtgctggacatgggcgcggcggcgatgcagtcgttgcgccccgtgaagcaggcgaagcagcacatgtgcacgttcgcgctgtacgcgcacgacccgaagcggcaggtggagacgcaccactacgtctcccgcctcaaccaggacttcctccagtgcgccgtctatgactccgacaaagccgacgcgcgtctcatcggcgtggagtacatcgtgtcgaggaagatcttcgactcgctgccggcggaggagcagcggctgtggcactcgcacgcgcacgagatcaagtcaggcctgtggacgagcccgcacgtggcggggctgctggagaaggcggagctggaccacatggccgccacgttcggcaagttctggtgcacctggcaggtggaccgcggcgaccgcctgccgctgggcgcccccgcgctcatggtgtccccacaggccgaccccgccgcagccgtgcgccccgacctggtccggaagcgagacgacaggtacggcctctccacggaggagctccgcgccgctagggccgacgtcgaggcgcccgccgaggagcacccgggccaggccgactactggctccgccaccgcaagggcttcgcggtggacgtcgtgccgcacgagatgaagcgtcacgcgccgtttccgtgagccgtgaccaaccggtgttttacagtggcgcatgtgtaataaaaccaaacgatccagcaggcgtctccgtccgaactcgtgaatggcacgcgtttatttgtttttcagttcatgatgttcaaatcggcagtacgcatgtgttatggatgcgtgtgtattggatgaagtggatcggtgagaacagactttagcctcgcaggtgttaaaccaaaaaaaaaaaaaaaa

SEQ ID NO: 7054 - protein, 252 aa, Zea mays
  misc_feature: Ceres CLONE ID no. 1291513
  misc_feature: Ceres CDNA ID no. 36707058
  misc_feature: Homolog of GI Number: 34909516 NR Desc: P0481E12.28
  misc_feature: Homolog of GI Number: 34910820 NR Desc: P0456A01.15
  misc_feature: Homolog of GI Number: 51038130 NR Desc: putative embryo
  misc_feature: Homolog of GI Number: 66776103 NR Desc: LigA
  misc_feature: Homolog of GI Number: 66776452 NR Desc: Protein
  misc_feature: Homolog of GI Number: 66776365 NR Desc: PE
  misc_feature: Homolog of GI Number: 67663518 NR Desc: Alpha/beta hydrolase fold:Short
  misc_feature: Homolog of GI Number: 67987629 NR Desc: Thymidylate kinase
  misc_feature: Homolog of GI Number: 66778616 NR Desc: Serine O
MASSDGKPLPTPASVGGGGGSSTAPPGQPTTVASKVLDMGAAAMQSLRPVKQAKQHMCTFALYAHDPKRQVETHHYVSRLNQDFLQCAVYDSDKADARLIGVEYIVSRKIFDSLPAEEQRLWHSHAHEIKSGLWTSPHVAGLLEKAELDHMAATFGKFWCTWQVDRGDRLPLGAPALMVSPQADPAAAVRPDLVRKRDDRYGLSTEELRAARADVEAPAEEHPGQADYWLRHRKGFAVDVVPHEMKRHAPFP

SEQ ID NO: 7055 - DNA, 869 bp, Zea mays
  misc_feature: Ceres CLONE ID no. 1291907
  misc_feature: Ceres CDNA ID no. 36707086
  CDS (61)..(462): REFERENCED BY SEQ ID NO: 7056
atctcacggctagctagcacaagcatagtgcaggggcttggcatccaaggcctgagagccatggcatccaaggccgtcctcttcttggctctcaacctcctgttcttcacggtggccaacgcctgcggcaactgcccgaccccaacgcccccggtcgagccaccgccgccgcctcctgctgctaccccacccccttcgtccagcggcaagtgcccgctgaacgcgctcaagttcggcgtgtgcgccgatgtgctcggcctcgtcaaaggcgaggttggcaaggtgcctgccgagccatgctgtaccctcatcaaaggccttgcggacttcgaggccgccgtctgcctctgcacggccatcaaggccaacgtgctcggcgtcgtcatcgatgtccccatcaagctcagcgccctcgtcaactactgtggcaagtgcgtgcccaagggctacttgtgcgcgtaagcagctccgcgcggtcacacgctcgtagctgttcacgtacgagattatatatgcacgcaccctgcatggcacgaatgcatgcattgtgtctgctgatatatctctcctgtctcagttgttgtgcaccttcggttctacaaaacctagaaccattccagccaaatacttacttgtcagttcaattcgcatgtattgtctcttgttgaattcccatttttcttttgtatttggtcatttcctcgtaagagtccgacaccttctcgaagggaaaaaaaagaggggtgttgcttctagttttttttatatctacgaatcatgtaatttgttgagagtcatttgatgtgtatgtaaaaccaaacacttgaacttgtagtaccttattcgatttgttaaaaaaaaaaaaaaaa

SEQ ID NO: 7056 - protein, 133 aa, Zea mays
  misc_feature: Ceres CLONE ID no. 1291907
  misc_feature: Ceres CDNA ID no. 36707086
  misc_feature (51)..(132): Pfam Name: Tryp_alpha_amyl PFAM Desc: Protease inhibitor/seed storage/LTP family
  misc_feature: Homolog of GI Number: 4240035 NR Desc: ZmGR1b
  misc_feature: Homolog of GI Number: 4240033 NR Desc: ZmGR1a
  misc_feature: Homolog of GI Number: 50927845 NR Desc: OSJNBa0010H02.24
  misc_feature: Homolog of GI Number: 50911527 NR Desc: putative ZmGR1a
  misc_feature: Homolog of GI Number: 50911525 NR Desc: root
  misc_feature: Homolog of GI Number: 50927843 NR Desc: OSJNBa0010H02.23
  misc_feature: Homolog of GI Number: 4454097 NR Desc: hybrid proline
  misc_feature: Homolog of GI Number: 39748094 NR Desc: lipid transfer protein
  misc_feature: Homolog of GI Number: 60542797 NR Desc: arachidonic acid
  misc_feature: Homolog of GI Number: 21360370 NR Desc: extensin
MASKAVLFLALNLLFFTVANACGNCPTPTPPVEPPPPPPAATPPPSSSGKCPLNALKFGVCADVLGLVKGEVGKVPAEPCCTLIKGLADFEAAVCLCTAIKANVLGVVIDVPIKLSALVNYCGKCVPKGYLCA

SEQ ID NO: 7057 - DNA, 748 bp, Zea mays
  misc_feature: Ceres CLONE ID no. 1292186
  misc_feature: Ceres CDNA ID no. 40351740
  CDS (166)..(549): REFERENCED BY SEQ ID NO: 7058
ctcggcctctcctcccggcttcctcacacggcactccagccgctagccctcactcaaccagacaaccagtacaccaccgccaccaagcccgggccgaataactctgccgggcaaccgccgcccttcgccggcaaagaacgcccaccagatccaccccggcctgctatggagtccgcggtgaacccgaaggcgtacccgctggctgatgcgcagctgacgatgggtatcctcgatatcatccagcaggccgccaactacaagcagctcaagaagggagcgaacgaagcgacgaaaaccctgaatagggggatatcggagttcgttgtgatggcggcggacacggagcctctcgagatcctgctccacctccccttgttagccgaggataagaacgtcccatatgtatttgttccatcgaaacaagctcttggccgtgcttgtggtgtgacaagacccgtcattgcttgctcagtgaccagcaatgagggtagccagctgaaacaacagatacagggtctcaaggactcgattgagaagcttctcatctgatttacctaagatctttcagtgtgatgggcctcggcgacacatttttcagaggcttggactggtgatggtgtcttgtttacattacgctttccaaactatatttgaacactgctaagtcaatcatatttgaattgtgcttcaaaaaaaaaaaaaaaaaaaaaaaaaaaaaaaaaaaaaaaaaagaaaaaaaaaaaaaaaa

SEQ ID NO: 7058 - protein, 127 aa, Zea mays
  misc_feature: Ceres CLONE ID no. 1292186
  misc_feature: Ceres CDNA ID no. 40351740
  misc_feature (19)..(113): Pfam Name: Ribosomal_L7Ae PFAM Desc: Ribosomal protein L7Ae/L30e/S12e/Gadd45 family
MESAVNPKAYPLADAQLTMGILDIIQQAANYKQLKKGANEATKTLNRGISEFVVMAADTEPLEILLHLPLLAEDKNVPYVFVPSKQALGRACGVTRPVIACSVTSNEGSQLKQQIQGLKDSIEKLLI

SEQ ID NO: 7059 - DNA, 901 bp, Zea mays
  misc_feature: Ceres CLONE ID no. 1292878
  misc_feature: Ceres CDNA ID no. 25445702
  CDS (177)..(692): REFERENCED BY SEQ ID NO: 7060
atatttcagcccgttcttttagctagcccatcagcccatttagagcgcgttagcactagggtttcaccagctcttaaggccgccgccgcctcggtgcctcctcgcttcgaagtgttcgtgcgaaggcgaccctccctccttcgctccttccgcgccgcctcccggccgtcgccgccatggtgaagtactcgcaggagccgggcaaccctaccaagtcggctaaggccatgggcagggatctgagggtccacttcaagaacacaagggagacagcctttgcgcttcgcaagttgtctttgaccaaggctaagcgataccttgaggatgttattgctcacaagcagacaattcccttccggagatactgtgggggtgttggtcgcaccgcgcaagctaagtcgcgccactccaatgggcagggccgctggcccgttaaatcagccaggttcatcctggatttgctgaagaatgctgagagtaacgctgatgtgaaaggcttggatgtggacaacctctatgtttcacacatccaggtgaatcaagcccagaagcagaggcgccgcacctaccgtgctcacgggcgcatcaatccctacatgtcctcaccttgccacattgagctgatcttgtcagagaaggaagagcctgtgaagaaagaggctgacaacattgtcgcagcaaggaagcagtgaagtatatcagcatgctgatcgaggccattttgtcgaagtattatagccgtagctcttttatgtaccttttcaggcagccttgcctctcgagacgtttccggcaccgatgttttaaatctggattatctatgttctgtactgaactactgtgttggactgtaagttcagctcgtaatacaatagctcttaagataaaaaaaaaaaaaaaa

SEQ ID NO: 7060 - protein, 171 aa, Zea mays
  misc_feature: Ceres CLONE ID no. 1292878
  misc_feature: Ceres CDNA ID no. 25445702
  misc_feature (17)..(153): Pfam Name: Ribosomal_L22 PFAM Desc: Ribosomal protein L22p/L17e
  misc_feature: Homolog of GI Number: 2668748 NR Desc: ribosomal protein L17
  misc_feature: Homolog of GI Number: 50899126 NR Desc: putative ribosomal protein L17
  misc_feature: Homolog of GI Number: 50947889 NR Desc: putative ribosomal protein L17
  misc_feature: Homolog of GI Number: 19104 NR Desc: ribosomal protein L17
  misc_feature: Homolog of GI Number: 421987 NR Desc: ribosomal protein L17.2
  misc_feature: Homolog of GI Number: 12240036 NR Desc: ribosomal protein L17
  misc_feature: Homolog of GI Number: 19102 NR Desc: ribosomal protein L17
  misc_feature: Homolog of GI Number: 421985 NR Desc: ribosomal protein L17.1
  misc_feature: Homolog of GI Number: 15824574 NR Desc: ribosomal protein
  misc_feature: Homolog of GI Number: 27882190 NR Desc: RPL17 protein
MVKYSQEPGNPTKSAKAMGRDLRVHFKNTRETAFALRKLSLTKAKRYLEDVIAHKQTIPFRRYCGGVGRTAQAKSRHSNGQGRWPVKSARFILDLLKNAESNADVKGLDVDNLYVSHIQVNQAQKQRRRTYRAHGRINPYMSSPCHIELILSEKEEPVKKEADNIVAARKQ

SEQ ID NO: 7061 - DNA, 678 bp, Zea mays
  misc_feature: Ceres CLONE ID no. 1292916
  misc_feature: Ceres CDNA ID no. 25446999
  CDS (116)..(262): REFERENCED BY SEQ ID NO: 7062
aactccgatcgcacgagccccagcccccaaacagcctccaggtctagctagggtttcgtctccgccgcttgctctaatcctctcccggcacgcgacacgcgagggcgcagcgtttatggcggcgacaccggcggacgcgaagaccgaggccgccaagatggacctcctcgaggacgacgacgagttcgaagagttcgagatcgaccaagtggtaaaaaatattgctgttatatattttgtctggtgtttcctccaaaagtgacgtagttctgcaaatctctaacttctgaagactaatgattatatatgaatgggatgagaaggaagaaggcaatgaagctgtccagcagtgggaggatgattgggatgacgatgatgtgaatgatgatttctcgctgcagctgaggaaagaactggagggaagcaacgcccagaagagctgaagtattatttctccagtttacaaatgatccttctatgccagctacttctggaaatcggaacctttatgtgatttgtgctgctgggagcaatcgaactctggagtaaaaaagtaaccataccagtgatttctaagtatgaacggcaggaagttgacggacatcagtcggctatttaaaaaatatctcagttgtggttagaatatgccacagttcttatctaaaaaaaaaaaaaaaa

SEQ ID NO: 7062 - protein, 48 aa, Zea mays
  misc_feature: Ceres CLONE ID no. 1292916
  misc_feature: Ceres CDNA ID no. 25446999
  misc_feature (4)..(43): Pfam Name: DSS1_SEM1 PFAM Desc: DSS1/SEM1 family
  misc_feature: Homolog of GI Number: 37050895 NR Desc: deleted in split hand/splt foot protein 1
MIIYEWDEKEEGNEAVQQWEDDWDDDDVNDDFSLQLRKELEGSNAQKS

SEQ ID NO: 7063 - DNA, 970 bp, Zea mays
  misc_feature: Ceres CLONE ID no. 1292965
  misc_feature: Ceres CDNA ID no. 36707383
  CDS (3)..(896): REFERENCED BY SEQ ID NO: 7064
atccccgccacaacggcgccggcagcggcattagcaacctaaccctcgcccaaccgacacacttcaacacactgtacacccgaccggaccctcccaccacccatgggcctgtgcgtgtcgctcggcgggacggccggcgccgaggccgcgcgggcggcggcgcccagctgcaagtgcggcacggcgctggtgctcatgcccagcggcgacatgcgggagtaccctttcccggcgacgacggccgcgcgcgtgctggaggacgcctccgccgccgccgacggcggcgatggctggctcctgtgcgacgcggacgggatgggcttcgagggcccggccccgccggcggtgccccacgcggagccgctccgcgcggggcagctctacttcgtgctcccggccgccgcgcgccgccgcggcctgcggcgcgaggaggtcgccgcgctcgccgtccgggcctcggccgcgctctcctcccgggcctccgcatccgcctccgccgcgccgggaaggcggaggcgcggcgccgtcgtcgcgcccctcgtcttcgcgccaccgccggaggacgaggaggaggagcgcgagcagcagaagtcgacggccttggcggcgccaccggtgcggcggcccgcgcgccccggcaggcgcctcgtgcggttcgcgtcggacctcaccgcgatccccgagtgagtaggcgggtcgggctcagacggacgggaacggattcgctgccattgaattggctctggaactggaagcagaggacgaggacgcctggagtcgggacggacagaggaaattccaggcaggcaccgtcagattctcatcgaggggaggccctgatcactgcacgtgcaagtcatggacgaaacgtgaatacaaatgtaaaaaatgaatagcgatgattcatggtcttaccaagatcgctccacaactcacttgcgtagttgcatgtcgaaaaaaaaaaaaaaaa

SEQ ID NO: 7064 - protein, 194 aa, Zea mays
  misc_feature: Ceres CLONE ID no. 1292965
  misc_feature: Ceres CDNA ID no. 36707383
  misc_feature: Homolog of GI Number: 67987177 NR Desc: 4Fe
  misc_feature: Homolog of GI Number: 66776365 NR Desc: PE
  misc_feature: Homolog of GI Number: 66778264 NR Desc: LigA
  misc_feature: Homolog of GI Number: 66776813 NR Desc: Phosphoribosylaminoimidazole
  misc_feature: Homolog of GI Number: 66776103 NR Desc: LigA
  misc_feature: Homolog of GI Number: 66780099 NR Desc: PE
  misc_feature: Homolog of GI Number: 67664382 NR Desc: LigA
  misc_feature: Homolog of GI Number: 66779226 NR Desc: Response regulator receiver:ATP
  misc_feature: Homolog of GI Number: 66779191 NR Desc: LigA
MGLCVSLGGTAGAEAARAAAPSCKCGTALVLMPSGDMREYPFPATTAARVLEDASAAADGGDGWLLCDADGMGFEGPAPPAVPHAEPLRAGQLYFVLPAAARRRGLRREEVAALAVRASAALSSRASASASAAPGRRRRGAVVAPLVFAPPPEDEEEEREQQKSTALAAPPVRRPARPGRRLVRFASDLTAIPE

SEQ ID NO: 7065 - DNA, 1096 bp, Zea mays
  misc_feature: Ceres CLONE ID no. 1293139
  misc_feature: Ceres CDNA ID no. 29191445
  CDS (203)..(604): REFERENCED BY SEQ ID NO: 7066
agggttttagcccggtaccccgaatcccgctcctccgccgcctcgcgtccgcccttcctcttggcgcgctccgatccaaggttcctgccgcctcctcgtcggcgaaagtctccctctattttcctcgttccttcgctcgttgttccccgtctcacgtctccgcgtttgctgttgcctgtttgtcatcgatgacggagcagagatggcggtgccgctgctgacaaagaagatcgtgaagaagcgggtcaagcagttcaagaggccccatctcgaccgctataagtgccttaagccaagctggcgcaggccaaagggtattgactcccgtgttaggaggaagttcaagggatgcaccttgatgcccaacattggttatggctctgacaaatcaaccaggcactacctccccaacaagttcaagaagtttgtggtgcacaatgtctctgagttggagttgctcatgatgcacaacagaacctactgtgccgagatcgcccacaacgtttcaaccaagaagcgcaaggagattgttgaacgtgccgcgcagctcgacattgtggtcaccaacaagctcgccaggctccgcagccaggaggatgagtagtctggtttcttgtcataacggccaactagatcctgccattcccggctgtaggaaactactctgttttgtgccttgttagtacttagaataccagacatttctacatttttggtaccactagcgacttctatgtggcatattctactgttatcttgcgtcttaattacctgcacctcatggtttcattggtgtcgtatgtcatccttgcattggtgggcaattcatggccgcgctgggtgcacgtacggtggttttgcttattttatccagtctatgggtagcaaagggcttgttgtatggttgcatgacaagtttggtcaggtttgctaaaatgatggatttgtttgccctctaccatttgggctgttgctggctagcgcacaacactactggataggttaatgcaagtatgcaatgtactctctatcccacgtacagtttttttaatgcaaaaaatgcaatgtatgtttatttttaaaaaaaaaaaaaaaa

SEQ ID NO: 7066 - protein, 133 aa, Zea mays; identical to SEQ ID NO: 6698
  misc_feature: Ceres CLONE ID no. 1293139
  misc_feature: Ceres CDNA ID no. 29191445
  misc_feature (14)..(123): Pfam Name: Ribosomal_L32e PFAM Desc: Ribosomal protein L32
  misc_feature: Homolog of GI Number: 50947773 NR Desc: putative ribosomal protein L32
  misc_feature: Homolog of GI Number: 76057835 NR Desc: ribosomal L32
  misc_feature: Homolog of GI Number: 71534997 NR Desc: ribosomal protein L32
  misc_feature: Homolog of GI Number: 13899057 NR Desc: ribosomal protein L32
  misc_feature: Homolog of GI Number: 40287540 NR Desc: ly200 protein
  misc_feature: Homolog of GI Number: 77745481 NR Desc: ly200
  misc_feature: Homolog of GI Number: 23198054 NR Desc: ribosomal protein L32
  misc_feature: Homolog of GI Number: 21555143 NR Desc: ribosomal protein L32
  misc_feature: Homolog of GI Number: 10177580 NR Desc: ribosomal protein L32
  misc_feature: Homolog of GI Number: 31241003 NR Desc: ENSANGP00000017702

SEQ ID NO: 7067 - DNA, 1501 bp, Triticum aestivum
  misc_feature: Ceres CLONE ID no. 1313803
  misc_feature: Ceres CDNA ID no. 29191777
  CDS (86)..(1117): REFERENCED BY SEQ ID NO: 7068
cacttcgcagcccccagccgcaaccgcgccgtcaccgaccgctccccgtccggccgtcagattttgaaggttcacagcaggagagatggcaactctaaccagccttgcctcaaacccgaatccaaacaagtcattcgaggtcctgcctaatccgggtgactccctctcaagcctcagttttagcccgaaaagcaatcttctggtggcaacttcctgggataaccaggtgaggtgttgggagataggtaatggtaacagtcagccaaaggcatccatatcacatgatcagccagtgctctgctcagcctggaaagatgatgggactactgtcttctctggagggtgtgataaacaggtcaaaatgtggcctctgctgtctggtgggcaggctcagacggttgcaatgcatgatgcacctgtcaaggaggtctcttggatttctcagatgaatcttcttgtctcgggaagctgggacaagacgctaaggtattgggacacaagacagccaaatcctgcccatgttcagcaacttcctgatcgttgctacgcacttgctgtgaattatccccttatgattgtgggaacagctgatcgcaatattgtgatcttcaacttgcagaatcctcagactgagtttaagcgtattcaatcacctctgaaataccagacacggtgcgttgctgcctttccagatcaacaaggattcctggtgggttccatagaaggaagagttggtgtgcatcatattgatgattcacagcaaagcaaaaacttcacattcaaatgtcacagggaaggaaatgatatcttctctgtcaattcactcaactttcaccctgttcatcacacgtttgccacagctggatctgatggtgctttcaacttttgggataaggatagcaagcagagacttaaggctttcagtcggtgtcctcaacccattccttgcagtagcttcaataatgatggctcaatatttgcttatggggtctgctatgactggagccgtggtgctgagaaccataatcctgcaaatgcaaagacatccatctatctccacagtccccaggaagccgaggtgaaaggaaagccaagaatcgcaacaggacggaagtgatggcatcctgcctgctgaaaagtcgatagttgtgcaagagatgatgtatattcaagggccttgccttgacgtgtcctctggatgttcttggttcggccacctgttagatgaaaagtctactcccagcaaccagtgataggttacttagccgtaggtcgtagcacatagctgttcctgtaatgcatagttgtccgaaggaatgttttccggtgttcttctgttgtgatatagtcaggtcagtgcgtagtcttttgaaaaggagaaagtctcagtgccttgtatgtggtgtagatctttggaaatatgggcatgatatttggtggagttattctgagaccatatatataatatataccccctccgttctgaaaaaaaaaaaaaaaa

SEQ ID NO: 7068 - protein, 343 aa, Triticum aestivum
  misc_feature: Ceres CLONE ID no. 1313803
  misc_feature: Ceres CDNA ID no. 29191777
  misc_feature (58)..(95): Pfam Name: WD40 PFAM Desc: WD domain
  misc_feature: Homolog of GI Number: 21593271 NR Desc: mRNA export protein
  misc_feature: Homolog of GI Number: 50941635 NR Desc: putative RAE1
  misc_feature: Homolog of GI Number: 34913020 NR Desc: putative mRNA export protein
  misc_feature: Homolog of GI Number: 6503278 NR Desc: F23A5.2
  misc_feature: Homolog of GI Number: 62739173 NR Desc: RAE1
  misc_feature: Homolog of GI Number: 62858469 NR Desc: Rae1_predicted
  misc_feature: Homolog of GI Number: 37908080 NR Desc: RNA export 1
  misc_feature: Homolog of GI Number: 34860864 NR Desc: similar to RAE1 RNA export 1 homolog
  misc_feature: Homolog of GI Number: 50758953 NR Desc:  similar to RAE1 RNA export 1 homolog
  misc_feature: Homolog of GI Number: 41351131 NR Desc: Similar to RAE1 RNA export 1 homolog
  misc_feature: Useful for making plants with altered leaf shape eg curled leaves
  misc_feature: Useful for making shorter plants
  misc_feature: Useful for making stronger plants
MATLTSLASNPNPNKSFEVLPNPGDSLSSLSFSPKSNLLVATSWDNQVRCWEIGNGNSQPKASISHDQPVLCSAWKDDGTTVFSGGCDKQVKMWPLLSGGQAQTVAMHDAPVKEVSWISQMNLLVSGSWDKTLRYWDTRQPNPAHVQQLPDRCYALAVNYPLMIVGTADRNIVIFNLQNPQTEFKRIQSPLKYQTRCVAAFPDQQGFLVGSIEGRVGVHHIDDSQQSKNFTFKCHREGNDIFSVNSLNFHPVHHTFATAGSDGAFNFWDKDSKQRLKAFSRCPQPIPCSSFNNDGSIFAYGVCYDWSRGAENHNPANAKTSIYLHSPQEAEVKGKPRIATGRK

SEQ ID NO: 7069 - DNA, 1570 bp, Triticum aestivum
  misc_feature: Ceres CLONE ID no. 1313857
  misc_feature: Ceres CDNA ID no. 24726667
  CDS (580)..(1344): REFERENCED BY SEQ ID NO: 7070
attccactccgatcaattcaagtagtatcttttctcaagtgtagctccatcggtgcatgcttcactagtctgtgtgtgcgtactagcctagagagcctgagcgtaccatcactttgctcttccaccggtcatctatcagtatactcgagtgctagcgagtagttttgggctaacactcgatgggtgcgacgcagaaggagacgccggggcggagaatggcagggatggaggagttgatggggacggtgccagcggttggacatgatctgcctgctgttcgcgcttcggcgcttgtgctagcactgctggacggaagagaaagagagtggagagagaggccagaggtggacgaaaggagatgtgctttgagattcgtttttccaggtgttatcatcgcgagagggtctcacgacgcagaacgtgcgacctgggtcgcataagatttttttttctggcggggcatggcaacgcacaatcaagcccatcactcactccgcaccgcaagctccaactgaccattcacggattggagtagcagcgacggtccgacgtggttagcgcaaagcggggcatggccgcatggatgggtcagctgctttgcggccattgctatgctggcacgacctcctcgggtggaacgtgcgccgcgcgcgcgagcagagcgcgcacgcacgcacgccaccgtctggcgacgatgggcgcacgcggccgcggcacataggttcgcgcgcgctgtggacaaccgggcttcacttccccgcagtctcctccatgtccatgcccgagcacgagcacggttactcccccgcagtctcctccccgtcctccgcctcggcgccctcatcctcgtccctcctcccggacttccccggcggtggcagctggttcgcgtccacggcctccccgccgacgggatcgctcgcctgcgactccgtcgcgccgtccacacccgtgggcgccgcgacgaacaagaggcgggtgggcctggggcccaacgcagcggtcgccgggcgggtcgggaagcgtcgggcgaggccgtcgaagcgcgcgccgaccacgtacatcagcaccgacgccgtcaacttccgactcatggtgcagcacgtcacgggcgcccaggccgagcccacggcagacggcgcactcctgcccgcgtcgttcgacgcgtcctccgcctcggcgctgctgggcggcctccctttcgacggcgcgttcggggacgcgctgcggctgccgtcggacgtcgacgcggaggcgctccatcgccaccaccaccagcagcagcacgcgtgctacccgacgctggactcgtggagcgtcatgtgcgagagcagtcagctataacttcgcctagacgacagaagaacaccaacacaaactcaacatcacaccattatctcagacaagactagctaggactaaagtaagcattgcacgacgaatcagggactgtctggatggttaccaaaggtgcaccttgccaatattttggtcatgactaaaacattggcctttgtttggatgaagggcttccttaccaactctggtaatttgaaaaaaaaaaaaaaaa

SEQ ID NO: 7070 - protein, 254 aa, Triticum aestivum
  misc_feature: Ceres CLONE ID no. 1313857
  misc_feature: Ceres CDNA ID no. 24726667
  misc_feature (155)..(185): Pfam Name: VQ PFAM Desc: VQ motif
  misc_feature: Homolog of GI Number: 56283929 NR Desc: CG3047
  misc_feature: Homolog of GI Number: 2429362 NR Desc: proline rich protein
  misc_feature: Homolog of GI Number: 41400384 NR Desc: plus agglutinin
  misc_feature: Homolog of GI Number: 7949115 NR Desc: Ser/Arg
  misc_feature: Homolog of GI Number: 34872074 NR Desc: similar to Ser/Arg plenty-of-prolines-101
  misc_feature: Homolog of GI Number: 33150824 NR Desc: Ser/Arg
  misc_feature: Homolog of GI Number: 23274133 NR Desc: Serine/arginine repetitive matrix 1
  misc_feature: Homolog of GI Number: 42542379 NR Desc: serine/arginine repetitive matrix 1
  misc_feature: Homolog of GI Number: 55665385 NR Desc: serine\/arginine repetitive matrix 1
MDGSAALRPLLCWHDLLGWNVRRAREQSAHARTPPSGDDGRTRPRHIGSRALWTTGLHFPAVSSMSMPEHEHGYSPAVSSPSSASAPSSSSLLPDFPGGGSWFASTASPPTGSLACDSVAPSTPVGAATNKRRVGLGPNAAVAGRVGKRRARPSKRAPTTYISTDAVNFRLMVQHVTGAQAEPTADGALLPASFDASSASALLGGLPFDGAFGDALRLPSDVDAEALHRHHHQQQHACYPTLDSWSVMCESSQL

SEQ ID NO: 7071 - DNA, 1185 bp, Triticum aestivum
  misc_feature: Ceres CLONE ID no. 1314037
  misc_feature: Ceres CDNA ID no. 25446535
  CDS (121)..(894): REFERENCED BY SEQ ID NO: 7072
atgctccaagtcttccgtttcttccagcagcttctcccccttccccactatacttccaagcaaaggcgagaaccctagcctcacgagcaccgcgcagcggagatcccgaccatcaccgcgatgcaggccccgacgaacccccccgtcgacctcccgccgctggtggcgccgcccccgcgggtgaaggcgccgaccccgcgcccccctccgccggcttcgctccagcccgactccccgggcgtcttcttcaccaacgctgccgcagctgccccactgggctccgcccaccgccgcatcgccatcgccgtcgatctgtccgacgagtccgcctacgccgtaagctgggccgtcgccaactacctccggccaggggacgccgtcatcctcctgcacgtccgctccaccaatgtcctctatggcgccgattggggctccgtcacccccacatcccccgaagacgacgctgaggtcgccgcgcgcaagatggaggaagacttcgacgccctcaccgcttccaaggccgacgacctggccaagccactcgaggaggccaagatcccctacaagatccacatcgtcaaggatcacgacatgaaggagagactctgcctcgaggtggagaggctagggcttagcgcggtgatcatggggagcaaggggtttggtgcggcgcggcgggccagcaagggaaggctcgggagtgtgagcgattactgcgtccaccactgtatttgccccgtcgtggtggtgcgttcccctgatgatgctgtagcagagggcggggagtccgccactgcgatggaggcggcggtcggtgcagaggacgtgctgcaccctgtgccagaggaggatgctgagtaccatgacgccgctgaggagcacaaggatacttgattggatctatgcatccatgtactgttggatccagcatgtaaaggttctagcagtcgactgttggctgagtgctacctcgtggtttctgctgagcacattagctgtttgttagactttactgttcatgtcgatctgtgcttccactctgttgtatttggtgaacatttgttctctagaacttttgtgcttcttggatatcaaattatatgttgctgatgtgacagtttgactacttagagaaccacatgatcgcgcgctatacttaaaaaaaaaagaaaaaaaaaaaaaaaa

SEQ ID NO: 7072 - protein, 257 aa, Triticum aestivum
  misc_feature: Ceres CLONE ID no. 1314037
  misc_feature: Ceres CDNA ID no. 25446535
  misc_feature (55)..(211): Pfam Name: Usp PFAM Desc: Universal stress protein family
  misc_feature: Homolog of GI Number: 50938251 NR Desc: CHP
  misc_feature: Homolog of GI Number: 50938253 NR Desc: CHP
  misc_feature: Homolog of GI Number: 53791695 NR Desc: universal stress protein
  misc_feature: Homolog of GI Number: 34910112 NR Desc: B1100D10.31
  misc_feature: Homolog of GI Number: 25402657 NR Desc: protein T23J18.3
  misc_feature: Homolog of GI Number: 30682191 NR Desc: universal stress protein
  misc_feature: Homolog of GI Number: 34100044 NR Desc: anti
  misc_feature: Homolog of GI Number: 15232490 NR Desc: universal stress protein
  misc_feature: Homolog of GI Number: 30793787 NR Desc: putative CHP
  misc_feature: Homolog of GI Number: 50926032 NR Desc: OSJNBa0067K08.24
  misc_feature: Useful for accelerating flowering time
  misc_feature: Useful for delaying flowering time
  misc_feature: Useful for making lethal plants for genetic confinement systems
  misc_feature: Useful for making ornamental plants with modified leaves
  misc_feature: Useful for making plants with increased biomass and foliage
MQAPTNPPVDLPPLVAPPPRVKAPTPRPPPPASLQPDSPGVFFTNAAAAAPLGSAHRRIAIAVDLSDESAYAVSWAVANYLRPGDAVILLHVRSTNVLYGADWGSVTPTSPEDDAEVAARKMEEDFDALTASKADDLAKPLEEAKIPYKIHIVKDHDMKERLCLEVERLGLSAVIMGSKGFGAARRASKGRLGSVSDYCVHHCICPVVVVRSPDDAVAEGGESATAMEAAVGAEDVLHPVPEEDAEYHDAAEEHKDT

SEQ ID NO: 7073 - DNA, 897 bp, Triticum aestivum
  misc_feature: Ceres CLONE ID no. 1314051
  misc_feature: Ceres CDNA ID no. 25087870
  CDS (116)..(646): REFERENCED BY SEQ ID NO: 7074
ccccggtccaaatccgaaaattttccccttcccgcagcccgtcccctcctccgcgcccgcactgtagctcgagcgctcggctccaccgccgtggcctgtagccgccgccgctgccatggcgaacggcgggtcccccaagtccggtgacatcccgccctaccccgagatgattctcgcggcgatcgaggcgctgggcgacaagaacggctcgagcaagtcggccatctccagctacatcgaggagaagtacgagggccttccctccgcgcacgcctccctcctcacggccaacctcgccagcatgaaggaggccggcaagctcgccttcgccaagaacaactacctcaaggccgatgctccctccgccaccccggcaaagcgcggccgtggccgcccgcccaaggaccccaacacgcccaagcgcggtcggggccgcccgcccaaggctaaggactccatggccgacgccgtcaaggaggccgtcgccaaggccaccaccggcatgccccgcggccgcggccgcccgccgggtccctcctcggccaagaaggccaaggtcaccacggaggctgcctctccggctcccgcgtccggctccgctcctgccaagcgtggccgtgggcgcccacgcaaggtggcggcttgaggcctgcgtgtgatgcctttcggtctgtggatctcgctgtggttgcgacggtggtaagctcctaggtgtgaccgtgcttcttcgatttgtgctctgtactaattgttccgtcggcttagttgctcagtatgtgttgtaacctaatcgagatgagtgtgcacaatggatggatggatgtttttagcttcggttgtagttgactgtgctgctgtgagtgaacatgttcattttttttaaaaaaaaaaaaaaaa

SEQ ID NO: 7074 - protein, 176 aa, Triticum aestivum
  misc_feature: Ceres CLONE ID no. 1314051
  misc_feature: Ceres CDNA ID no. 25087870
  misc_feature (11)..(80): Pfam Name: Linker_histone PFAM Desc: linker histone H1 and H5 family
  misc_feature (88)..(100): Pfam Name: AT_hook PFAM Desc: AT hook motif
  misc_feature: Homolog of GI Number: 20502966 NR Desc: HMG
  misc_feature: Homolog of GI Number: 11544762 NR Desc: HMGI/Y protein
  misc_feature: Homolog of GI Number: 9837562 NR Desc: high mobility group I/Y
  misc_feature: Homolog of GI Number: 4585621 NR Desc: HMGI/Y protein
  misc_feature: Homolog of GI Number: 50945947 NR Desc: putative high mobility group I/Y
  misc_feature: Homolog of GI Number: 51091572 NR Desc: DNA binding protein PF1
  misc_feature: Homolog of GI Number: 47027043 NR Desc: high mobility group I/Y
  misc_feature: Homolog of GI Number: 629769 NR Desc: histone
  misc_feature: Homolog of GI Number: 1181589 NR Desc: high mobility group protein
  misc_feature: Homolog of GI Number: 6651027 NR Desc: high mobility group protein I/Y
MANGGSPKSGDIPPYPEMILAAIEALGDKNGSSKSAISSYIEEKYEGLPSAHASLLTANLASMKEAGKLAFAKNNYLKADAPSATPAKRGRGRPPKDPNTPKRGRGRPPKAKDSMADAVKEAVAKATTGMPRGRGRPPGPSSAKKAKVTTEAASPAPASGSAPAKRGRGRPRKVAA

SEQ ID NO: 7075 - DNA, 1020 bp, Triticum aestivum
  misc_feature: Ceres CLONE ID no. 1314506
  misc_feature: Ceres CDNA ID no. 25891051
  CDS (106)..(723): REFERENCED BY SEQ ID NO: 7076
accactacgagaatctgcctagggttttttgacgccctcgccggcccgccgccacctcctcccttttcacaagcgctgcccctccactaccaccgtagcaccaggatgacggcgcagactgccgaggagctcgccgcgcatatcgagcaggagcagctcgaggcgaagaaaactgaggcagaagaggttgtggttgaggatgatgatgatgatgacgacgacgatgaggatgatgatgacaacgatgatttggatgggcaagaaggtgatgccagtggcacatcaaagcaaagcaggagtgagaagaagagtcgcaaggcaatgctgaagcttggcatgaaatccatcactggcgtaagccgtgtcactgtgaagaaaagcaagaatatattattcgtcatctcaaagccagatgtcttcaagagcccaaattcagagacgtatgttattttcggtgaagccaagattgaggatctcagctcccagctgcagagccaggctgccgaacagttcaaggctcctgacctgagccaaatgatctcaagtcctgaggcgtcgggcatggagaatgatgacaacgaggttgtcaacgatgaaggagtcgagccaaaggacatcgagctggtgatgacacaggcgggcgtctcaagggccaaggctgtcagggctctcaagtctgccaatggagacattgtcactgccattatggaggtcacaacttaagagtatggcgacatttctggaactagttgaaccatttctctttgagcgatttgcagcttgagttggtacagtgtttgctttgcatctctgataaggtcgtttggacatgatcctgcctgcggttaagttggtacagtgtttttagcacggacatgtcagtggtggcaattttctggcatgtttttcacctttgactgaaatattattagatttaatttaaataaaccccgttgtattctttgtaacagataaaaataacatgattataactgttaagcagtaaaaaaaaaaaaaaaa

SEQ ID NO: 7076 - protein, 205 aa, Triticum aestivum
  misc_feature: Ceres CLONE ID no. 1314506
  misc_feature: Ceres CDNA ID no. 25891051
  misc_feature (166)..(201): Pfam Name: UBA PFAM Desc: UBA/TS
  misc_feature (65)..(123): Pfam Name: NAC PFAM Desc: NAC domain
  misc_feature: Homolog of GI Number: 50931251 NR Desc: putative nascent polypeptide associated complex alpha chain
  misc_feature: Homolog of GI Number: 34907258 NR Desc: putative nascent polypeptide associated complex alpha chain
  misc_feature: Homolog of GI Number: 48310641 NR Desc: At5g13850
  misc_feature: Homolog of GI Number: 6752882 NR Desc: nascent polypeptide associated complex alpha chain
  misc_feature: Homolog of GI Number: 34902238 NR Desc: Putative nascent polypeptide associated complex alpha chain
  misc_feature: Homolog of GI Number: 20465565 NR Desc: putative alpha NAC protein
  misc_feature: Homolog of GI Number: 18377570 NR Desc: alpha NAC
  misc_feature: Homolog of GI Number: 6561948 NR Desc: alpha NAC
  misc_feature: Homolog of GI Number: 16323352 NR Desc: F9L11.19/F9L11.19
  misc_feature: Homolog of GI Number: 56784713 NR Desc: alpha NAC
MTAQTAEELAAHIEQEQLEAKKTEAEEVVVEDDDDDDDDDEDDDDNDDLDGQEGDASGTSKQSRSEKKSRKAMLKLGMKSITGVSRVTVKKSKNILFVISKPDVFKSPNSETYVIFGEAKIEDLSSQLQSQAAEQFKAPDLSQMISSPEASGMENDDNEVVNDEGVEPKDIELVMTQAGVSRAKAVRALKSANGDIVTAIMEVTT

SEQ ID NO: 7077 - DNA, 716 bp, Triticum aestivum
  misc_feature: Ceres CLONE ID no. 1314543
  misc_feature: Ceres CDNA ID no. 25891052
  CDS (135)..(542): REFERENCED BY SEQ ID NO: 7078
acatccacagccaattccgagctcttccgagtcccagaagccacctcccatctcctccatcgtttcgcagttcgcacagacctacgtagtaccatcgagctcgtaccggaccaggaccagctagccgcgcgccgatggtttcgtcgatgaagcactgcagagatcaggcaccggaggtgcctctgtccctctcgctctccctcggcgccatggccgaccgctccaagaagcagcgccgcggcgcagacggcgagttcgtctgcaagacatgcagccgcgccttcccgtcgttccaggcgctgggcggccaccggaccagccacctgcgcgcccgccatgggctcgcgctaggcctcactggcgggtccgatcagccggcgaccaacaaggcgacggaccagaagcaggcccaccagtgccacgtctgcgggctagagttcgagatggggcaggcgctgggcggccacatgcgccggcaccgcgagcaggaggccgccaccacggcgcaggcaccgcccgttctgctccagctcttcgtctagaaccgcacagatttctctcaagttcaatagctaggcatatcagatttacaggtcgacctatgtgcgcgatttggtttgtacatttgctgcgcactagttggtcttgatccttggcccgttcgctcattttattaggtatatatatacgtacatatttcaaaaaaaaaaaaaaaa

SEQ ID NO: 7078 - protein, 131 aa, Triticum aestivum
  misc_feature: Ceres CLONE ID no. 1314543
  misc_feature: Ceres CDNA ID no. 25891052
  misc_feature (89)..(111): Pfam Name: zf PFAM Desc: Zinc finger
  misc_feature: Homolog of GI Number: 32172478 NR Desc: C2H2 type zinc finger transcription factor ZFP37
  misc_feature: Homolog of GI Number: 50919477 NR Desc: putative Cys2/His2 zinc
  misc_feature: Homolog of GI Number: 56784659 NR Desc: C2H2 zinc finger protein
  misc_feature: Homolog of GI Number: 34908122 NR Desc: P0031D11.19
  misc_feature: Homolog of GI Number: 34908110 NR Desc: P0031D11.12
  misc_feature: Homolog of GI Number: 30420734 NR Desc: zinc finger transcription factor ZFP19
  misc_feature: Homolog of GI Number: 56784648 NR Desc: zinc finger transcription factor ZFP19
  misc_feature: Homolog of GI Number: 2346976 NR Desc: ZPT2
  misc_feature: Homolog of GI Number: 55734106 NR Desc: zinc finger DNA
  misc_feature: Homolog of GI Number: 50931121 NR Desc: putative C2H2 type zinc finger transcription factor ZFP16
MKHCRDQAPEVPLSLSLSLGAMADRSKKQRRGADGEFVCKTCSRAFPSFQALGGHRTSHLRARHGLALGLTGGSDQPATNKATDQKQAHQCHVCGLEFEMGQALGGHMRRHREQEAATTAQAPPVLLQLFV

SEQ ID NO: 7079 - DNA, 682 bp, Triticum aestivum
  misc_feature: Ceres CLONE ID no. 1314637
  misc_feature: Ceres CDNA ID no. 40351741
  CDS (62)..(472): REFERENCED BY SEQ ID NO: 7080
caaatcccccaagcaaacaactaccgaagcagcctcccctcccccaccctaccccgcagcaatggcgcgcaccaagcagacggcgaggaagtcgaccggcggcaaggcgccgaggaagcagctggcgaccaaggccgcccgcaagtcggccccggccaccggtggcgtgaagaagccccaccgcttccgccccggcaccgtggcgctgcgtgagatccgcaagtaccagaagagcacggagttgctgatccgcaagctgcccttccagcggctggtgcgtgagatcgcgcaggacttcaagaccgacctccgcttccagagctccgccgtgtccgcgctccaggaggccgccgaggcgtacctcgtcgggctcttcgaggacaccaacctctgcgccatccacgccaagcgcgtcaccatcatgcccaaggacatccagctcgcccgccgcatccgcggggagagggcttgagtagcggtagccgcgtgcgtgcgttgtcagagagtcctactgtgatgttccggtttcagagcttggtggtgtagttaacatgttcctgttcgctcttgtcgttgtcttgccatatgtagctccttgctgcgatgaattatcaatgaagagtgcagttatcatcatctgaatctcatttcagtgttcatttttacaaaaaaaaaaaaaaaa

SEQ ID NO: 7080 - protein, 136 aa, Triticum aestivum; identical to SEQ ID NO: 588
  misc_feature: Ceres CLONE ID no. 1314637
  misc_feature: Ceres CDNA ID no. 40351741
  misc_feature (58)..(134): Pfam Name: Histone PFAM Desc: Core histone H2A/H2B/H3/H4

SEQ ID NO: 7081 - DNA, 978 bp, Triticum aestivum
  misc_feature: Ceres CLONE ID no. 1314663
  misc_feature: Ceres CDNA ID no. 25891756
  CDS (245)..(802): REFERENCED BY SEQ ID NO: 7082
cccacggccctcgtccattcgcacgccgcaccttttcaccgcagtcctcactctctcctcagattcagaagcagcggcatctccgtcgccgtcgccgccgccgccgcgcctccacggagctctgccctcgcctgcacgcctctcctcgatcccggcctccgcctgtccccgtgcacgcccacgagcccctgccctgcactgcgcctcccgcccccgggcccggtccttcctaggtagctccagaatgggtctcctcagcatcatcagaaaaatcaagcgcaaggaaaaggagatgcggattctcatggttggcctggacaactcgggtaagacgacaattgtgctcaagataaatggggaggacaccagtgtcatcagccctactcttggctttaatatcaaaaccatccaataccaaaagtactcgctgaacatatgggatgttggggggcagaagaccatccgttcatactggaggaactacttcgagcagactgacggtctcgtttgggtggtcgatagttccgatgttcgaaggctcgatgattgccgtgcggagctccataatcttctgaaagaagagagactggctggatcatcgttgttagttttcgcaaataagcaagacattcagggcgctttgaagcctgacgaaatcgccaaggttctgaatcttgaagtgatgaacaaggaccggcactggaagatcgtcggctgcagcgcctacacaggcgacggcctgctccagggcttcgactggctggtccaggacatcgcctcccgcatctatgtcctcgactgaaacaacaaccaaactctggacatttagccatctgcactactgttattggttacaccggctacctcatgtaatccgatcaagtttgaaccaaaccatagatgatgaaacttttgttatgcactctcattgagctctgcgtactgcaatcgtcagttgtgataaaaaaaaaaaaaaaa

SEQ ID NO: 7082 - protein, 185 aa, Triticum aestivum; identical to SEQ ID NO: 3712
  misc_feature: Ceres CLONE ID no. 1314663
  misc_feature: Ceres CDNA ID no. 25891756
  misc_feature (18)..(179): Pfam Name: Ras PFAM Desc: Ras family
  misc_feature: Homolog of GI Number: 17104667 NR Desc: putative ADP
  misc_feature: Homolog of GI Number: 66813292 NR Desc: ADP
  misc_feature: Homolog of GI Number: 68363374 NR Desc:  similar to ADP
  misc_feature: Homolog of GI Number: 53734021 NR Desc: Zgc:103658
  misc_feature: Homolog of GI Number: 74833822 NR Desc: arl_A17
  misc_feature: Homolog of GI Number: 48095928 NR Desc: similar to ADP
  misc_feature: Homolog of GI Number: 76689115 NR Desc:  similar to ADP
  misc_feature: Homolog of GI Number: 62898736 NR Desc: ADP
  misc_feature: Homolog of GI Number: 30584891 NR Desc: Homo sapiens ADP
  misc_feature: Homolog of GI Number: 21465908 NR Desc: Chain A
  misc_feature: Useful for increasing seed/fruit yield or modifying fruit content
  misc_feature: Useful for making ornamental plants with modified leaves
  misc_feature: Useful for sterility

SEQ ID NO: 7083 - DNA, 662 bp, Triticum aestivum
  misc_feature: Ceres CLONE ID no. 1314731
  misc_feature: Ceres CDNA ID no. 40351742
  CDS (91)..(501): REFERENCED BY SEQ ID NO: 7084
ctattcgcccttccgcatccagtttggtcgccttccgattcgaacctccccgaaatccgcagcagtcgacaggaggccaaaggcgccgccatggcccgtacgaagcagaccgcccgcaagtccaccggcggcaaggcgccccgcaagcagctcgccaccaaggcggcgaggaagtctgcgccgacgaccggcggagtgaagaagccccaccgctacaggcccgggaccgtggcgctccgggagatccgcaagtaccagaagagcacggagctgctgatccgcaagctgcctttccagcgcctggtccgcgagatcgcgcaggacttcaagacggacctcaggttccagagccacgccgtgctggccctccaggaggcggccgaggcgtacctggtggggctgttcgaggacaccaacctgtgcgccatccacgccaagcgcgtcaccatcatgcccaaggacatccagctcgcccgccgcatccgtggcgagagggcctaagctgccccctccgccgacgccgttagtgagtcggaatgtgttgattctggttgtagtttgttcctaattgctgtgctaggtctctctgcttttgtgtagaagaaatatggttgttggtacaagcaagacgaacttgttatgtgagaaaaaaaaaaaaaaaa

SEQ ID NO: 7084 - protein, 136 aa, Triticum aestivum; identical to SEQ ID NO: 30
  misc_feature: Ceres CLONE ID no. 1314731
  misc_feature: Ceres CDNA ID no. 40351742
  misc_feature (58)..(134): Pfam Name: Histone PFAM Desc: Core histone H2A/H2B/H3/H4

SEQ ID NO: 7085 - DNA, 605 bp, Triticum aestivum
  misc_feature: Ceres CLONE ID no. 1314905
  misc_feature: Ceres CDNA ID no. 40351743
  CDS (70)..(408): REFERENCED BY SEQ ID NO: 7086
attttgcgccgccgcctcccccgaagccatccgcatccccacgctcgctcgccgcggccgcccgacgcgatggctcccaccaagaaggcgaagaagagcggggagaacatcaacaacaagctgcagctggtgatgaagagcggcaagtatacgctcggctacaagaccgtcctcaagacgctgcgcagctccaaggggaagctgataatcctcgcaaacaactgcccgcccctgaggaagtcagagattgagtactacgctatgttggcgaaaattagcgtgcaccatttccatggaaacaatgttgatcttggaacagcctgcggcaagtactaccgggtgtgctgcctcagcatccttgaccctggtgactcggacatcatcagcaccaccaccaccacccagtgaagagaagagaagagagctctccacctattttatttagtcgagttgtagggtcctgttgtgctctcgaaaccactcttgttatcttcggtttatgtacctttttgcgacgctgagttggagctgtcatacagataatacttcatatggttgttccgctggacattcatgtggttttgttttcaaaaaaaaaaaaaaaa

SEQ ID NO: 7086 - protein, 112 aa, Triticum aestivum; identical to SEQ ID NO: 2948
  misc_feature: Ceres CLONE ID no. 1314905
  misc_feature: Ceres CDNA ID no. 40351743
  misc_feature (12)..(106): Pfam Name: Ribosomal_L7Ae PFAM Desc: Ribosomal protein L7Ae/L30e/S12e/Gadd45 family

SEQ ID NO: 7087 - DNA, 780 bp, Triticum aestivum
  misc_feature: Ceres CLONE ID no. 1314937
  misc_feature: Ceres CDNA ID no. 29191526
  CDS (88)..(549): REFERENCED BY SEQ ID NO: 7088
acaccatcccagcccccacctcccctgcctccagcaaactcacagcccccaccaccgaagctcccaaccccacccgaagcggcagccatggcccccaaggcagacaagaagccggccgcggagaacaaggtcgagaaggcgacggagaagacccccgcgggcaagaagcccaaggccgagaagcggctgccggcgggcaagacggcgtccaaggaggccggcggcgagggcaagacccggggccgcaagaagggcagcaaggcgaagaagggcgtggagacgtacaagatctacatcttcaaggtgctgaagcaggtgcaccctgacatcggcatctcctccaaggccatgtccatcatgaactccttcatcaacgacatcttcgagaagctcgccggggagtccgccaagctggcccgctacaacaagaagcccaccatcacctcccgggagatccagacctccgtccgcctcgtcctccccggggagctcgccaagcacgccgtctccgagggcaccaaggccgtcaccaagttcacctcctcctagactgacgatgcgtcgcttgttgtgacagatgtggctgtctgatgtatctgcaagtagaagtagtagttcgtgtggtagaagattgccaacgctttgttggcttcttggttgtgagaactgaacgtgttgcttttgcaaactgaaatctatctaaaaaatgttgcggttgtggtactactacatctgtgacagtgatgttcttactaatgctggccaaaaaaaaaaaaaaaa

SEQ ID NO: 7088 - protein, 153 aa, Triticum aestivum
  misc_feature: Ceres CLONE ID no. 1314937
  misc_feature: Ceres CDNA ID no. 29191526
  misc_feature: No seed is being produced by the plant
  misc_feature: The plant flowers significantly late compared to wild-type.
  misc_feature: Useful for biocontainment applications
  misc_feature: Useful for making plants with modulated flowering time
  misc_feature (60)..(132): Pfam Name: Histone PFAM Desc: Core histone H2A/H2B/H3/H4
  misc_feature: Homolog of GI Number: 122033 NR Desc: Histone H2B.2
  misc_feature: Homolog of GI Number: 22325 NR Desc: H2B histone
  misc_feature: Homolog of GI Number: 577825 NR Desc: H2B histone
  misc_feature: Homolog of GI Number: 21801 NR Desc: histone H2B
  misc_feature: Homolog of GI Number: 34895900 NR Desc: putative histone H2B
  misc_feature: Homolog of GI Number: 22323 NR Desc: H2B histone
  misc_feature: Homolog of GI Number: 34895838 NR Desc: putative histone H2B
  misc_feature: Homolog of GI Number: 34895896 NR Desc: putative histone H2B
  misc_feature: Homolog of GI Number: 34895832 NR Desc: putative histone H2B
  misc_feature: Homolog of GI Number: 50932769 NR Desc: putative histone H2B
  misc_feature: Useful for delaying flowering time
  misc_feature: Useful for increasing chlorophyll and photosynthetic capacity
  misc_feature: Useful for making plants with altered leaf shape eg curled leaves
  misc_feature: Useful for making plants with altered leaf shape eg curled leaves
  misc_feature: Useful for making plants with increased biomass and foliage
  misc_feature: Useful for making plants with increased biomass and foliage
  misc_feature: Useful for sterility
  misc_feature: Useful for sterility
MAPKADKKPAAENKVEKATEKTPAGKKPKAEKRLPAGKTASKEAGGEGKTRGRKKGSKAKKGVETYKIYIFKVLKQVHPDIGISSKAMSIMNSFINDIFEKLAGESAKLARYNKKPTITSREIQTSVRLVLPGELAKHAVSEGTKAVTKFTSS

SEQ ID NO: 7089 - DNA, 614 bp, Triticum aestivum
  misc_feature: Ceres CLONE ID no. 1315091
  misc_feature: Ceres CDNA ID no. 25891053
  CDS (147)..(389): REFERENCED BY SEQ ID NO: 7090
acttcgattcgccgtctcctcctcctccccccttcccctccgtctcgctcctcgcccttatccccgtccctttccccttcctcccacccgcagccgacgaaactttccccacgcccctcggcggatcggaccgccgcgctccatccatgtcggaggaatctggtcgccctttgcccaagtttggcgaatgggacgtcaacgacccagcttctgctgatgggttcactgttatattcaacaaagccagggatgagaaaaaggctgggaatggacaagataccgaacccccttgcaaagatgccaggactgagagggtggaatcttatgccaccaaggcaaattcaaagaagtggttttgctgcgtgacaccaagtcctacacaatcttgaggaggacaagcgtcgcccgaagaaaaaatggttgcgaaagtatggtcgtttaattttgctatatacatactatccataagaccttgtaagaggtacccagcccccctgggcatatcgcgatgggtatctcgtaaaactctgaagtgtgtatgtatggtgtgagggttgtcagacactcatttggataagtgaacttctgattgtaattcaaaaaaaaaaaaaaaa

SEQ ID NO: 7090 - protein, 80 aa, Triticum aestivum
  misc_feature: Ceres CLONE ID no. 1315091
  misc_feature: Ceres CDNA ID no. 25891053
  misc_feature (1)..(73): Pfam Name: NOI PFAM Desc: Nitrate
  misc_feature: Homolog of GI Number: 55296571 NR Desc: putative nitrate
  misc_feature: Homolog of GI Number: 7489791 NR Desc: NOI protein
  misc_feature: Homolog of GI Number: 50899034 NR Desc: NOI protein
  misc_feature: Homolog of GI Number: 20465673 NR Desc: putative nitrate
  misc_feature: Homolog of GI Number: 79537400 NR Desc: NOI
  misc_feature: Homolog of GI Number: 21536567 NR Desc: NOI protein
  misc_feature: Homolog of GI Number: 34897468 NR Desc: putative nitrate
MSEESGRPLPKFGEWDVNDPASADGFTVIFNKARDEKKAGNGQDTEPPCKDARTERVESYATKANSKKWFCCVTPSPTQS

SEQ ID NO: 7091 - DNA, 1401 bp, Triticum aestivum
  misc_feature: Ceres CLONE ID no. 1315114
  misc_feature: Ceres CDNA ID no. 25891054
  CDS (258)..(1073): REFERENCED BY SEQ ID NO: 7092
cacacacacatcagtacatcaccgcagacgccgagaaagacacgccgcattcgtaacgcagctcccgtgttgcctagcgcggtgctgattaccgagccgttgggagctgagagctactcggtgcagctgagtgcccgagtgctcctctgtcctctgtcctctacactcctcccctctcctctcgctcggccgagaaggatagatagacctcacctccccctctccccccaccgtgttcttggggcagacgcgccgggatggagcatatcgcgaggttcttcttcggggtctcaggcaatgttatcgctctgttcctcttcctgtcgccggtcatcaccttctggaggatcatcaagaggaagtcgacggaggacttctccggcgtgccatacaacatgacgctgctcaactgcctcctatccgcatggtacgggctgccgttcgtgtccccgaacaacatcctggtgacgacgatcaacggcgcggggtcggtgatcgaggccatctacgtggtcatcttcctcatcttcgcggagcgcagggccaaggtccggatgctgggcctgctcagcgtggtcaccgccatcttcgccacggtggtgctggtgtcgctgctggcgctgcacggcaaggcccgcaccgtcttctgcggcctcgccgccaccgtcttctccatctgcatgtacgcctcgccgctctccatcatgaggttggtgatcaagaccaagagcgtggagtacatgccgttcctgctgtccctgtccgtgttcctctgcggcacctcctggttcatctacggcctgctcggcctcgaccccttcatctacatccccaacgggtgcgggagcttcctgggcctgatgcagctcatcctctacgccatctaccggaagaacaagggccccgccgccggcgccggcaagggggaggacgccgacgaggccgacgaggtggaggacgccaagaaggcggcagctgcagtggagatgggcgaggcaaagatcaaggtcgacgacgacaccgccgtcgtcgacgagccggccgttgtcgacaaggtcgccgcgcaggtgtagccgccgccgttgcagagagagcttgcatggagtgacagcagcataagtgcgctgcttaattagttagtagagctattatgctacgcagatcgtgggtgtctgccttgttgatttgtttcttgacttggtacgtacacgtacatttgccagaaagaaagctggtgcggaaccctctccccaaaggccagcctacgggagagctatgaaacagtactccgaaaatctcaaactgtaactgcaagtgtgaattactacctctgctctgtttctgtgtgttgtactcctccaaagatcgaatttggtttctgcccgaaaaaaaaaaaaaaaa

SEQ ID NO: 7092 - protein, 271 aa, Triticum aestivum
  misc_feature: Ceres CLONE ID no. 1315114
  misc_feature: Ceres CDNA ID no. 25891054
  misc_feature (129)..(215): Pfam Name: MtN3_slv PFAM Desc: MtN3/saliva family
  misc_feature: Homolog of GI Number: 34907420 NR Desc: P0018C10.36
  misc_feature: Homolog of GI Number: 53981730 NR Desc: unknow protein
  misc_feature: Homolog of GI Number: 57900518 NR Desc: putative MtN3
  misc_feature: Homolog of GI Number: 34912454 NR Desc: P0681B11.31
  misc_feature: Homolog of GI Number: 34912462 NR Desc: MtN3
  misc_feature: Homolog of GI Number: 56785283 NR Desc: MtN3
  misc_feature: Homolog of GI Number: 11994587 NR Desc: MtN3
  misc_feature: Homolog of GI Number: 21592843 NR Desc: contains similarity to Medicago truncatula MtN3
  misc_feature: Homolog of GI Number: 21593109 NR Desc: MtN3
  misc_feature: Homolog of GI Number: 9758527 NR Desc: MtN3
  misc_feature: Useful for increasing chlorophyll and photosynthetic capacity
  misc_feature: Useful for increasing seed/fruit yield or modifying fruit content
  misc_feature: Useful for making plants with altered leaf shape eg curled leaves
MEHIARFFFGVSGNVIALFLFLSPVITFWRIIKRKSTEDFSGVPYNMTLLNCLLSAWYGLPFVSPNNILVTTINGAGSVIEAIYVVIFLIFAERRAKVRMLGLLSVVTAIFATVVLVSLLALHGKARTVFCGLAATVFSICMYASPLSIMRLVIKTKSVEYMPFLLSLSVFLCGTSWFIYGLLGLDPFIYIPNGCGSFLGLMQLILYAIYRKNKGPAAGAGKGEDADEADEVEDAKKAAAAVEMGEAKIKVDDDTAVVDEPAVVDKVAAQV

SEQ ID NO: 7093 - DNA, 648 bp, Triticum aestivum
  misc_feature: Ceres CLONE ID no. 1315378
  misc_feature: Ceres CDNA ID no. 40351744
  CDS (78)..(488): REFERENCED BY SEQ ID NO: 7094
caccgcgagaaatcacaatctcaatctccaaaccgtagcagcagcagcagcatctctcccctctccaacaagcttcgatggcccgcacgaagcagatggcgcgcaagtccaccggcggcaaggcgccgaggaagcagctggcgaccaaggcggcgcgcaagtccgccccggccaccggcggcgtgaagaagccccaccgcttccgcccggggaccgtcgccctccgcgagatccgcaagtaccagaagagcacggagctgctcatccgcaagctccccttccagcgcctcgtccgggagatcgcccaggacttcaagaccgacctccgcttccagtcctccgccgtctccgccctgcaggaggccgccgaggcctacctcgtcggcctcttcgaggacaccaacctctgcgccatccacgccaagcgcgtcaccatcatgcccaaggacatccagctcgcccgccgcatccgcggggagcgcgcctaggctccgcacgcgccctgcccgctccgcttggttgccggtagctgtctatggttctgtagttgtttgccctccttgtatgtcctgtgggtgccatcgattgttcaaatctctggtttgataaatggaatcacgcatcttttatacaaaaaaaaaaaaaaaa

SEQ ID NO: 7094 - protein, 136 aa, Triticum aestivum
  misc_feature: Ceres CLONE ID no. 1315378
  misc_feature: Ceres CDNA ID no. 40351744
  misc_feature (58)..(134): Pfam Name: Histone PFAM Desc: Core histone H2A/H2B/H3/H4
MARTKQMARKSTGGKAPRKQLATKAARKSAPATGGVKKPHRFRPGTVALREIRKYQKSTELLIRKLPFQRLVREIAQDFKTDLRFQSSAVSALQEAAEAYLVGLFEDTNLCAIHAKRVTIMPKDIQLARRIRGERA

SEQ ID NO: 7095 - DNA, 633 bp, Triticum aestivum
  misc_feature: Ceres CLONE ID no. 1315472
  misc_feature: Ceres CDNA ID no. 36531372
  CDS (84)..(446): REFERENCED BY SEQ ID NO: 7096
ctctcgcatcgcatcccaccaccaagctccagacgcctcctcctcctcccccgccgccgccgcacgctccagagaccgcaggcatgggcgtcttcaccttcgtgtgccgcgactccggcgccgagtggtcggccaagcagcacaagggcgagctcgaggcctccgccgccacgccctacgacctgcagcgccagctcgtctccgccgcctgcgccgaggacaagtccggcggcgtccagtcctccttcaccatggtctcccccaattccgccatcttccaggtggtcattggtggtgcctctgctggtccgatcggtggtggtgctggtggtggtggtgccgctgcatcaggtggagctgccgcagaggcccccaaggctgaggagaagaaggaagaggagaaggaggagagcgaggatgaccttggcttctccctcttcgattagatcttctttaccctgttgctcgccagaaatgacattgtcctattgccgctaattttgatgccacgcccacagggtttgtgaacctgcctagtttgattgtcaagggatgtatgtgttactttctgttcatgtgaggatttggttatgttattatgcagcatcgaatatcccaaaaaaaaaaaaaaaa

SEQ ID NO: 7096 - protein, 120 aa, Triticum aestivum
  misc_feature: Ceres CLONE ID no. 1315472
  misc_feature: Ceres CDNA ID no. 36531372
  misc_feature (25)..(119): Pfam Name: Ribosomal_60s PFAM Desc: 60s Acidic ribosomal protein
  misc_feature: Homolog of GI Number: 56783875 NR Desc: putative acidic ribosomal protein P3a
  misc_feature: Homolog of GI Number: 53792736 NR Desc: putative 60S acidic ribosomal protein P3
  misc_feature: Homolog of GI Number: 7489709 NR Desc: acidic ribosomal protein P3a
  misc_feature: Homolog of GI Number: 20259603 NR Desc: putative acidic ribosomal protein
  misc_feature: Homolog of GI Number: 21617903 NR Desc: 60S acidic ribosomal protein P3
  misc_feature: Homolog of GI Number: 6226017 NR Desc: 60S acidic ribosomal protein P3
  misc_feature: Homolog of GI Number: 38503544 NR Desc: 60S acidic ribosomal protein P3
  misc_feature: Homolog of GI Number: 38503547 NR Desc: 60S acidic ribosomal protein P3
  misc_feature: Homolog of GI Number: 38503536 NR Desc: 60S acidic ribosomal protein P3
  misc_feature: Homolog of GI Number: 12963432 NR Desc: ribosomal protein P2
MGVFTFVCRDSGAEWSAKQHKGELEASAATPYDLQRQLVSAACAEDKSGGVQSSFTMVSPNSAIFQVVIGGASAGPIGGGAGGGGAAASGGAAAEAPKAEEKKEEEKEESEDDLGFSLFD

SEQ ID NO: 7097 - DNA, 926 bp, Triticum aestivum
  misc_feature: Ceres CLONE ID no. 1315618
  misc_feature: Ceres CDNA ID no. 25892806
  CDS (15)..(695): REFERENCED BY SEQ ID NO: 7098
aaaagcatctcacaatggcctcctcttcctctttgtttctcctcgccgtgcttcttgcgctggtctcatggcaggccactgcctatgatcctagccctctgcaagacttctgcgtcgccgacatgaagtcacctgtgcgagtaaatggatttccttgcaaggacccaatggccgtcaacacggaagatttcttcaatccagccatgcttgaccggcctagggatactaagaacagcaaggttgggtccaacgtcaccaacattaacgtcatcaattttcctggcctcaacacccttggcatctcgctggcacgcatcgactatggaccattgggcgtgaacacaccacatatacatccccgtgccactgagctccttactgtgcttgagggaactctctaccttggatttgtcacatccaacccaaataggctcttctccagggtggtcaagaaaggtgacgtatttgtgttcccgaaggcaatgatccacttccaaatgaatctagcacatgacaagccagcagctgcgttgtcatcactcagcagccaaaacccaggagttatttctattgccaatgcagtctttggatcaaacccacccatttcggatgatgttttggccacggcgtttcaggtggaaaagaaactgattgattggctccaatctcagttctgggagaataaccactactaatatgttgtagtgtttacacctataaatagtataaagaataaatgtcatgtatgtgtgtgcctgcgagccgcgagtttttcatttccttttgaatcgtgacaatatatgttgtttgttggattgatatagtaatatggtgacagtgtaagcatttggttgtttaataaatggaataccggggtgtcctcttccctcgtaactgaaataagagaatcaaaaaaaaaaaaaaaa

SEQ ID NO: 7098 - protein, 226 aa, Triticum aestivum
  misc_feature: Ceres CLONE ID no. 1315618
  misc_feature: Ceres CDNA ID no. 25892806
  misc_feature (63)..(214): Pfam Name: Cupin_1 PFAM Desc: Cupin
  misc_feature: Homolog of GI Number: 6996619 NR Desc: oxalate oxidase
  misc_feature: Homolog of GI Number: 9837115 NR Desc: germin F
  misc_feature: Homolog of GI Number: 9837113 NR Desc: germin B
  misc_feature: Homolog of GI Number: 9837117 NR Desc: germin D
  misc_feature: Homolog of GI Number: 50941851 NR Desc: germin protein type 1
  misc_feature: Homolog of GI Number: 9837119 NR Desc: germin E
  misc_feature: Homolog of GI Number: 50941849 NR Desc: putative germin protein type 1
  misc_feature: Homolog of GI Number: 50942591 NR Desc: putative germin protein type 1
  misc_feature: Homolog of GI Number: 50941859 NR Desc: putative germin A
  misc_feature: Homolog of GI Number: 50941853 NR Desc: putative germin A
MASSSSLFLLAVLLALVSWQATAYDPSPLQDFCVADMKSPVRVNGFPCKDPMAVNTEDFFNPAMLDRPRDTKNSKVGSNVTNINVINFPGLNTLGISLARIDYGPLGVNTPHIHPRATELLTVLEGTLYLGFVTSNPNRLFSRVVKKGDVFVFPKAMIHFQMNLAHDKPAAALSSLSSQNPGVISIANAVFGSNPPISDDVLATAFQVEKKLIDWLQSQFWENNHY

SEQ ID NO: 7099 - DNA, 1238 bp, Triticum aestivum
  misc_feature: Ceres CLONE ID no. 1315656
  misc_feature: Ceres CDNA ID no. 24726565
  CDS (58)..(1077): REFERENCED BY SEQ ID NO: 7100
cttttccgacgaggcgacctgccccctttcccctctcgcgcaccttcctctctcgccatggccttcttctcccaccaccacctccagcagccccaccccgcggcgccgccaccgcagcagcagcagcagcagccggcgcctctctccttcaggaacgcgctgccggtgccggtcgatggacagatcccggcgcctctcgccttcttcaacgcgccgcccgctttcccggaccaggccgggcagccacagatagtggacgcggcggggctgacggctgcggcgggtatggggtggaggcagccgagggagcaggagctgctgggggagaactcgcagatgtcgtctatcgatttcctgcagacgggctcggcggtgtcgacgggcctggctctctctctggaggaccggcgccatggcggcggcggcgctggcgcagggaactcctcgggcgattcgccgctgctcctgctgccgatgctggacgacgacatctcccgtgaggtccagcgcctagatgctgatatggaccgattcatcagggcccagagtgagcgcatgaggcagtctatattggagaaagttcaggcaaagcagtttgaagcgctggcctctgttgaagacaagatcctccgaaaaatacgcgataaagagtcagaagtgcagaacatcaacaaaaggaacctggaactcgaggaccagattaaacaaatggcaggggaagttggtgcgtggcagcaacgagctaagtacaacgagagcatgatcagcgcactcaagtacaacctggagcaggtatgtgcccatcagagcaaggacttcaaagaaggctgtggcgacagtgaggtagacgatacagcatcctgctgcaacggcggcgctgtcaatctgcagctgatgcccaaggagaacaatcaccccaaggatttgacggcctgcagggtctgtaaatcaagcgaggcgtgcatgctcttgctgccctgccggcatctttgcctgtgcaaagagtgcgagagcaagctgagcttctgtcccctctgccagtcctccaagatacttggcatggagatatatatgtgatgtagaatataattttatgtactgcttgagtatcttatctttcgagatgctgatgtacttagacatcaatgtattgtcaactgtagtctcactgggtcgataagactgccatttctggtagagttactgcagagaacttctgattaaaaaaaaaaaaaaaa

SEQ ID NO: 7100 - protein, 339 aa, Triticum aestivum
  misc_feature: Ceres CLONE ID no. 1315656
  misc_feature: Ceres CDNA ID no. 24726565
  misc_feature: null
  misc_feature: Useful for making plants with altered Lignin content
  misc_feature: Homolog of GI Number: 29368618 NR Desc: S
  misc_feature: Homolog of GI Number: 45544873 NR Desc: CONSTANS interacting protein 4
  misc_feature: Homolog of GI Number: 45602841 NR Desc: S
  misc_feature: Homolog of GI Number: 45758663 NR Desc: S
  misc_feature: Homolog of GI Number: 40807658 NR Desc: S
  misc_feature: Homolog of GI Number: 13194828 NR Desc: putative S
  misc_feature: Homolog of GI Number: 50905017 NR Desc: putative S
  misc_feature: Homolog of GI Number: 21536706 NR Desc: S
  misc_feature: Homolog of GI Number: 62321633 NR Desc: At1g10650
  misc_feature: Homolog of GI Number: 6573749 NR Desc: F20B24.9
MAFFSHHHLQQPHPAAPPPQQQQQQPAPLSFRNALPVPVDGQIPAPLAFFNAPPAFPDQAGQPQIVDAAGLTAAAGMGWRQPREQELLGENSQMSSIDFLQTGSAVSTGLALSLEDRRHGGGGAGAGNSSGDSPLLLLPMLDDDISREVQRLDADMDRFIRAQSERMRQSILEKVQAKQFEALASVEDKILRKIRDKESEVQNINKRNLELEDQIKQMAGEVGAWQQRAKYNESMISALKYNLEQVCAHQSKDFKEGCGDSEVDDTASCCNGGAVNLQLMPKENNHPKDLTACRVCKSSEACMLLLPCRHLCLCKECESKLSFCPLCQSSKILGMEIYM

SEQ ID NO: 7101 - DNA, 956 bp, Triticum aestivum
  misc_feature: Ceres CLONE ID no. 1315736
  misc_feature: Ceres CDNA ID no. 24727017
  CDS (10)..(825): REFERENCED BY SEQ ID NO: 7102
aagaacgcaatgtctggtgccgctgacacagctgcggccgccgccgtcgccgccgtcgccggctcatcgggtcccgcggcgttgccgctcagcggacgcgtggccatcgtgaccggcgcgtcgcgcggcatcgggcgagccatcgcggcccacctctcctccctcggcgcaagcgtcgtcctgggctacgcggccagcgcggccgaggccgacgcgctcgccgcagagctcccacgagccgtcgccgtgaaggccaacgtgtccgaagaggccggcgtgcgctccctcttcgacgccgccgagtcggccttcggctgcgcggcgccgcacatcatagtcgccaacgccggcgtgctcggcgacaagtacccgcccctcgccgacaccgccacggcggacttcgaccgcgtgttcgccgtcaacacgcgcggcgccttcctctgcctccgcgaggccgccaaccggctgccccgtggcggcggcggccggatcgtggccgtgacgtcgtccgtggtcgggtcgaacccgacggggtactccgcctacaccgcgtccaaggcggccgtggaggcgatggtgcgtaccatggccaaggagctcaagggcacgcgcgtgacggccaactgcgtggctccgggggccacggccacggacatgttcttcgccgggaagagcaacgagacggtgaggcggaccgcggagatgaacccgatggagcggctcggggaggccggcgacatcgcaccagtggtcggcttcctctgcactgacgccgccgagtgggtcaacgggcaggtcatcagggtcaacggcgggtacgtctgataatctgctggctggcctgtcatgccattagacattacggtgggagcgaaataatgcctctgggtgttgcagaaaactaaaaaaatatatctgccggaaatttatagcacaatttaaaaaaaaaaaaaaaa

SEQ ID NO: 7102 - protein, 271 aa, Triticum aestivum
  misc_feature: Ceres CLONE ID no. 1315736
  misc_feature: Ceres CDNA ID no. 24727017
  misc_feature (30)..(198): Pfam Name: adh_short PFAM Desc: short chain dehydrogenase
  misc_feature: Homolog of GI Number: 50938375 NR Desc: putative short
  misc_feature: Homolog of GI Number: 50934443 NR Desc: putative short
  misc_feature: Homolog of GI Number: 50934441 NR Desc: putative short
  misc_feature: Homolog of GI Number: 6223643 NR Desc: putative short
  misc_feature: Homolog of GI Number: 55773921 NR Desc: putative short
  misc_feature: Homolog of GI Number: 21594913 NR Desc: short
  misc_feature: Homolog of GI Number: 77403673 NR Desc: short chain dehydrogenase
  misc_feature: Homolog of GI Number: 9758903 NR Desc: Brn1
  misc_feature: Homolog of GI Number: 395223 NR Desc: short
  misc_feature: Homolog of GI Number: 6223645 NR Desc: putative short
MSGAADTAAAAAVAAVAGSSGPAALPLSGRVAIVTGASRGIGRAIAAHLSSLGASVVLGYAASAAEADALAAELPRAVAVKANVSEEAGVRSLFDAAESAFGCAAPHIIVANAGVLGDKYPPLADTATADFDRVFAVNTRGAFLCLREAANRLPRGGGGRIVAVTSSVVGSNPTGYSAYTASKAAVEAMVRTMAKELKGTRVTANCVAPGATATDMFFAGKSNETVRRTAEMNPMERLGEAGDIAPVVGFLCTDAAEWVNGQVIRVNGGYV

SEQ ID NO: 7103 - DNA, 613 bp, Triticum aestivum
  misc_feature: Ceres CLONE ID no. 1315826
  misc_feature: Ceres CDNA ID no. 29191527
  CDS (111)..(350): REFERENCED BY SEQ ID NO: 7104
attccggaatctttctcccctctcgctctctccaccaaccaagaacagcaacacctcggcctcggagcgccgccgaatccgccgcccggcagaagggatccgaagctcccatggctggcaagtacatcgtcgccggcctcgtcggctcctgtgtcatctcgtacgcctgcgactacattgtttctcagaagaagatcttcggtggcaccatcccagggactgtgtccgacaaggagtggttgaaggcgacggagcagaggttccaggcctggcctcgcgtcgccggcccgccggtcatcatgaaccccatcagccgccagaacttcatcgtcaaggacctcaacccctgaggcccaagaccttgaggtttgcggtcggttggaacctttaccctgatggcgatgcctgttgctaaatctacctatatgtgctggctgtactctcgaggctattttgtctgtctcaataattaaaacaacactattgtgtagggcaccgtggctatatttcttctgaagaacagaagagaacctgaagcatatttgctttggactttttgtcatcttttgtttgcataaacatatgtttacttttcagaaaaaaaaaaaaaaaa

SEQ ID NO: 7104 - protein, 79 aa, Triticum aestivum; identical to SEQ ID NO: 2798
  misc_feature: Ceres CLONE ID no. 1315826
  misc_feature: Ceres CDNA ID no. 29191527
  misc_feature: Homolog of GI Number: 34897932 NR Desc: ozone
  misc_feature: Homolog of GI Number: 21387039 NR Desc: stress
  misc_feature: Homolog of GI Number: 34897944 NR Desc: ozone
  misc_feature: Homolog of GI Number: 15223334 NR Desc: ozone
  misc_feature: Homolog of GI Number: 6715639 NR Desc: T25K16.16
  misc_feature: Homolog of GI Number: 50910341 NR Desc: putative stress
  misc_feature: Homolog of GI Number: 50925981 NR Desc: OSJNBa0067K08.15
  misc_feature: Homolog of GI Number: 7739775 NR Desc: stress

SEQ ID NO: 7105 - DNA, 719 bp, Triticum aestivum
  misc_feature: Ceres CLONE ID no. 1315961
  misc_feature: Ceres CDNA ID no. 24766063
  CDS (138)..(449): REFERENCED BY SEQ ID NO: 7106
aagggaagggagcagtctagcgaacgcagccctcttcaaagcgcggcagactcctccccgcaaacccccagatcccgacgagaccacgccacagcgcggcgaagccctagcctccggccagcgccgccgccgcagcgatggtgtacttcgactcatgggacgagttcgtcgaccggtccgtgcagctcttccgcgccgaccccatcaccactcgctattgtatgaagtaccggcactgcgacgggaagctcgtgctcaaggtcaccgacgaccgcgagtgcttgaagttcaagacggatcaagctcaggacgcaaagaagatggagaagctcaacaacatctttttcgctctcatgactcgtggacctgatgctgacataagcgaggtttcagggaaggaacaagcggagcagcagcaatcaaagaagggacggggcaggaggcagtagtatcatgctctggatttctttcaaaaagatcacaactgggagtggtgggtggatattttgatcgactcctgttaagccatgttacaactgtgagtggtgggtggtctaagagtggcgagtagttttcaagacaatgtgcgagccatcgttggatccttttcctggcacagaaccgcgaattacacttacccacacaatcatggttgatgagacaaatcaaatctttgaccgtctgcgtgttttgttgatgaaataaaaaaaaaaaaaaaa

SEQ ID NO: 7106 - protein, 103 aa, Triticum aestivum
  misc_feature: Ceres CLONE ID no. 1315961
  misc_feature: Ceres CDNA ID no. 24766063
  misc_feature (2)..(78): Pfam Name: SRP9 PFAM Desc: Signal recognition particle 9 kDa protein
  misc_feature: Homolog of GI Number: 2208988 NR Desc: signal recognition particle subunit 9
  misc_feature: Homolog of GI Number: 52077269 NR Desc: putative signal recognition particle 9 kDa protein
  misc_feature: Homolog of GI Number: 21553473 NR Desc: signal recognition particle 9 kDa protein SRP9
  misc_feature: Homolog of GI Number: 41055367 NR Desc: similar to signal recognition particle 9kDa
  misc_feature: Homolog of GI Number: 62857637 NR Desc: Srp9
  misc_feature: Homolog of GI Number: 50603659 NR Desc: MGC81742 protein
  misc_feature: Homolog of GI Number: 5107800 NR Desc: Signal Recognition Particle Alu Rna Binding Heterodimer
  misc_feature: Homolog of GI Number: 6755662 NR Desc: signal recognition particle 9
  misc_feature: Homolog of GI Number: 134890 NR Desc: Signal recognition particle 9 kDa protein
  misc_feature: Homolog of GI Number: 61831100 NR Desc:  similar to signal recognition particle 9K chain
MVYFDSWDEFVDRSVQLFRADPITTRYCMKYRHCDGKLVLKVTDDRECLKFKTDQAQDAKKMEKLNNIFFALMTRGPDADISEVSGKEQAEQQQSKKGRGRRQ

SEQ ID NO: 7107 - DNA, 853 bp, Triticum aestivum
  misc_feature: Ceres CLONE ID no. 1316002
  misc_feature: Ceres CDNA ID no. 25892807
  CDS (101)..(643): REFERENCED BY SEQ ID NO: 7108
agcgtaacgcataacacctaactaagctaggctactaagccaaagcacaacaagggagcaggagagggagatatacctcgctgcttggtctcgatcttccatggatgagcaaggggagagggggctccagctgctgctccccgcagccgctgctcgggtgctccgggaagcgccggccagcgccgccaccgaccaccagcagctggacctggacctgtccatgagcattgggccgaggcagcagcagctgcagctgcagctgccacggccggcgccgccgactccaccggcgaacgagagcaggagagcagcggcgactgtggccgccagcgctgcgacggcgaggcacgtgcagcagcagcagcagcaggtgacggtggacgtccgcgccgtgaagcagcagacggcggagcaggcccggatggcatcggcggagcgcgcctacgcggagcgcgtccgggagctggcgaagcgggagctggagctcgccgagagagagttcgcgcgcgccaggatgatctgggagcgcgcccgcgaggaggtggagcgggtggagcggatgaagcagatcgccgccaggcggctcggctccgccgcgctcgagatcacctgccacgcctgcatgcagcgcttccatccttaattaggtcggccggccaactgcaccgacgacatggtcgatcggagatcgatgcttcctgctcgccattgctagctgtaactctctctatctctcgtagctcctgtcttgtgagtgccagtcacgttgcccctgtttgagacgataatcatctggttgatgcatgcatcaaggaagcggttattcctctttactctaaaaaaaaaaaaaaaa

SEQ ID NO: 7108 - protein, 140 aa, Triticum aestivum
  misc_feature: Ceres CLONE ID no. 1316002
  misc_feature: Ceres CDNA ID no. 25892807
  misc_feature: Homolog of GI Number: 50923823 NR Desc: OSJNBa0044M19.6
  misc_feature: Homolog of GI Number: 11067292 NR Desc: zinc finger protein ID1
  misc_feature: Homolog of GI Number: 56784100 NR Desc: putative isoflavone reductase homolog IRL
  misc_feature: Homolog of GI Number: 4406777 NR Desc: putative C2H2
  misc_feature: Homolog of GI Number: 51893578 NR Desc: magnesium chelatase
  misc_feature: Homolog of GI Number: 117580 NR Desc: Circumsporozoite protein precursor
  misc_feature: Homolog of GI Number: 66776103 NR Desc: LigA
  misc_feature: Homolog of GI Number: 66775827 NR Desc: OsmC
  misc_feature: Homolog of GI Number: 50946649 NR Desc: putative zinc finger protein
  misc_feature: Homolog of GI Number: 72389 NR Desc: circumsporozoite protein precursor
MSIGPRQQQLQLQLPRPAPPTPPANESRRAAATVAASAATARHVQQQQQQVTVDVRAVKQQTAEQARMASAERAYAERVRELAKRELELAEREFARARMIWERAREEVERVERMKQIAARRLGSAALEITCHACMQRFHP

SEQ ID NO: 7109 - DNA, 625 bp, Triticum aestivum
  misc_feature: Ceres CLONE ID no. 1316065
  misc_feature: Ceres CDNA ID no. 25892808
  CDS (63)..(332): REFERENCED BY SEQ ID NO: 7110
aaaaaaataaccaagcaagaagaagctagcagctagctctagccaaatcaagacacgtcgacatgaatcacgccaaggagaaggtgaaggacgccgcgagcgcggccaaggccaaggccaagatcacgcaggccaaggtggccgagaagacggaggcggccacggcgaggtcgcacgacgagcgtgcgctggcgcacgagcggggcaaggccaaggtcgccgccgccgaggccgagctgcaccaggccaaggtcacccaccgcgaggaggccatggagcaccgcctccacaagcgcgccggcaccgggcacaagcacggcgctggccactgatgtgcatgaaggagccggacggccggccgccggctagaaagatgtaccgtgcacgcatagttcatgctagcaagccggcctgtacttgtttccaactctttttccattattattttactcccagaccaagtgtgtgttcattgacgtcgggcttaatttggagaggtgacagctgccagcctgcctgccccaggtgcatatgtatgtattttggcttcttgaataataattagtaacggattgacataagttttgtctatcaaaaagtattaaaatcaaaaaaaaaaaaaaaa

SEQ ID NO: 7110 - protein, 89 aa, Triticum aestivum
  misc_feature: Ceres CLONE ID no. 1316065
  misc_feature: Ceres CDNA ID no. 25892808
  misc_feature (1)..(73): Pfam Name: LEA_1 PFAM Desc: Late embryogenesis abundant
  misc_feature: Homolog of GI Number: 82394682 NR Desc: seed maturation protein
  misc_feature: Homolog of GI Number: 82394680 NR Desc: seed maturation protein
  misc_feature: Homolog of GI Number: 82394666 NR Desc: seed maturation protein
  misc_feature: Homolog of GI Number: 82394674 NR Desc: seed maturation protein
  misc_feature: Homolog of GI Number: 82394556 NR Desc: seed maturation protein
  misc_feature: Homolog of GI Number: 82394652 NR Desc: seed maturation protein
  misc_feature: Homolog of GI Number: 82394678 NR Desc: seed maturation protein
  misc_feature: Homolog of GI Number: 4102692 NR Desc: late
MNHAKEKVKDAASAAKAKAKITQAKVAEKTEAATARSHDERALAHERGKAKVAAAEAELHQAKVTHREEAMEHRLHKRAGTGHKHGAGH

SEQ ID NO: 7111 - DNA, 659 bp, Triticum aestivum
  misc_feature: Ceres CLONE ID no. 1316612
  misc_feature: Ceres CDNA ID no. 29191374
  CDS (107)..(508): REFERENCED BY SEQ ID NO: 7112
ccagtagggttttatctcttctcgtgttgcccaccacctagacccatcctcctcccctcacactccctcccatccccgccgccgccgccgccgctcgcctcgcaagatggcggtgcctatcctgaagacggcgatcgtgaagaagcgggtgaagcacttcaagagggcgcacagcgaccgctacatcggcctcaagcaaagctggcgcaggccaaagggtatcgactcccgtgtcaggcgtaagttcaagggatgcaccttgatgcccaacattggatatggttctaacaagaagaccaggcactaccttcccaacaagttcaagaagtttgtggtgcacaacgtctctgagctggagctgcttatgatgcacaacaggacgtactgtgctgagatcgcgcacaacgtgtccacccagaagcgcaaggcgatagtggagcgcgccgcccagctcgacgtcgtggtcaccaacaagctcgccaggctccgcagccaggaggatgagtgaaatgtttcgaacagtagcgcttttggatcgttttgttccctgtagcagacttaatgccgaatctggaattttctcttctgttcgcctcgaggattcgacgctgttgaacaccttgctatcgatgctggtcatgctaaaaaaaaaaaaaaaa

SEQ ID NO: 7112 - protein, 133 aa, Triticum aestivum
  misc_feature: Ceres CLONE ID no. 1316612
  misc_feature: Ceres CDNA ID no. 29191374
  misc_feature (14)..(123): Pfam Name: Ribosomal_L32e PFAM Desc: Ribosomal protein L32
  misc_feature: Homolog of GI Number: 76057835 NR Desc: ribosomal L32
  misc_feature: Homolog of GI Number: 50947773 NR Desc: putative ribosomal protein L32
  misc_feature: Homolog of GI Number: 40287540 NR Desc: ly200 protein
  misc_feature: Homolog of GI Number: 77745481 NR Desc: ly200
  misc_feature: Homolog of GI Number: 13899057 NR Desc: ribosomal protein L32
  misc_feature: Homolog of GI Number: 71534997 NR Desc: ribosomal protein L32
  misc_feature: Homolog of GI Number: 23198054 NR Desc: ribosomal protein L32
  misc_feature: Homolog of GI Number: 21555143 NR Desc: ribosomal protein L32
  misc_feature: Homolog of GI Number: 10177580 NR Desc: ribosomal protein L32
  misc_feature: Homolog of GI Number: 15213784 NR Desc: ribosomal protein L32
MAVPILKTAIVKKRVKHFKRAHSDRYIGLKQSWRRPKGIDSRVRRKFKGCTLMPNIGYGSNKKTRHYLPNKFKKFVVHNVSELELLMMHNRTYCAEIAHNVSTQKRKAIVERAAQLDVVVTNKLARLRSQEDE

SEQ ID NO: 7113 - DNA, 732 bp, Triticum aestivum
  misc_feature: Ceres CLONE ID no. 1316692
  misc_feature: Ceres CDNA ID no. 25447050
  CDS (88)..(495): REFERENCED BY SEQ ID NO: 7114
ccggtaactagtggcaagtggtactgtaacatcacatcacagggtgacggtgttcggccgagctggtcgatcgacacggcggccagcatgaaggcgtcctacttcctggtcgtgcttctgctcgccgccgccacggggagcaggctctcgctcgccgcccgcgagggcaccaccctgggcggcgagctcggcgcgctcatagccaaggccggcagcttcctcacgtcggcgggccgcgcgggagcggacggctggcactccgccgcggccgcggaggtggacgcctcggcgaggaaggggcacggccatccggcgggggcgaagaagcggctgaagaagtcttccgtgaactgcatccccgccgacatgtgccggaggaagaaggtgctgtgcggcaagcggtgctacaagacgtcgcacgccggcgccggcctcgaccacgtcccctccagccggtgcgtcgtcaggtgcaagaagtgcgtgcccacctgctagatcgttcgttggttgctccttcccttccatcttctgagttccgtgtcgtgtcgtgtcgtggtgctcgatccgtgcatgttagttacatttgcttttccctccatagggtttcattcatgcatcagttgaataagctggcaggcttcccgccatcatgcatgcagcataggtagtggacatacgggttctactctaaaagaagtgtaccacggttgtgtgctaaaaaaaaaaaaaaaa

SEQ ID NO: 7114 - protein, 135 aa, Triticum aestivum
  misc_feature: Ceres CLONE ID no. 1316692
  misc_feature: Ceres CDNA ID no. 25447050
  misc_feature: Homolog of GI Number: 50926614 NR Desc: OSJNBa0074L08.2
MKASYFLVVLLLAAATGSRLSLAAREGTTLGGELGALIAKAGSFLTSAGRAGADGWHSAAAAEVDASARKGHGHPAGAKKRLKKSSVNCIPADMCRRKKVLCGKRCYKTSHAGAGLDHVPSSRCVVRCKKCVPTC

SEQ ID NO: 7115 - DNA, 849 bp, Triticum aestivum
  misc_feature: Ceres CLONE ID no. 1316744
  misc_feature: Ceres CDNA ID no. 29191528
  CDS (351)..(680): REFERENCED BY SEQ ID NO: 7116
atcgtctggctcacaatctcacatagcgtggcggtaggtgcacgagacccgcaccggcgccctaccggtttccacacaaatactacgggccttctcctcgtgtccactcttcttctcccctctcgcctcttctggcgttctcccctccccccatcgcggtttgccccgccggcggcgacgcggacctggctggcgcaaatcggcttcttctctttgcgggatttatgtgccaagctgcatattgttctgttttattccttggatcagacttgttgagctgattccagcaaggagcaatctgcaacaacttggtgttaagcttgcatcttccctaagcagctctagattaaatgggagaagcaagctcggatgatctttgccattgtcaagggtgtcttggcaagtacaccctactcagagatgaagagaacccgcagctggcaaggtttgagagacggcttccttgctttggttgcggaataggatggtcctcatttcttttaggtttcttgtgtccattgctttggtactatgcaacgaccctttactgctgcaagtactacaatagggatccccgagagcgcccgggtcttgctgcctctgctattgcggcggccatcttcactactgcggcaactattaccctctccatcattctgataatctgggcacaaaagtgatttctgaggcagggataacatggctggatgattggttgtttatcggcagatgagggattcagaaggcaacttgtaatgttgatgatagcaggtcgttttagttcatcatgtaatcatagtgcatatgcaagtgtttatcgaaggtcttcatcgaaaaaaaaaaaaaaaa

SEQ ID NO: 7116 - protein, 109 aa, Triticum aestivum
  misc_feature: Ceres CLONE ID no. 1316744
  misc_feature: Ceres CDNA ID no. 29191528
MGEASSDDLCHCQGCLGKYTLLRDEENPQLARFERRLPCFGCGIGWSSFLLGFLCPLLWYYATTLYCCKYYNRDPRERPGLAASAIAAAIFTTAATITLSIILIIWAQK

SEQ ID NO: 7117 - DNA, 798 bp, Triticum aestivum
  misc_feature: Ceres CLONE ID no. 1317049
  misc_feature: Ceres CDNA ID no. 29191529
  CDS (94)..(579): REFERENCED BY SEQ ID NO: 7118
cctagcctccggatccatccatccgcccctcgctgccgctgcgtctcgtctccaccaccccacttgcccccggactcaggaggatcgtcggagatgtcggacaccgatgagcaccacttcgagtccaaggccgactccggcgcctccaagacctacccgcagcaggctggcgccatccgcaagggtggacacatcgtcatcaaggcccgtccctgcaaggttgttgaggtctccacctccaagactgggaagcatggtcacgcaaagtgtcactttgttgccattgacatctttaatggaaagaagcttgaggatatcgttccttcatcccacaactgtgacgtcccccatgttgaccgccaagattatcagctgattgacataactgatgatggatatgtcagccttctcactgagagtggtaacactaaggatgacctgaagcttcccactgatgatgttctgcttggccagatcaagactggatttgctgatggcaaggacctgatcctgtctgtgatgtccgccatgggtgaagaacagatctgcgctgtgaaggaaatcggtggtggcaagtaagcagctgtgcgtggttgcctacctgcgatacttggtatctagtgcttctgggtgtttgagatacacatacataggcatcaagatatctgttgggtgaaacaagtttgatccagatttgtgtgttttttacaccgaatgctcgaggtgctgctagtactttgttatctatctatctatctctattataataccctttggaattgaaaaaaaaaaaaaaaa

SEQ ID NO: 7118 - protein, 161 aa, Triticum aestivum
  misc_feature: Ceres CLONE ID no. 1317049
  misc_feature: Ceres CDNA ID no. 29191529
  misc_feature (28)..(64): Pfam Name: KOW PFAM Desc: KOW motif
  misc_feature (86)..(155): Pfam Name: eIF PFAM Desc: Eukaryotic initiation factor 5A hypusine
  misc_feature: Homolog of GI Number: 74048999 NR Desc: eukaryotic translation initiation factor 5A1
  misc_feature: Homolog of GI Number: 78191549 NR Desc: translation initiation factor 5A
  misc_feature: Homolog of GI Number: 74049022 NR Desc: eukaryotic translation initiation factor 5A2
  misc_feature: Homolog of GI Number: 74049040 NR Desc: eukaryotic translation initiation factor 5A3
  misc_feature: Homolog of GI Number: 78191545 NR Desc: translation initiation factor 5A
  misc_feature: Homolog of GI Number: 50938957 NR Desc: translation initiation factor 5A
  misc_feature: Homolog of GI Number: 12407787 NR Desc: eukaryotic translation initiation factor 5A
  misc_feature: Homolog of GI Number: 34915268 NR Desc: putative translation initiation factor 5A
  misc_feature: Homolog of GI Number: 2225887 NR Desc: eukaryotic initiation factor 5A1
  misc_feature: Homolog of GI Number: 44894088 NR Desc: eukaryotic initiation factor 5A2
  misc_feature: Useful for increasing chlorophyll and photosynthetic capacity
  misc_feature: Useful for making plants that grow better in shade
  misc_feature: Useful for making plants with increased biomass and foliage
  misc_feature: Useful for making plants with increased biomass and foliage
  misc_feature: Useful for making shorter plants
  misc_feature: Useful for making shorter plants and plants with modified flowers
MSDTDEHHFESKADSGASKTYPQQAGAIRKGGHIVIKARPCKVVEVSTSKTGKHGHAKCHFVAIDIFNGKKLEDIVPSSHNCDVPHVDRQDYQLIDITDDGYVSLLTESGNTKDDLKLPTDDVLLGQIKTGFADGKDLILSVMSAMGEEQICAVKEIGGGK

SEQ ID NO: 7119 - DNA, 554 bp, Triticum aestivum
  misc_feature: Ceres CLONE ID no. 1317071
  misc_feature: Ceres CDNA ID no. 25446536
  CDS (1)..(351): REFERENCED BY SEQ ID NO: 7120
attatctcccacacactcactcgcctcctccgcagttgttgctcgagcagttgtagcacagccgcatctgcgacattttctttctcgcagctaggatcatggcctccaagatcttccgcgccgtcgtcatcgcggccgtcgccgcgtcttccttcgctggggtcgctctggccgccgacgagcccgcgccgagcccgacgcccggtgccgcagctgtctcctcgtcgcttctcgccgccgtgctctgcccggccgtggcgttcctcgttggcagcatgcgccactgagttggccgaggtagcagctaccgcgcgtgtccacaggctcgctccatgccggatttcagggtgaatgggcgcttttcttgcgtgatctttgcgccttgctccttgatttgatagtcttcatacgtgtacccgtcgatgctgttagttttttttttttcgaaagtcgatgctgttagtgttggttgtgtttttcttttcatgtgctacatagtttatgtgtattgattcagatatttgtcagaatttgctctaaaaaaaaaaaaaaaa

SEQ ID NO: 7120 - protein, 62 aa, Triticum aestivum
  misc_feature: Ceres CLONE ID no. 1317071
  misc_feature: Ceres CDNA ID no. 25446536
MASKIFRAVVIAAVAASSFAGVALAADEPAPSPTPGAAAVSSSLLAAVLCPAVAFLVGSMRH

SEQ ID NO: 7121 - DNA, 689 bp, Triticum aestivum
  misc_feature: Ceres CLONE ID no. 1317197
  misc_feature: Ceres CDNA ID no. 29191530
  CDS (74)..(484): REFERENCED BY SEQ ID NO: 7122
ctcactccaaatcccccaaccctcccaatcccccaaatctcctcagcctccctgccggcgcatctccgactccatggcccgcaccaagcagacggcgaggaagtccaccggcggcaaggcgccgaggaagcagctggccaccaaggccgcccgcaagtccgccccggccaccggcggcgtcaagaagccccaccgcttccgccccggcaccgtcgcgctccgcgagatccgcaagtaccagaagagcaccgagctgctcatccgcaagctccccttccagcgcctggtgagggagatcgcccaggacttcaagaccgacctccgcttccagtcctccgccgtctccgccctgcaggaggccgccgaggcctacctcgtggggctcttcgaggacaccaacctctgcgccatccacgccaagcgcgtcaccatcatgcccaaggacatccagctcgcccgccgcatccgtggagagagggcctaggctgcagtctgcaatccatgcgtcgtctgttagatccctgttagcctgagttcgtcggtggaagtgtgtgtgtgctagcagtagggtttcagactgtgcctgtgttgttcttgtcatggtggatgtggtatgcctaatgtgatggtaccgtcttgttgccattagcaatggaaatgaaaaatgtttcacaaaaaaaaaaaaaaaa

SEQ ID NO: 7122 - protein, 136 aa, Triticum aestivum; identical to SEQ ID NO: 588
  misc_feature: Ceres CLONE ID no. 1317197
  misc_feature: Ceres CDNA ID no. 29191530
  misc_feature (58)..(134): Pfam Name: Histone PFAM Desc: Core histone H2A/H2B/H3/H4
  misc_feature: Homolog of GI Number: 62286642 NR Desc: Histone H3
  misc_feature: Homolog of GI Number: 166384 NR Desc: histone H3
  misc_feature: Homolog of GI Number: 70753 NR Desc: histone H3
  misc_feature: Homolog of GI Number: 68441481 NR Desc:  similar to CG31613
  misc_feature: Homolog of GI Number: 57098927 NR Desc:  similar to histone protein Hist2h3c1
  misc_feature: Homolog of GI Number: 1362108 NR Desc: histone H3 homolog
  misc_feature: Homolog of GI Number: 61842355 NR Desc:  similar to HIST1H3I protein
  misc_feature: Homolog of GI Number: 61839509 NR Desc:  similar to histone 1
  misc_feature: Homolog of GI Number: 55775689 NR Desc: histone 3
  misc_feature: Homolog of GI Number: 34858260 NR Desc: similar to histone protein Hist2h3c1

SEQ ID NO: 7123 - DNA, 1123 bp, Triticum aestivum
  misc_feature: Ceres CLONE ID no. 1317277
  misc_feature: Ceres CDNA ID no. 25892809
  CDS (103)..(891): REFERENCED BY SEQ ID NO: 7124
atccattggagatgctcccggctcagctcccccctctcctctagatctcccgacgcaacaaacgcaaggccgccgccgccgccgccgctgccgccccgagagatggcaaaggcattttacgcggtggggttctggatccgggagaccggtcaggccctcgaccgcctcggctgccgcctccaggggaactacttcttccacgagcagatttcaaggcatcgcacacttatgaacatctttgacaaagcccctcatgttcacaaagaggcatttgtcgctccaagtgcatcccttattggcgatgttcaagttggacaagggtcttcaatttggtacggctgcgtcttaagaggtgatgcaaataacgttcaagttggatctgggacgaatatacaggacaattctgttgtgcatgtggcaaaatctaatctaactgggaaagtctttccaaccatcattggagacaatgtcacagtaggacatagtgctgtattacaaggatgcactgttgaggatgaagcttttgttggtatgggagcaaccctgttagatggtgttattgtggaaaagcatgggatggttgctgctggagcccttgtaagacagaacacaaggatcccttgtggagaggtatggggtggaaaccctgcgaaatttctgaggaagctcacagatgaggagattgcttttattgcggaatcggctgccaactactccaacttagccaaggcacacgctgttgagaatgccaagcccttggaaaagattgattttgagaaagtgttgcgcaagaaagtagctcaccaggacgaggaagacgattccatgcttagtggcactcgagtggtccctccagagctagcgccacccagctctacccctgctcaataagctttggttatctgtttttttttttcctttctttggtgccttcaccatcttcagtttgaattattatattatatctctatctgcgcagtgagtttggcgatttacgtcaatttcaataattttgggtcgagcgatgttctaaagctgaccatgtagttcagtttttgtattccatatgttttaagacctatggaacaaacagaaccatttcacactaaaaaaaaaaaaaaaa

SEQ ID NO: 7124 - protein, 262 aa, Triticum aestivum
  misc_feature: Ceres CLONE ID no. 1317277
  misc_feature: Ceres CDNA ID no. 25892809
  misc_feature (116)..(133): Pfam Name: Hexapep PFAM Desc: Bacterial transferase hexapeptide
  misc_feature: Homolog of GI Number: 56785028 NR Desc: putative gamma
  misc_feature: Homolog of GI Number: 82621186 NR Desc: transcription factor APFI
  misc_feature: Homolog of GI Number: 13507025 NR Desc: transcription factor APFI
  misc_feature: Homolog of GI Number: 19310771 NR Desc: putative ferripyochelin
  misc_feature: Homolog of GI Number: 50939569 NR Desc: putative transcription factor APFI
  misc_feature: Homolog of GI Number: 44889011 NR Desc: mitochondrial NADH:ubiquinone oxidoreductase 32 kDa subunit
  misc_feature: Homolog of GI Number: 70980467 NR Desc: putative transcription factor APF1
  misc_feature: Homolog of GI Number: 44888972 NR Desc: mitochondrial NADH:ubiquinone oxidoreductase 27 kDa subunit
  misc_feature: Homolog of GI Number: 66776989 NR Desc: transferase hexapeptide repeat
MAKAFYAVGFWIRETGQALDRLGCRLQGNYFFHEQISRHRTLMNIFDKAPHVHKEAFVAPSASLIGDVQVGQGSSIWYGCVLRGDANNVQVGSGTNIQDNSVVHVAKSNLTGKVFPTIIGDNVTVGHSAVLQGCTVEDEAFVGMGATLLDGVIVEKHGMVAAGALVRQNTRIPCGEVWGGNPAKFLRKLTDEEIAFIAESAANYSNLAKAHAVENAKPLEKIDFEKVLRKKVAHQDEEDDSMLSGTRVVPPELAPPSSTPAQ

SEQ ID NO: 7125 - DNA, 658 bp, Triticum aestivum
  misc_feature: Ceres CLONE ID no. 1317500
  misc_feature: Ceres CDNA ID no. 24766064
  CDS (68)..(478): REFERENCED BY SEQ ID NO: 7126
acaccccctcacacctccgatccacaccccacctccccgcaccctaggatcatcatcagcagcacccatggcgcccaaggccgcagagaagaagccggtggagaagaccccggcgggcaagaagcccaaggcggagaagaaggtgccggcgtccaaggagggcggaggcgagaagaaggggaagaagaaggccaagaagagcgtggagacgtacaagatctacatcttcaaggtgctgaagcaggtgcacccagacatcggcatctcctccaaggccatgtccatcatgaactccttcatcaacgacatcttcgagaagctcgccggcgagtccgccaagctcgcgcggtacaacaagaagcccaccatcacgtcgagggagatccagacctccgttcgcctcgtcctccccggcgagcttgccaagcacgccgtctctgagggcaccaaggccgtcaccaagttcacctcctcctaggcgtcttccgatggcagcgttttgtgtgtagttagcagtgcgatggtacaatctctgtaggaattgtgctgcttgttggtctgaagaaatagtaatgtcgccgtctgaattattgctcaacgtgtgcttgtattattcagtttcggttggaaggttcttctgttaaaaaaaaaaaaaaaa

SEQ ID NO: 7126 - protein, 136 aa, Triticum aestivum
  misc_feature: Ceres CLONE ID no. 1317500
  misc_feature: Ceres CDNA ID no. 24766064
  misc_feature: No seed is being produced by the plant
  misc_feature: The plant flowers significantly late compared to wild-type.
  misc_feature: Useful for biocontainment applications
  misc_feature: Useful for making plants with modulated flowering time
  misc_feature (43)..(115): Pfam Name: Histone PFAM Desc: Core histone H2A/H2B/H3/H4
  misc_feature: Homolog of GI Number: 531054 NR Desc: protein H2B153
  misc_feature: Homolog of GI Number: 34908130 NR Desc: putative histone H2B
  misc_feature: Homolog of GI Number: 22323 NR Desc: H2B histone
  misc_feature: Homolog of GI Number: 21801 NR Desc: histone H2B
  misc_feature: Homolog of GI Number: 531058 NR Desc: protein H2B
  misc_feature: Homolog of GI Number: 577825 NR Desc: H2B histone
  misc_feature: Homolog of GI Number: 577819 NR Desc: H2B histone
  misc_feature: Homolog of GI Number: 22325 NR Desc: H2B histone
  misc_feature: Homolog of GI Number: 1708107 NR Desc: Histone H2B
  misc_feature: Homolog of GI Number: 34895832 NR Desc: putative histone H2B
  misc_feature: Useful for delaying flowering time
  misc_feature: Useful for increasing chlorophyll and photosynthetic capacity
  misc_feature: Useful for making plants with altered leaf shape eg curled leaves
  misc_feature: Useful for making plants with altered leaf shape eg curled leaves
  misc_feature: Useful for making plants with increased biomass and foliage
  misc_feature: Useful for making plants with increased biomass and foliage
  misc_feature: Useful for sterility
  misc_feature: Useful for sterility
MAPKAAEKKPVEKTPAGKKPKAEKKVPASKEGGGEKKGKKKAKKSVETYKIYIFKVLKQVHPDIGISSKAMSIMNSFINDIFEKLAGESAKLARYNKKPTITSREIQTSVRLVLPGELAKHAVSEGTKAVTKFTSS

SEQ ID NO: 7127 - DNA, 1028 bp, Triticum aestivum
  misc_feature: Ceres CLONE ID no. 1317673
  misc_feature: Ceres CDNA ID no. 25445817
  CDS (62)..(799): REFERENCED BY SEQ ID NO: 7128
atacacttaagcaacagatatacaggacaggagtatcagggaggaagacgaggaaacgttgatggccggcagtgaagagctgaagctgctggggtggtgggcgcccggggtgagccccttcgtgctccgcgcccagatggcgctcgccgtaaaggggctgagctacgagtacctcccggaggaccgcgggtgcaagagcgacctcctcatcgcgtccaaccccgtgtacaagaaggtgcccgtcctcatccacgacggcaggcccgtctgcgagtcgctgctcatcctggagtacctcgacgacgcacccggccttgccggcaacggcacgtcgatcctccccacagacccctacagccgcgccgtcgctcgcttctgggccgcctatgtgaacggcaagttgtttccttcgtgcatcggcatcctcaagacagcgaagcaggaggagagagccggtaaggtggaggagaccctgtccgggctccgacacttggaaggtgtccttgcagagtgctccaaaggggaggcagaggcggaggcgccgttcttcggtggtgacaccatcgggttcctcgacatcgcgctcgggtgctatcttccctggtttgaggcagtaggccgcctggccggcttggggccgctcatcgacccggcgaggacgccgaaactagccgcatgggcggagaggttcagggtcgcggagccggtcaaggcgctgctgcctggggtggacgagctggaggagtacatcactacggtgctttatccaaagtggaacatcgccgtcaccggtaactagttaatgatcgtgtctttccattaccggcggaggatcgtgtcgatccaataattcctctgccttcttagttgttttcaccccaagagttgaactgttgttactagtaggtccttagtgtctcctcctcgtcgatggcacgcaggcgtgcactctcttcgatctgagttgttgacatgttgtttcgtgaataaattgaagcttcatccatcttgcaaaaaaaaaaaaaaaa

SEQ ID NO: 7128 - protein, 245 aa, Triticum aestivum
  misc_feature: Ceres CLONE ID no. 1317673
  misc_feature: Ceres CDNA ID no. 25445817
  misc_feature (7)..(81): Pfam Name: GST_N PFAM Desc: Glutathione S
  misc_feature (93)..(214): Pfam Name: GST_C PFAM Desc: Glutathione S
  misc_feature: Homolog of GI Number: 20067423 NR Desc: glutathione transferase
  misc_feature: Homolog of GI Number: 37536356 NR Desc: putative glutathione S
  misc_feature: Homolog of GI Number: 57015397 NR Desc: Probable glutathione S
  misc_feature: Homolog of GI Number: 11385517 NR Desc: glutathione S
  misc_feature: Homolog of GI Number: 20143566 NR Desc: putative glutathione S
  misc_feature: Homolog of GI Number: 11385503 NR Desc: glutathione S
  misc_feature: Homolog of GI Number: 20067421 NR Desc: glutathione transferase
  misc_feature: Homolog of GI Number: 20143553 NR Desc: putative glutathione S
  misc_feature: Homolog of GI Number: 22022398 NR Desc: glutathione
  misc_feature: Homolog of GI Number: 11385511 NR Desc: glutathione S
  misc_feature: Useful for making plants with altered leaf shape eg curled leaves
MAGSEELKLLGWWAPGVSPFVLRAQMALAVKGLSYEYLPEDRGCKSDLLIASNPVYKKVPVLIHDGRPVCESLLILEYLDDAPGLAGNGTSILPTDPYSRAVARFWAAYVNGKLFPSCIGILKTAKQEERAGKVEETLSGLRHLEGVLAECSKGEAEAEAPFFGGDTIGFLDIALGCYLPWFEAVGRLAGLGPLIDPARTPKLAAWAERFRVAEPVKALLPGVDELEEYITTVLYPKWNIAVTGN

SEQ ID NO: 7129 - DNA, 673 bp, Triticum aestivum
  misc_feature: Ceres CLONE ID no. 1317696
  misc_feature: Ceres CDNA ID no. 25445578
  CDS (89)..(433): REFERENCED BY SEQ ID NO: 7130
atctcaccagaccagctccgatacaatctcgtaatacagtgctcgactaagattacatagcgtggagaagagggttcgaccggcgtcaatggcgatgttcaagggttcgctcctcgtgttcgctctcctgcttgctgctgctttcctcgtcgcctcggccgaagaaactcaggccaaggaggagccgacggccgacgtgcaggactactaccgtggcggcggcggctacccgggccgtggttatcctgggcgcggaggagggtactacccgtaccctggccgcggaagaggcgggtacccaggccgcggcggcggcgggtactgccggtggggctgctgcggccgcgggtactacggcggctgccggtgctgttcgcgcgccgacgaggtcccggagcccatgtaccgcgctgaggcggaggtgcaccactgagccgagcatgcatccaccggatgcagcgtgtacgcctgcacgtgcctagttaatctgcttatactgtgtgttcttgaggaacgcacctagccctgtgttcttgcaagctacgtatgtgttgatgtgtgtgcttgttcgtaagacgtactggtcagtgtacggatgtattgttactgcacccgtgttgtgtttatggaataaaaagacaggcgaatttgctcttcaaaaaaaaaaaaaaaa

SEQ ID NO: 7130 - protein, 114 aa, Triticum aestivum
  misc_feature: Ceres CLONE ID no. 1317696
  misc_feature: Ceres CDNA ID no. 25445578
  misc_feature (1)..(92): Pfam Name: GRP PFAM Desc: Glycine rich protein family
  misc_feature: Homolog of GI Number: 50909901 NR Desc: putative glycine
  misc_feature: Homolog of GI Number: 27461096 NR Desc: glycine
  misc_feature: Homolog of GI Number: 728596 NR Desc: glycine rich protein
  misc_feature: Homolog of GI Number: 295808 NR Desc: glycine
  misc_feature: Homolog of GI Number: 6782438 NR Desc: glycine
  misc_feature: Homolog of GI Number: 42565497 NR Desc: glycine
  misc_feature: Homolog of GI Number: 7024449 NR Desc: glycine
  misc_feature: Homolog of GI Number: 20334894 NR Desc: At2g05540/T20G20.11
  misc_feature: Homolog of GI Number: 81625 NR Desc: glycine
  misc_feature: Homolog of GI Number: 259447 NR Desc: glycine
MAMFKGSLLVFALLLAAAFLVASAEETQAKEEPTADVQDYYRGGGGYPGRGYPGRGGGYYPYPGRGRGGYPGRGGGGYCRWGCCGRGYYGGCRCCSRADEVPEPMYRAEAEVHH

SEQ ID NO: 7131 - DNA, 734 bp, Triticum aestivum
  misc_feature: Ceres CLONE ID no. 1317727
  misc_feature: Ceres CDNA ID no. 25445828
  CDS (3)..(572): REFERENCED BY SEQ ID NO: 7132
atcccctctgtctctcaccccgctatctctctctcttatctctctttactcccgatctgatccacgtcttgccggtgcccttgccccgacctcgccggccaccacatcatcggatccacccatggcgccctgttcccgagctcctctcctccgcgcccgcgccctggctggctggcttgctgctcggccaaagctcgctggaggaagccggcgaccaggccagccgcacctccccggctgctgctcggccggagctcgctggaggaagccggcgaccaggccagccacacctccccgtccccggtcccatccccgtcgcctcggagactaggccagccgcacctcgccggccccgtctcctcgcgcgcctcgccggccccgaccccctcgccgccgcccgtccctgccccgaccccgaccgcatggccccagctggcccctaccccgacggcatcgcccccgccggcccagaccccaccccccgccgcctcacgcgccgtgctgcaccggccaccgctagccgtgccggccatggggtcaatccggttctagtagtgcttcatagtttttaaggcaaatccttcatagatgattgtcatatttcctatctgtatgatctagtatgtggtgacttgagtatgcgattctgttgttccattcgtgctggtaacggcaaggattttgtgctccgaatggcaaagaattttgttttttattcaaaaaaaaaaaaaaaa

SEQ ID NO: 7132 - protein, 69 aa, Triticum aestivum
  misc_feature: Ceres CLONE ID no. 1317727
  misc_feature: Ceres CDNA ID no. 25445828
  misc_feature: Homolog of GI Number: 12018147 NR Desc: vegetative cell wall protein gp1
  misc_feature: Homolog of GI Number: 7441829 NR Desc: proline
  misc_feature: Homolog of GI Number: 7441828 NR Desc: extensin
  misc_feature: Homolog of GI Number: 19919 NR Desc: Pistil extensin like protein
  misc_feature: Homolog of GI Number: 539029 NR Desc: cysteine
  misc_feature: Homolog of GI Number: 55740439 NR Desc: hydroxyproline
  misc_feature: Homolog of GI Number: 39933290 NR Desc: possible OmpA family member
  misc_feature: Homolog of GI Number: 535586 NR Desc: proline rich protein
MAPCSRAPLLRARALAGWLAARPKLAGGSRRPGQPHLPGCCSAGARWRKPATRPATPPRPRSHPRRLGD

SEQ ID NO: 7133 - DNA, 1080 bp, Triticum aestivum
  misc_feature: Ceres CLONE ID no. 1317759
  misc_feature: Ceres CDNA ID no. 29191531
  CDS (93)..(890): REFERENCED BY SEQ ID NO: 7134
atcccggcggcggcgcgttgcacaggagaaggagcaggcggcggcggtgcccgaagaggagaagcacggcgacctagcccgagctcgcaaccatggctaggggtttgaagaagcatctgaagaggctcaatgccccgtctcattggatgcttgacaagcttggtggagcttttgcccccaagccatcatccggtcctcacaaggccagggagtgcctgcctctgatcctcatcctgaggaacagactgaaatatgctctcacctaccgtgaagtgcaatctatccttatgcagcgtcatattatggttgatggaaaggtccgcactgacaagacctaccctgctggtttcatggacatcatttccattcccaagactggtgagaactacaggcttctgtatgacaccaagggtcgcttccgccttcactctgtcagggacgaggatgctaagttcaagctctgcaaggtcaggtctgtccagtttggccagaagggcatcccatacctcaacacctatgatggccgcaccatccgctacccagacccactcatcaaggccaatgacaccatcaagcttgacctggagaccaacaagattgttgacttcatcaagtttgacgtcggcaacgtggtcatggtgactggtgggcgcaacactgggcgtgttggtgtgatcaagaacagggagaagcataagggaaccttcgagaccatccacgttgaggatgcccagggccaccagttcgccacccgtctgggcaacgtgttcaccatcggcaagggcaccaagccgtgggtgagcctccccaagggcaagggtatcaagctcaccatcattgaggagcagaggaagcgggatgccgctgcccaggctgctgccaaggcctgattctgaggtgttgagtcgttttgctatagccagttatctgcaaggatatagacctatgttcctggaaccatcgtttttaagttttgcctgatgtttgttgatttgcgaactcgtggttgctgctagatgtaatgtggatgtttaccttattaagcgctatttcgagacctcaagaaaaaaaaaaaaaaaa

SEQ ID NO: 7134 - protein, 265 aa, Triticum aestivum
  misc_feature: Ceres CLONE ID no. 1317759
  misc_feature: Ceres CDNA ID no. 29191531
  misc_feature (175)..(211): Pfam Name: KOW PFAM Desc: KOW motif
  misc_feature (3)..(40): Pfam Name: RS4NT PFAM Desc: RS4NT
  misc_feature (42)..(90): Pfam Name: S4 PFAM Desc: S4 domain
  misc_feature (94)..(170): Pfam Name: Ribosomal_S4e PFAM Desc: Ribosomal family S4e
  misc_feature: Homolog of GI Number: 53791616 NR Desc: putative 40S ribosomal protein S4
  misc_feature: Homolog of GI Number: 50252099 NR Desc: putative ribosomal protein S4
  misc_feature: Homolog of GI Number: 44894458 NR Desc: ribosomal protein S4
  misc_feature: Homolog of GI Number: 2331301 NR Desc: ribosomal protein S4 type I
  misc_feature: Homolog of GI Number: 48596901 NR Desc: ribosomal protein
  misc_feature: Homolog of GI Number: 2345154 NR Desc: ribsomal protein S4
  misc_feature: Homolog of GI Number: 73759787 NR Desc: ribosomal protein S4
  misc_feature: Homolog of GI Number: 22138108 NR Desc: 40S ribosomal S4 protein
  misc_feature: Homolog of GI Number: 457803 NR Desc: ribosomal protein S4
  misc_feature: Homolog of GI Number: 82400118 NR Desc: 40S ribosomal protein S4
  misc_feature: Useful for increasing chlorophyll and photosynthetic capacity
MARGLKKHLKRLNAPSHWMLDKLGGAFAPKPSSGPHKARECLPLILILRNRLKYALTYREVQSILMQRHIMVDGKVRTDKTYPAGFMDIISIPKTGENYRLLYDTKGRFRLHSVRDEDAKFKLCKVRSVQFGQKGIPYLNTYDGRTIRYPDPLIKANDTIKLDLETNKIVDFIKFDVGNVVMVTGGRNTGRVGVIKNREKHKGTFETIHVEDAQGHQFATRLGNVFTIGKGTKPWVSLPKGKGIKLTIIEEQRKRDAAAQAAAKA

SEQ ID NO: 7135 - DNA, 734 bp, Triticum aestivum
  misc_feature: Ceres CLONE ID no. 1318065
  misc_feature: Ceres CDNA ID no. 25447051
  CDS (207)..(419): REFERENCED BY SEQ ID NO: 7136
attcttttagtcgtgggttcgtggcgtttctaattgcaggcggtagcggcgggaggtctcggcggcgagcggccgcagcgcggaggagcgtggtgtccttcggcggcgattccaccgatccccttcgcctccggtggctgattaggtgtcggcttgctgatgggaacacggatctgtccacaaagaggctgtagatagaagaggtcatgaggctgaacatcctgtccaatcagagatgggtggtcatggattcaaagaaggcggagtgtagtcatgtagtgtcgctggtgtttctcggtgtcaggttatgtttggccattggcatgcatattgatgcgccatgcatctcctttcatcatgatggtcagcgaccgcgtcttcgccgccggagctgttcagtatcacctactctcgggtgaagctcggcgagagaggccctatagtttacaaatattcgtggagctctcacaatggcagacagagagaggagctactccagcattgcatggctgacagcaagtgactaatgctctaatcttgttgtgtaaattaatgcaactggcgttaacttgtagagcatcatgttgttagaatagttctaaggtcaccgtgtgatttcgtttacatttttgcttgcttgccggtgtaccaaacaagatggatgtagcttctgccgaggtatggacgaggggcgggtccgttcctctgttcctgctcgaaaaaaaaaaaaaaaa

SEQ ID NO: 7136 - protein, 70 aa, Triticum aestivum
  misc_feature: Ceres CLONE ID no. 1318065
  misc_feature: Ceres CDNA ID no. 25447051
MRLNILSNQRWVVMDSKKAECSHVVSLVFLGVRLCLAIGMHIDAPCISFHHDGQRPRLRRRSCSVSPTLG

SEQ ID NO: 7137 - DNA, 1003 bp, Triticum aestivum
  misc_feature: Ceres CLONE ID no. 1318142
  misc_feature: Ceres CDNA ID no. 36705279
  CDS (225)..(329): REFERENCED BY SEQ ID NO: 7138
gttcttgcctgatcctctcgatcgagccacccaaccagcctccttccttgttatccccatcgggccaactacctctcccacctcgggatccatccccatccaatcaatgtgagtgtcctagatccaaaattcctctcgatctctccccaccaaccaccggccccctctgcttcacttcgattctccaacaaccgagccccttgcgcaccaccttgctcgagcagatgagccctgccgctgctctccttccctccatctctccctgctgctccctcctctcacatctctctctttctctctgtgtctcacaggttgccatggatgcctgaacgcctccaggaccccgtctgccccgccgcgtcgcggatccggccaccaggaccctccagcgccgctgcctctgccatggacgccaggtcccaaggtccccgcgcccgtcctcatggcaccctgcatcctcttcgtcgcttgggagctcctcaccttcgcccgcgttggcgccatgtccgccatgccgctgcctccgcttcgatccggcaggaaatgggacccgaagacctttcgcgcctggatcctccccgagctcaccagtgccttcgacctccccgtcgcgccgtttttcgccggagtcctaagaaacgctaggccgccgctgcgtcctctgcgtcgcggccgcgccaaggctcctgtttcttcggcgttgaccgcgccagctcccctgcatcgctcattccccgcttcaggaacgagacgatgagcgctgcagcaaccgcgttgatcgcatcggtcagatccggtcggcccgtgatgtttccccgtcgggccagtgcgcctcctctctggcccagctttagtttcggcctgctaggcccgatgtgagcagacccctccagatccccttttcctgttgggccagcaagtttcagcccagtgaatgttttttgttgttctgcgaatttgctaattaccagggatttacagatttacaaaaaaaaaaaaaaaa

SEQ ID NO: 7138 - protein, 107 aa, Triticum aestivum
  misc_feature: Ceres CLONE ID no. 1318142
  misc_feature: Ceres CDNA ID no. 36705279
MPERLQDPVCPAASRIRPPGPSSAAASAMDARSQGPRARPHGTLHPLRRLGAPHLRPRWRHVRHAAASASIRQEMGPEDLSRLDPPRAHQCLRPPRRAVFRRSPKKR

SEQ ID NO: 7139 - DNA, 1094 bp, Triticum aestivum
  misc_feature: Ceres CLONE ID no. 1318363
  misc_feature: Ceres CDNA ID no. 25445650
  CDS (61)..(864): REFERENCED BY SEQ ID NO: 7140
accccacactcttgagctaagctaagcaagccagcacctcgatctagcaccactccagcaatggcgtcgtccaggagagcgctcatcctgctggcggtggtgctggcggcggtgccggcggcgctgagccagaagacgacggccccggcgcccgaggcgcccgagacgccagacgcgccggcggcggggacgacgcccaaggcggccgccgcgccgaacgtgacggcggtgctggagaaggccgggcagtacaccaagttcatccggctgatggcgtcgacgcagcaggacacgcagctgaacgcgcaggccaacgactccgacacgggcttcacggtgttcgcccccaccgacaacgccttcaacagcctcaagccgggcaccctcaactcgctctcgcagcaggaccaggtgacgctcgtgcaggcccacatcgtccccaccttctactccatggagtccttcgagaccgccagcaaccccgtccgcacccaggcctccggcaccgacgggccctgcaccgtcaacgtcaccgccaccagcaacagcgccgtcaacgtctccaccgggatcgtccacaccaccgtcggcaccgcgctgcgcgccaccaggccgctcgccgtctactccgtcgacaaggtgctgctgcccatggacctcttcggccccaagccgccggcctccgcgcccccggcccccggcaagaagccctcgtcggccaagggggcagccaaggcgccctcgggcgacgacgaggacgaggaggaggccccgcccgccggagccgccgcagccgtcggcgccggctggaggagcctcgtcgccgtggtggccgccgccgccgccgccgcgtgcctcttgtaagaagaagaaagtgcgagagaggatcatgattcgtgagaccgacagatcgatggagactagctgcgtgcatgttgtgcatggatttggataggttactagttcttgcattagtggctgcttcttctctctctttttttgttaaatgtccatttttgttctctttcttttcctcccctgttgatgggctaagatgcgataagatgttccactgtcgaaaaaaaaaaaaaaaa

SEQ ID NO: 7140 - protein, 267 aa, Triticum aestivum
  misc_feature: Ceres CLONE ID no. 1318363
  misc_feature: Ceres CDNA ID no. 25445650
  misc_feature (63)..(197): Pfam Name: Fasciclin PFAM Desc: Fasciclin domain
  misc_feature: Homolog of GI Number: 56202243 NR Desc: arabinogalactan protein
  misc_feature: Homolog of GI Number: 34910950 NR Desc: putative arabinogalactan
  misc_feature: Homolog of GI Number: 2129473 NR Desc: arabinogalactan
  misc_feature: Homolog of GI Number: 55770445 NR Desc: putative arabinogalactan protein
  misc_feature: Homolog of GI Number: 21553523 NR Desc: arabinogalactan protein
  misc_feature: Homolog of GI Number: 5919185 NR Desc: arabinogalactan protein Pop14A9
  misc_feature: Homolog of GI Number: 47717923 NR Desc: fasciclin
  misc_feature: Homolog of GI Number: 6523547 NR Desc: hydroxyproline
  misc_feature: Homolog of GI Number: 21992 NR Desc: extensin
  misc_feature: Useful for delaying flowering time
  misc_feature: Useful for making plants with increased biomass and foliage
MASSRRALILLAVVLAAVPAALSQKTTAPAPEAPETPDAPAAGTTPKAAAAPNVTAVLEKAGQYTKFIRLMASTQQDTQLNAQANDSDTGFTVFAPTDNAFNSLKPGTLNSLSQQDQVTLVQAHIVPTFYSMESFETASNPVRTQASGTDGPCTVNVTATSNSAVNVSTGIVHTTVGTALRATRPLAVYSVDKVLLPMDLFGPKPPASAPPAPGKKPSSAKGAAKAPSGDDEDEEEAPPAGAAAAVGAGWRSLVAVVAAAAAAACLL

SEQ ID NO: 7141 - DNA, 924 bp, Triticum aestivum
  misc_feature: Ceres CLONE ID no. 1318367
  misc_feature: Ceres CDNA ID no. 25891011
  CDS (67)..(759): REFERENCED BY SEQ ID NO: 7142
aaacctagggtttatcttccgccgccgccgccgcaaaatcatctccctccccctcgcttctccaacatggctcttcagatcagcaagaagcggaagttcgtcgccgacggcgtgttcctggccgagctgaacgagatgctgacccgcgagctcggggaggacggcttcgccggcgtcgagatccgggtcacccccatgcgcaccgagatcatcatccgcgccacccgcacccagaacgtcctcggcgagaagggcaggaggataagggagctgacgtcggtggtgcagaagcgcttcaactttccggacggcggcgtggagctctacgccgagaaggtcctgaaccgcggcctctgcgccgtcgctcaggctgagtccctccgctacaagctgcttggtggcctcgccgtccgaagagcatgctatggtgtactccgatttgtcatggagagtggtgcgaagggctgtgaggttattgtgagtgggaagcttagggcacagcgtgccaagtccatgaagttcaaggatggctatatgatctcttcaggccatcctgtcaaccaatatattgatggagctgtgaggcatgttcttctgagacagggtgtgctgggtatcaaggttaagatcatgcttgactgggatccgaaggggaaacaaggaccagctacacctttacctgaccttgttaccatccaccctcctaaggatgaggatgagttcctgagacctcttgcagcagaaattgtagttgcttaaaagtgaaaaaattgcatttggctaggggtatataagagttcaggttgactgatgctatggtttcagattatgtaggtatactttttatttatgatggatgtgtactggtacaaaagggcttcacctttttaagttcaatcatcagtaacaaaaaaaaaaaaaaaa

SEQ ID NO: 7142 - protein, 230 aa, Triticum aestivum
  misc_feature: Ceres CLONE ID no. 1318367
  misc_feature: Ceres CDNA ID no. 25891011
  misc_feature: There is no branching.
  misc_feature: Useful for making plants with modulated biomass
  misc_feature (104)..(188): Pfam Name: Ribosomal_S3_C PFAM Desc: Ribosomal protein S3
  misc_feature (45)..(102): Pfam Name: KH_2 PFAM Desc: KH domain
  misc_feature: Homolog of GI Number: 50939157 NR Desc: putative 40S ribosomal protein
  misc_feature: Homolog of GI Number: 38093738 NR Desc: putative ribosomal protein
  misc_feature: Homolog of GI Number: 22204124 NR Desc: putative 40S ribosomal protein S3
  misc_feature: Homolog of GI Number: 20466075 NR Desc: AT5g35530/MOK9_14
  misc_feature: Homolog of GI Number: 20258907 NR Desc: putative 40S ribosomal protein
  misc_feature: Homolog of GI Number: 16323404 NR Desc: putative ribosomal protein S3a homolog
  misc_feature: Homolog of GI Number: 83283961 NR Desc: 40S ribosomal protein
  misc_feature: Homolog of GI Number: 57102362 NR Desc:  similar to ribosomal protein S3
  misc_feature: Homolog of GI Number: 27769401 NR Desc: Ribosomal protein S1a protein
  misc_feature: Useful for delaying flowering time
  misc_feature: Useful for making lethal plants for genetic confinement systems
  misc_feature: Useful for making ornamental plants with modified flowers
  misc_feature: Useful for making ornamental plants with modified leaves
  misc_feature: Useful for making plants with altered leaf shape eg curled leaves
  misc_feature: Useful for making plants with altered leaf shape eg curled leaves
  misc_feature: Useful for making plants with increased biomass
  misc_feature: Useful for making plants with increased biomass and foliage
  misc_feature: Useful for making plants with modified flowers
  misc_feature: Useful for making shorter plants
MALQISKKRKFVADGVFLAELNEMLTRELGEDGFAGVEIRVTPMRTEIIIRATRTQNVLGEKGRRIRELTSVVQKRFNFPDGGVELYAEKVLNRGLCAVAQAESLRYKLLGGLAVRRACYGVLRFVMESGAKGCEVIVSGKLRAQRAKSMKFKDGYMISSGHPVNQYIDGAVRHVLLRQGVLGIKVKIMLDWDPKGKQGPATPLPDLVTIHPPKDEDEFLRPLAAEIVVA

SEQ ID NO: 7143 - DNA, 1115 bp, Triticum aestivum
  misc_feature: Ceres CLONE ID no. 1318489
  misc_feature: Ceres CDNA ID no. 25445683
  CDS (100)..(894): REFERENCED BY SEQ ID NO: 7144
attccattcgccattcccgtcctcctctcctcctgtcgcctccagagcaacagcagctccagctcgagcaagaaacaagtactagtttgatctgtgaacatgttggccatcttccagaagcaggtggcgcacgcgccgcaggagctcaacagcccgcgcggcagcaccgccaagcccaagaaccccgacgagatcctccgcgacttccacgccgcccacccctccgacgccttctccacctccttcggcggcggcgccgccctcgcctgcgtcgccgcgcagccccgcaacctcgccgccgccggctaccagaggatgttctgcgggctggacgacatctactgcgtcttcatgggcacgctggacaacctgagcgcgctgatgcggcagtacggcctcaccggccgctccaccaacgaggcgctgctggtgatcgaggcctaccgcaccctgcgcgaccggggcccctacccggcggaccaggtggtgaaggacctgttcggctccttcgccttcgtcgtcttcgacaaccgcggcaggtcggggtcgggggcggcggtgttcgcggcgcagagcacggacggcggggtgccgctgcactggggcgtggcggcggacgggtcggtggtgatctgcgacgaccgcggcgtggccaaggccgggtgcgggcggtcgtacgcgccgttcccgcccgggtgcatgttccacagcgagggcgggctcaagagcttcgagcaccccatgaaccggctcaaggcgttcccgcgcgtggacagcgagggcgtcatgtgcggcgccaacttcaaggtcgacgcattcaccaagatcaactccatgccccgcgtcggcagcgccaccaactgggccgccacctgggacgacgccgccatctagctgggctggtgtgcatcacctcgccggcgccgctcgcctagctcgtcggacttctgaatttgggcttaccgcattttacgtactttttttctttggcaatgtacattctgatctgatctgatctgagccgtgtgtgggcgtgggcgcgctgacacgtacggttgtttgcttgtacgatggaggaataagactttgcttccagtccaaaaaaaaaaaaaaaa

SEQ ID NO: 7144 - protein, 264 aa, Triticum aestivum
  misc_feature: Ceres CLONE ID no. 1318489
  misc_feature: Ceres CDNA ID no. 25445683
  misc_feature: Homolog of GI Number: 20340249 NR Desc: aluminum
  misc_feature: Homolog of GI Number: 21436085 NR Desc: putative aluminum
  misc_feature: Homolog of GI Number: 53767310 NR Desc: COG1309: Transcriptional regulator
  misc_feature: Homolog of GI Number: 2078483 NR Desc: antifreeze glycopeptide AFGP polyprotein precursor
  misc_feature: Homolog of GI Number: 66778899 NR Desc: UvrD/REP helicase
  misc_feature: Homolog of GI Number: 71367849 NR Desc: similar to Methylase involved in ubiquinone/menaquinone biosynthesis
  misc_feature: Homolog of GI Number: 56283929 NR Desc: CG3047
  misc_feature: Useful for making plants with altered leaf shape eg curled leaves
  misc_feature: Useful for making plants with increased biomass and foliage
  misc_feature: Useful for making stronger plants
  misc_feature: Useful for modifying fruit shape and seed yield
MLAIFQKQVAHAPQELNSPRGSTAKPKNPDEILRDFHAAHPSDAFSTSFGGGAALACVAAQPRNLAAAGYQRMFCGLDDIYCVFMGTLDNLSALMRQYGLTGRSTNEALLVIEAYRTLRDRGPYPADQVVKDLFGSFAFVVFDNRGRSGSGAAVFAAQSTDGGVPLHWGVAADGSVVICDDRGVAKAGCGRSYAPFPPGCMFHSEGGLKSFEHPMNRLKAFPRVDSEGVMCGANFKVDAFTKINSMPRVGSATNWAATWDDAAI

SEQ ID NO: 7145 - DNA, 793 bp, Triticum aestivum
  misc_feature: Ceres CLONE ID no. 1318582
  misc_feature: Ceres CDNA ID no. 25892810
  CDS (72)..(572): REFERENCED BY SEQ ID NO: 7146
ctactgcccttcccaagcctctcccaaaccctcccgccgccgccgccgccgcccgccaccgaacagcagccatgccgcccaagctcgacccgtcgcaggtggtggaggtctacgtccgggtgaccggaggcgaggtcggcgcggcgtcttcgctcgcccccaagatcgggcccctcggtctctcccccaagaagatcggtgaggacatcgccaaggagacggccaaggactggaagggcctccgcgtcaccgtcaagctcaccgtccagaaccgtcaggccaaggtctccgtcgtcccttccgccgcggcgctcgtcatcaagtccctcaaggagcccgagagggacaggaagaaggtgaagaacatcaagcacaacggcaacatcagcctcgacgacgtcatcgagatcgccaagatcatgaagcccaggtccatggccaaggagatggccgggactgtcaaggagatcctcggcacctgcgtcagcgttggctgcaccgtcgacgggaaggaccccaaggacctgcagacggagatcgacgacggcgaggtcgagatcccctccgcttaaagacctgatgtcgaggtgattatcatctctgatgatatggaagtcataccatgttgcttatgtaccttccaaacgatgtgatccctcctctttttgtcatgttttagcagtaatcctgtgagacctcattgttactactgcatatttggtctttgcaatgtagtctgtgcacttgggttaacttaatctataccattcagtggtcaaaaaaaaaaaaaaaa

SEQ ID NO: 7146 - protein, 166 aa, Triticum aestivum
  misc_feature: Ceres CLONE ID no. 1318582
  misc_feature: Ceres CDNA ID no. 25892810
  misc_feature (12)..(71): Pfam Name: Ribosomal_L11_N PFAM Desc: Ribosomal protein L11
  misc_feature (76)..(144): Pfam Name: Ribosomal_L11 PFAM Desc: Ribosomal protein L11
  misc_feature: Homolog of GI Number: 50911805 NR Desc: putative 60S ribosomal protein L12
  misc_feature: Homolog of GI Number: 50900506 NR Desc: OSJNBa0093F12.16
  misc_feature: Homolog of GI Number: 40287508 NR Desc: 60S ribosomal protein L12
  misc_feature: Homolog of GI Number: 21593741 NR Desc: 60S ribosomal protein L12
  misc_feature: Homolog of GI Number: 21592414 NR Desc: 60S ribosomal protein L12
  misc_feature: Homolog of GI Number: 22655306 NR Desc: 60S ribosomal protein L12
  misc_feature: Homolog of GI Number: 2677830 NR Desc: ribosomal protein L12
  misc_feature: Homolog of GI Number: 3986695 NR Desc: ribosomal protein L12
  misc_feature: Homolog of GI Number: 1167828 NR Desc: 60S ribosomal protein L12
MPPKLDPSQVVEVYVRVTGGEVGAASSLAPKIGPLGLSPKKIGEDIAKETAKDWKGLRVTVKLTVQNRQAKVSVVPSAAALVIKSLKEPERDRKKVKNIKHNGNISLDDVIEIAKIMKPRSMAKEMAGTVKEILGTCVSVGCTVDGKDPKDLQTEIDDGEVEIPSA

SEQ ID NO: 7147 - DNA, 914 bp, Triticum aestivum
  misc_feature: Ceres CLONE ID no. 1319045
  misc_feature: Ceres CDNA ID no. 29191532
  CDS (142)..(591): REFERENCED BY SEQ ID NO: 7148
acaaatcgctcccggccccctccttcctcctctcccccacccgtacggtcaaacaagagaccccccgcccccctctctcctccacctccatctccagcgctcgccgcgagaagccgagaaggaagagcctgagaaggtagcatggcggaccaactcaccgacgaccagatcgccgagttcaaggaagccttcagcctattcgacaaggacggcgacggttgcatcacaaccaaggagctgggaacagttatgcgctcgctggggcagaacccaaccgaggcagagctccaggacatgatcaacgaggtcgatgccgatggcaacggcaccatcgacttcccggagttcctcaacctgatggctcgcaagatgaaggacaccgactcggaggaagagctcaaggaggccttccgggtgttcgacaaggaccagaacggtttcatctcggccgcggagctccgccacgtcatgaccaacctcggcgagaagctaacggatgacgaggtcgacgagatgatccgcgaggctgacgtcgacggggacggccagatcaactacgaggagttcgtcaaggtgatgatggccaagtgatccagccgatgttcatgtccggtggtattattatttttaccggggaggaggaaattgtgctatgcatattagtagtaaggaatgcggctctcgtttccttgtctttgcccccgaaccagaagaagcgtactagtagacgtagttgctcaagagcattcatggaatcctcctcccctgctgctaccctgtctctctcccgtgtgtcattgaaacatctttctttctgtgtgaatctgcaagacttggccccttcgcgatgaaccctgattgcagttgaatccgtttgatccaagttccgttctactacaaaaaaaaaaaaaaaa

SEQ ID NO: 7148 - protein, 149 aa, Triticum aestivum; identical to SEQ ID NO: 6232
  misc_feature: Ceres CLONE ID no. 1319045
  misc_feature: Ceres CDNA ID no. 29191532
  misc_feature (12)..(40): Pfam Name: efhand PFAM Desc: EF hand
  misc_feature: Homolog of GI Number: 60729721 NR Desc: calmodulin
  misc_feature: Homolog of GI Number: 62286560 NR Desc: Calmodulin
  misc_feature: Homolog of GI Number: 34304717 NR Desc: calmodulin 8
  misc_feature: Homolog of GI Number: 20190 NR Desc: calmodulin
  misc_feature: Homolog of GI Number: 1755001 NR Desc: calmodulin TaCaM2
  misc_feature: Homolog of GI Number: 4103961 NR Desc: calmodulin
  misc_feature: Homolog of GI Number: 50299519 NR Desc: calmodulin cam
  misc_feature: Homolog of GI Number: 8131969 NR Desc: calmodulin
  misc_feature: Homolog of GI Number: 30683369 NR Desc: calmodulin
  misc_feature: Homolog of GI Number: 50748592 NR Desc:  similar to calmodulin 1

SEQ ID NO: 7149 - DNA, 756 bp, Triticum aestivum
  misc_feature: Ceres CLONE ID no. 1319194
  misc_feature: Ceres CDNA ID no. 35383380
  CDS (139)..(624): REFERENCED BY SEQ ID NO: 7150
acacaagacaagcgtcgattgccccccatccgtggctgcgcgtccgccggtggccgggggttctaatccgagcgattcccaatcccaaccgccgctggaagaccccgcagctccacgacagcgcgggcagaggcagacatggcgcccgtgctacctgcaccggcggcggcggcggcggcggctcctcctcccttctgccgtgtctctctcccggcccgcagcgctttcccctcctccttccccgtcagaagccttggcaggtttgcagccaggagcagcggcggcggcggccgtcccgagcccaaagcaggtgatgaagagagcaaggccgtcctcgacgccttcttcctcgggaaggccttggcggaggctctgacggagagggccgagtcggtggtgggcgaggtgttcagcgtcgtcgggcagtggcaggcggagcagcagaagcaggtccaggaatttcaggaggaggtagttcagagagcccaaaaggctaaggaaagagctgctgaggaggtcgttgatgataagggaccaaagactctaaagggatcttcaacaaccattgtgacgcctgcacctacaccccctccttctcctactattcccacacaggcagaatagttataagcgacgatgaagagttagtgctgcatgtagactcacttttgtgctccaagaaagttacgaaattctcctttgagatatttattgatcaagttgtcctttctttgatagggaaaaaaaaaaaaaaaa

SEQ ID NO: 7150 - protein, 161 aa, Triticum aestivum
  misc_feature: Ceres CLONE ID no. 1319194
  misc_feature: Ceres CDNA ID no. 35383380
MAPVLPAPAAAAAAAPPPFCRVSLPARSAFPSSFPVRSLGRFAARSSGGGGRPEPKAGDEESKAVLDAFFLGKALAEALTERAESVVGEVFSVVGQWQAEQQKQVQEFQEEVVQRAQKAKERAAEEVVDDKGPKTLKGSSTTIVTPAPTPPPSPTIPTQAE

SEQ ID NO: 7151 - DNA, 483 bp, Triticum aestivum
  misc_feature: Ceres CLONE ID no. 1319280
  misc_feature: Ceres CDNA ID no. 24727413
  CDS (89)..(316): REFERENCED BY SEQ ID NO: 7152
atctctctcagcagtggcaaaccagtaaacaagaaagcttgggcgtaggtcgcagataggcagcgagaagaggagagcatcgtccaccatgtggccggagatgaaggcgtgggcctccatggccgacgacccgctgaagcgcgcctcgtcgtcggcgacgagcccgtccagccccatgcgccgcttcagccccaccacgatggccgtcggcggcctcctcgccgtcggcaccgtcggctacttcatgttcatgggcaaggacgacaggcagcgcgagcgcgacaggcacaacgagcgcctggctcaccgcacctgagaagctgttgccgtcgccggagtccttcgccgtagcttaccagtaaccaccgcatgacaaataagatcccccccttctgggtgttggtgtacaaatcccgtgtgctctgcttctctgtactcttttatcagtggaacatgcatagatttgtaaaaaaaaaaaaaaaa

SEQ ID NO: 7152 - protein, 75 aa, Triticum aestivum
  misc_feature: Ceres CLONE ID no. 1319280
  misc_feature: Ceres CDNA ID no. 24727413
MWPEMKAWASMADDPLKRASSSATSPSSPMRRFSPTTMAVGGLLAVGTVGYFMFMGKDDRQRERDRHNERLAHRT

SEQ ID NO: 7153 - DNA, 514 bp, Triticum aestivum
  misc_feature: Ceres CLONE ID no. 1319460
  misc_feature: Ceres CDNA ID no. 25401272
  CDS (88)..(336): REFERENCED BY SEQ ID NO: 7154
atccatccccatttcacagcatctattccagagcaacagcagtttccatcatatccgagtgttgatcgatcggtacttcggtagccaatggcggacatagcgatgctggtggccgatgaggcgttcgagaagaggctgcagcgaggggcgcccttcgccggcgccggcgatgaggcgtccaagggcagggagaacttccgggccgtgaccaaggtgtgtggctcatgggcgtcgggggtcaaggtgcgcgtcgcgctgctcgtcaaggccgacctggtggccgagcccaagaccccgatcgccatggcagccttcgacggcttcttctctgcttaattagtcatctttttctttctgaaatggagttaatttcgaagagttttacctgtatctccccccccccctcccctgagtcaattgcagtattgacttgtcacctgtacataaccatgatgtagtttactgatttacaaagaggaagcactagcttatatttgtactgcaaaaaaaaaaa

SEQ ID NO: 7154 - protein, 82 aa, Triticum aestivum
  misc_feature: Ceres CLONE ID no. 1319460
  misc_feature: Ceres CDNA ID no. 25401272
MADIAMLVADEAFEKRLQRGAPFAGAGDEASKGRENFRAVTKVCGSWASGVKVRVALLVKADLVAEPKTPIAMAAFDGFFSA

SEQ ID NO: 7155 - DNA, 1086 bp, Triticum aestivum
  misc_feature: Ceres CLONE ID no. 1319476
  misc_feature: Ceres CDNA ID no. 35383381
  CDS (135)..(830): REFERENCED BY SEQ ID NO: 7156
accacaacacggcacagccgctgagtccacagcagagcagagcagcattcttctcttccattctactcaacgcaaagtctctctatctcagatcagatcagatcagatcgagcgctaggctgtaagatccaaccatggccccctcacaggaagtcgcggcccccgccgccaaggagccatccgccaacggcaacgggaccaacggcacgcccgcagccgcccccaagaccaaggccccggcgctgaacgagcggatcctctcctccatcacccgccgctccgtcgccgcccacccgtggcacgacctggagatcggcccggacgcgcccacaatcttcaactgcgtgatcgagatccccaaggggagcaaggtcaagtacgagctggacaagaagacggggctcatcaaggtggaccgggtgctctactcctccgtcgtctacccgcacaactacggcttcatcccgcgcaccctctgcgacgactccgaccccatcgacgtcctcgtcatcatgcaggagcccgtcgtccccggatgcttcctccgcgccaaggccatcggactcatgcccatgatcgaccagggcgaggccgacgacaagatcatcgccgtctgcgccgacgaccccgagtaccgccacttcaacgacatcaaggagctccctccccaccgcctcgccgagatcaggcgtttcttcgaggactacaagaagaacgagaacaaggaggtggccgtcaacgacttcctgccgtcggaggacgcctacgaggccatccagcactccatggatctctatgccacctacatttgcgagggcctgagaagatagatagatccggtgatgccgccccgcttgctggaggatgttgatgaaaaattactcgtgtcgagagcgaacatacatacattcttgttttcagttacctacctgcatacatacacatactagtatatgatatgatcgcccaaagccttgcgttaaggcagtagcagccagataaacagggcattcttttcccaactaccttatgtaatacgatttcctggctgaatgaatatgagatgttggaaaaaaaaaaaaaaaa

SEQ ID NO: 7156 - protein, 231 aa, Triticum aestivum
  misc_feature: Ceres CLONE ID no. 1319476
  misc_feature: Ceres CDNA ID no. 35383381
  misc_feature: null
  misc_feature: Useful for making plants with modulated nitrogen use efficiency
  misc_feature (69)..(223): Pfam Name: Pyrophosphatase PFAM Desc: Inorganic pyrophosphatase
  misc_feature: Homolog of GI Number: 50931109 NR Desc: putative inorganic pyrophosphatase
  misc_feature: Homolog of GI Number: 6729513 NR Desc: inorganic pyrophosphatase
  misc_feature: Homolog of GI Number: 21593570 NR Desc: inorganic pyrophosphatase
  misc_feature: Homolog of GI Number: 48927683 NR Desc: putative inorganic pyrophosphatase
  misc_feature: Homolog of GI Number: 21537232 NR Desc: soluble inorganic pyrophosphatase
  misc_feature: Homolog of GI Number: 6752884 NR Desc: soluble inorganic pyrophosphatase
  misc_feature: Homolog of GI Number: 534916 NR Desc: soluble inorganic pyrophosphatase
  misc_feature: Homolog of GI Number: 5669924 NR Desc: soluble inorganic pyrophosphatase
  misc_feature: Homolog of GI Number: 20197320 NR Desc: putative inorganic pyrophosphatase
  misc_feature: Homolog of GI Number: 26451240 NR Desc: putative inorganic pyrophosphatase
  misc_feature: Useful for making plants with altered leaf shape eg curled leaves
MAPSQEVAAPAAKEPSANGNGTNGTPAAAPKTKAPALNERILSSITRRSVAAHPWHDLEIGPDAPTIFNCVIEIPKGSKVKYELDKKTGLIKVDRVLYSSVVYPHNYGFIPRTLCDDSDPIDVLVIMQEPVVPGCFLRAKAIGLMPMIDQGEADDKIIAVCADDPEYRHFNDIKELPPHRLAEIRRFFEDYKKNENKEVAVNDFLPSEDAYEAIQHSMDLYATYICEGLRR

SEQ ID NO: 7157 - DNA, 607 bp, Triticum aestivum
  misc_feature: Ceres CLONE ID no. 1319617
  misc_feature: Ceres CDNA ID no. 25445651
  CDS (88)..(369): REFERENCED BY SEQ ID NO: 7158
acaaccacaacaaaaccatcactccacgagcagacaggactgggaagagctttgctcgacaagttcaggagttaggaccaaccaacgatgaagagcagcacgctggtggcgatcctagtcctccaggccgtcatggtcatgggaatcctctcacactcactggccgccgacgacaatttcccgaagtgctgcgacaactgcaactcctggtcgggggcccaattctgtgacgacgtgggccccaagtgccgcgacggctgcgtgaactgccacgtggtgcagacgaggcccgtgaagacgttccggtgtggcgatggacgcgccgccctcccagagaatccctgcccgccgccgtgcaaaaagaactgatcgctcgctcgagctcaccacacagggagatcgacgttgcgccgaaaataaataagaaagctccgacgagatgagcagaaacggccggtgtggtgtacatgcacgtggcccacgcccagcaacacttgagagatagttgatgttgctccgtaaataaacacgtgtatcagtgtatacatatgcgtcacagctcaatcaaataaaaagtcagtttgtttgtgcaaaaaaaaaaaaaaaa

SEQ ID NO: 7158 - protein, 93 aa, Triticum aestivum
  misc_feature: Ceres CLONE ID no. 1319617
  misc_feature: Ceres CDNA ID no. 25445651
  misc_feature: Homolog of GI Number: 543708 NR Desc: wheat aluminum induced protein wali 3
  misc_feature: Homolog of GI Number: 543709 NR Desc: wheat aluminum induced protein wali 5
  misc_feature: Homolog of GI Number: 732809 NR Desc: putative protease inhibitor
  misc_feature: Homolog of GI Number: 34895580 NR Desc: putative wound
  misc_feature: Homolog of GI Number: 34895582 NR Desc: putative wound
MKSSTLVAILVLQAVMVMGILSHSLAADDNFPKCCDNCNSWSGAQFCDDVGPKCRDGCVNCHVVQTRPVKTFRCGDGRAALPENPCPPPCKKN

SEQ ID NO: 7159 - DNA, 802 bp, Triticum aestivum
  misc_feature: Ceres CLONE ID no. 1319738
  misc_feature: Ceres CDNA ID no. 40351745
  CDS (91)..(459): REFERENCED BY SEQ ID NO: 7160
catcacactccaccagcttaaccacactcatctgatcacccatagctagctagctagcagcttaaggaactagcttgcagctaccgatcgatggctcgtctcaacagcaaggctgtggtggccgccgtggtcctggcggcggtggtgctgatgatggccggcagggaggcctcggcggcgctgtcgtgcgggcaggtggactccaagctcgcgccgtgcgtggcgtacgtgacggggagggcgtcctcgatcagcaaggagtgctgctccggcgtgcaggggctgaacggcatggcccgcagcagctcggaccgcaagatagcgtgcaggtgcctcaagagcctcgccaccagcatcaagtccatcaacatgggcaaggtctccggcgtgcccggcaagtgcggcgtcagtgtgcccttccccatcagcatgtccaccaactgcgacactgtcaactagttcaatatataacccttcctacgtgcatgcatggacgcgcttgtgtggagcttaatgtctatgttgatggagtgctcatacgatactgatgagctactaaaaaaataaaataaagttgcctgcatgtgttatttcagtagtgtgtctatgtctgtaccttgcacacacactgtgtgtgcatatatatttatgcgacatgtatgcacacgtccgtatgcgtgagtgaactgtcagttccttgctgtactccagtctagccgagatgtgtacgtgtgatgtgcctgacctacttgttcaggcaattaatgaatagtaattattttcctgaaaaaaaaaaaaaaaa

SEQ ID NO: 7160 - protein, 122 aa, Triticum aestivum
  misc_feature: Ceres CLONE ID no. 1319738
  misc_feature: Ceres CDNA ID no. 40351745
  misc_feature (33)..(118): Pfam Name: Tryp_alpha_amyl PFAM Desc: Protease inhibitor/seed storage/LTP family
MARLNSKAVVAAVVLAAVVLMMAGREASAALSCGQVDSKLAPCVAYVTGRASSISKECCSGVQGLNGMARSSSDRKIACRCLKSLATSIKSINMGKVSGVPGKCGVSVPFPISMSTNCDTVN

SEQ ID NO: 7161 - DNA, 642 bp, Triticum aestivum
  misc_feature: Ceres CLONE ID no. 1319845
  misc_feature: Ceres CDNA ID no. 25445806
  CDS (75)..(491): REFERENCED BY SEQ ID NO: 7162
accaatccacctctgcctcccagcgaaacaccacacctctcctcgtcgaagcagcagcagcagccgcggcatccatggcccccaaggcggagaagaagccggtggcggagaaggccgagaagacgacggcggcgaagaagaccaaggccgagaagcggccgccggcgtccaaggagggcggcgagaagaaggggaagaagaagtcgaagaagagcgtggagacgtacaagatctacatcttcaaggtgctgaagcaggtgcaccccgacatcggcatctcctccaaggccatgtccatcatgaactccttcatcaacgacatcttcgagaagctcgccggcgagtccgccaagctcgcccgctacaacaagaagcccaccatcacctcccgggagatccagacctccgtccgcctcgtcctccccggcgagctcgccaagcacgccgtctccgagggcaccaaggccgtcaccaagttcacctccgcttagatagtctgttcctgtcttctttgtcgatcgatggtactctgtaatagtcaggtgttcggaccatgtcgtcttgtaactgtttcattatcttgtgaaatagtaatggcgcttctttgatcaaaaaaaaaaaaaaagaaaaaaaaaaaaaaaa

SEQ ID NO: 7162 - protein, 138 aa, Triticum aestivum; identical to SEQ ID NO: 6640
  misc_feature: Ceres CLONE ID no. 1319845
  misc_feature: Ceres CDNA ID no. 25445806
  misc_feature: No seed is being produced by the plant
  misc_feature: The plant flowers significantly late compared to wild-type.
  misc_feature: Useful for biocontainment applications
  misc_feature: Useful for making plants with modulated flowering time
  misc_feature (45)..(117): Pfam Name: Histone PFAM Desc: Core histone H2A/H2B/H3/H4
  misc_feature: Homolog of GI Number: 531058 NR Desc: protein H2B
  misc_feature: Homolog of GI Number: 531054 NR Desc: protein H2B153
  misc_feature: Homolog of GI Number: 21801 NR Desc: histone H2B
  misc_feature: Homolog of GI Number: 577819 NR Desc: H2B histone
  misc_feature: Homolog of GI Number: 34908130 NR Desc: putative histone H2B
  misc_feature: Homolog of GI Number: 22323 NR Desc: H2B histone
  misc_feature: Homolog of GI Number: 577825 NR Desc: H2B histone
  misc_feature: Homolog of GI Number: 22325 NR Desc: H2B histone
  misc_feature: Homolog of GI Number: 1708107 NR Desc: Histone H2B
  misc_feature: Homolog of GI Number: 531056 NR Desc: protein H2B

SEQ ID NO: 7163 - DNA, 1084 bp, Triticum aestivum
  misc_feature: Ceres CLONE ID no. 1319857
  misc_feature: Ceres CDNA ID no. 25400909
  CDS (33)..(920): REFERENCED BY SEQ ID NO: 7164
ctaaccgccgccgtctgcccgtctccacgtccatggccaccctcgcgccacgccccgacctcctcctcgtcgctctgagaaggtcccgcgctaggactcgcgctccggtgccaccgcaggcagcgcggcgcgtcttcctcggcctcggcgccgctttcgtcgaccagctcgcccgcatggcctccggtggtaccccgtcccgctcgttcgtggccgcggcgcggccaaggcagggggtttcccctgtcgaacagattttgaagaatgtggaatggccggacgagttccctttcaagcccgacgacttcagccgcttcgacgagtcatcagatactgtgttctattcggctccccgttttgtcacgcacattgacgacccagcaatcagagcgctcacaaaatactactcccaagttcttcctccaagcaacactccaggcgtggccatcctggacatgtgcagtagctgggtgagccattatccggttggataccaacaagagaagatcgtagggatgggtatgaatgaagacgagctgaaaaagaacccggttttgacagagtatgttgtgcaagacctcaatctgaacccgaagcttcctttcgacgataacacctttgatgttataaccaacgtggttagtgtagactacttgacaaaaccaatggatgtttttaaggagatgagacgaatacttaaaccatctgggttagctatcatgagcttttcaaatcgctgcttttggacaaaagctatatccatttggacatcaactggtgatgctgaccatgcttggatagttggtgcatacttccattatgctggagggtttgagccccctgaggctgttgatatatctcccaatccaggacaaacagatccgatgtacattgtttgctctagaaagaaaacagcttaattaaatatattttgtatcggagttttgcttaaaagaccaaatactagctgacgcatatatgtttctaccaagaggtgactactgacgactccggtctatatatatgtacacgacttcgtttgtttatttatgtggcactcacttgtacaaaaaaaaaaaaaaaa

SEQ ID NO: 7164 - protein, 295 aa, Triticum aestivum
  misc_feature: Ceres CLONE ID no. 1319857
  misc_feature: Ceres CDNA ID no. 25400909
  misc_feature: Homolog of GI Number: 34910520 NR Desc: B1142C05.17
  misc_feature: Homolog of GI Number: 21464553 NR Desc: AT4g29590/T16L4_100
  misc_feature: Homolog of GI Number: 53797070 NR Desc: COG0500: SAM
  misc_feature: Homolog of GI Number: 32394624 NR Desc: methyltrasferase
  misc_feature: Homolog of GI Number: 45525217 NR Desc: COG0500: SAM
  misc_feature: Homolog of GI Number: 46134880 NR Desc: COG0500: SAM
  misc_feature: Homolog of GI Number: 23129867 NR Desc: COG0500: SAM
  misc_feature: Homolog of GI Number: 52007777 NR Desc: COG0500: SAM
  misc_feature: Homolog of GI Number: 53691309 NR Desc: COG0500: SAM
MATLAPRPDLLLVALRRSRARTRAPVPPQAARRVFLGLGAAFVDQLARMASGGTPSRSFVAAARPRQGVSPVEQILKNVEWPDEFPFKPDDFSRFDESSDTVFYSAPRFVTHIDDPAIRALTKYYSQVLPPSNTPGVAILDMCSSWVSHYPVGYQQEKIVGMGMNEDELKKNPVLTEYVVQDLNLNPKLPFDDNTFDVITNVVSVDYLTKPMDVFKEMRRILKPSGLAIMSFSNRCFWTKAISIWTSTGDADHAWIVGAYFHYAGGFEPPEAVDISPNPGQTDPMYIVCSRKKTA

SEQ ID NO: 7165 - DNA, 643 bp, Triticum aestivum
  misc_feature: Ceres CLONE ID no. 1319871
  misc_feature: Ceres CDNA ID no. 24766993
  CDS (85)..(495): REFERENCED BY SEQ ID NO: 7166
atcaccgttcctcccacctcccagcgaagccacgcacaccacaccagagcacctctccccgtcgccgccgccgcagcagcatccatggcgcccaaggctgccgagaagaagccggcagagaagacccccgcgggcaagaaacccaaggcggagaagaaggtgccggcgtccaaggagggcgggggcgagaagaaggggaagaagaagtccaagaagagcgtggagacgtacaagatctacatcttcaaggtgctgaagcaggtgcacccggacatcgggatctcctccaaggccatgtccatcatgaactccttcatcaacgacatcttcgagaagctggccggcgagtcggccaagctggcgcggtacaacaagaagcccaccatcacgtcccgggagatccagacctccgtccgcctcgtcctccccggcgagctcgccaagcacgccgtctccgagggcaccaaggccgtcaccaagttcacttccgcctgattcggctgatggatcgatgtcaccctgtagtttcctgttcgtgctctgtcctcttgtaacttgtcctggttgtgtgggatcacatctcatgatccggagaaatagtaacagcgcttatttcagttcttgccgaaaaaaaaaaaaaaaa

SEQ ID NO: 7166 - protein, 136 aa, Triticum aestivum
  misc_feature: Ceres CLONE ID no. 1319871
  misc_feature: Ceres CDNA ID no. 24766993
  misc_feature: No seed is being produced by the plant
  misc_feature: The plant flowers significantly late compared to wild-type.
  misc_feature: Useful for biocontainment applications
  misc_feature: Useful for making plants with modulated flowering time
  misc_feature (43)..(115): Pfam Name: Histone PFAM Desc: Core histone H2A/H2B/H3/H4
  misc_feature: Homolog of GI Number: 531054 NR Desc: protein H2B153
  misc_feature: Homolog of GI Number: 34908130 NR Desc: putative histone H2B
  misc_feature: Homolog of GI Number: 531058 NR Desc: protein H2B
  misc_feature: Homolog of GI Number: 21801 NR Desc: histone H2B
  misc_feature: Homolog of GI Number: 22323 NR Desc: H2B histone
  misc_feature: Homolog of GI Number: 577819 NR Desc: H2B histone
  misc_feature: Homolog of GI Number: 1708107 NR Desc: Histone H2B
  misc_feature: Homolog of GI Number: 22325 NR Desc: H2B histone
  misc_feature: Homolog of GI Number: 34895832 NR Desc: putative histone H2B
  misc_feature: Homolog of GI Number: 34895838 NR Desc: putative histone H2B
  misc_feature: Useful for delaying flowering time
  misc_feature: Useful for increasing chlorophyll and photosynthetic capacity
  misc_feature: Useful for making plants with altered leaf shape eg curled leaves
  misc_feature: Useful for making plants with altered leaf shape eg curled leaves
  misc_feature: Useful for making plants with increased biomass and foliage
  misc_feature: Useful for making plants with increased biomass and foliage
  misc_feature: Useful for sterility
  misc_feature: Useful for sterility
MAPKAAEKKPAEKTPAGKKPKAEKKVPASKEGGGEKKGKKKSKKSVETYKIYIFKVLKQVHPDIGISSKAMSIMNSFINDIFEKLAGESAKLARYNKKPTITSREIQTSVRLVLPGELAKHAVSEGTKAVTKFTSA

SEQ ID NO: 7167 - DNA, 975 bp, Triticum aestivum
  misc_feature: Ceres CLONE ID no. 1319893
  misc_feature: Ceres CDNA ID no. 25445804
  CDS (85)..(735): REFERENCED BY SEQ ID NO: 7168
ccgtctcgctcagccacaagaatccaaaatcatcacccaccacagagcgagagagagaagagagagaaagaggagaaagagaccatggcttccgccgtcgattgcaagggcaaggaaatcgcgccggccagcctcctcaagtccggtgctcccgtggccttccgctcggtccactcccccgccgtcaccgccgcccgccgcccgtacaacacccaggccaaggaggtcagccgctacgacgacgacgacgacgactacagcggccgcgacctcgtcatccccagcttcttctcgcaggacgtgatcgacccgctcggcgcgccgaccagcatggcccgtctgctgtctctgatggaggacgtcgcatctcagaccggcggcctctcctccactgctggggctggcgcgtcgcggctcggacgctgggtggccaaggaggacgacgacgcggtgtacctcaaggtgccgatgccggggctgaccaaggagcacgtggaggtgcgcgcggacaagaacatcctggtgatcaagggcgagggcgagaagcagccctgggacggcgacgacgacgactccgcggtgccgaagtacaaccgccgcatcgaggtgccctctgctgacgcgtacaagatggacaagatcaaggccgagatgaagaacggcgtgctctgggtcaccctgctcaaggtcaaggaggaggagcgcaaggacgtcttccacgtcaaggtcgagtagtccttgtggatgtggtagtgctcatggaggatggccggcgcgagagtgtgagagatgccctgtttatgtggtcatgtttggtgtctttcttccttgttttgcttcgttgatcgtcttgcatcgagtaggtgaagttggccgcgaactctgatagtttcctcaagtttggcatatgatgaactgatttggtggtgaaattggtcatgaaattctgttgatttcctaaaaaaaaaaaaaaaa

SEQ ID NO: 7168 - protein, 216 aa, Triticum aestivum
  misc_feature: Ceres CLONE ID no. 1319893
  misc_feature: Ceres CDNA ID no. 25445804
  misc_feature (115)..(216): Pfam Name: HSP20 PFAM Desc: Hsp20/alpha crystallin family
  misc_feature: Homolog of GI Number: 4138871 NR Desc: small heat shock protein Hsp23.6
  misc_feature: Homolog of GI Number: 51535365 NR Desc: putative heat shock protein hsp22 precursor
  misc_feature: Homolog of GI Number: 51964398 NR Desc: PREDICTED P0471A11.32 gene product
  misc_feature: Homolog of GI Number: 54299342 NR Desc: mitochondrial small heat shock protein 22
  misc_feature: Homolog of GI Number: 4138869 NR Desc: small heat shock protein Hsp23.5
  misc_feature: Homolog of GI Number: 7441310 NR Desc: heat shock protein MTSHP precursor
  misc_feature: Homolog of GI Number: 28950739 NR Desc: At4g25200
  misc_feature: Homolog of GI Number: 2326354 NR Desc: LMW heat shock protein
  misc_feature: Homolog of GI Number: 7159338 NR Desc: LMW heat shock protein
  misc_feature: Homolog of GI Number: 21554988 NR Desc: mitochondrial heat shock 22 kd protein
MASAVDCKGKEIAPASLLKSGAPVAFRSVHSPAVTAARRPYNTQAKEVSRYDDDDDDYSGRDLVIPSFFSQDVIDPLGAPTSMARLLSLMEDVASQTGGLSSTAGAGASRLGRWVAKEDDDAVYLKVPMPGLTKEHVEVRADKNILVIKGEGEKQPWDGDDDDSAVPKYNRRIEVPSADAYKMDKIKAEMKNGVLWVTLLKVKEEERKDVFHVKVE

SEQ ID NO: 7169 - DNA, 641 bp, Triticum aestivum
  misc_feature: Ceres CLONE ID no. 1319912
  misc_feature: Ceres CDNA ID no. 40351746
  CDS (61)..(471): REFERENCED BY SEQ ID NO: 7170
cacaaatcacagcgtcgccgcacccgatctcccaagaagacaccaccaccacccgcgccgatggcccgcacaaagcagacggcgcgcaagtccaccggcggcaaggcgccgaggaagcagctggcgaccaaggcggcccgcaagtccgcgccggccaccggcggcgtcaagaagccccaccgtttccgccccggcaccgtcgccctccgcgagatccgcaagtaccagaagagcacggagctgctcatccgcaagctccccttccagcgcctcgtccgggagatcgcgcaggacttcaagaccgacctccgcttccagagctccgccgtctccgcgctgcaggaggccgccgaggcgtacctggtgggcatgttcgaggacaccaacctgtgcgccatccacgccaagcgcgtcaccatcatgcccaaggacatacagctcgcccgccgcatccgcagggagcgcgcctagatttggggtcgccggtaatactgggcagtatctgttcttgtcctgtgattcgaatgtgtgttgagtgcctctgtttgttggtgttgatatgatgtgtcgtctgttcctatggatcgtgatgttcgaatgaaatggcaatggaagttcagttaacaaaaaaaaaaaaaaaa

SEQ ID NO: 7170 - protein, 136 aa, Triticum aestivum
  misc_feature: Ceres CLONE ID no. 1319912
  misc_feature: Ceres CDNA ID no. 40351746
  misc_feature (58)..(134): Pfam Name: Histone PFAM Desc: Core histone H2A/H2B/H3/H4
MARTKQTARKSTGGKAPRKQLATKAARKSAPATGGVKKPHRFRPGTVALREIRKYQKSTELLIRKLPFQRLVREIAQDFKTDLRFQSSAVSALQEAAEAYLVGMFEDTNLCAIHAKRVTIMPKDIQLARRIRRERA

SEQ ID NO: 7171 - DNA, 586 bp, Triticum aestivum
  misc_feature: Ceres CLONE ID no. 1319946
  misc_feature: Ceres CDNA ID no. 25446537
  CDS (75)..(344): REFERENCED BY SEQ ID NO: 7172
aacaacagagagcattctaccaccgcaccgcacgagtgaagtgagagctttgcacgaaaagttcatcagcgaccatgaagggcaccaagctcgcggcgatcctcatcctccaggccgtcctggtcatgggagtcctctcacacgtgaacgccgactatttccccaagtgctgcaacaactgcaggtccttctccggggtcgacgtctgcgacgacgcccaccccaagtgccccaagggctgctcggcgtgccgcgtggtgtcgacgagccccgaaatgtggcgctgcgcggatatgaaatccaccgtcgacggcacctgcggtgggccctgcaagaagtactgatcggctcatgccagcatgatatgttccgcctaaaatgaaataaaagctcagacgagatgagcagcgtcatcgtgcctatgcgtgtgtgtgtggccaacaaatatgtataccagtatgccgtgtcttcgtcgctgtgttttctctctcgagaaaaagttggtgttgcttgttgttcagatatccggaatatcctccgtgaataagtaatgattgtgcgttggtggcgaaaaaaaaaaaaaaaa

SEQ ID NO: 7172 - protein, 89 aa, Triticum aestivum
  misc_feature: Ceres CLONE ID no. 1319946
  misc_feature: Ceres CDNA ID no. 25446537
  misc_feature: Homolog of GI Number: 543709 NR Desc: wheat aluminum induced protein wali 5
  misc_feature: Homolog of GI Number: 732809 NR Desc: putative protease inhibitor
  misc_feature: Homolog of GI Number: 543708 NR Desc: wheat aluminum induced protein wali 3
  misc_feature: Homolog of GI Number: 34895582 NR Desc: putative wound
  misc_feature: Homolog of GI Number: 34895580 NR Desc: putative wound
  misc_feature: Homolog of GI Number: 42495351 NR Desc: wound
MKGTKLAAILILQAVLVMGVLSHVNADYFPKCCNNCRSFSGVDVCDDAHPKCPKGCSACRVVSTSPEMWRCADMKSTVDGTCGGPCKKY

SEQ ID NO: 7173 - DNA, 675 bp, Triticum aestivum
  misc_feature: Ceres CLONE ID no. 1319993
  misc_feature: Ceres CDNA ID no. 25446538
  CDS (86)..(514): REFERENCED BY SEQ ID NO: 7174
ccaaaaagcaatccaattccccaccagccccctcgcaccttccggcgaatcaccgcacctctccccggcgaagcagcagcgtccgatggcccccaaggcggagaagaagccggctgccgcggagaagactccggcggccgagaagaccaccgcgggcaagaagcccaaggccgagaagcggccgcccaagtccaaggagggcggcgccgacaagaagaagaagaaggccaagaagagcgtggagacgtacaagatctacatcttcaaggtgctgaagcaggtgcacccggacatcggtatctcctccaaggccatgtccatcatgaactccttcatcaacgacatcttcgagaagctcgccggcgagtccgccaagctcgcccgctacaacaagaagcccaccatcacctccagggagatccagacctccgtccgcctcgtcctcccgggcgagctcgccaagcacgccgtctctgagggcaccaaggccgtcaccaagttcacatcctcttagataggctgttctctgtcttcgtggttgatcgatggttctctgtaatgctcgttagctgttcggaccatgtcgctgtgtaacttgtgctggtgttgtggcaacacactgtttcatcatctcgtgaatcagtaactttgcttaaaaaaaaaaaaaaaaaaaaa

SEQ ID NO: 7174 - protein, 142 aa, Triticum aestivum; identical to SEQ ID NO: 1926
  misc_feature: Ceres CLONE ID no. 1319993
  misc_feature: Ceres CDNA ID no. 25446538
  misc_feature: No seed is being produced by the plant
  misc_feature: The plant flowers significantly late compared to wild-type.
  misc_feature: Useful for biocontainment applications
  misc_feature: Useful for making plants with modulated flowering time
  misc_feature (49)..(121): Pfam Name: Histone PFAM Desc: Core histone H2A/H2B/H3/H4
  misc_feature: Homolog of GI Number: 531058 NR Desc: protein H2B
  misc_feature: Homolog of GI Number: 21801 NR Desc: histone H2B
  misc_feature: Homolog of GI Number: 22323 NR Desc: H2B histone
  misc_feature: Homolog of GI Number: 22325 NR Desc: H2B histone
  misc_feature: Homolog of GI Number: 531056 NR Desc: protein H2B
  misc_feature: Homolog of GI Number: 577825 NR Desc: H2B histone
  misc_feature: Homolog of GI Number: 34908130 NR Desc: putative histone H2B
  misc_feature: Homolog of GI Number: 34895838 NR Desc: putative histone H2B
  misc_feature: Homolog of GI Number: 34895896 NR Desc: putative histone H2B
  misc_feature: Homolog of GI Number: 1708107 NR Desc: Histone H2B
  misc_feature: Useful for delaying flowering time
  misc_feature: Useful for increasing chlorophyll and photosynthetic capacity
  misc_feature: Useful for making plants with altered leaf shape eg curled leaves
  misc_feature: Useful for making plants with altered leaf shape eg curled leaves
  misc_feature: Useful for making plants with increased biomass and foliage
  misc_feature: Useful for making plants with increased biomass and foliage
  misc_feature: Useful for sterility
  misc_feature: Useful for sterility

SEQ ID NO: 7175 - DNA, 1200 bp, Triticum aestivum
  misc_feature: Ceres CLONE ID no. 1320061
  misc_feature: Ceres CDNA ID no. 40351747
  CDS (105)..(971): REFERENCED BY SEQ ID NO: 7176
gaacaagcttccatcgggctttctcctcctcatcaaccttcttctactactagttgttcctagctagctggttgagtgagcttgctttcgggagcaagaaacgcatggcggtgtcctcggtgctggcgatcctgctcgacgcctcgtgtgcccttgcgtcggcgaccttcgacaaggagttcgacatcacctggggtgacggccgagggaagatcatgaacaatggccagctcctcacgctggggctggacaaggtctccggctccggattccagtccaagcacgagtacctctacggcaagatcgacatgcagctcaagctcgtccccggcaactccgccggcaccgtcaccgcatactacctgtcgtcgcaggggccgacgcacgacgagatcgactttgagttcctgggcaatgtcaccggcgagccgtacactctgcacaccaacgtgttcacgcaggggcaggggcagcgggagcagcagttccgcctctggttcgatcccaccaacgacttccacacctactccatcctctggaacccaaagcacatcatcttcatggtggacgacatgccgatcagggacttcaggaacctggagggaaaggggatcgccttccccaagaaccagccgatgcgcctctactccagcctctggaacgccgacgactgggccacgcaaggaggccgcgtcaagacggactggtcccacgcgccgttctctgcctcctaccgcggcttcaaggccgacgcgtgcgtggtgaccgcggccggccggccgcgctgcggcgccagcgtgggcacggaggtcgcccccggcacgggcgcggcgggcgagtggtacaaccaggagctcgacctgacgcggcagcagcggatgcggtgggtgcagagcaactacatgatctacaactactgcaccgaccccaagcgcttcgcccagggcgttcccgccgagtgctccatgtagtccatgcctgtcgatcgccggagaaagacggccggagatagggaagatggggtgtctgtataatccgatatcaataaggattggtgactgggagatgtgtaaagtagccggtggtagattcttctttggcatttacgcccagttcttctaatcgtgatcacgatcatttcgtgtgtaatctattgcctcgtcgtacatacgttcatcacctgtaaaaaaaaaaaaaaaa

SEQ ID NO: 7176 - protein, 288 aa, Triticum aestivum
  misc_feature: Ceres CLONE ID no. 1320061
  misc_feature: Ceres CDNA ID no. 40351747
  misc_feature: null
  misc_feature: Useful for making plants with altered cell wall content and/or composition
  misc_feature (22)..(203): Pfam Name: Glyco_hydro_16 PFAM Desc: Glycosyl hydrolases family 16
  misc_feature (228)..(286): Pfam Name: XET_C PFAM Desc: Xyloglucan endo
MAVSSVLAILLDASCALASATFDKEFDITWGDGRGKIMNNGQLLTLGLDKVSGSGFQSKHEYLYGKIDMQLKLVPGNSAGTVTAYYLSSQGPTHDEIDFEFLGNVTGEPYTLHTNVFTQGQGQREQQFRLWFDPTNDFHTYSILWNPKHIIFMVDDMPIRDFRNLEGKGIAFPKNQPMRLYSSLWNADDWATQGGRVKTDWSHAPFSASYRGFKADACVVTAAGRPRCGASVGTEVAPGTGAAGEWYNQELDLTRQQRMRWVQSNYMIYNYCTDPKRFAQGVPAECSM

SEQ ID NO: 7177 - DNA, 812 bp, Triticum aestivum
  misc_feature: Ceres CLONE ID no. 1320109
  misc_feature: Ceres CDNA ID no. 36706269
  CDS (99)..(506): REFERENCED BY SEQ ID NO: 7178
ctcccacctgcgtccctctcgcctccaccgcctcctgtctcctcgcgcgttccgtctcccagtagcggctcccgtcgttcccctcctcggttgctgagatggccggtcgtgggaaggcaatcggcgccggcgcggccaagaaggcgacgtcccggagctccaaggctgggctgcagttccccgtgggaaggatcgccaggttcctcaaggccggcaagtacgccgagcgcgtcggagccggcgcccccgtctacctcgccgccgtccttgagtacctcgccgctgaggtcctggagctggccggaaacgccgccagggacaacaagaagacccgtatcgtgccgcgccacatccagctcgccgtgcgcaatgacgaggagctgaccaagttgctcggcggcgccaccatcgccagcggcggtgtgatgcccaacatccaccagcacctcctccccaagaaggcctcttcctccaaggcgtccaccgtcgatgacgacgacaactgaggccctgtcctttccctcgctgccaccgcccgcaccatggattacatttgcatcacaaagacgaaggagtttcttgtttcgtaggatttagtgtcttggttttcaggagagtcccggatggtatggtattaggagaatttctagttggtggtcggattggttgctttcatcccatggctgtgaatatggcaaacaaattttcgggtgttcaaactcagatgtaaggctgcttgatcttgtccggtttccatggttgaagaaattgaaaggaactcaactttaagctattgaaaaaaaaaaaaaaaa

SEQ ID NO: 7178 - protein, 135 aa, Triticum aestivum
  misc_feature: Ceres CLONE ID no. 1320109
  misc_feature: Ceres CDNA ID no. 36706269
  misc_feature (25)..(89): Pfam Name: CBFD_NFYB_HMF PFAM Desc: Histone
  misc_feature: Homolog of GI Number: 50938209 NR Desc: histone H2A
  misc_feature: Homolog of GI Number: 1154954 NR Desc: histone H2A
  misc_feature: Homolog of GI Number: 77555213 NR Desc: Core histone H2A/H2B/H3/H4
  misc_feature: Homolog of GI Number: 536896 NR Desc: protein H2A
  misc_feature: Homolog of GI Number: 50938211 NR Desc: putative histone H2A
  misc_feature: Homolog of GI Number: 50945929 NR Desc: putative histone H2A
  misc_feature: Homolog of GI Number: 29824201 NR Desc: putative histone H2A
  misc_feature: Homolog of GI Number: 17065594 NR Desc: putative histone H2A protein
  misc_feature: Homolog of GI Number: 21593834 NR Desc: histone H2A
  misc_feature: Homolog of GI Number: 2317760 NR Desc: H2A homolog
MAGRGKAIGAGAAKKATSRSSKAGLQFPVGRIARFLKAGKYAERVGAGAPVYLAAVLEYLAAEVLELAGNAARDNKKTRIVPRHIQLAVRNDEELTKLLGGATIASGGVMPNIHQHLLPKKASSSKASTVDDDDN

SEQ ID NO: 7179 - DNA, 1116 bp, Triticum aestivum
  misc_feature: Ceres CLONE ID no. 1320121
  misc_feature: Ceres CDNA ID no. 40351748
  CDS (100)..(894): REFERENCED BY SEQ ID NO: 7180
aacattccattcgccgttcccgttctcctctccccctgtcgcctccatagcagcagcagctccagctcgagcaagaaagaactagtttgatctgtgaaaatgttggccatcttccagaagcaggtggcgcacgcgccgcaggagctcaacagcccgcgcggcagcaccgccaagcccaagaaccccgacgagatcctccgcgacttccacgccgcccacccctccgacgccttctccacctccttcggcggcggcgccgccctcgcctgcgtcgccgcgcagccccgcaacctcgccgccggcgggtaccagaggatgttctgcgggctggacgacatctactgcgtcttcatggggacgctggacaacctgagcgcgctgatgcggcagtacggcctcacgggccgctccaccaacgaggcgctgctggtgatcgaggcctaccgcaccctgcgcgaccggggcccctaccctgctgaccaggtggtgaaggacctgtcgggctccttcgccttcgtcgtcttcgacaaccgcggccggtccggctccggggcggccgtgttcgcggcgcagagcacggacggcggcgtgccgctgcactggggcgtggcggcggacgggtcggtggtgatctgcgacgaccgcgccgtggccaaggccgggtgcgggcggtcctacgcgccgttcccgcccgggtgcatgttccacagcgagggcgggctcaagagcttcgagcaccccatgaaccggctcaaggcgctcccgcgggtggacagcgagggcgtcatgtgcggcgccaacttcaaggtcgacgccttcaccaagatcaactccatgccccgcgtcggtagcgccaccaactgggccgccacctgggacgaagccgccatctgatatagccatcgtcgctccccggcgccggcgacgctcgcctagctcgtcggacttctggatttgggcttactgcattttacttatttttttctttggcaatgtacattctgaatctgatctgatctgagccgtgtgtgggcgtgggcacgctgacacgtacggttgtttgcttgtacgatggaggaataagactttgcttccagtccaaaaaaaaaaaaaaaa

SEQ ID NO: 7180 - protein, 264 aa, Triticum aestivum
  misc_feature: Ceres CLONE ID no. 1320121
  misc_feature: Ceres CDNA ID no. 40351748
MLAIFQKQVAHAPQELNSPRGSTAKPKNPDEILRDFHAAHPSDAFSTSFGGGAALACVAAQPRNLAAGGYQRMFCGLDDIYCVFMGTLDNLSALMRQYGLTGRSTNEALLVIEAYRTLRDRGPYPADQVVKDLSGSFAFVVFDNRGRSGSGAAVFAAQSTDGGVPLHWGVAADGSVVICDDRAVAKAGCGRSYAPFPPGCMFHSEGGLKSFEHPMNRLKALPRVDSEGVMCGANFKVDAFTKINSMPRVGSATNWAATWDEAAI

SEQ ID NO: 7181 - DNA, 651 bp, Triticum aestivum
  misc_feature: Ceres CLONE ID no. 1320137
  misc_feature: Ceres CDNA ID no. 40351749
  CDS (143)..(412): REFERENCED BY SEQ ID NO: 7182
gaccgcagcgcagaagcaaaagccccaatcccctccgcctccgccgccgttcttctccgtccgcctgcgctccagccgtgcccttctcgtcgccacttaccgacctcgagctccccagccaccgacaaccggaggcggcgccatgtctcagaacaacccctcccagctcctcccctcagagctgatcgaccggtgcatcggatccaagatttgggtgatcatgaagggagacaaggagctcgtcggcactctctgcgggttcgacgtctacgtcaacatggtcctcgaggacgtcaccgagtatgagtataccgccgagggccggcgcattacgaaacttgatcagatcctcctcaatggcaacaacatagccatcttagttcctggtggttcaccgccagatgctgcatgagctagcaagcacttctggaggatatctgtttgaggctaaacgagacgcagtgaagtctgaaccttgtattgtgaaagcgctagatatttcttggtcaaatgtgctttcctctgtatggaacctactgagctgaaacatgcacctgcgattgctgcacttgtatgacttggcattcggcaaatgctaattgtgacatgtctctagttgctgtttatgtttttcgaaaaaaaaaaaaaaaa

SEQ ID NO: 7182 - protein, 89 aa, Triticum aestivum
  misc_feature: Ceres CLONE ID no. 1320137
  misc_feature: Ceres CDNA ID no. 40351749
  misc_feature (13)..(81): Pfam Name: LSM PFAM Desc: LSM domain
MSQNNPSQLLPSELIDRCIGSKIWVIMKGDKELVGTLCGFDVYVNMVLEDVTEYEYTAEGRRITKLDQILLNGNNIAILVPGGSPPDAA

SEQ ID NO: 7183 - DNA, 758 bp, Triticum aestivum
  misc_feature: Ceres CLONE ID no. 1320351
  misc_feature: Ceres CDNA ID no. 40351750
  CDS (84)..(494): REFERENCED BY SEQ ID NO: 7184
actattcgcctttccgcaccctcttccgtcgccgtcgattcgaacctcccccaaatcagcagcagtcgaccggaggcgccgccatggcccgtaccaagcagaccgcccgcaagtccaccggcggcaaggcgccccgcaagcagctcgccaccaaggcggcgaggaagtcggcgccgaccaccggcggagtgaagaagccccaccgctacaggccggggaccgtggcgctccgggagatccgcaagtaccagaagagcacggagctgctgatccgcaagctgcctttccagcgcctggtccgcgagatcgcgcaggacttcaagacggacctccgcttccagtcccacgccgtgctggccctccaggaggcggccgaggcgtacctcgtcgggctgttcgaggacaccaacctgtgcgccatccacgccaagcgcgtcaccatcatgcccaaggacatccagctcgcccgccgcatccgtggcgagagggcctaagctgtcctctccgtgaacgacggtagtggatcgggatgagttgattccggttgtagtttgttcctaattgctgttctaggtcttaagcttttgtgtagaagaaatatggttgttaggtatgagtaagacgaaccaacttgatatgtgatgttccttttggtttgcgatgaagcaaacgtatatctatgttgaagacctcagaaccattgttgttcgctgcaactctgttgttgtcgtgcccttgatccaaaaaaaaaaaaaaaa

SEQ ID NO: 7184 - protein, 136 aa, Triticum aestivum; identical to SEQ ID NO: 30
  misc_feature: Ceres CLONE ID no. 1320351
  misc_feature: Ceres CDNA ID no. 40351750
  misc_feature (58)..(134): Pfam Name: Histone PFAM Desc: Core histone H2A/H2B/H3/H4

SEQ ID NO: 7185 - DNA, 832 bp, Triticum aestivum
  misc_feature: Ceres CLONE ID no. 1320379
  misc_feature: Ceres CDNA ID no. 25891012
  CDS (75)..(611): REFERENCED BY SEQ ID NO: 7186
cttcgcccgccgcctcctgccctccccatctgcttaggttaggttaggctaggggcttcgcagagctcgcggaaatggtggccttcaggttccatcagtaccaggtggtgggtcgcgcgctgccgacgcccggcgatgagcagcctaagatctaccgcatgaagctctgggccaccaatgaggtgcgcgccaagagcaagttctggtatttcctgaggaagctgaagaaggtgaagaagagcaacggccagatgctcgccatcaacgagatctttgagaagaacccaaccacgatcaagaactatggcatttggctgcgttaccagagcagaaccggctaccacaacatgtacaaggagtaccgtgacaccacactgaatggtgccgtggagcagatgtacactgagatggcctctcgccaccgtgtgagatccccctgcattcagatcatcaagaccgcgactgtcaacttcaagctatgcaagagagacaacaccaagcagttccacaactccaagatcaagttcccccttgtgtaccaaaaggtcaggccaccaaccaggaagctgaagaccacctacaaggcgacgaggccgaacctgttcatgtgattgggctgtggtggatgctggtatttttgttgggcagaagcacaaaagttgaaatgttctcttagtatgttggatcttctaatgcatgaagactagtgttttgttgcttatttatcatttaaagacatggtcggtgaaccttgtgattgtgttcttatcagtaatctgcatacaatctattggtatctgatatagatctgtttgtaaaaaaaaaaaaaaaa

SEQ ID NO: 7186 - protein, 178 aa, Triticum aestivum
  misc_feature: Ceres CLONE ID no. 1320379
  misc_feature: Ceres CDNA ID no. 25891012
  misc_feature (5)..(178): Pfam Name: Ribosomal_L18ae PFAM Desc: Ribosomal L18ae protein family
  misc_feature: Homolog of GI Number: 50511482 NR Desc: putative 60S ribosomal protein L18a
  misc_feature: Homolog of GI Number: 34909590 NR Desc: putative ribosomal protein L18a
  misc_feature: Homolog of GI Number: 34910926 NR Desc: putative 60S ribosomal protein L18A
  misc_feature: Homolog of GI Number: 30102898 NR Desc: At2g34480
  misc_feature: Homolog of GI Number: 20453309 NR Desc: AT3g14600/MIE1_10
  misc_feature: Homolog of GI Number: 13430184 NR Desc: ribosomal protein L18a
  misc_feature: Homolog of GI Number: 21593925 NR Desc: putative 60S ribosomal protein L18A
  misc_feature: Useful for making ornamental plants with modified flowers
  misc_feature: Useful for making ornamental plants with modified leaves
  misc_feature: Useful for making plants with altered leaf shape eg curled leaves
  misc_feature: Useful for making shorter plants
MVAFRFHQYQVVGRALPTPGDEQPKIYRMKLWATNEVRAKSKFWYFLRKLKKVKKSNGQMLAINEIFEKNPTTIKNYGIWLRYQSRTGYHNMYKEYRDTTLNGAVEQMYTEMASRHRVRSPCIQIIKTATVNFKLCKRDNTKQFHNSKIKFPLVYQKVRPPTRKLKTTYKATRPNLFM

SEQ ID NO: 7187 - DNA, 1128 bp, Triticum aestivum
  misc_feature: Ceres CLONE ID no. 1320533
  misc_feature: Ceres CDNA ID no. 25891910
  CDS (90)..(926): REFERENCED BY SEQ ID NO: 7188
ctctaccacccttcaccgccgccacagcctccagaccctatctcccccgtcggagctccctgcccccaaccccccacccccaaacaaccatggcggaccgcggcggcgagcgtggtggcgaccgcggaggcgaacgcggcgggttcggccgcggcttcgggcgcggcgggcgcggggaccgtggcgggcgccgcggcggccgtcgtggccctcgccaggaggaggagaagtgggtgcccgtcaccaagctcggccgcctcgtcaaggagggccggttcaccaagatggaggagatctacctccactcgctccccgtcaaggagcaccagatcgtggagcagctctgcccggggctcaaggacgaggtgatgaagatcactcccgtgcagaagcagacccgcgccggccagcggacccgcttcaaggcgttcgtcgtcgtcggcgacagcaacggccacgtcgggctcggcgtcaagtgcgccaaggaggtggcaacggccatccgcggcgccatcatcctcgccaagctctccatcgtgcccgtcaggaggggctactgggggaacaagatcggcctgccccacaccgtgccctgcaaggtcaccggcaagtgcggctctgtcaccgtgcgcatggtgcctgccccgaggggttctggaatcgtcgccgctcgtgtccccaagaaggtgctccagttcgctggtattgatgatgtcttcacttcctcgcgtggatccaccaagacacttggcaacttcgtcaaggcaaccttcgactgcctgatgaagacctatggattcctcacccctgacttctggagggagacgaccttcaccaaggggccgtaccaggagttcaccgacatcttggcgaagccgacaaaggccttgatgcttgatgcaccagttgagaagatagaagcttaggatgttggcgtaaatggtttttgctagctgggagctgtgtaatgcactatgctttatttagttattaagactttgaatcgtgctgcttcaggatgtctctctgccgtcaagtgttggtttgtggaactatgctactctcttttatcgtcaatggatgctacataattatagataaaaaaaaaaaagaaaaaaaaaaaaaaaa

SEQ ID NO: 7188 - protein, 278 aa, Triticum aestivum
  misc_feature: Ceres CLONE ID no. 1320533
  misc_feature: Ceres CDNA ID no. 25891910
  misc_feature (171)..(244): Pfam Name: Ribosomal_S5_C PFAM Desc: Ribosomal protein S5
  misc_feature (88)..(154): Pfam Name: Ribosomal_S5 PFAM Desc: Ribosomal protein S5
  misc_feature: Homolog of GI Number: 50919281 NR Desc: putative 40S ribosomal protein S2
  misc_feature: Homolog of GI Number: 50935111 NR Desc: putative 40S ribosomal protein S2
  misc_feature: Homolog of GI Number: 22137092 NR Desc: At2g41840/T11A7.6
  misc_feature: Homolog of GI Number: 21553851 NR Desc: 40S ribosomal protein S2
  misc_feature: Homolog of GI Number: 62318510 NR Desc: ribosomal protein S2
  misc_feature: Homolog of GI Number: 18181932 NR Desc: ribosomal protein S2
  misc_feature: Homolog of GI Number: 21618011 NR Desc: ribosomal protein S2
  misc_feature: Homolog of GI Number: 30017231 NR Desc: At3g57490
  misc_feature: Homolog of GI Number: 21539457 NR Desc: ribosomal protein S2
  misc_feature: Homolog of GI Number: 27501336 NR Desc:  similar to ribosomal protein S2
  misc_feature: Useful for increasing chlorophyll and photosynthetic capacity
  misc_feature: Useful for sterility
MADRGGERGGDRGGERGGFGRGFGRGGRGDRGGRRGGRRGPRQEEEKWVPVTKLGRLVKEGRFTKMEEIYLHSLPVKEHQIVEQLCPGLKDEVMKITPVQKQTRAGQRTRFKAFVVVGDSNGHVGLGVKCAKEVATAIRGAIILAKLSIVPVRRGYWGNKIGLPHTVPCKVTGKCGSVTVRMVPAPRGSGIVAARVPKKVLQFAGIDDVFTSSRGSTKTLGNFVKATFDCLMKTYGFLTPDFWRETTFTKGPYQEFTDILAKPTKALMLDAPVEKIEA

SEQ ID NO: 7189 - DNA, 1051 bp, Triticum aestivum
  misc_feature: Ceres CLONE ID no. 1320922
  misc_feature: Ceres CDNA ID no. 25891136
  CDS (91)..(849): REFERENCED BY SEQ ID NO: 7190
atcatactagcatacagcaccaccacagggaaagccagcaagggaatcacatcctacctagtgtagagtacgtgcttgtgctcaccggcaatgtgcagagggacggtggacgacctccgcccgctcgggccccggcggctcgacgtccgcgccttctacctccgcctctcctcctcctcccactcatccgcgtcgccgccgcccgcggagctcacgctcgtctaccgcccggccatcggcggcgccgcgctggagctggccggccgcgcgctcccgccggcgtgccccgccgaggccaccctcctgcgcgtccgcggcgcggccgacggtgcggacgacgcgccggcgtacgcgagcgccgaccgcgtctcggccgccgagggcgcgcgcttcgaggtgtacgccgggcaggagctcgcggcggagggcgccttcttcccgcggcgccggctcgacggaggcgggtggcacgtcgagtgccgccggccggtcgggtcgcgctcgcactcgcgggtggcggaggtgctggtcctcgcggagggcggcgtgctcataagggccagggccagggcggcgaggcgggccgggtgcgcgacgccgctggaggggataccggaggaggacgcgtcctcgtgggggtcgtgcgagtgcggggcttgcggggacgggtggcagatggtcggagacagcagcagcgatgatgacgacggcgacaagttgaaggaggaagaggtggaggccgagacgatgcggtgggcgctggagatgggcgcctgggcggtgtgcgtcggggtcggcctgctcgccaccgcccgccggttcagccggaggagggccgcgctccggtgatccctgcctgtcaagaggaatttgtttttgttttcttcagtttcacttggtcaaagtgtcaggataggattttgcagtatcttcttcttcttcagtctagctagtgattttgtttcgtgggagttgtcaaatcttgtagcgtatatgtacatacactcactcggagtcgatcaaccaagagcttgcaaaaaaaaaaaaaaaa

SEQ ID NO: 7190 - protein, 252 aa, Triticum aestivum
  misc_feature: Ceres CLONE ID no. 1320922
  misc_feature: Ceres CDNA ID no. 25891136
  misc_feature: Homolog of GI Number: 66776103 NR Desc: LigA
  misc_feature: Homolog of GI Number: 66780099 NR Desc: PE
  misc_feature: Homolog of GI Number: 66779508 NR Desc: Aspartate/glutamate/uridylate kinase
  misc_feature: Homolog of GI Number: 66776896 NR Desc: LigA
  misc_feature: Homolog of GI Number: 66776365 NR Desc: PE
  misc_feature: Homolog of GI Number: 53767310 NR Desc: COG1309: Transcriptional regulator
  misc_feature: Homolog of GI Number: 66776813 NR Desc: Phosphoribosylaminoimidazole
  misc_feature: Homolog of GI Number: 66779191 NR Desc: LigA
  misc_feature: Homolog of GI Number: 66779656 NR Desc: Insulinase
  misc_feature: Homolog of GI Number: 53769716 NR Desc: COG0454: Histone acetyltransferase HPA2 and related acetyltransferases
MCRGTVDDLRPLGPRRLDVRAFYLRLSSSSHSSASPPPAELTLVYRPAIGGAALELAGRALPPACPAEATLLRVRGAADGADDAPAYASADRVSAAEGARFEVYAGQELAAEGAFFPRRRLDGGGWHVECRRPVGSRSHSRVAEVLVLAEGGVLIRARARAARRAGCATPLEGIPEEDASSWGSCECGACGDGWQMVGDSSSDDDDGDKLKEEEVEAETMRWALEMGAWAVCVGVGLLATARRFSRRRAALR

SEQ ID NO: 7191 - DNA, 1426 bp, Triticum aestivum
  misc_feature: Ceres CLONE ID no. 1321552
  misc_feature: Ceres CDNA ID no. 25891911
  CDS (86)..(1063): REFERENCED BY SEQ ID NO: 7192
acacttcctctctctctcccccgcccctcgccgtcgccggagagagagagagagggacgcggccgcgggagaagaaggagggaagatgatgatgacacgggcctccatgggggccatggagggcgcggcgctggacgaggtggtgcggcgattggtcgagggcggccgcggcgggcggcaggtgcagctgtccgaggcggagatccggcagctctgcgtcgacgccaagcgggttttcctgtcccagccgaacctcctccgcatccaggcccccgtcaagatctgcggtgatatccatggtcagtttgttgatcttctgaggttgtttgatttgggtggttatcctccaacctcaacctatgtattccttggagactacgtagatagaggcaaacagagcttggaaactatatgcttactgctggcgtacaaaataaggtaccctgacaaggttttcctgttaaggggtaaccatgaagatgccaaaatcaacagagtttatggtttctatgatgaatgcaagaggaggttcaatgttcgactgtggaagatattctctgattgcttcaactgcctgcctattgcagcactcattgatgacaagatactgtgcatgcatggtggcctttcacctgaactgactaacctggaccaaataaaggatattgagaggccggctgagattcctgattatggtctcctgtgtgatttgctttggtctgatcctagccctgacggagaagggtggggggagagtgacagaggtgtttcatgtacgtttggtgcagataagcttatagagttcttggaaaaaaatgatcttgatcttatctgccgagcccatcaggtggtagaagatggttacgagttcttcgcacagcggagattagtcaccatcttctcagctccaaattactgcggggaattcgataatgtaggtgctctgttgagcatagatgaagatctaatgtgctcatttcaaatcttgaagccaaatgaaacaggcacatcgcgggtaaaaagacaaattccaaataagccagcaaccgggggaagtgcctgatctgatcaacatccattccttgaatattagcatcgtcagctcgaagggggtgatctgatctattgtttggatccaccagggcatggcaatattcatccaccagccaattgtcttgcttaaccacccttagttgccgagcatttgtaaatgtccattggctctgcactcgttttctctgtacagaattaggccggatttaacagcaccacctattctggttgttcttcctggttgcgcggcatctgtttttgtaagttacttttgtggtacatttttgccagtggatgttgatagcttctgtttgtgagcatctattatttgccttatgtttgtgacgtgacgttttaaaaaaaaaaaaaaaaa

SEQ ID NO: 7192 - protein, 318 aa, Triticum aestivum
  misc_feature: Ceres CLONE ID no. 1321552
  misc_feature: Ceres CDNA ID no. 25891911
  misc_feature (55)..(250): Pfam Name: Metallophos PFAM Desc: Calcineurin
  misc_feature: Homolog of GI Number: 34365687 NR Desc: At3g05580
  misc_feature: Homolog of GI Number: 38503411 NR Desc: Serine/threonine protein phosphatase PP1 isozyme 8
  misc_feature: Homolog of GI Number: 21593410 NR Desc: TOPP8 serine/threonine protein phosphatase type one
  misc_feature: Homolog of GI Number: 667049 NR Desc: protein phosphatase PP1
  misc_feature: Homolog of GI Number: 29290586 NR Desc: serine threonine protein phosphatase
  misc_feature: Homolog of GI Number: 3153205 NR Desc: serine/threonine protein phosphatase type one
  misc_feature: Homolog of GI Number: 55296130 NR Desc: putative serine/threonine protein phosphatase PP1
  misc_feature: Homolog of GI Number: 23296753 NR Desc: putative phosphoprotein phosphatase type 1 catalytic subunit
  misc_feature: Homolog of GI Number: 24641014 NR Desc: CG2096
  misc_feature: Homolog of GI Number: 47419837 NR Desc: putative serine/threonine protein phosphatase
MGAMEGAALDEVVRRLVEGGRGGRQVQLSEAEIRQLCVDAKRVFLSQPNLLRIQAPVKICGDIHGQFVDLLRLFDLGGYPPTSTYVFLGDYVDRGKQSLETICLLLAYKIRYPDKVFLLRGNHEDAKINRVYGFYDECKRRFNVRLWKIFSDCFNCLPIAALIDDKILCMHGGLSPELTNLDQIKDIERPAEIPDYGLLCDLLWSDPSPDGEGWGESDRGVSCTFGADKLIEFLEKNDLDLICRAHQVVEDGYEFFAQRRLVTIFSAPNYCGEFDNVGALLSIDEDLMCSFQILKPNETGTSRVKRQIPNKPATGGSA

SEQ ID NO: 7193 - DNA, 593 bp, Triticum aestivum
  misc_feature: Ceres CLONE ID no. 1321939
  misc_feature: Ceres CDNA ID no. 40351751
  CDS (97)..(342): REFERENCED BY SEQ ID NO: 7194
aaacacggtcgcctggatcagaagccatagcttgtttcacctaaagagagaaaaaaaggctttgctccatcaacctacctacccccacagaagcaaatggagttcaagcccaaggcgaccgtgtgcgcggtgatgctggtgctgctcctgctttcctcctacagcggcggcggtggcatcggcgtggcggaggcgcgcatttgcacggggaagagccagcaccactcgttcccgtgcgtctcggacaagagctgcaccaagacgtgcctcagcgagcacggcgcaaaatggacggccggctactgcaaaatcaggcgctgcacctgccagagggagtgctagggcagacgctccgcgcgcgagctcccccacccccgccccgtccatggcgccgtctgtcaaacgaagccacctatgtatcttaagtcttaactaccatgtacccactcgccgcctctgtcaggagatgtaataaaacgtggcgcggcgacccgccggcgcgtcaccgttgtacgtagcatgatgcatgccacgcgttgcttttggtaacaaaataaattgatttatccgtggaaataaaaaaaaaaaaaaaa

SEQ ID NO: 7194 - protein, 81 aa, Triticum aestivum
  misc_feature: Ceres CLONE ID no. 1321939
  misc_feature: Ceres CDNA ID no. 40351751
  misc_feature (34)..(81): Pfam Name: Gamma PFAM Desc: Gamma
MEFKPKATVCAVMLVLLLLSSYSGGGGIGVAEARICTGKSQHHSFPCVSDKSCTKTCLSEHGAKWTAGYCKIRRCTCQREC

SEQ ID NO: 7195 - DNA, 1040 bp, Triticum aestivum
  misc_feature: Ceres CLONE ID no. 1322025
  misc_feature: Ceres CDNA ID no. 40351752
  CDS (64)..(849): REFERENCED BY SEQ ID NO: 7196
ctagcccagctgcccacccattcccctcgccgccgccgccactccgccgctgccgccgccgagatgggtcgcgtgatccgcgctcagcgtaagggtgcgggctccgtcttcaagtcccacacccaccaccgcaagggccccgcccgcttcaggtcgctcgacttcggcgagcgcaacgggtacctcaagggcgtcgtcaccgatgtcatccacgacccggggcgtggtgcgccgctggccaaggtgaccttccgccacccgttcaggtacaagcaccagaaggagctcttcgtcgccgccgagggtatgtacaccggccagttcgtctactgcggacgccgcgccaccctctccgttggtaacgtcctcccgctccgctccgtgcctgagggaggcgtcatctgcaacgtcgagcaccacgtcggcgaccgtggtgtcttcgccagggcctccggtgactacgccatcgtcatcagccacaaccctgacaacggcacctcaaggatcaagctcccctctggtgccaagaagattgtcccaagcagctgccgtgccatgattggtcaggttgctggtggtggcaggactgagaagccaatgctcaaggctggtaacgcctaccacaagtaccgcgtgaagaggaactcctggcctaaggtgcgtggtgtggccatgaaccctgtggagcatccccacggaggaggtaaccaccagcatattggtcacgcttccactgtccgccgtgatgcaccacctggccagaaggttggtctcatcgctgccaggaggactggtcgtctcagaggccaggctgccgcctctgctgccaaggccgacaaggccacttagagctatcgttgctgtttatctatgtttgctgcctctagattacccgtcaaggacatgtattgcaatatggatgtcgtttttgctcggtactttggtaacgtggtgatatttgttatcagttttcgctgtcgtggtctggattcgtcggtccacataaagaagattgtgcttggacaaaaaaaaaaaaaaaa

SEQ ID NO: 7196 - protein, 261 aa, Triticum aestivum
  misc_feature: Ceres CLONE ID no. 1322025
  misc_feature: Ceres CDNA ID no. 40351752
  misc_feature (11)..(90): Pfam Name: Ribosomal_L2 PFAM Desc: Ribosomal Proteins L2
  misc_feature (96)..(231): Pfam Name: Ribosomal_L2_C PFAM Desc: Ribosomal Proteins L2
MGRVIRAQRKGAGSVFKSHTHHRKGPARFRSLDFGERNGYLKGVVTDVIHDPGRGAPLAKVTFRHPFRYKHQKELFVAAEGMYTGQFVYCGRRATLSVGNVLPLRSVPEGGVICNVEHHVGDRGVFARASGDYAIVISHNPDNGTSRIKLPSGAKKIVPSSCRAMIGQVAGGGRTEKPMLKAGNAYHKYRVKRNSWPKVRGVAMNPVEHPHGGGNHQHIGHASTVRRDAPPGQKVGLIAARRTGRLRGQAAASAAKADKAT

SEQ ID NO: 7197 - DNA, 935 bp, Triticum aestivum
  misc_feature: Ceres CLONE ID no. 1322163
  misc_feature: Ceres CDNA ID no. 36705255
  CDS (90)..(728): REFERENCED BY SEQ ID NO: 7198
acatcccatcccatccgcagcggctttacctaccgagaagaagagagaaaaaaggttcgagtgcgttccagagtgaggagtgagaagagatggctccggtgaagctgtacggcgcgaccctgtcgtggaacgtcaccaggtgcgtggcggcgctggaggaggccggcgtcgagtacgagatcgtacccatcaacttcggcaccggcgagcacaagagccccgaccacctcgccaggaaccccttcggccaggtgccagctttgcaggatggtgacttatacgtcttcgaatcacgtgctatttgcaagtacgcgtgccgcaagaacaagccagagctgttgaaggagggcgacatcaaggagtcagcaatggtggatgtgtggctcgaggtggaggcccatcagtacactgccgctctgagccccattctcttcgagtgccttatccatccaatgcttgggggagccactgaccagaaggtcatcgacgacaaccttgttaagatcaagaacgtgctggcggtgtacgaggcgcacctgagcaagtccaagtacctggctggagacttcctcagtcttgcggaccttaaccatgtgtctgtcaccctgtgcttggcggctacaccctatgcgtctctgttcgacgcgtacccgcatgtgaaggcctggtggactgacctgctggcgaggccgtccgtccagaaggtcgcagcgctgatgaagccatgatcttaattgctggtgctcgttcgtcgcgaaataagccgaggtgtgtgccccccgatgtgtgcctgtacgagtgtgtgttcttgtgatgtctcctcgtgttgaatgttcaggcttgtgcttgcgatcctgtctcatcttttactgaaatgagcgttcctatgctctggtttaataataaattgtgcctagataaaaaaaaaaaaaaaa

SEQ ID NO: 7198 - protein, 212 aa, Triticum aestivum
  misc_feature: Ceres CLONE ID no. 1322163
  misc_feature: Ceres CDNA ID no. 36705255
  misc_feature (4)..(77): Pfam Name: GST_N PFAM Desc: Glutathione S
  misc_feature (93)..(201): Pfam Name: GST_C PFAM Desc: Glutathione S
  misc_feature: Homolog of GI Number: 23504749 NR Desc: glutathione transferase F1
  misc_feature: Homolog of GI Number: 5923877 NR Desc: glutathione S
  misc_feature: Homolog of GI Number: 21212950 NR Desc: glutathione
  misc_feature: Homolog of GI Number: 44894209 NR Desc: glutathione s
  misc_feature: Homolog of GI Number: 554565 NR Desc: glutathione S
  misc_feature: Homolog of GI Number: 168491 NR Desc: glutathione S
  misc_feature: Homolog of GI Number: 3891708 NR Desc: Chain D
  misc_feature: Homolog of GI Number: 56412207 NR Desc: glutathione S
  misc_feature: Homolog of GI Number: 66615 NR Desc: glutathione transferase
  misc_feature: Homolog of GI Number: 21790 NR Desc: glutathione transferase
MAPVKLYGATLSWNVTRCVAALEEAGVEYEIVPINFGTGEHKSPDHLARNPFGQVPALQDGDLYVFESRAICKYACRKNKPELLKEGDIKESAMVDVWLEVEAHQYTAALSPILFECLIHPMLGGATDQKVIDDNLVKIKNVLAVYEAHLSKSKYLAGDFLSLADLNHVSVTLCLAATPYASLFDAYPHVKAWWTDLLARPSVQKVAALMKP

SEQ ID NO: 7199 - DNA, 588 bp, Triticum aestivum
  misc_feature: Ceres CLONE ID no. 1322169
  misc_feature: Ceres CDNA ID no. 36705256
  CDS (69)..(407): REFERENCED BY SEQ ID NO: 7200
tccatttgcgccgccgcctcccccgaagccatccgcacccccttccccacgctcgctcgcccgacgcgatggctcccaccaagaaggcgaagaagagcggggagaacatcaacaacaagctgcagctggtgatgaagagcggcaagtacacgctcggctacaagaccgtcctcaagacgctgcgcagctccaaggggaagctgatcatcctcgcgaacaactgccctccccttaggaagtcagagattgagtactacgctatgttggcgaaaattagcgtgcaccacttccacggaaacaatgttgatcttggaactgcctgcggcaagtactaccgggtgtgctgcctcagcatccttgaccctggtgactcggacatcatcagcaccaccaccaccacccagtgaagagaagagagctttctacctattttatttagtcgagttgtagggtcctgttgtgctcttggaaccactcttgttatcttcggtttgtgtacctttttgcgacgctgagttggagctgtcatacagataatacttcatatggttgttctgctggacattcatgtgaaaaaaaaaaaaaaaa

SEQ ID NO: 7200 - protein, 112 aa, Triticum aestivum; identical to SEQ ID NO: 2948
  misc_feature: Ceres CLONE ID no. 1322169
  misc_feature: Ceres CDNA ID no. 36705256
  misc_feature (12)..(106): Pfam Name: Ribosomal_L7Ae PFAM Desc: Ribosomal protein L7Ae/L30e/S12e/Gadd45 family
  misc_feature: Homolog of GI Number: 57471710 NR Desc: ribosomal protein L30
  misc_feature: Homolog of GI Number: 50511371 NR Desc: putative 60S ribosomal protein L30
  misc_feature: Homolog of GI Number: 71042078 NR Desc: Chain C
  misc_feature: Homolog of GI Number: 2668750 NR Desc: ribosomal protein L30
  misc_feature: Homolog of GI Number: 55297497 NR Desc: putative ribosomal protein L30
  misc_feature: Homolog of GI Number: 2879811 NR Desc: ribosomal protein L30
  misc_feature: Homolog of GI Number: 34909198 NR Desc: putative 60S ribosomal protein L30
  misc_feature: Homolog of GI Number: 6984132 NR Desc: 60S ribosomal protein L30
  misc_feature: Homolog of GI Number: 21593857 NR Desc: 60S ribosomal protein
  misc_feature: Homolog of GI Number: 49903584 NR Desc: MGC89963 protein

SEQ ID NO: 7201 - DNA, 1040 bp, Triticum aestivum
  misc_feature: Ceres CLONE ID no. 1322176
  misc_feature: Ceres CDNA ID no. 40351753
  CDS (104)..(778): REFERENCED BY SEQ ID NO: 7202
actcatccaccacagcttagcagcagcagcaaccagtgccttagacactctccatcaacaaactctagctgatcactcctagctaagctttgcatagcaagcaatggggtactccaaaaccctagcggctggcctgttggccatgctgctcctagctccagccgtcctggctaccgaccctgaccttcttcaggacttctgcgtcgccgacctcgacggcaaggcagtctcggtgaacgggcatccgtgcaagcccatgtcggaggccggcgaggacttcctcttctcgtccaagctagccaaggctggcaacacgtcgaccccgaacggctcggccgtgacggagctcgacgtggccgagtggcccggtacgaacacgctaggcgtgtcgatgaaccgcgtggacttcgcaccggggggcaccaacccgccgcacatccacccccgtgccaccgagatcggcatcgtgatgaaaggtgagcttctcgttggaatccttggcagccttgactccgggaacaagctatactccagggtggtgcgcgctggcgagacgttcctcatcccacggggcctcatgcacttccagttcaacgtcggtaagaccgaggcctccatggtcgtctccttcaacagccagaaccccggcatcgtctttgtgcccctcacgctgttcggctccaacccacccatcccaacgccagtgctcaccaaggcactccgggtggaggccggggtcgtggaacttctcaagtccaagttcgccgctgggttttaatttcctgggagcctgccctgaaatgatcaatatataattcaatatatgcatgccagcaatacttaataattctcatcagaagacatgtcttcaagcttcgtgttaatctcgcatgcagttaattataataagatagaataagttagcctcatggtttagccttcagatccaatatggggaattgtatgtactactttttattgtcgtctttgttcttttcattgaacagaatatataattagcattttcgtaaaaaaaaaaa

SEQ ID NO: 7202 - protein, 224 aa, Triticum aestivum
  misc_feature: Ceres CLONE ID no. 1322176
  misc_feature: Ceres CDNA ID no. 40351753
  misc_feature (98)..(176): Pfam Name: Cupin_2 PFAM Desc: Cupin domain
MGYSKTLAAGLLAMLLLAPAVLATDPDLLQDFCVADLDGKAVSVNGHPCKPMSEAGEDFLFSSKLAKAGNTSTPNGSAVTELDVAEWPGTNTLGVSMNRVDFAPGGTNPPHIHPRATEIGIVMKGELLVGILGSLDSGNKLYSRVVRAGETFLIPRGLMHFQFNVGKTEASMVVSFNSQNPGIVFVPLTLFGSNPPIPTPVLTKALRVEAGVVELLKSKFAAGF

SEQ ID NO: 7203 - DNA, 761 bp, Triticum aestivum
  misc_feature: Ceres CLONE ID no. 1322188
  misc_feature: Ceres CDNA ID no. 25446539
  CDS (79)..(558): REFERENCED BY SEQ ID NO: 7204
aacccaaaccagtgccagcctctctcttcttcctcgactcccgatttcctagcaccaacaggtagcagctagctagtcatggcgtcctccaagtcccttgccctcctgctactcgtggctctgtcggcgacggccatgtccgccgccggtcaaggctgcgacggccacaaggtgacggtgcagaacctgtgtggccacgacctgaacctgggcatcaacgcggtctcgaacagcaagatgctcttccccaacgggtggctgctccccaacgggaggcacgagtcgttcgacgtctgcgcgtggtcggggagcgtgtcggcgcagggcgccgccgtggccaagttccacatcggccatgagggcggggcgtactacgaggtgagcacggaccaggcgaacatgcccatccgcgtctccgtcactccgcacggcaacccgctgcaggggcactgccccactgccggatgcaacagcggcaaccactgcttcgagcactccgtccccggcggcaattgccatggcgtctccgagatcaagatcatctactacaacccatagaccgatcgtccgcctacgtagtacgtagctgctgcacctactagtgttgaataatgctgcagctaagctcgatcgtcagtggcgttccaccgacgtggttgtaccgtcgtcagtcgtgcagtgtcggatttgcagtttaactactatattttgtggtacgtactaaaatgtatacatgatcggagggaaaaaaaaaaaaaaaa

SEQ ID NO: 7204 - protein, 159 aa, Triticum aestivum
  misc_feature: Ceres CLONE ID no. 1322188
  misc_feature: Ceres CDNA ID no. 25446539
  misc_feature: Homolog of GI Number: 56283929 NR Desc: CG3047
MASSKSLALLLLVALSATAMSAAGQGCDGHKVTVQNLCGHDLNLGINAVSNSKMLFPNGWLLPNGRHESFDVCAWSGSVSAQGAAVAKFHIGHEGGAYYEVSTDQANMPIRVSVTPHGNPLQGHCPTAGCNSGNHCFEHSVPGGNCHGVSEIKIIYYNP

SEQ ID NO: 7205 - DNA, 1389 bp, Triticum aestivum
  misc_feature: Ceres CLONE ID no. 1322379
  misc_feature: Ceres CDNA ID no. 24766092
  CDS (166)..(1140): REFERENCED BY SEQ ID NO: 7206
aaaatcgagaaccctaaagccgccgcccacacatccccaaggaataaaacctcaaggccgcggctgacatccctccccagcttacacctagccgccgccgccgccgacgaaatccacccaagccgccgagctcgtctcgccgtcgtcgcgctctaggcttttgggatggaggccgagacggcggcgaagagggcgcgggagaacgagggcgctgcggcggcggacggagccggggagcaggcgggggtctccgccgtcatccccggatggttctccgagatcagccccatgtggcccggcgaggcgcactcgctcaaggtggagaaggtcctgttccaaggcaagtcggactaccaagacgtgctggttttccagtcctccacctacgggaaggtgctcgtcctggatggggtgatccaggtgaccgagagggatgagtgcgcctaccaggagatgatcacccacctccctctctgctcaatcaaagaccccaagaaggtcctggtcatcgggggcggagacggcggcgttctgcgcgaggtctcgcggcactcctcggtggagcagatcgacatctgcgagatcgacaagatggtggtcgatgtgtcgaagcagttcttccctcacctggccctcgggttcgaggaccctcgcgtgtccctgcacatcggcgacggcgtcgccttcctgaagaatgctccagagggcacctatgatgcagtgatcgtcgattcctccgacccagtaggccctgcccaggagctgttcgagaagccgttcttcgagtccgtctccagggctctgcgtccgggcggggtcgtctgcacccaggcggagagcatatggctgcacatgcacatcatagaggacattgtcaccaactgtcgccaggttttcaaaggctcggtgaactacgcatggactacggtgcccacatacccaagcggagtgataggtttcatgctctgctccacggagggacctagtgttgatttccagcatcccgtcttcagcatcgaggaggacgaatactccacaaaatcaaaggggccgctcaagttctacaattccgagttccacaccgcatcgttttgtttgccatcatttgcgaggagggtcattgaggccaaggctaactagattcttatgaagatggtcactgaaaccaaggccaactagaagagctggtttggtttcaatttcaacactgggagaaatctgtcttagcgtagacagaggaaaagcccccttttttattaacttgcaataagcccacatggaaattattggtacctgtgattctgtctgctgtatgtctcagcttgtatttcctggctacctggtggtatgagaaccttctgaatttagtctttaaaaaaaaaaaaaaaa

SEQ ID NO: 7206 - protein, 324 aa, Triticum aestivum
  misc_feature: Ceres CLONE ID no. 1322379
  misc_feature: Ceres CDNA ID no. 24766092
  misc_feature (34)..(279): Pfam Name: Spermine_synth PFAM Desc: Spermine/spermidine synthase
  misc_feature: Homolog of GI Number: 51978966 NR Desc: PREDICTED P0492E07.108 gene product
  misc_feature: Homolog of GI Number: 6094335 NR Desc: Spermidine synthase
  misc_feature: Homolog of GI Number: 6094330 NR Desc: Spermidine synthase 2
  misc_feature: Homolog of GI Number: 1561577 NR Desc: spermidine synthase 1
  misc_feature: Homolog of GI Number: 34902650 NR Desc: spermidine synthase 1
  misc_feature: Homolog of GI Number: 4104972 NR Desc: spermidine synthase 1
  misc_feature: Homolog of GI Number: 49425361 NR Desc: spermidine synthase
  misc_feature: Homolog of GI Number: 4138109 NR Desc: spermidine synthase
  misc_feature: Homolog of GI Number: 15150055 NR Desc: spermidine synthase
  misc_feature: Homolog of GI Number: 20260024 NR Desc: strong similarity to spermidine synthase
  misc_feature: Useful for modifying seed structure and content
MEAETAAKRARENEGAAAADGAGEQAGVSAVIPGWFSEISPMWPGEAHSLKVEKVLFQGKSDYQDVLVFQSSTYGKVLVLDGVIQVTERDECAYQEMITHLPLCSIKDPKKVLVIGGGDGGVLREVSRHSSVEQIDICEIDKMVVDVSKQFFPHLALGFEDPRVSLHIGDGVAFLKNAPEGTYDAVIVDSSDPVGPAQELFEKPFFESVSRALRPGGVVCTQAESIWLHMHIIEDIVTNCRQVFKGSVNYAWTTVPTYPSGVIGFMLCSTEGPSVDFQHPVFSIEEDEYSTKSKGPLKFYNSEFHTASFCLPSFARRVIEAKAN

SEQ ID NO: 7207 - DNA, 1139 bp, Triticum aestivum
  misc_feature: Ceres CLONE ID no. 1322445
  misc_feature: Ceres CDNA ID no. 25891846
  CDS (142)..(843): REFERENCED BY SEQ ID NO: 7208
gtcctgtactagtactcctctgtcccaatcgccgtgatccagctagccagctttgggcgattcgaccgaggccgccgccccgccgccgccgccgccgccgccggagacgatcccctgcagtcagttagttaagatacaaaaatggcctcactggacaccgttagaggggatcttggcctggttgttttgtacctaagcaaggctgaggcaagagataagatctgcagggctatacaatatggatccaagttcttgagcaacggacagccaggacctgcacagaatgtcgacaaatcaactagtctagctcggaaagttttccgcctgtttaagtttgttaatgatctccaagctctgattagtccccctgccaaaggaactccacttccactgatcttacttggaaagtcgaagaacgcgatgctgtcaactttcctctttctggaccaaattgtttgggctgggagaacaggagtatacaagaacaaggagcgagcagagttccttggcaggatagcattttattgctttctcggatctaatacctgtactaccatcatcgagctagcggagcttcagcggctttccaaatcgatgaagaagttagagaaggacctcaagcaccaagagctgcacaagaacgagcagtatcggatgaagctgcagaaatccaacgagaggctgctcgccctcatcaaatcgagcctcgacatagttgttgcggtggggctcctgcaacttgccccgaaaaaggtcactcctcgcgtcacaggggcctttgggttcgctagctcactcatcgcctgttaccagttgcttccagccccagccaaatccaagtgatctgcctgcccacctcgggccaggcagctggtgcatcgattgatgaaacggcggtcgctgttgctgatacttgataagaaataaatctggaccaaattgtccgtcctgtaggatataaccgaggattattgttgtgcatgctggcattgcccagggccatctcatagcctggttgatctgccttgccttagacttgatcatgtagcacgcttgtatttggatggtccggtgtgccactatcatactacaactgttgcaaaataattagaaatttcataccaaaaaaaaaaaaaaaa

SEQ ID NO: 7208 - protein, 233 aa, Triticum aestivum; identical to SEQ ID NO: 4060
  misc_feature: Ceres CLONE ID no. 1322445
  misc_feature: Ceres CDNA ID no. 25891846
  misc_feature (11)..(226): Pfam Name: PEX11 PFAM Desc: Peroxisomal biogenesis factor 11
  misc_feature: Homolog of GI Number: 55775296 NR Desc: peroxisomal biogenesis factor 11 protein
  misc_feature: Homolog of GI Number: 56368447 NR Desc: putative peroxisomal membrane protein PEX11
  misc_feature: Homolog of GI Number: 56368449 NR Desc: peroxisomal membrane protein PEX11
  misc_feature: Useful for increasing chlorophyll and photosynthetic capacity
  misc_feature: Useful for making ornamental plants with modified leaves
  misc_feature: Useful for sterility

SEQ ID NO: 7209 - DNA, 859 bp, Triticum aestivum
  misc_feature: Ceres CLONE ID no. 1322454
  misc_feature: Ceres CDNA ID no. 25445829
  CDS (59)..(673): REFERENCED BY SEQ ID NO: 7210
ctaagtcaccacactccgtttcccgccgcctccgccctctgccgccgcagccgcagccatgggcgcgtacaagttcgtgtcggagctatggaggaggaagcagtccgacgtgatgaggttcgtgcagcgcgtgcgttgctgggagtacaggcagcagcccgccatcgtccgcatcaccaggcccacccgccccgacagggcacgccgtctcggcttcaaggccaagcaggggtatgtggtctaccgtatccgtgtgagacgtggtggcaggaagcgcccagtgcccaagggtattgtttatggcaagcctaagcaccagggtattacccaactcaagttccagaggaacaagaggtctgttgctgaggaaagagctgggcgcaggcttggtggtcttcgtgtcctcaactcctactgggtgaatgaggactccacctacaagtactttgaggtcatccttgttgacgttgctcacagcgctgtccgcaacgatccaaggatcaactggctctgcaagcctgtgcacaagcaccgtgagctgcgtggtctcacctctgcgggaaagaaattccgtggtctgcgtggcaagggtcaccgccaccacaagaacaggccctcaaggagagccacctggaagaggaaccagaccgtctccctccgccgctaccgttaagcttatgtgctgttatgttctgtggaacctgccctatgcttaccttgatagtatctgtttgcaccgtcaaattttgctaccttcgttctgtggctgaacctccaggcatgtctgttgaactatttgctatgtgcctgtgttacctggaattcgaatgattgaagtagtccaaaaaaaaaaaaaaaa

SEQ ID NO: 7210 - protein, 204 aa, Triticum aestivum
  misc_feature: Ceres CLONE ID no. 1322454
  misc_feature: Ceres CDNA ID no. 25445829
  misc_feature (2)..(193): Pfam Name: Ribosomal_L15e PFAM Desc: Ribosomal L15
  misc_feature: Homolog of GI Number: 14585879 NR Desc: ribosomal protein L15
  misc_feature: Homolog of GI Number: 48596903 NR Desc: ribosomal protein
  misc_feature: Homolog of GI Number: 34896990 NR Desc: ribosomal protein L15
  misc_feature: Homolog of GI Number: 21689875 NR Desc: putative 60S ribosomal protein L15
  misc_feature: Homolog of GI Number: 23505795 NR Desc: At4g16720/dl4385c
  misc_feature: Homolog of GI Number: 50878349 NR Desc: putative 60s ribosomal protein L15
  misc_feature: Homolog of GI Number: 3608479 NR Desc: ribosomal protein L15
  misc_feature: Homolog of GI Number: 7268491 NR Desc: ribosomal protein
  misc_feature: Homolog of GI Number: 2982318 NR Desc: probable 60S ribosomal protein L15
  misc_feature: Homolog of GI Number: 2982249 NR Desc: probable 60S ribosomal protein L15
  misc_feature: Useful for decreasing plant size
  misc_feature: Useful for making plants with increased biomass
  misc_feature: Useful for making shorter plants
  misc_feature: Useful for sterility
  misc_feature: Useful for sterility
MGAYKFVSELWRRKQSDVMRFVQRVRCWEYRQQPAIVRITRPTRPDRARRLGFKAKQGYVVYRIRVRRGGRKRPVPKGIVYGKPKHQGITQLKFQRNKRSVAEERAGRRLGGLRVLNSYWVNEDSTYKYFEVILVDVAHSAVRNDPRINWLCKPVHKHRELRGLTSAGKKFRGLRGKGHRHHKNRPSRRATWKRNQTVSLRRYR

SEQ ID NO: 7211 - DNA, 1127 bp, Triticum aestivum
  misc_feature: Ceres CLONE ID no. 1322549
  misc_feature: Ceres CDNA ID no. 24766390
  CDS (316)..(813): REFERENCED BY SEQ ID NO: 7212
aaatgtccccgggcggcccctcccttcccactccttccttaaacccccataagccttgttcctttcccttctctctagctactcttgcagtcccgctcctcttctccaggcctctccggctccaaacacagacggcgaggagcgccggagctagctgccgtcgcggcgcgccagtgccagtggagtcgagtatcgaagctggagaagtggagatagagcttccgccccctctcggcgttgttgatcaaactgcctctgcagcaggaaaaaaggggcgaacgtacgcatagccagcagcagtagcgggagaggaagatgatgatgactcaagtggccaatcacagcaagaggaaccacaccgacagctacttcagcgggaagcagcagcagcaggccgtcgccaccaccgccaccagcagcggctcggaggagttcgcgggcatggggtccaagaagccgaggaacgccagccccaggggcggcggccccatttctcccagggagaagaaagacaaggtcggcgagagagtggcggcgctgcagcagctcgtgtcgccatttgggaagacggacacagcttctgttcttcaggaggcctcgggctacatcaagttcttgcaccagcagctcgaggttcttagctccccgtacatgcgccctcctccgtcgcccggcgccgagcctgaggatcccgaccactacagcctgcggaaccgcggcctgtgcctggtgccggtggagcagacgctgcagctgacccagagcaacggggccgacctctgggcgccggcgaacaccaccaggcgctgctgaagcgaagcccgaggctggcctcgacggcggcgatggccgcactgcgtggcaggggtagaattccggtacaagcgcgcgcatggctgacccaattcggtcaatctctaacacaatcgtttcgtttcgtttggtttcgtttctgtgaacatcctcagcagaccctgtgctggcgccggtagtatgtaatgtgtaatcgtcgtgtatagcgagacgacgcaccgccgaccgatcggtcgatcggtccccgtggtcgttgcgtgggtgactgtggttaacatggtagcgtcctgttgctgtcaaaaaaaaaaaaaaaa

SEQ ID NO: 7212 - protein, 165 aa, Triticum aestivum
  misc_feature: Ceres CLONE ID no. 1322549
  misc_feature: Ceres CDNA ID no. 24766390
  misc_feature: Homolog of GI Number: 32562996 NR Desc: bHLH transcription factor
  misc_feature: Homolog of GI Number: 21593443 NR Desc: ER33 protein
  misc_feature: Homolog of GI Number: 5669656 NR Desc: ER33 protein
  misc_feature: Homolog of GI Number: 32562998 NR Desc: bHLH transcription factor
  misc_feature: Homolog of GI Number: 50918903 NR Desc: putative ethylene
  misc_feature: Homolog of GI Number: 33111977 NR Desc: putative bHLH133 transcription factor
  misc_feature: Homolog of GI Number: 42562634 NR Desc: ethylene
  misc_feature: Homolog of GI Number: 25403382 NR Desc: protein F17F8.3
  misc_feature: Homolog of GI Number: 50937043 NR Desc: bHLH transcription factor
MMMTQVANHSKRNHTDSYFSGKQQQQAVATTATSSGSEEFAGMGSKKPRNASPRGGGPISPREKKDKVGERVAALQQLVSPFGKTDTASVLQEASGYIKFLHQQLEVLSSPYMRPPPSPGAEPEDPDHYSLRNRGLCLVPVEQTLQLTQSNGADLWAPANTTRRC

SEQ ID NO: 7213 - DNA, 1419 bp, Triticum aestivum
  misc_feature: Ceres CLONE ID no. 1322633
  misc_feature: Ceres CDNA ID no. 40351754
  CDS (82)..(1146): REFERENCED BY SEQ ID NO: 7214
cctcatcccctgcttctcgagctgcacacctcatctcatatcattgccattccctccttgcgagtagcaccggcagcagcaatggccagcctcgccgacctcgtcaacctcgacctcagcgactgcaccgacaagatcatcgtcgagtacctctggattggaggatccggtatcgacatcaggagcaaagcaaggacggtgaacggccccatcacggacgcgagccagctgcccaagtggaactacgacggctccagcaccggccaggctcccggagaggacagcgaagtcatcctctacccccaggccattttcaaggacccgttcaggaggggcgacaacctccttgttatgtgtgactgctacacaccacaaggtgtgccaatccccaccaacaagaggcacaatgccgccaagatcttcaacacccccaaggttgcagctgaggagacatggtatggaattgagcaggagtacactctcctccagaaggacgtgaactggcctcttggctggcccattggtggctaccctggtcctcagggaccatactactgcgccgccggcgccgacaaggcgttcgggcgtgacatcgtggacgcccactacaaggcgtgcctctacgccgggatcaacatcagcggcatcaacggggaggtcatgcccggccagtgggagttccaagtcgggccgtccgtcgggatcgccgcctcagaccagctgtgggtggcgcgctacatcctcgagaggatcacggaggttgccggggtggtgctgtccctggacccgaagccgatcccgggcgactggaacggcgccggcgcgcacaccaactacagcaccaagtcgatgcgggaggccggcgggtacggcgtgatcaagacggccatcgagaagctgggcaagcggcacgcgcagcacatcgccgcctacggcgagggcaacgagcgccgcctcacgggccaccacgagaccgccgacatcaacaccttcaagtggggcgtggcggaccgcggcgcgtccatccgcgtgggccgcgacacggagaaggacggcaagggctacttcgaggaccgcaggccggcctccaacatggacccctacgtcgtcacctccatgatcgccgagaccaccctcctcctctgagctctgagcgaccagcagccaatgcctaccacaccgccggacgacacttaggctctcgaccttctcgatcgagggtggccattgattgatttctgcaaaatgtttcgtgttttccgtttcttttgcaaggtctagcctgttttgggggcgtgtctttcactttactcgttcagataagagtaagagtcctcagtgtgctctgaaaataatgttgtttcctcattcccataaatgaaatcatggaaccttgtgatgcgaaaaaaaaaaaaaaaa

SEQ ID NO: 7214 - protein, 354 aa, Triticum aestivum
  misc_feature: Ceres CLONE ID no. 1322633
  misc_feature: Ceres CDNA ID no. 40351754
  misc_feature (103)..(353): Pfam Name: Gln PFAM Desc: Glutamine synthetase
  misc_feature (17)..(98): Pfam Name: Gln PFAM Desc: Glutamine synthetase
MASLADLVNLDLSDCTDKIIVEYLWIGGSGIDIRSKARTVNGPITDASQLPKWNYDGSSTGQAPGEDSEVILYPQAIFKDPFRRGDNLLVMCDCYTPQGVPIPTNKRHNAAKIFNTPKVAAEETWYGIEQEYTLLQKDVNWPLGWPIGGYPGPQGPYYCAAGADKAFGRDIVDAHYKACLYAGINISGINGEVMPGQWEFQVGPSVGIAASDQLWVARYILERITEVAGVVLSLDPKPIPGDWNGAGAHTNYSTKSMREAGGYGVIKTAIEKLGKRHAQHIAAYGEGNERRLTGHHETADINTFKWGVADRGASIRVGRDTEKDGKGYFEDRRPASNMDPYVVTSMIAETTLLL

SEQ ID NO: 7215 - DNA, 1290 bp, Triticum aestivum
  misc_feature: Ceres CLONE ID no. 1322689
  misc_feature: Ceres CDNA ID no. 36704257
  CDS (67)..(1143): REFERENCED BY SEQ ID NO: 7216
aaaccgcctccgtcccctgcctgccaaccccaaattccgctctcgaatctttcccgagcatcgaccatgtcggcctactgcggaaagtacaaggatgagctcatccagaacgctgcctacattggcacccctggcaagggtatcctcgctgctgatgagtccacaggcaccatcggcaagcgcttcgccagcatcaatgttgagaacgttgaggacaaccgtcgtgccctccgtgagctcctcttctgcacccctggtgccctccagtacctcagcggtgtgatcctctttgaggagactctgtaccagagcaccaagggtggcaagccctttgtcgacatcctcaaggcgggcaatgtcctccccggcatcaaggtggacaagggtaccattgagctcgctggaaccaacggtgagaccaccacccagggctttgatgaccttggcaagcgctgcgccaagtactacgaggctggtgcccgcttcgccaagtggcgtgcagtcctcaagatcggcgccaccgagccatcgcagctctccatcgaccagaacgctcagggtctggctcgctatgccatcatctgccaggagaatggtctggtgcccattgtcgagcccgagatccttgttgatggacctcatgacattgaccgctgtgcttatgtcaccgaggtcgtccttgctgcctgctacaaggccctcaacgaccagcatgtcctcctcgagggcaccctcctgaagcccaacatggtcacccctggttccgactccaagaaggtggcccctgaggtgattgctgagtacactgtccgcaccctccagaggaccgtccctgctgccgtccccgccattgtcttcctctctggtggacagagtgaggaggaggcgaccctgaacctgaacgccatgaacaagctccagaccaagaagccatggaacctgtccttctcctttgggcgtgccctccagcagagcaccctcaaggcctggtccggcaagacggagaacgaggagaaggccagggcggcgttcctggtgaggtgcaaggccaattccgaggccaccctcggcacctacaagggtgacgccaccctcgctgagggcgcctctgagagcctccacgtcaaggactacaagtactgatctatctgccttcggagctgtggcccgtttgggcgtcccgcttaccagtatcattgtttggttttctgagtcctgatatatcctcggatatcgaacatcgtttttaataatatggaacttgtgttttcatgaaaaaaaaaaaaaaaa

SEQ ID NO: 7216 - protein, 358 aa, Triticum aestivum
  misc_feature: Ceres CLONE ID no. 1322689
  misc_feature: Ceres CDNA ID no. 36704257
  misc_feature: null
  misc_feature: Useful for making plants with modulated phosphate use efficiency
  misc_feature (11)..(358): Pfam Name: Glycolytic PFAM Desc: Fructose
  misc_feature: Homolog of GI Number: 218157 NR Desc: cytoplasmic aldolase
  misc_feature: Homolog of GI Number: 10645188 NR Desc: cytosolic aldolase
  misc_feature: Homolog of GI Number: 295850 NR Desc: fructose bisphosphate aldolase
  misc_feature: Homolog of GI Number: 2213867 NR Desc: fructose
  misc_feature: Homolog of GI Number: 7436606 NR Desc: fructose
  misc_feature: Homolog of GI Number: 10800924 NR Desc: fructose
  misc_feature: Homolog of GI Number: 7340654 NR Desc: fructose
  misc_feature: Homolog of GI Number: 17104659 NR Desc: putative fructose bisphosphate aldolase
  misc_feature: Homolog of GI Number: 50878379 NR Desc: putative fructose
  misc_feature: Homolog of GI Number: 10197481 NR Desc: aldolase B
MSAYCGKYKDELIQNAAYIGTPGKGILAADESTGTIGKRFASINVENVEDNRRALRELLFCTPGALQYLSGVILFEETLYQSTKGGKPFVDILKAGNVLPGIKVDKGTIELAGTNGETTTQGFDDLGKRCAKYYEAGARFAKWRAVLKIGATEPSQLSIDQNAQGLARYAIICQENGLVPIVEPEILVDGPHDIDRCAYVTEVVLAACYKALNDQHVLLEGTLLKPNMVTPGSDSKKVAPEVIAEYTVRTLQRTVPAAVPAIVFLSGGQSEEEATLNLNAMNKLQTKKPWNLSFSFGRALQQSTLKAWSGKTENEEKARAAFLVRCKANSEATLGTYKGDATLAEGASESLHVKDYKY

SEQ ID NO: 7217 - DNA, 1303 bp, Triticum aestivum
  misc_feature: Ceres CLONE ID no. 1322708
  misc_feature: Ceres CDNA ID no. 29191533
  CDS (255)..(1025): REFERENCED BY SEQ ID NO: 7218
tcccttgactcttcttctcttcgtccttgaccgagggcgactctctgtctctctctctccgcctccgccgagggcttccgagaatccaccagcgagcagcgagacagggacccctccgccgccaccaccaccgccctcctcgccgccgcctcaccgcccccatcgccgtctcctacgtcctcctttccccgcaccggagatccggcggttctcgtgcttgcaagatatttggctttgcacgaacaagatcttacatggagccatcctcgcagcctgagcctgtggtgggtgtggccactgctgggtcacaagcatatcctcctcctgctgcctatccagctccagccatgcctgccgccattcctcccggctcgcagccagcagtgccattccccgctaatccagctcaactcagtgctcagcaccaactggtttaccaacaagcccagcaatttcatcaacaactgcagcaacagcagcagcagcaacttcgtgagttctgggctactcaaatggaagagattgagcaggcaactgacttcaagaaccacaccttaccactggcaaggataaaaaagataatgaaggctgacgaggatgtccggatgatctccgcagaagctcctgttgtctttgcaaaggcatgcgaggtgtttatcttagagttgacactcaggtcatggatgcacactgaggagaacaagcgccggaccttgcagaagaatgacattgccgctgccattaccaggactgacatctatgacttcttggtggacatcattcccagggatgacatgaaggaggaaggccttgggcttccgagggttggcttgccgccagctgctctaggggcaccggctgatgcatatcctccttattactatgtgccagcacaacaggtacccggagtaggaatgatgtatggtggtcagcagggtcatccagtggcatatgcgtggcagcagcctcaagggcaacaggccgaggaggcccctgaagagcagcagcagtctccctcaaactagccaagagattgatacaatgaagccatgacatgatcctgaacttgatgcctataaactcaggcttgtgttaatttatttccatcatcgttggccggaacagttactcatgattaggtcttagggggggttcctaatggtagcttcgatgctggtatggcaccagcggtaggaaaaaaagattgtgatttgttaggtgatttgaaactgatctagtaaacagtacctttgttttcgccctagtttctatctaatccaatattccaaaaaaaaaaaaaaaa

SEQ ID NO: 7218 - protein, 256 aa, Triticum aestivum
  misc_feature: Ceres CLONE ID no. 1322708
  misc_feature: Ceres CDNA ID no. 29191533
  misc_feature: Useful for making plants with modulated growth and phenotype characteristics
  misc_feature: The sequence is a functional homolog of  SEQ ID NO 1188 in the  10/412,699 US patent application
  misc_feature: The sequence is a functional homolog of  SEQ ID NO 1190 in the  10/412,699 US patent application
  misc_feature: The sequence is a functional homolog of  SEQ ID NO 712 in the  11/479,226 US patent application
  misc_feature: The sequence is a functional homolog of  SEQ ID NO 835 in the  10/374,780 US patent application
  misc_feature: The sequence is a functional homolog of  SEQ ID NO 837 in the  10/374,780 US patent application
  misc_feature (99)..(163): Pfam Name: CBFD_NFYB_HMF PFAM Desc: Histone
  misc_feature: Homolog of GI Number: 50905597 NR Desc: putative heme activated protein
  misc_feature: Homolog of GI Number: 52076535 NR Desc: putative CCAAT
  misc_feature: Homolog of GI Number: 46250703 NR Desc: CCAAT
  misc_feature: Homolog of GI Number: 45544869 NR Desc: CONSTANS interacting protein 2b
  misc_feature: Homolog of GI Number: 21389649 NR Desc: putative transcription factor
  misc_feature: Homolog of GI Number: 46250701 NR Desc: CCAAT
  misc_feature: Homolog of GI Number: 21554704 NR Desc: transcription factor
  misc_feature: Homolog of GI Number: 23505813 NR Desc: At1g08970/F7G19_16
  misc_feature: Homolog of GI Number: 6289057 NR Desc: heme activated protein
MEPSSQPEPVVGVATAGSQAYPPPAAYPAPAMPAAIPPGSQPAVPFPANPAQLSAQHQLVYQQAQQFHQQLQQQQQQQLREFWATQMEEIEQATDFKNHTLPLARIKKIMKADEDVRMISAEAPVVFAKACEVFILELTLRSWMHTEENKRRTLQKNDIAAAITRTDIYDFLVDIIPRDDMKEEGLGLPRVGLPPAALGAPADAYPPYYYVPAQQVPGVGMMYGGQQGHPVAYAWQQPQGQQAEEAPEEQQQSPSN

SEQ ID NO: 7219 - DNA, 744 bp, Triticum aestivum
  misc_feature: Ceres CLONE ID no. 1322774
  misc_feature: Ceres CDNA ID no. 24726798
  CDS (84)..(503): REFERENCED BY SEQ ID NO: 7220
gcgtgtccccattccgatccccctcccggcgccgcctccagcctagggtttcctcccgccgcccgtccgccccacccgccgccatggcccgccgcagcggaggaggaaggtcttcccgccctgctccacgtgctgctccagtgagaaacccaccagcgccagcccgtccagctcctccacctgctaccacccagagcagcggtggtggtatcatgagcgggattgggtccaccattgctcagggcatggctttcggtactggaagtgccatggcgcacagggctgttgatgctgtgatgggtccccgtaccattcagcatgagactgttgtcggtgaggctgctgcatctatgactccaatggacaatgctgctgatgacaagtgtggcaacccttccaaggccttccaagattgcatcaaccactacggaagcgatatcagcaagtgccagttctaccttgacatgctgaacgagtgccgccgtggaggagcaactctttaagctactatctttgcttgattggggcttaattgggcagaacctgttttcagtcatgatgatgatgatatatatctcctaaataattcattggcaatattatgaacctatgccacagcttgtgtctattacctaccctagttcgtggtctctgttgtcccgggagtatttccttgtattgatgttggaattaccttcatggcagtgggtttataaatatggagtttgaaaaaaaaaaaaaaaa

SEQ ID NO: 7220 - protein, 139 aa, Triticum aestivum
  misc_feature: Ceres CLONE ID no. 1322774
  misc_feature: Ceres CDNA ID no. 24726798
  misc_feature (94)..(135): Pfam Name: CHCH PFAM Desc: CHCH domain
  misc_feature: Homolog of GI Number: 52139112 NR Desc: MGC105647 protein
MARRSGGGRSSRPAPRAAPVRNPPAPARPAPPPATTQSSGGGIMSGIGSTIAQGMAFGTGSAMAHRAVDAVMGPRTIQHETVVGEAAASMTPMDNAADDKCGNPSKAFQDCINHYGSDISKCQFYLDMLNECRRGGATL

SEQ ID NO: 7221 - DNA, 722 bp, Triticum aestivum
  misc_feature: Ceres CLONE ID no. 1322946
  misc_feature: Ceres CDNA ID no. 40351755
  CDS (67)..(477): REFERENCED BY SEQ ID NO: 7222
aattccactcccaaatctccccagcaatcctctctccgcgcccacgaagcaagctctccactcccgatggcccgcacgaagcagacggcgaggaagtccaccggcggcaaggcgccgcgcaagcagctggccaccaaggcggcgcgcaagtccgccccggccaccggcggcgtgaagaagccccaccgcttccgccccggcaccgtcgcgctccgggagatccgcaagtaccagaagagcaccgagctgctcatccgcaagctccccttccagcgcctggtgcgggagatcgcgcaggacttcaagaccgacctccgcttccagagctccgccgtctccgcgctgcaggaggccgccgaggcctacctcgtcgggctcttcgaggacaccaacctctgcgccatccacgccaagcgcgtcaccatcatgcccaaggacatccagctcgcccgccgcatccgtggcgagagggcctaggctgcttcctagaatcctagtgtctgatctggcctcgaggtgtagagatgcgttagtttcttattagcccgtgtctgtggtagtaaggctcgttgacggttgtgttatggtgtgtgtgtgatgtatgtgatggtaccatcttgttatcatcattagtgggaagttagcaaatctgattttaaacatgcctgcttgtttgtctgatctcagtaaacgttttggtttgtctaaaaaaaaaaaaaaaa

SEQ ID NO: 7222 - protein, 136 aa, Triticum aestivum; identical to SEQ ID NO: 588
  misc_feature: Ceres CLONE ID no. 1322946
  misc_feature: Ceres CDNA ID no. 40351755
  misc_feature (58)..(134): Pfam Name: Histone PFAM Desc: Core histone H2A/H2B/H3/H4

SEQ ID NO: 7223 - DNA, 1052 bp, Triticum aestivum
  misc_feature: Ceres CLONE ID no. 1322982
  misc_feature: Ceres CDNA ID no. 25092182
  CDS (93)..(854): REFERENCED BY SEQ ID NO: 7224
acaagaagaaaagaaacgccaccaaatccaatctcgagcccccctctcccgtccgcccgtcccaacccgatccgatcccctcctccgtcgccatgggccgcaagttcttcgtcggcggcaactggaaatgcaatggaactgtcgaacaggtagagagtatcgtcaatactctgaacgctggacagatcgcctctacggatgttgtcgaggttgttgtcagcccaccctatgtcttccttcccaccgtcaaggctaagctgcgcccagagatccaagttgctgctcagaactgctgggtgaagaagggcggtgctttcaccggtgaagtcagtgctgagatgcttgtcaacctcggcgttccctgggtcattcttggacactctgaaaggaggagcttgatgggagaatcaagtgagtttgttggagagaaggttgcatatgcactcgctcagggcttgaaggtcattgcatgtgttggtgagactcttgagcagcgagaagctggatcaaccatggaagttgtcgctgaacagacaaaagcaattactggcaagatcaaggactggactaacgtggttgtcgcgtatgaaccagtgtgggccattggcaccggtaaagttgcgacaccggctcaggcgcaggaagtccatgccaatctgagggactggctcaagaccaatgtgagccctgaggttgctgcatccacacggatcatctatggaggatctgtaactggcgcaagctgcaaggagttggccgggcagcccgacgtcgatggtttcctcgttggtggagcttctttgaagcctgagttcatcgacatcatcaacgccgccaccgtgaagtctgcctaagcaagatctcgatgtgtggctcctctgggcgtggaggaagacagcaacgatgaagagaccccttttttctctcctgtgtttattatgtgtactatgctagtaattttgcggtggagcagctgctactgtgtttcctccccctgacttgagcttgcaagccaataatgataatgtttactaccaaaaaaaaaaaaaaaa

SEQ ID NO: 7224 - protein, 253 aa, Triticum aestivum
  misc_feature: Ceres CLONE ID no. 1322982
  misc_feature: Ceres CDNA ID no. 25092182
  misc_feature (5)..(245): Pfam Name: TIM PFAM Desc: Triosephosphate isomerase
  misc_feature: Homolog of GI Number: 11124572 NR Desc: triosephosphat
  misc_feature: Homolog of GI Number: 407525 NR Desc: triosephosphate isomerase
  misc_feature: Homolog of GI Number: 1785948 NR Desc: cytosolic triosephosphate isomerase
  misc_feature: Homolog of GI Number: 168647 NR Desc: triosephosphate isomerase 1
  misc_feature: Homolog of GI Number: 50900728 NR Desc: putative triose
  misc_feature: Homolog of GI Number: 602590 NR Desc: triosephosphate isomerase
  misc_feature: Homolog of GI Number: 38112662 NR Desc: triose phosphate isomerase cytosolic isoform
  misc_feature: Homolog of GI Number: 77745458 NR Desc: triose phosphate isomerase cytosolic isoform
  misc_feature: Homolog of GI Number: 553107 NR Desc: triosephosphate isomerase
  misc_feature: Homolog of GI Number: 34908172 NR Desc: putative triosephosphate isomerase
  misc_feature: Useful for making lethal plants for genetic confinement systems
  misc_feature: Useful for making plants with increased biomass and foliage
  misc_feature: Useful for sterility
MGRKFFVGGNWKCNGTVEQVESIVNTLNAGQIASTDVVEVVVSPPYVFLPTVKAKLRPEIQVAAQNCWVKKGGAFTGEVSAEMLVNLGVPWVILGHSERRSLMGESSEFVGEKVAYALAQGLKVIACVGETLEQREAGSTMEVVAEQTKAITGKIKDWTNVVVAYEPVWAIGTGKVATPAQAQEVHANLRDWLKTNVSPEVAASTRIIYGGSVTGASCKELAGQPDVDGFLVGGASLKPEFIDIINAATVKSA

SEQ ID NO: 7225 - DNA, 667 bp, Triticum aestivum
  misc_feature: Ceres CLONE ID no. 1322990
  misc_feature: Ceres CDNA ID no. 25446677
  CDS (81)..(515): REFERENCED BY SEQ ID NO: 7226
cgaaaaacaccacagcatccgcaaccccctcacatcccacaccaagccccacgctcgaaccaccaccaccaccagcacccatggcacccaaggcagcggagaagaagccggtggccacggccgagaagaccaccgcggggaagaagcccaaggcggagaagcgggcgccggcgaccaaggaggccggcggcgaggggaagacgaggggcaggaagaagggcagcaaggccaagaagggcgtggagacgtacaagatctacatcttcaaggtgctcaaacaggtgcacccggacatcggcatctcctccaaggccatgtccatcatgaactccttcatcaacgacatcttcgagaagctcgccggcgagtccgccaagctggcccgctacaacaagaagcccaccatcacgtcccgggagatccagacctccgtccgcctcgtcctccccggcgagctcgccaagcacgccgtctccgagggcaccaaggccgtcaccaagttcacctcatcctaggctggcttcgttgttgtttcatgagttgatggcggcaggcgtcgtgtacgtagtcggcagtagtacgatgttacaatctctgtaagaattgtgctgcttgtgtttctgaagaaatagtgatgttgctgtttgaatcaaaaaaaaaaaaaaaa

SEQ ID NO: 7226 - protein, 144 aa, Triticum aestivum
  misc_feature: Ceres CLONE ID no. 1322990
  misc_feature: Ceres CDNA ID no. 25446677
  misc_feature: No seed is being produced by the plant
  misc_feature: The plant flowers significantly late compared to wild-type.
  misc_feature: Useful for biocontainment applications
  misc_feature: Useful for making plants with modulated flowering time
  misc_feature (51)..(123): Pfam Name: Histone PFAM Desc: Core histone H2A/H2B/H3/H4
  misc_feature: Homolog of GI Number: 122033 NR Desc: Histone H2B.2
  misc_feature: Homolog of GI Number: 34895900 NR Desc: putative histone H2B
  misc_feature: Homolog of GI Number: 21801 NR Desc: histone H2B
  misc_feature: Homolog of GI Number: 34895838 NR Desc: putative histone H2B
  misc_feature: Homolog of GI Number: 34895896 NR Desc: putative histone H2B
  misc_feature: Homolog of GI Number: 34895888 NR Desc: putative histone H2B
  misc_feature: Homolog of GI Number: 34895832 NR Desc: putative histone H2B
  misc_feature: Homolog of GI Number: 22325 NR Desc: H2B histone
  misc_feature: Homolog of GI Number: 577825 NR Desc: H2B histone
  misc_feature: Homolog of GI Number: 34895904 NR Desc: putative histone H2B
MAPKAAEKKPVATAEKTTAGKKPKAEKRAPATKEAGGEGKTRGRKKGSKAKKGVETYKIYIFKVLKQVHPDIGISSKAMSIMNSFINDIFEKLAGESAKLARYNKKPTITSREIQTSVRLVLPGELAKHAVSEGTKAVTKFTSS

SEQ ID NO: 7227 - DNA, 1145 bp, Triticum aestivum
  misc_feature: Ceres CLONE ID no. 1323009
  misc_feature: Ceres CDNA ID no. 25446816
  CDS (45)..(1025): REFERENCED BY SEQ ID NO: 7228
tcaagtaggagctagctccagttggtttgcttgcttgattggcgatgaacggtgcggcgctagacaacgtgatccggcggctgctggaggtgcggcgggggcggccggggaagcagcaagtgcagcaggtgcagctgggcgagggggagatccggcagctctgcggcgccgccaaggacgtcttcatgcgccagcccaacctgctccagctcgacgcccccatcaagatcgccggtgacatccacgggcagtacacggatctcatccgactcttcgagctgggcggcttcccgccgcagcacaagtacctgttcctgggcgactacgtggaccgcggcaagcagagcatcgagaccatctgcctgctgctcgcctacaagctccggtacccggagcacttcttcctcctccgcggcaaccacgagtgcgcctccgtcaaccgcgtctacggcttctacgacgagtgcaagcgccgctactccgtccgcctctggcgccacttctccgactgcttcaactgcatgcccgtcgccgccctcgtcgagtcgcgcatcctctgcatgcacggcggcctctccccggacctccgccacatccgcgacatcgccggcctccccaggccagtcgacgtccccgacaccggcctcctctgcgacctcctctggtccgaccccggcggcgccgcggggtggggacccaatgagaggggcgtgtcgtacacgttcggggcggacgtggtggcggccttcatggagaggcacgacctggacctcgtgtgccgggcgcaccaggtggtggaggacggctacgagttcttcgccgggaggaggatggtcaccgtcttctccgcgcccaactactgcggcgagttcgacaacgccggcgccctcatgtgcgtcgacgacgacctcacctgctcgttccagatactcaagcccgcggacaacaggcagcggcgtttcgccttcggcatgggatcatccgcatctactactagcagggggatccgatcaccgtggtgctaataattaatatgcatgctttgcttggtcaaaacggatgcatgcaataaacccatccatctttgatttcgatccttggcaattttgtataccacagttttttgtacaaaaaaaaaaaaaaaa

SEQ ID NO: 7228 - protein, 326 aa, Triticum aestivum
  misc_feature: Ceres CLONE ID no. 1323009
  misc_feature: Ceres CDNA ID no. 25446816
  misc_feature (58)..(252): Pfam Name: Metallophos PFAM Desc: Calcineurin
  misc_feature: Homolog of GI Number: 2654373 NR Desc: protein phosphatase 1
  misc_feature: Homolog of GI Number: 3176072 NR Desc: protein phosphatase 1
  misc_feature: Homolog of GI Number: 2642169 NR Desc: putative serine/threonine protein phosphatase PP1 isozyme 4
  misc_feature: Homolog of GI Number: 5917726 NR Desc: serine/threonine protein phosphatase 1
  misc_feature: Homolog of GI Number: 23296753 NR Desc: putative phosphoprotein phosphatase type 1 catalytic subunit
  misc_feature: Homolog of GI Number: 3255941 NR Desc: PP1A protein
  misc_feature: Homolog of GI Number: 55296130 NR Desc: putative serine/threonine protein phosphatase PP1
  misc_feature: Homolog of GI Number: 2654372 NR Desc: protein phosphatase 1
  misc_feature: Homolog of GI Number: 25289017 NR Desc: phosphoprotein phosphatase
  misc_feature: Homolog of GI Number: 7209508 NR Desc: type 1 protein phosphatase
MNGAALDNVIRRLLEVRRGRPGKQQVQQVQLGEGEIRQLCGAAKDVFMRQPNLLQLDAPIKIAGDIHGQYTDLIRLFELGGFPPQHKYLFLGDYVDRGKQSIETICLLLAYKLRYPEHFFLLRGNHECASVNRVYGFYDECKRRYSVRLWRHFSDCFNCMPVAALVESRILCMHGGLSPDLRHIRDIAGLPRPVDVPDTGLLCDLLWSDPGGAAGWGPNERGVSYTFGADVVAAFMERHDLDLVCRAHQVVEDGYEFFAGRRMVTVFSAPNYCGEFDNAGALMCVDDDLTCSFQILKPADNRQRRFAFGMGSSASTTSRGIRSPWC

SEQ ID NO: 7229 - DNA, 1049 bp, Triticum aestivum
  misc_feature: Ceres CLONE ID no. 1323088
  misc_feature: Ceres CDNA ID no. 25446965
  CDS (62)..(808): REFERENCED BY SEQ ID NO: 7230
cccactctctctcacaactcacaagcaagcaaggaagaaaggttctcctcaggccgccaggatgagctcctcctcctcctccaagctcttccactccgcctgcaaggccgccaggtccttcctcgcctcctcccccgcctccgcctccgccccgcgcgccgcctcctccgtcctcgcagacgggaggaacgccgcgctcgccaccctcgccaacctcggccggaactccaccctccccgccgcatacgcccaccacaccaacgccgccgcctcctcccacggctacgcatggatcgccgccatccccgccgccgtgtacatgctccaggatcaggaggtgcatgccgccgagatggaacgcaccttcatcgccatcaagcctgacggcgtccagagaggcctcatttctgagatagtgtcccgattcgagagaaaagggtacaagcttgttgccatcaagctggtggttccatccaagcagtttgccgagaagcactaccatgatctcaaggaaagacctttcttcagtggactgtgcgacttcctcagctccggtcccgtgcttgccatggtatgggaaggagagggcgttatcaagtacgggaggaagctgatcggtgccacggacccatcgaaatctgagccaggaaccatcaggggtgaccttgctgttgttgttgggagaaacatcatccacgggagcgatggcccggagacggccaaggacgagatcgcactctggttccagcccaaggagctggtctcttacaccagcaacgaggagaagtggatctacggtgtgaactaagcgctgcatcgtcttcagaagagccaaagaagctccagtccctttccgtaatcgcctctagaccatggcagagtgcaataacaccgcgacccgggcgacctttcagtcggtgtcgcccttgcccttgtcttgttctgatgcaataaggcccgaagaaatctaaagagtttgtttgtacctttgaatattatagagcgtgcaccgagcaatcgtgatgttcaaatcaaaaaaaaaaaaaaaa

SEQ ID NO: 7230 - protein, 248 aa, Triticum aestivum
  misc_feature: Ceres CLONE ID no. 1323088
  misc_feature: Ceres CDNA ID no. 25446965
  misc_feature (99)..(233): Pfam Name: NDK PFAM Desc: Nucleoside diphosphate kinase
  misc_feature: Homolog of GI Number: 55733879 NR Desc: putative nucleoside diphosphate kinase
  misc_feature: Homolog of GI Number: 19699051 NR Desc: nucleoside diphosphate kinase III
  misc_feature: Homolog of GI Number: 17065632 NR Desc: putative nucleoside diphosphate kinase 3
  misc_feature: Homolog of GI Number: 6435320 NR Desc: nucleoside diphosphate kinase
  misc_feature: Homolog of GI Number: 19744167 NR Desc: NDPK III
  misc_feature: Homolog of GI Number: 21593387 NR Desc: nucleoside diphosphate kinase 3
  misc_feature: Homolog of GI Number: 8272416 NR Desc: nucleoside diphosphate kinase 3
  misc_feature: Homolog of GI Number: 20218817 NR Desc: putative nucleoside diphosphate kinase
  misc_feature: Homolog of GI Number: 56554368 NR Desc: Chain F
  misc_feature: Homolog of GI Number: 55646597 NR Desc:  similar to Nm23 protein
MSSSSSSKLFHSACKAARSFLASSPASASAPRAASSVLADGRNAALATLANLGRNSTLPAAYAHHTNAAASSHGYAWIAAIPAAVYMLQDQEVHAAEMERTFIAIKPDGVQRGLISEIVSRFERKGYKLVAIKLVVPSKQFAEKHYHDLKERPFFSGLCDFLSSGPVLAMVWEGEGVIKYGRKLIGATDPSKSEPGTIRGDLAVVVGRNIIHGSDGPETAKDEIALWFQPKELVSYTSNEEKWIYGVN

SEQ ID NO: 7231 - DNA, 564 bp, Triticum aestivum
  misc_feature: Ceres CLONE ID no. 1323155
  misc_feature: Ceres CDNA ID no. 40351756
  CDS (3)..(227): REFERENCED BY SEQ ID NO: 7232
acgagtttgatgagggcctcaacctggtccgcaattcctccaccacttgcgatgagtggccgagccatggagcggaggcggcagggagtattgattatattggaaggccaagggattatttctgcacgaggatgtatttgggagagattttgagtggctgctactactggatgcaattgttggaattgtcagagatggtgcagatattgaaggagtctcaacattgatggttacttcctgccgagatttgtgaaatacttaagaactacaagaattttcatacagctccagtttaggcaaatggatggagtactttgcttttgcatcatatgtttttaatggcttggagttcatcctccgccacactaacgacgacccaatgccatggtggtggagaccacaacagatgtcaaggcggaggagaggtgtttacatttttttcctggcagtgagtgtttacacaatctagacatatctatgatgctggctccagccagatttggggactattaaccaaaatattgattgcaacaaaaaaaaaaaaaaataaaaaaaaaaaaaaaa

SEQ ID NO: 7232 - protein, 54 aa, Triticum aestivum
  misc_feature: Ceres CLONE ID no. 1323155
  misc_feature: Ceres CDNA ID no. 40351756
MEYFAFASYVFNGLEFILRHTNDDPMPWWWRPQQMSRRRRGVYIFFLAVSVYTI

SEQ ID NO: 7233 - DNA, 1036 bp, Triticum aestivum
  misc_feature: Ceres CLONE ID no. 1323295
  misc_feature: Ceres CDNA ID no. 25446092
  CDS (193)..(735): REFERENCED BY SEQ ID NO: 7234
aactcgccccatatcctcaccgcatagccgccgccgccgccgccctctgatcccccccttctctcgtcgacgcggcgagtctgctttgcgcccatccgaggcggaggccaacagatcaaggatacactacagcatactttgaagagttgtcctgtgccaaatcaagaaagaaggcaccttttgcctggaatcatggcaccatcagcatccactggtcagaaagtcaacctgaaggggtacaagaccctaccccatgctattcagctggtaacgatgatgtcggggacgtcttcagcttcaacattgacgattggggaccagaacaagaagttcaaggtgagccgtgctttgacgtggatggtggttatctgcataccggctactttcattgccgtcacagcaggttcggcctacaggatgtataacaaacccatctgggccgccggcttcccatcgaggctgccagttgtcttgatgttgggagcttacctggcagtggtgaacctggcgctggggtacttgaccctctacttgccacaggcacccttcgctgtgtggaaagctctggatgatgttggtctcaggttgattggccttgccgttatcttaatctctggccctgttttgttgtctgcccaggcgtggctgcacatcatctgggcttgccttcttggcgtcctcattgctgccatccttgccttctgtgtctgtcttgctcggacgtacagcaagtagcctcttgctaccatggcttagatgccgccttttaggcccgtacgtgcagtacgggcctgtcctcgtaaactagctagcggcttagatgccgccttagacccgtacgggcagtagcggcttagatgccttcttagacccgtatatggggcagtacgggtctgtctttgtgaactatactagctgtcgtttgctagtaggataataatgtcgtctcttcaaggtgaagtcactctgtaaacagtctgctgctcgtgtgttattaattattattattattgtctttttaaaaaaaaaaaaaaaa

SEQ ID NO: 7234 - protein, 180 aa, Triticum aestivum
  misc_feature: Ceres CLONE ID no. 1323295
  misc_feature: Ceres CDNA ID no. 25446092
  misc_feature: Homolog of GI Number: 34910720 NR Desc: P0690B02.24
MAPSASTGQKVNLKGYKTLPHAIQLVTMMSGTSSASTLTIGDQNKKFKVSRALTWMVVICIPATFIAVTAGSAYRMYNKPIWAAGFPSRLPVVLMLGAYLAVVNLALGYLTLYLPQAPFAVWKALDDVGLRLIGLAVILISGPVLLSAQAWLHIIWACLLGVLIAAILAFCVCLARTYSK

SEQ ID NO: 7235 - DNA, 736 bp, Triticum aestivum
  misc_feature: Ceres CLONE ID no. 1323387
  misc_feature: Ceres CDNA ID no. 35389427
  CDS (46)..(465): REFERENCED BY SEQ ID NO: 7236
gttactttctctcttggaaaaaaaacttatcccaatcccctggcgatgtggggaggctgcgcgccggaggagcacggcgagaaggtcggccagggagccggagcagcagcgctaccgtctcctctccctattgctaggagctggagttggggtagaccagcaccctccagcggctcccccgtcgttcccctcctcgacggcgtcgatgatgcggtggatgaggtggtggttgggggaggcgtcccaccgtgcccagaagctcttgtagcaaccgaagcagctgcagcccatctctggctggtgatgtccgttgaggcgcctgcaccggcccccgcccactgcctcgtcgcgccgccacaggcgccagcagggtcgccggcaacatcaacagcgccaccgccgacgcgtccgccgcggacggcgccggcccctcgtgcacccgccgcctctttcctgaattactgaagaatgaagaagaccggaaacgttattttattttccggagacatgctacgaaaaagaaggttgtgccaaatgtggccgaagagcaacatggagaactattgcgtatgccggctgtgattgaagagcaaactcaagaaccagtgtctatgccgaatgcacatttgatgcaactaagggggttttggtgttggtgttgcatgagatacaactgattttactgacataaactcatttttttgtgaaatttgttgctccaaaaaaaaaaaaaaaa

SEQ ID NO: 7236 - protein, 139 aa, Triticum aestivum
  misc_feature: Ceres CLONE ID no. 1323387
  misc_feature: Ceres CDNA ID no. 35389427
MWGGCAPEEHGEKVGQGAGAAALPSPLPIARSWSWGRPAPSSGSPVVPLLDGVDDAVDEVVVGGGVPPCPEALVATEAAAAHLWLVMSVEAPAPAPAHCLVAPPQAPAGSPATSTAPPPTRPPRTAPAPRAPAASFLNY

SEQ ID NO: 7237 - DNA, 588 bp, Triticum aestivum
  misc_feature: Ceres CLONE ID no. 1323549
  misc_feature: Ceres CDNA ID no. 29191534
  CDS (133)..(345): REFERENCED BY SEQ ID NO: 7238
attagccacttacctgctccactgtcacccgtccatcgtcttccagccgcttccttccccatccgtccccggcgtcactcaccgtgcacacacacagaaagtagtgagctcgtcgatccgggagagatcaggatgagcgaccccaagtacgcctacccctaccccgcgcaaggttactaccagggagggccataccaggggccgccggtgatggcgccgccgcagtacgccgcgccgccgccgcgcccccagcccagcttcctcgaaggctgtttggccgcgctttgctgctgctgcctgatcgacgagtgctgctgcgacccctccatcatcttcgtcggctagatcacccaaggccaagccagggcatccggcctggcatgctgtcaactgtacaaagagatgccctcatcaaggatatttaccacgttgttgccacgctatataatatatcatgatctctctcctccatatatatgaacgtattcccttattattgttatctcactagtcactacggtgttgcctgcctttgtaactcgaatccatcagtaacaaaggctttatcatctaaaaaaaaaaaaaaaa

SEQ ID NO: 7238 - protein, 70 aa, Triticum aestivum
  misc_feature: Ceres CLONE ID no. 1323549
  misc_feature: Ceres CDNA ID no. 29191534
  misc_feature: Homolog of GI Number: 50919167 NR Desc: unknow protein
  misc_feature: Homolog of GI Number: 8515092 NR Desc: adhesive/proline
  misc_feature: Homolog of GI Number: 50938779 NR Desc: adhesive/proline
  misc_feature: Homolog of GI Number: 8698728 NR Desc: Contains weak similarity to GATA
  misc_feature: Homolog of GI Number: 42565788 NR Desc: proline
MSDPKYAYPYPAQGYYQGGPYQGPPVMAPPQYAAPPPRPQPSFLEGCLAALCCCCLIDECCCDPSIIFVG

SEQ ID NO: 7239 - DNA, 1032 bp, Triticum aestivum
  misc_feature: Ceres CLONE ID no. 1323699
  misc_feature: Ceres CDNA ID no. 36707169
  CDS (76)..(855): REFERENCED BY SEQ ID NO: 7240
acccacccactccgccgagaaacagcaacagccacagccacacgcccacgcgcacacaccagatcgtcgacagcgatggcaaaggcagcggcaacgagggaggagatggtctacttggcgaagctggcggagcaggccgagcggtacgaggagatggtcgagttcatggagaaggtcgtggcggcggcggggaccgtcgagctcaccatcgaggagaggaacctgctctcagtcgcgtacaagaacgtcatcggggcgcgtcgtgcttcctggcgcatcgtgtcctccatcgagcagaaggaggaagggcgtggagcggcggggcacgccgccgcggcgcgcgggtaccgcgcacttgtcgaggccgagctctccaacatctgcgcggggatcctccgtctcctcgacgaacgcctagtccccgccgctgccgccgtcgacgccaaggtattctacctgaagatgaagggagactaccatcgctacctcgcggagttcaagtcggccgccgagcgcaaggatgccgctgactccaccctcggtgcctaccaggccgctcaggacatagccatgaaggagctgccaccgactcaccccatcaggctgggcctcgcgctcaacttctccgtgttctactatgagatcctcaactcgcctgatcgtgcgtgctcgctcgccaaacaggccttcgatgaagccatcgctgagctggattccctcggagaagattcctacaaggacagcaccctgatcatgcaacttctccgtgacaatctcactttgtggacctctgatatgcaggatgacgctggcgatgaaatgagggattcaagcaagcctgaggatgagcagtagtgaagggtcctagctactgccctctttctctcttaaccttcgggtagttatgatgcttgtacaaggaccattttcgtgtgtcctttgttgctgggtcttttatctaccctttctttcgttatattgttatacatcgccgtcctcgtgcattattttactttaaaaaaaaaaaaaaaa

SEQ ID NO: 7240 - protein, 259 aa, Triticum aestivum
  misc_feature: Ceres CLONE ID no. 1323699
  misc_feature: Ceres CDNA ID no. 36707169
  misc_feature: Useful for making plants with modulated growth and phenotype characteristics
  misc_feature: null
  misc_feature: The sequence is a functional homolog of  SEQ ID NO 2350 in the  10/374,780 US patent application
  misc_feature: The sequence is a functional homolog of  SEQ ID NO 342 in the  10/412,699 US patent application
  misc_feature: The sequence is a functional homolog of  SEQ ID NO 344 in the  10/412,699 US patent application
  misc_feature: The sequence is a functional homolog of  SEQ ID NO 782 in the  11/479,226 US patent application
  misc_feature: The sequence is a functional homolog of  SEQ ID NO 786 in the  11/479,226 US patent application
  misc_feature: The sequence is a functional homolog of  SEQ ID NO 789 in the  11/479,226 US patent application
  misc_feature: The sequence is a functional homolog of  SEQ ID NO 790 in the  10/225,066 US patent application
  misc_feature: The sequence is a functional homolog of  SEQ ID NO 797 in the  11/479,226 US patent application
  misc_feature: The sequence is a functional homolog of  SEQ ID NO 801 in the  11/479,226 US patent application
  misc_feature: The sequence is a functional homolog of  SEQ ID NO 805 in the  11/479,226 US patent application
  misc_feature: Useful for making plants with modulated drought sensitivity
  misc_feature (8)..(245): Pfam Name: 14 PFAM Desc: 14
  misc_feature: Homolog of GI Number: 9798605 NR Desc: TaWIN2
  misc_feature: Homolog of GI Number: 50946923 NR Desc: putative TaWIN2
  misc_feature: Homolog of GI Number: 695765 NR Desc: 14
  misc_feature: Homolog of GI Number: 13928452 NR Desc: 14
  misc_feature: Homolog of GI Number: 4775555 NR Desc: 14
  misc_feature: Homolog of GI Number: 20062 NR Desc: protein kinase C inhibitor homologue
  misc_feature: Homolog of GI Number: 555974 NR Desc: 14
  misc_feature: Homolog of GI Number: 4850247 NR Desc: 14
  misc_feature: Homolog of GI Number: 8099063 NR Desc: 14
  misc_feature: Homolog of GI Number: 13447104 NR Desc: GF14 omega
MAKAAATREEMVYLAKLAEQAERYEEMVEFMEKVVAAAGTVELTIEERNLLSVAYKNVIGARRASWRIVSSIEQKEEGRGAAGHAAAARGYRALVEAELSNICAGILRLLDERLVPAAAAVDAKVFYLKMKGDYHRYLAEFKSAAERKDAADSTLGAYQAAQDIAMKELPPTHPIRLGLALNFSVFYYEILNSPDRACSLAKQAFDEAIAELDSLGEDSYKDSTLIMQLLRDNLTLWTSDMQDDAGDEMRDSSKPEDEQ

SEQ ID NO: 7241 - DNA, 773 bp, Triticum aestivum
  misc_feature: Ceres CLONE ID no. 1323724
  misc_feature: Ceres CDNA ID no. 29191535
  CDS (100)..(288): REFERENCED BY SEQ ID NO: 7242
cgtatatcccaaaccaaccccagcaaaagctgtccgcgacttgcgagcagagcacacgacgcgacccgcgagccaaaccctaccgcgaacacgtcggcgatgagctcctccaacggcaacggcgggaagaagccggcgccgtccggcggccgcgggggcatccgcaccctcgccgacatcaaccgcggcccctccggattcccaggcgcaggcggcagcggcagcgactccgatgagccccaggagtactacaccggcggcgagaagaggtttctctctccctcctagcagattttgtattgccctgtcgagatttggcggcgatcgctcgtgggcatcgggatccccgcctcctgctgccatcgtctagttaggcgtagattgcagagcggcaaccgcataaatcatcggatttagattttttattttcggacggttgatctatgtcggttggattcttttgtcatgcgaactgtgcgggatacaggttaaaccttactaggttagcgctgaccaccgagtactgagaggtaggtgtagtgttcaatgctgctcagattagatcgccacgaacgattgcagattgatactttttgcaggcaaatttattcaagatcggattagtttagtttggtcatgtattggttccgctgaagtgtaggctttgctattagatttatgggtctgtccgccgcacatctagatgtgccctacttattgcatatctaagtgactcaatcatcaagcataaaaagggaaaaaaaaaaaaaaaa

SEQ ID NO: 7242 - protein, 62 aa, Triticum aestivum
  misc_feature: Ceres CLONE ID no. 1323724
  misc_feature: Ceres CDNA ID no. 29191535
  misc_feature: Homolog of GI Number: 50924870 NR Desc: OSJNBa0060P14.10
  misc_feature: Homolog of GI Number: 47027085 NR Desc: Fas
MSSSNGNGGKKPAPSGGRGGIRTLADINRGPSGFPGAGGSGSDSDEPQEYYTGGEKRFLSPS

SEQ ID NO: 7243 - DNA, 639 bp, Triticum aestivum
  misc_feature: Ceres CLONE ID no. 1323971
  misc_feature: Ceres CDNA ID no. 40351757
  CDS (111)..(416): REFERENCED BY SEQ ID NO: 7244
acagactcgagtcatcttcttcctctgctcctgctcggatcccataccctgctcctcaacccccttcgcggcgcggcgcggcgcggcacagcacagaggagtcggcggagatgtcgggagtgacggcggacgaggacaagaagcccgcgggcgacggtggaggcgcccacatcaacctcaaggtcaaggggcaggatggcaatgaggttttcttccgcatcaagagatccacacagctgaagaagctgatgaacgcttactgcgaccgtcagtctgtggatctcaactccattgctttcctttttgatggtcgtaggctccgtggtgagcagacccctgatgagcttgagatggaggaaggcgacgagatcgacgccatgcttcaccagaccggagggtgctttcctggcccttagaaggagcttgctgcagcctggctgttctatgtcgtatgctacctttagaactagagtaaaatgtaagaagtgaaagaacttgtgaggctatggttctgtgccatagcctgagggggggtctggaggtgaaacaacatcggagtactgttgatgtcgtgactgaactatcatccattgcctaatatatcatgccttgttgtgttccctaaaaaaaaaaaaaaaa

SEQ ID NO: 7244 - protein, 101 aa, Triticum aestivum
  misc_feature: Ceres CLONE ID no. 1323971
  misc_feature: Ceres CDNA ID no. 40351757
  misc_feature (19)..(94): Pfam Name: ubiquitin PFAM Desc: Ubiquitin family
MSGVTADEDKKPAGDGGGAHINLKVKGQDGNEVFFRIKRSTQLKKLMNAYCDRQSVDLNSIAFLFDGRRLRGEQTPDELEMEEGDEIDAMLHQTGGCFPGP

SEQ ID NO: 7245 - DNA, 899 bp, Triticum aestivum
  misc_feature: Ceres CLONE ID no. 1324022
  misc_feature: Ceres CDNA ID no. 25445653
  CDS (3)..(419): REFERENCED BY SEQ ID NO: 7246
atagagctcgccgcctccctccttccctccctgtctccttccccgcctctctctcgtcgtcgtcccccgcagcgccggccgaagcaaagcacggggactcaaccgctgccatgagctactacggccagcagcagccccccgtcggcgtgcctccacagcaagggtatccagggaaagaagagtacccgccggcaggctaccctccggccgggtacccaccgccggggcagggacagggctaccctccccagggatacccgccgcagcaggggggttatccgccacagcagggtgggtatccgccgcagcaaggctacccgcagcaagggtacccacagcaggggtacccgcctcagtacgcgcagcagccgccgcggcagcagcagagcagcggcccgtccttcatggagggatggtaagacaagactgagcccacctccttacttctctcagattccctcggcttggtcctagcatcgcgttagatctctgaactgaagccagattgggctcgccgtcgccggtgggtcgtcggggtcgtggtggacgttggggggtcggcgttttgtgtggcccggggtgggttgggttcgttggtgggtgacgtcggccccgcatccctccactcgtgactcgtcgttactgccgttctgatgtgtctgtcactaggagtggttgcctcagctgtcaaaaaaaaaggagtggttgcctcagcgaacctcgtagctgtctgtcacgctaggtcttctggcgcggaaagatatttgtgatttgtgaacaatataaactatatatatactcctccgtccataatgtaaacgtcttacatttacactagtgtcaaagaacgtcttacattatgagacggagggagtactttttcaaaaaaaaaaaaaaaa

SEQ ID NO: 7246 - protein, 102 aa, Triticum aestivum
  misc_feature: Ceres CLONE ID no. 1324022
  misc_feature: Ceres CDNA ID no. 25445653
  misc_feature (12)..(16): Pfam Name: XYPPX PFAM Desc: XYPPX repeat
  misc_feature: Homolog of GI Number: 113965 NR Desc: Annexin A7
  misc_feature: Homolog of GI Number: 671859 NR Desc: annexin VII
  misc_feature: Homolog of GI Number: 167666 NR Desc: annexin VII
  misc_feature: Homolog of GI Number: 60473993 NR Desc: annexin VII
  misc_feature: Homolog of GI Number: 42565788 NR Desc: proline
  misc_feature: Homolog of GI Number: 50938779 NR Desc: adhesive/proline
  misc_feature: Homolog of GI Number: 18913086 NR Desc: Igr2p
  misc_feature: Homolog of GI Number: 56471552 NR Desc: C2 domain protein
  misc_feature: Homolog of GI Number: 3337330 NR Desc: rhodopsin
MSYYGQQQPPVGVPPQQGYPGKEEYPPAGYPPAGYPPPGQGQGYPPQGYPPQQGGYPPQQGGYPPQQGYPQQGYPQQGYPPQYAQQPPRQQQSSGPSFMEGW

SEQ ID NO: 7247 - DNA, 876 bp, Triticum aestivum
  misc_feature: Ceres CLONE ID no. 1324029
  misc_feature: Ceres CDNA ID no. 25446688
  CDS (132)..(740): REFERENCED BY SEQ ID NO: 7248
atatctacccgttacctttcctccactccggctcctctcctctcctctcctcatcataaatccgcatctggaatctagccagccagacacaaccaatcccaatccgcatttggggaagcagaggacggacgatgggcacgccggtgggaatggcgactctagcggccctggcgctgctgctgtgcgtctccatggacgggtgcgccgccgctgagtacaaggtgggcggtctggacgcgtggggggtgccgccgtccagcaagccggacgtgtacgtgcggtgggccaagtccgtccccgtcaagctcggcgacgccctcttcttcctctacccgcccagccaggacagcgccgtgcaggtcaccgccaaggccttcgccgcctgccacgtctccgacccgctgctcaagctggaggacggcaactccgtcttcaacctcaccaagcccgggcgggcctacttcaccagcgccgccccgggccgctgccgcaagggccagaagctgtcggtggacgtgcctggcgccgatgggaagctgctcaagccgtcggcggacgacgaggccgcgctcaaggcgctctctgcgctgccgcctgccgctgccccgtccgaggcgctcccctcgctctcgcccggccccgacgacgacgacgactcggctgcctcctccatggccctgcaccgggccgccggatccgctctgtctctcctcgccgctctcatcctcatgtggctgtgatttctttctttctttctttcttttttgtcagatgagaaacatgaattctactctactctactccggagtattaatttatttgtttggattggattataagtataattgattgattgattaaaaaaaaaaaaaaaaa

SEQ ID NO: 7248 - protein, 202 aa, Triticum aestivum
  misc_feature: Ceres CLONE ID no. 1324029
  misc_feature: Ceres CDNA ID no. 25446688
  misc_feature (37)..(123): Pfam Name: Cu_bind_like PFAM Desc: Plastocyanin
  misc_feature: Homolog of GI Number: 46359847 NR Desc: At1g64640
  misc_feature: Homolog of GI Number: 53792667 NR Desc: NtEPc
  misc_feature: Homolog of GI Number: 50933685 NR Desc: uclacyanin 3
  misc_feature: Homolog of GI Number: 34908784 NR Desc: P0415A04.29
  misc_feature: Homolog of GI Number: 3738326 NR Desc: nodulin
  misc_feature: Homolog of GI Number: 50905419 NR Desc: phytocyanin protein
  misc_feature: Homolog of GI Number: 34146796 NR Desc: At2g25060
  misc_feature: Homolog of GI Number: 52076874 NR Desc: putative phytocyanin protein
  misc_feature: Homolog of GI Number: 3831466 NR Desc: putative uclacyanin I
MGTPVGMATLAALALLLCVSMDGCAAAEYKVGGLDAWGVPPSSKPDVYVRWAKSVPVKLGDALFFLYPPSQDSAVQVTAKAFAACHVSDPLLKLEDGNSVFNLTKPGRAYFTSAAPGRCRKGQKLSVDVPGADGKLLKPSADDEAALKALSALPPAAAPSEALPSLSPGPDDDDDSAASSMALHRAAGSALSLLAALILMWL

SEQ ID NO: 7249 - DNA, 834 bp, Triticum aestivum
  misc_feature: Ceres CLONE ID no. 1324079
  misc_feature: Ceres CDNA ID no. 25445799
  CDS (135)..(581): REFERENCED BY SEQ ID NO: 7250
aaaaatcctccgactccttctcgccccctcctcttgccccgtggtccccaaccgccgcccgccgccgccgcagaggggagaggccgccgccgcccgccgccgcccccgcgcccccgccggccgggtttgatcccatggcgtccaagaggatcctcaaggagctcaaggacctgcagaaggaccctcccacctcgtgcagcgcaggtcctgtaggtgaggacatgttccactggcaggccactatcatgggaccctcggacagcccgttcaccggtggtctatttttggtgaacattcatttcccaccggattaccccttcaagcccccgaaggtctctttccgcaccaaggtgttccacccaaacatcaacagcaacggcagcatttgccttgacattctcaaggaacagtggagcccggctttgaccatatcaaaggtcctgctgtcaatctgttcgttgctgacggacccgaaccccgatgatcctctggtgcccgagatcgctcacatgtacaagactgatcgggccaagtatgagtccacggcgcgctcctggacgcagaagtacgccatgggctagagcctggacggccagctggtgaccatggatgcgccgagccccagaaccgttatcacctaaataaccagccaaagtatcaccccaccccgtgacgaagtgaatggacttttgaggccgtcgtgcccctgttgaactcgtatgaatgtactctttgccatgtcaagtccgttgggtctgggtagtctgttctacctgacgtttcgttatccattaagttaaatctctgtccgtatcatgaaaaaaaaaaaaaaaa

SEQ ID NO: 7250 - protein, 148 aa, Triticum aestivum; identical to SEQ ID NO: 5056
  misc_feature: Ceres CLONE ID no. 1324079
  misc_feature: Ceres CDNA ID no. 25445799
  misc_feature: The plant produces a reduced number of seeds.
  misc_feature: Useful for biocontainment applications
  misc_feature (5)..(142): Pfam Name: UQ_con PFAM Desc: Ubiquitin
  misc_feature: Homolog of GI Number: 52548244 NR Desc: ubiquitin
  misc_feature: Homolog of GI Number: 50929483 NR Desc: OSJNBa0043A12.6
  misc_feature: Homolog of GI Number: 5762457 NR Desc: ubiquitin
  misc_feature: Homolog of GI Number: 22137310 NR Desc: At1g64230/F22C12_17
  misc_feature: Homolog of GI Number: 2668744 NR Desc: ubiquitin conjugating enzyme
  misc_feature: Homolog of GI Number: 464981 NR Desc: Ubiquitin
  misc_feature: Homolog of GI Number: 34909292 NR Desc: ubiquitin conjugating enzyme
  misc_feature: Homolog of GI Number: 28569271 NR Desc: ubiquitin
  misc_feature: Homolog of GI Number: 28569267 NR Desc: ubiquitin
  misc_feature: Homolog of GI Number: 11762186 NR Desc: AT4g27960

SEQ ID NO: 7251 - DNA, 794 bp, Triticum aestivum
  misc_feature: Ceres CLONE ID no. 1324397
  misc_feature: Ceres CDNA ID no. 25892812
  CDS (177)..(524): REFERENCED BY SEQ ID NO: 7252
agagagagaggaggagacagatatttcccccgaggtcaagtcgtctcgtcccgtgttgcctttctcctcctccccgcattcgccgtctgcggttcgcaccaccggacaagctcacacatcaagacaataaatagagccttgtctgtttggggccaatcaaaccaaacaacaagttcatgtctgatctcgacgtccaggttccaactgcttttgatccgtttgctgaggcaaatgctgaggactccggcgctggtgctggatcaaagaactatgtgcatgtgcgtgtccagcagcgcaacggaagaaagagtctgacaactgttcagggtctgaagaaagactacagctacaacaagattctcaaggatctcaaaaaggaattctgctgtaatggtactgtagtccaggatccagaactaggccaggtcatccaactccaaggtgatcagcgtaaaaatgttgctacttttctagttcaggctggacttgcaaagaaagagagcatcaagattcacggattttaggcaacacacaaatgctcgtgtgctgtcaccgaagcctggaagttgtcgtatacttggtattgtcacatctaagacatttgaattgctagtactcgtgtgaggcatctgtgtttgatgcacttttacatccaagacatttgaatttgcatcggtgtgttgatgcaagttgtccttcaacatggtttgtatgcgccaccagtatggcagtatggtttatccaggttattgtgcactaaataaatgtacttcaggccaaaaaaaaaaaaaaaa

SEQ ID NO: 7252 - protein, 115 aa, Triticum aestivum
  misc_feature: Ceres CLONE ID no. 1324397
  misc_feature: Ceres CDNA ID no. 25892812
  misc_feature: The plant flowers significantly earllier than wild-type.
  misc_feature: The plant is abnormally small.
  misc_feature: null
  misc_feature: Useful for making plants with modulated biomass
  misc_feature: Useful for making plants with modulated flowering time
  misc_feature (27)..(108): Pfam Name: SUI1 PFAM Desc: Translation initiation factor SUI1
  misc_feature: Homolog of GI Number: 34908850 NR Desc: putative translation initiation factor SUI1
  misc_feature: Homolog of GI Number: 53791638 NR Desc: putative translation initiation factor
  misc_feature: Homolog of GI Number: 50937977 NR Desc: translational initiation factor eIF1
  misc_feature: Homolog of GI Number: 6478142 NR Desc: putative translation initiation factor eIF
  misc_feature: Homolog of GI Number: 2668740 NR Desc: translation initiation factor
  misc_feature: Homolog of GI Number: 21070377 NR Desc: translation initiation factor
  misc_feature: Homolog of GI Number: 3334346 NR Desc: Protein translation factor SUI1 homolog
  misc_feature: Homolog of GI Number: 4585973 NR Desc: translation initiation factor
  misc_feature: Homolog of GI Number: 20218809 NR Desc: putative translation factor
  misc_feature: Homolog of GI Number: 57091083 NR Desc:  similar to Eukaryotic translation initiation factor 1
  misc_feature: Useful for accelerating flowering time
  misc_feature: Useful for increasing chlorophyll and photosynthetic capacity
MSDLDVQVPTAFDPFAEANAEDSGAGAGSKNYVHVRVQQRNGRKSLTTVQGLKKDYSYNKILKDLKKEFCCNGTVVQDPELGQVIQLQGDQRKNVATFLVQAGLAKKESIKIHGF

SEQ ID NO: 7253 - DNA, 587 bp, Triticum aestivum
  misc_feature: Ceres CLONE ID no. 1325268
  misc_feature: Ceres CDNA ID no. 29191536
  CDS (110)..(331): REFERENCED BY SEQ ID NO: 7254
acacaagcctcttcgtatcttcgagagagaaaaaaaatcatccttcgagagatttcgcgggggcgcgggttcgtgaggagctagggtttgggagggagcagcggagaagatgatcgaggtggtgctgaacgacaggctggggaagaaggtgcgggtgaagtgcaacgaggacgacaccatcggcgacctgaagaagctcgtcgcggcgcagacggggaccaggcccgagaagatccgcatccagaagtggtacaccatctacaaggaccacatcaccctcggcgactacgagatccacgacggcatgggcctcgagctctactacaactagagtctagaagtcccgctgtcttaagaaactatctggaatccaacgaaccatacaagactgctggatgtaccaatgactgccgacctgaaatcctgaatgcagccatattatcaaccggcaaatgtgatgtgatgtgacgctacttgtacactacatataacataatgtttgtgacctttgtgtgataaccgctgtattttttagttatggcaagttcgttctgcttacgatttgtactacaaaaaaaaaaaaaaaa

SEQ ID NO: 7254 - protein, 73 aa, Triticum aestivum
  misc_feature: Ceres CLONE ID no. 1325268
  misc_feature: Ceres CDNA ID no. 29191536
  misc_feature (2)..(71): Pfam Name: ubiquitin PFAM Desc: Ubiquitin family
  misc_feature: Homolog of GI Number: 77553656 NR Desc: Ubiquitin family
  misc_feature: Homolog of GI Number: 77548651 NR Desc: Ubiquitin family
  misc_feature: Homolog of GI Number: 62318558 NR Desc: ubiquitin
  misc_feature: Homolog of GI Number: 50910751 NR Desc: ubiquitin
  misc_feature: Homolog of GI Number: 56501213 NR Desc: ubiquitin
  misc_feature: Homolog of GI Number: 23509060 NR Desc: ubiquitin
  misc_feature: Homolog of GI Number: 63635471 NR Desc:  similar to Chain A
  misc_feature: Homolog of GI Number: 40889756 NR Desc: Chain A
  misc_feature: Homolog of GI Number: 71026115 NR Desc: ubiquitin
  misc_feature: Homolog of GI Number: 62653293 NR Desc:  similar to Chain A
MIEVVLNDRLGKKVRVKCNEDDTIGDLKKLVAAQTGTRPEKIRIQKWYTIYKDHITLGDYEIHDGMGLELYYN

SEQ ID NO: 7255 - DNA, 871 bp, Triticum aestivum
  misc_feature: Ceres CLONE ID no. 1325296
  misc_feature: Ceres CDNA ID no. 25446678
  CDS (92)..(577): REFERENCED BY SEQ ID NO: 7256
aaacacagacgtcgaggaaacagccgcacgcgcgcgcgccaaagccgcgggtttctgtagagttcatgtgacgcgacgcgcgcgatcgagcatggcgagcggcggcgcggggggatactaccacggcgaccggtacggctacggctactcgtacccgcggcagcaggccgcgccgtcggcgacgtcgttccacatgtgcctgttcctggccacggcgtgcctcctcggcggcgtgtcgctctactcgcactgcgagtccgcggtggagagcctcgtcgaccagctccgggtcgccgtcgtcctgtccccgttcgtcctcctcctcgcggcgcagtactggtccgcgaccgggcggcgctggcggtcgtcgtcgtactcgtcgtcgtcgctggacgcggccccggcgccggtggtgtcgtgggagcagcagccgccctggtacgaccagcggcagcgggacggcggcgcgtcgtcgccgtggggcgtggcgctggcgctggcgctcgtcctgctgctcatctcctaccagtcctgcttccagtactggtggtcccccgtcgtccgccgccggcgctgagctccgtcgatcggatcattcgcgcgcagctagaagcctagaactagtatagcatttggtcacgtacgggcaatgctagctctcttatatttcttcacagagggagtactactgtactaggcaagaaaattatcggcaattggcagagcaggattttgctgtctaaaccatcagagatgtcttagccgtcagaaaactatcactagggtatttggaggatgtaaactgcaataaactgttgtgatatacttataaataataaagagcagtattcttgcaaaaaaaaaaaaaaaa

SEQ ID NO: 7256 - protein, 161 aa, Triticum aestivum
  misc_feature: Ceres CLONE ID no. 1325296
  misc_feature: Ceres CDNA ID no. 25446678
MASGGAGGYYHGDRYGYGYSYPRQQAAPSATSFHMCLFLATACLLGGVSLYSHCESAVESLVDQLRVAVVLSPFVLLLAAQYWSATGRRWRSSSYSSSSLDAAPAPVVSWEQQPPWYDQRQRDGGASSPWGVALALALVLLLISYQSCFQYWWSPVVRRRR

SEQ ID NO: 7257 - DNA, 649 bp, Triticum aestivum
  misc_feature: Ceres CLONE ID no. 1325371
  misc_feature: Ceres CDNA ID no. 25446540
  CDS (69)..(476): REFERENCED BY SEQ ID NO: 7258
atcgcctctgtctagatctccagcccagccaaacttttctcaccttcgaagaagaagcagcagcatccatggcccccaaggctgctgagaagaagccagtggagaagacccccgcgggcaagaagcccaaggcggagaagaaggtgccggcgtccaaggagggcggcgacaagaaggggaagaagaaggccaagaaaagcgtggagacgtacaagatctacatcttcaaggtgctcaagcaggtgcaccccgacatcggcatctcctccaaggccatgtccatcatgaactccttcatcaacgacatctttgagaagctcgccggtgagtccgccaagctcgcgcgctacaacaagaagcccaccatcacgtcccgcgagatccagacctccgtccgcctcgtcctccctggcgagctcgccaagcacgccgtctccgagagcaccaaggccgtcaccaagttcacctcgtcctaggctcctcgtgcattagttcttgtgtttctttcctgttccctgtctgatgagttctgtagctagctgtgtgtgttctgacagtgtcatcctgtaacaatggtgctgcctgaataaatagttatcttgctgcttgaatggacgactgtcgctgtggattaaaaaaaaaaaaaaaa

SEQ ID NO: 7258 - protein, 135 aa, Triticum aestivum
  misc_feature: Ceres CLONE ID no. 1325371
  misc_feature: Ceres CDNA ID no. 25446540
  misc_feature: No seed is being produced by the plant
  misc_feature: The plant flowers significantly late compared to wild-type.
  misc_feature: Useful for biocontainment applications
  misc_feature: Useful for making plants with modulated flowering time
  misc_feature (42)..(114): Pfam Name: Histone PFAM Desc: Core histone H2A/H2B/H3/H4
  misc_feature: Homolog of GI Number: 531054 NR Desc: protein H2B153
  misc_feature: Homolog of GI Number: 531058 NR Desc: protein H2B
  misc_feature: Homolog of GI Number: 21801 NR Desc: histone H2B
  misc_feature: Homolog of GI Number: 577819 NR Desc: H2B histone
  misc_feature: Homolog of GI Number: 22323 NR Desc: H2B histone
  misc_feature: Homolog of GI Number: 34908130 NR Desc: putative histone H2B
  misc_feature: Homolog of GI Number: 1708107 NR Desc: Histone H2B
  misc_feature: Homolog of GI Number: 577825 NR Desc: H2B histone
  misc_feature: Homolog of GI Number: 22325 NR Desc: H2B histone
  misc_feature: Homolog of GI Number: 30024116 NR Desc: putative histone H4
MAPKAAEKKPVEKTPAGKKPKAEKKVPASKEGGDKKGKKKAKKSVETYKIYIFKVLKQVHPDIGISSKAMSIMNSFINDIFEKLAGESAKLARYNKKPTITSREIQTSVRLVLPGELAKHAVSESTKAVTKFTSS

SEQ ID NO: 7259 - DNA, 1193 bp, Triticum aestivum
  misc_feature: Ceres CLONE ID no. 1325535
  misc_feature: Ceres CDNA ID no. 29191537
  CDS (49)..(972): REFERENCED BY SEQ ID NO: 7260
ctacaccatcacacaacatccagaaccatctcactgcaaacctccgcaatggcgttccgacgccctctcgctctccacccgctcgtgatcgccttcgtgctggtctcctgtctcgccggcaccgccaaggcgaagcagacgggccagctgaccgtgttctggggccggaacgccggcgagggcacgctgcgcgaggcctgcgacacggggctctactccaccgtcgtcatctccttctacagcgtcttcgggcacggccgctactggggcgacctctccggccaccctctcgccggcgtcggtgccgacatcaagcactgccagtccaggaacatcctcgttctcctctccatcggcgggcccgggaacggctacttcctcccgtcctcggcctccgccgcagccgtcgccgacaacctctggaacgcgcacctcggcgggcgccggaacggcgtgtaccgcccgttcggcgacgccgccgtcgacggcatcgacttctacatcgaccagggcgcccccgaccactacgacgagctggccagccgccttgatgggtacaaccggttctaccgcggccggaagggtgtgcgcctgacggcgacgccgcggtgcgggttgcccgacccccgcctgggggcggcgctccggacggggctgttcgagcgcatccacgtcaggttctacgacaacgactcatgctcgctggggaagggcgggacgtacggcgtggtagagcagtgggagaagtggacggcggcgttcccgaggacgcaggtgtacctgggcctcgcgccggcggagagcggcgtgccggagggggcgcagggcaccgtcgccgtttacctcaagtacctgtactacgacctgctgcccaaggtgcagaaggcgaacaactatggcggggtcatggtctgggacaggttcaccgacaagaagacacgctggagcagcgtcgtcagtggatgggcctgatcgtatatatcgctggtttacagcttttttagaaaagggatcgctggtttacagctacggatcggagtgtattactactactgtgtatatgcgtatgtacgaataaaacggcatccatatgataatgatatatatactctatggatgtgaactgaagttgtttgttgttctagtcaatgaaataaggaatatgatcgcttctcctaaaaaaaaaaaaaaaa

SEQ ID NO: 7260 - protein, 307 aa, Triticum aestivum
  misc_feature: Ceres CLONE ID no. 1325535
  misc_feature: Ceres CDNA ID no. 29191537
  misc_feature (32)..(294): Pfam Name: Glyco_hydro_18 PFAM Desc: Glycosyl hydrolases family 18
  misc_feature: Homolog of GI Number: 18693099 NR Desc: putative xylanase inhibitor protein
  misc_feature: Homolog of GI Number: 62733218 NR Desc: chitinase
  misc_feature: Homolog of GI Number: 62733213 NR Desc: Glycosyl hydrolases family 18
  misc_feature: Homolog of GI Number: 62733215 NR Desc: chitinase
  misc_feature: Homolog of GI Number: 62733220 NR Desc: chitinase
  misc_feature: Homolog of GI Number: 55168113 NR Desc: putative chitinase
  misc_feature: Homolog of GI Number: 62733250 NR Desc: chitinase
  misc_feature: Homolog of GI Number: 4884516 NR Desc: class III chitinase homologue
  misc_feature: Homolog of GI Number: 50947647 NR Desc: chitinase
  misc_feature: Homolog of GI Number: 62733214 NR Desc: chitinase
MAFRRPLALHPLVIAFVLVSCLAGTAKAKQTGQLTVFWGRNAGEGTLREACDTGLYSTVVISFYSVFGHGRYWGDLSGHPLAGVGADIKHCQSRNILVLLSIGGPGNGYFLPSSASAAAVADNLWNAHLGGRRNGVYRPFGDAAVDGIDFYIDQGAPDHYDELASRLDGYNRFYRGRKGVRLTATPRCGLPDPRLGAALRTGLFERIHVRFYDNDSCSLGKGGTYGVVEQWEKWTAAFPRTQVYLGLAPAESGVPEGAQGTVAVYLKYLYYDLLPKVQKANNYGGVMVWDRFTDKKTRWSSVVSGWA

SEQ ID NO: 7261 - DNA, 790 bp, Triticum aestivum
  misc_feature: Ceres CLONE ID no. 1325668
  misc_feature: Ceres CDNA ID no. 36701350
  CDS (95)..(457): REFERENCED BY SEQ ID NO: 7262
ccacccacacacacactcaagccagcggcactcacactacactcatccactcacaagctaatctagcggcgtagctcacttcagtccagtcggcatggcggctccgaggggcgcggcactggtgctggcgatggtgctcgcggcgatgctggtggcgccgccggcgacggtgcacgccatatcctgctccacggtgtacagcacgctgatgccgtgcctgcagtacgtgcagcagggcgggtcgccggcccggggctgctgcaccggcatccagaacctgctggccgaggccaacaacagccccgaccgccgcaccatctgcggctgcctgaagaacgtcgccaacggcgcctccggcgggccctacatcacccgcgccgccgcgctcccctccaagtgcaacgtcgccctcccctacaagatcagccccagcgtcgactgcaactcgatccactgaacgaactgaagcgccctggcccgtgtgtctgtcgacgtacgtctgccgtgtgaggagtcccatgtctggagaataaattgctgctactagtactgaagcttagctaggccttggcggccagatccgtgtcgttctacctagtcgttgtgtgtggtttagggtcgatcgagttaattatccgcatgcagttcatggtgttgtggcctgggtgccggtaggttccacgagcagagcagagtggtgaactgatattgtgtgcgtcgtactacgttcgtgtctatgtaatgtgcgtgctttatctataaattatcctcgtcaaaaaaaaaaaaaaaa

SEQ ID NO: 7262 - protein, 120 aa, Triticum aestivum
  misc_feature: Ceres CLONE ID no. 1325668
  misc_feature: Ceres CDNA ID no. 36701350
  misc_feature (31)..(116): Pfam Name: Tryp_alpha_amyl PFAM Desc: Protease inhibitor/seed storage/LTP family
  misc_feature: Homolog of GI Number: 56713109 NR Desc: type 1 non
  misc_feature: Homolog of GI Number: 6492243 NR Desc: lipid transfer protein
  misc_feature: Homolog of GI Number: 56201992 NR Desc: putative lipid transfer protein
  misc_feature: Homolog of GI Number: 34907830 NR Desc: putative lipid transfer protein
  misc_feature: Homolog of GI Number: 2407273 NR Desc: lipid transfer protein LPT II
  misc_feature: Homolog of GI Number: 77548420 NR Desc: nonspecific lipid
  misc_feature: Homolog of GI Number: 77553487 NR Desc: nonspecific lipid
  misc_feature: Homolog of GI Number: 7438281 NR Desc: probable lipid transfer protein precursor
  misc_feature: Homolog of GI Number: 42374744 NR Desc: lipid
  misc_feature: Homolog of GI Number: 2407271 NR Desc: lipid transfer protein
MAAPRGAALVLAMVLAAMLVAPPATVHAISCSTVYSTLMPCLQYVQQGGSPARGCCTGIQNLLAEANNSPDRRTICGCLKNVANGASGGPYITRAAALPSKCNVALPYKISPSVDCNSIH

SEQ ID NO: 7263 - DNA, 1328 bp, Triticum aestivum
  misc_feature: Ceres CLONE ID no. 1325893
  misc_feature: Ceres CDNA ID no. 24726712
  CDS (192)..(1016): REFERENCED BY SEQ ID NO: 7264
ctctctctctctctctctctctcctgcagctccacttcctcctcgggcgcagccattgtcttctggctcatatctcccctccccctcccctcctcgtccgcctcagacgccattaaaccccacctcgcctacgactgccggcggcgagccccgaccggagcagggatcgagcccgccgaaggggggaagacatggggacactcgggcgcgcgatctacacggtgggcaagtggatccgtggaacggggcaggccatggaccgcctcggatccaccatccagggcggcctccgcaccgaggagcaggtgtcaaggcatcgtacagtcatgagcatatttgacaaggagcctaggatcaacaaagatgtttttgttgctcccagtgcatctgtcattggtgatgttgagattggacatggatcatcgatctggtatggctccgttttgagaggtgatgtcaacagtattcgtattggatctggatcaaatatacaagacaactcccttgtacatgttgcaaagactaatattagcgggaaggtccttccgacgatcattggaagcaatgttacagtaggtcatagtgctgttttacatgcatgcaccattgaggatgaagcttttgttggtatgggtgccactttgcttgacggagtggttgttgaaaagcacagcatggttggcgctggatctcttgtcaagcagaatacaaggattccttctggggaggtctgggttggtaatcctgccaagttcctaaggaagctgacagaggaggagatcacattcatcgcccaatcggcagccaactacatcaacttagctcatgttcacgccactgagaattccaagagcttcgatgagattgagctcgagaagaagctgaggaagaagtttgctcacaaagatgaggagtacgactcgatgctcggagtggtccgtgagatcccgccgcagctcatcctccccgacaatatcctcccagacaaagcaccgaaagcagctgtcgctcactgagatcaagcccctcgtagggatgctttgattttgatatgtggcgacttgggacatttgacttatgttttggtcttgttctctgttttttcatgcccaataagatttgggtcgagcgctgttgtaggatcgaccgcatacagtacctctctttcacattgcaatgaagaggagcccgggatcgcttttacaccttctgtatgaagtgcacattgttgaagcagtcctgttttgtactctagagtgcatcttaactgtgatctgtttgtttttaaatggcttacagcgattcaatcttcaaaaaaaaaaaaaaaa

SEQ ID NO: 7264 - protein, 274 aa, Triticum aestivum
  misc_feature: Ceres CLONE ID no. 1325893
  misc_feature: Ceres CDNA ID no. 24726712
  misc_feature (119)..(136): Pfam Name: Hexapep PFAM Desc: Bacterial transferase hexapeptide
  misc_feature: Homolog of GI Number: 50939569 NR Desc: putative transcription factor APFI
  misc_feature: Homolog of GI Number: 13507025 NR Desc: transcription factor APFI
  misc_feature: Homolog of GI Number: 82621186 NR Desc: transcription factor APFI
  misc_feature: Homolog of GI Number: 56785028 NR Desc: putative gamma
  misc_feature: Homolog of GI Number: 8778427 NR Desc: F18O14.34
  misc_feature: Homolog of GI Number: 44889011 NR Desc: mitochondrial NADH:ubiquinone oxidoreductase 32 kDa subunit
  misc_feature: Homolog of GI Number: 44888988 NR Desc: mitochondrial NADH:ubiquinone oxidoreductase 29 kDa subunit
  misc_feature: Homolog of GI Number: 50404988 NR Desc: Carbonic anhydrase/acetlytransferase
  misc_feature: Homolog of GI Number: 50908833 NR Desc: putative mitochondrial NADH: ubiquinone oxidoreductase 29 kDa subunit
MGTLGRAIYTVGKWIRGTGQAMDRLGSTIQGGLRTEEQVSRHRTVMSIFDKEPRINKDVFVAPSASVIGDVEIGHGSSIWYGSVLRGDVNSIRIGSGSNIQDNSLVHVAKTNISGKVLPTIIGSNVTVGHSAVLHACTIEDEAFVGMGATLLDGVVVEKHSMVGAGSLVKQNTRIPSGEVWVGNPAKFLRKLTEEEITFIAQSAANYINLAHVHATENSKSFDEIELEKKLRKKFAHKDEEYDSMLGVVREIPPQLILPDNILPDKAPKAAVAH

SEQ ID NO: 7265 - DNA, 640 bp, Triticum aestivum
  misc_feature: Ceres CLONE ID no. 1325934
  misc_feature: Ceres CDNA ID no. 24766783
  CDS (1)..(540): REFERENCED BY SEQ ID NO: 7266
acaactcgcagctcaccaccgtcgtctcctctgctaagcattcgctcgccaccgcccaccgtctcctctccgaatcttctccggcaagtctttcaccgtcgacaacaaccagatggctcgcttcgccgtggtcgccgccctcctcgccctcctcgccgtcgccgccgccgcgcagggccccatgctggcgcccaggacggcccctcttccagcgccaccggcgaggtccccagccatcgcccctgcgccggtcgccaccccgcccaccgccgcgtcgccgtccccgatggcatctccccctgccccgaccaccgacgctccctccgcgatgacgccgtccgcggtctctgccacacccgctggagcccccgtcggcgcccccaccggcacccccgcgagctccgccgtgtactcatccgccgccagcttcgtcgcggtcgccggagcggtggccgccgccatcgtgttctagatgcagcgacgactcttctcgctgctgtctatacagtttcattgtttctgagatttttttggttataggcggaggaaatattacacacgacattgcgatgtaatcttgttacgagattattatgaatatataattccttcatttgttacgttaaaaaaaaaaaaaaaa

SEQ ID NO: 7266 - protein, 119 aa, Triticum aestivum
  misc_feature: Ceres CLONE ID no. 1325934
  misc_feature: Ceres CDNA ID no. 24766783
  misc_feature: Homolog of GI Number: 6523547 NR Desc: hydroxyproline
  misc_feature: Homolog of GI Number: 76262498 NR Desc: pherophorin
  misc_feature: Homolog of GI Number: 21992 NR Desc: extensin
  misc_feature: Homolog of GI Number: 2653671 NR Desc: 120 kDa style glycoprotein
  misc_feature: Homolog of GI Number: 76262500 NR Desc: pherophorin
  misc_feature: Homolog of GI Number: 62421773 NR Desc: 120 kDa pistil extensin
MARFAVVAALLALLAVAAAAQGPMLAPRTAPLPAPPARSPAIAPAPVATPPTAASPSPMASPPAPTTDAPSAMTPSAVSATPAGAPVGAPTGTPASSAVYSSAASFVAVAGAVAAAIVF

SEQ ID NO: 7267 - DNA, 1032 bp, Triticum aestivum
  misc_feature: Ceres CLONE ID no. 1325982
  misc_feature: Ceres CDNA ID no. 25445622
  CDS (75)..(815): REFERENCED BY SEQ ID NO: 7268
acgcacaaacaacgccgctccaaatctcgctcgctcgctcgccgcggaagccgctctcgccggtctccgccgccatggacgccgcctcctcgctcatgggcggcccctcctccgccgacgcgcccaccgacggcgagcaccgcatgggcaccaccatcgtcggggtctgctacgccggcggcgtcgtcctcgccgccgactccaggaccagcaccggaatgtatgtggcaaaccgtgcttcggacaagattagtcagctcactgataatgtctatgtctgccgttctggatctgctgctgatacacaagttatttcagattatgtgcgctattttctccaccaacacacaattcagcttgggcaaccagctaccgtgaaagtcgcatccaacttggttaggttgctggcctatcagaacaagagcatgttacaagctggaatgatagttggtggatgggataagtatgagggaggccaaatttactcagtccctcttggtggaacgattctgaggcaaccattcgcaattggaggatctggttccagctatctgtatggattgatggatcatgaatggaaagaggggatgacccaggaagaagctgagaagtttgtggtgaaggtggtttcccttgctattgcacgtgatggtgctagtggaggggttgttcgcaccgttactataaatgaggagggcgtgaagaggagcttccatcctggcgacaagctgccactgtggcatgaggagatggagccccagaactcgctcctcgacattctcgcggccgggagctctgatgccatggtccagtgaatctgttctggatttgagcttaatgttgttaagagattgtgccgaattgttccacatcagcttattttccaccttgttattacgaatgaatagtacatgttccttgtttgatggatccgtgtcctcctgtgcaacacaactctctcggagtagtgcgtcgattgctaaattttttagaaaagaaaacacccgtggaaccaaaaaaataaaaaaaaaa

SEQ ID NO: 7268 - protein, 246 aa, Triticum aestivum
  misc_feature: Ceres CLONE ID no. 1325982
  misc_feature: Ceres CDNA ID no. 25445622
  misc_feature (22)..(204): Pfam Name: Proteasome PFAM Desc: Proteasome A
  misc_feature: Homolog of GI Number: 66271075 NR Desc: beta1 proteasome
  misc_feature: Homolog of GI Number: 66271071 NR Desc: beta1 proteasome
  misc_feature: Homolog of GI Number: 55296478 NR Desc: putative beta 1 subunit of 20S proteasome
  misc_feature: Homolog of GI Number: 51979378 NR Desc: PREDICTED OJ1079_F11.26 gene product
  misc_feature: Homolog of GI Number: 7270032 NR Desc: multicatalytic endopeptidase complex
  misc_feature: Homolog of GI Number: 79325892 NR Desc: PBA1
  misc_feature: Homolog of GI Number: 21592365 NR Desc: multicatalytic endopeptidase complex
  misc_feature: Homolog of GI Number: 1743356 NR Desc: proteasome delta subunit
  misc_feature: Homolog of GI Number: 41352683 NR Desc: putative proteasome 20S beta1 subunit
  misc_feature: Homolog of GI Number: 41352685 NR Desc: putative proteasome 20S beta1.1 subunit
MDAASSLMGGPSSADAPTDGEHRMGTTIVGVCYAGGVVLAADSRTSTGMYVANRASDKISQLTDNVYVCRSGSAADTQVISDYVRYFLHQHTIQLGQPATVKVASNLVRLLAYQNKSMLQAGMIVGGWDKYEGGQIYSVPLGGTILRQPFAIGGSGSSYLYGLMDHEWKEGMTQEEAEKFVVKVVSLAIARDGASGGVVRTVTINEEGVKRSFHPGDKLPLWHEEMEPQNSLLDILAAGSSDAMVQ

SEQ ID NO: 7269 - DNA, 724 bp, Triticum aestivum
  misc_feature: Ceres CLONE ID no. 1325996
  misc_feature: Ceres CDNA ID no. 25445928
  CDS (67)..(372): REFERENCED BY SEQ ID NO: 7270
acaaacaagcaacgcatcctccactcttcaccaccgtctagctagctcttgttaggtcgatcggcaatggcgtccaccaaggctctcttcgtgctcgccgttctcctcgcgtcggccgtcctcctcgccgccgcggcctccgagcaaactcatgacaaggaggggaaggtggccaccaacggtgccggcgtccaggacggctggggtggcggcggccgcggcggagggtacccgggccgcgggggcggcggctacgggccctgcggccggtggggctgctgccgccgtgggtaccacggcgactgcatccgatgctgcagggccgccaacgacgtcccggaggccatggaccgcactgaggtgcacaactagctagctggcagctggctatggcttggctagcaagcaggacccatgatcaatctggaagctagcttcttccagggtactgagtaaaataaatctccggtttagttcatgtgatctatgtatgtgcgcggatgaacgtatgtatctacgtacatacgttcgtagtcctcttcctttgtttggttggaacaataataagaaaatgtgatgcgtgttgagtttgaaagagggcatgcatgcgtgtaatgtgtcgttgtgtttccgatcgatcgcgtggagtggatctccttcatgtttacgcggggattgccgaaattactggttaaggtgtacttttacaaaaaaaaaaaaaaaa

SEQ ID NO: 7270 - protein, 101 aa, Triticum aestivum
  misc_feature: Ceres CLONE ID no. 1325996
  misc_feature: Ceres CDNA ID no. 25445928
  misc_feature (1)..(80): Pfam Name: GRP PFAM Desc: Glycine rich protein family
  misc_feature: Homolog of GI Number: 50909901 NR Desc: putative glycine
  misc_feature: Homolog of GI Number: 728596 NR Desc: glycine rich protein
  misc_feature: Homolog of GI Number: 14516835 NR Desc: glycine rich protein
  misc_feature: Homolog of GI Number: 7024449 NR Desc: glycine
  misc_feature: Homolog of GI Number: 10798746 NR Desc: glycine rich protein
  misc_feature: Homolog of GI Number: 170267 NR Desc: glycine
  misc_feature: Homolog of GI Number: 27461096 NR Desc: glycine
  misc_feature: Homolog of GI Number: 295808 NR Desc: glycine
  misc_feature: Homolog of GI Number: 6782438 NR Desc: glycine
  misc_feature: Homolog of GI Number: 20334894 NR Desc: At2g05540/T20G20.11
MASTKALFVLAVLLASAVLLAAAASEQTHDKEGKVATNGAGVQDGWGGGGRGGGYPGRGGGGYGPCGRWGCCRRGYHGDCIRCCRAANDVPEAMDRTEVHN

SEQ ID NO: 7271 - DNA, 1007 bp, Triticum aestivum
  misc_feature: Ceres CLONE ID no. 1326013
  misc_feature: Ceres CDNA ID no. 25400911
  CDS (150)..(710): REFERENCED BY SEQ ID NO: 7272
ccccgatcctctttctcccctcggtagagccagggcgcgaccgcgcgaaggaagcaacgaaagcccaaagctggcgcatccttagcacccaagggaagaagaaagaggcgagagagcgaggcgtcccggaggcagagccaagaggatccatggatcggccccaggtggtcagcgagaactatgccaatcctataacatgcctcttccatgtgctcttcaaggcgtcggcactggcgttctacttcctcttctcgctcttcgtgaagagcttcgtcatcatctttgtcatcactgtgctcctcgctgcgctcgacttctgggtggtgaagaatgtcagcggaaggatactcgtcgggctgcggtggtggaatgagattgacgatgatggcaacagtgtgtggaagttcgagtgccttgacggggagtctcttgctcggatgaacaaaaaggactcgtggctgttctggtggactctttacttgaacgctgctgcatggatcattcttgggatattttcactcattagacttgaagctgattaccttcttgttgttggagtttgcttgactctaagccttgcgaacatcgtgggattcaccaaatgcaacaaagatgccaagaagaacatccgagcttttgctgaaaatgccgctcaaaacgccatcacatcccgcatcacatcatccctgcagtcagcattcggtatctgaagtccagattacagaggcccaaaattacatacaactgtgtaccatctgtcaaagaagatcagcttgtgatatcccgttttcatgtgattttggcttatataccaagtaggtcgattttgattggagtgacactatgatggaatacagcgtactaattagccctaggtaaatttacactttctcctgtactaaagagcatactttcttcttctcttgtaccctggtgtggcctagaggttcgaagcatgtcttccaatgcagaaggcctttttttgtttgtcaaaaaaaaaaaaaaaa

SEQ ID NO: 7272 - protein, 186 aa, Triticum aestivum
  misc_feature: Ceres CLONE ID no. 1326013
  misc_feature: Ceres CDNA ID no. 25400911
  misc_feature: Homolog of GI Number: 4337178 NR Desc: T31J12.5
  misc_feature: Homolog of GI Number: 17945742 NR Desc: RE32705p
  misc_feature: Homolog of GI Number: 48098345 NR Desc: similar to CG5021
  misc_feature: Homolog of GI Number: 66523411 NR Desc:  similar to FAM18
  misc_feature: Homolog of GI Number: 24661251 NR Desc: CG5021
  misc_feature: Homolog of GI Number: 24661255 NR Desc: CG5021
  misc_feature: Homolog of GI Number: 61864169 NR Desc:  similar to RIKEN cDNA 1810036I24
  misc_feature: Homolog of GI Number: 57086691 NR Desc:  similar to RIKEN cDNA 1810036I24
  misc_feature: Homolog of GI Number: 61818165 NR Desc:  similar to RIKEN cDNA 1810036I24
MDRPQVVSENYANPITCLFHVLFKASALAFYFLFSLFVKSFVIIFVITVLLAALDFWVVKNVSGRILVGLRWWNEIDDDGNSVWKFECLDGESLARMNKKDSWLFWWTLYLNAAAWIILGIFSLIRLEADYLLVVGVCLTLSLANIVGFTKCNKDAKKNIRAFAENAAQNAITSRITSSLQSAFGI

SEQ ID NO: 7273 - DNA, 1253 bp, Triticum aestivum
  misc_feature: Ceres CLONE ID no. 1326015
  misc_feature: Ceres CDNA ID no. 25892270
  CDS (101)..(865): REFERENCED BY SEQ ID NO: 7274
aaaatctccttccccttcctcttcctcccctccctcctctctcctcccctcccgttccatcgcccgctgccccgccggcgccgcaccctcgaattccgccatgccgaagggcgccaaaaagcgtgcgaagctcaagaagaagcagcaggggggccagcctgccgggtccaacggcggcgccaccaccaccaccaacaacaacggaagcaataactcgagccacggcaacgccgccagcgatggaaaccacctaccaatcaaacttaacattcctcccgtggatgcgagcgaggattcgatggagagctccgaggagatggtgacgccgagggcggaggcggccgaggaggagaagaagggcgccacgtcggaggtgccggtggagcgcgccgtcgaggtcgctgatgagggcgccacgggcgaggccggggaggaggtcatggttgatgctttaccgcctgaagctgctgaccgggaacaagagggtaaggtggatgtgagggcggaggcgcatgccgtggtgcaggaaccggaggtgcaggacatcgtggtgtccgaagcacccgaggtgctggaaccagaggtgaagagcgaggaggcggtgatccgggacacggccaaggtgcatcctgcgcatcaaccggagacgaaggccgatgaggttgtggtcagggatgcggacaccgctgctgtggtgcaggaaccggaggcaaagggtgaggtgtcacggtctcgtgagccagctgctgcgcagactacagaggtggtacgcggaccggcagtggcggtggctgcttcggggcatcgggcaaaatggtggaattgctgtgggattttggaagtctttggtggttcagagagatagatggaggtacatgaattggaaggaacttggaaagcaagaaggcagaagatgcaaagttgtgcaaagctgatgggtatctgtaactaggctcgttgagtgctcacacagatgatggagttgaaggattttgaatgacatcgagctgatgtttctctccacccgtattttccgtgtcttgctgtgcaaagttacattgtattggttgtggttaaaatcctgggtgcagtattctgagtattaccccttgtctagcatgttctaggttctgctgtccttgtagcatatgagttaaaaagtgggtcaacagtgaaaattttggtctttattttctatacttatatgtcgggaggtatcgtctgttacgtcccttttaaaaaaaaaaaaaaaa

SEQ ID NO: 7274 - protein, 254 aa, Triticum aestivum
  misc_feature: Ceres CLONE ID no. 1326015
  misc_feature: Ceres CDNA ID no. 25892270
  misc_feature: Homolog of GI Number: 34911482 NR Desc: P0454A11.15
  misc_feature: Homolog of GI Number: 395147 NR Desc: glycine
  misc_feature: Homolog of GI Number: 72608016 NR Desc: lipoprotein
  misc_feature: Homolog of GI Number: 259443 NR Desc: glycine
  misc_feature: Homolog of GI Number: 17821 NR Desc: glycine
  misc_feature: Homolog of GI Number: 1469223 NR Desc: glycine
  misc_feature: Homolog of GI Number: 2352260 NR Desc: keratin
  misc_feature: Homolog of GI Number: 54291564 NR Desc: putative glycine
  misc_feature: Homolog of GI Number: 9453857 NR Desc: EBNA
  misc_feature: Homolog of GI Number: 13561998 NR Desc: major ampullate spidroin 1
MPKGAKKRAKLKKKQQGGQPAGSNGGATTTTNNNGSNNSSHGNAASDGNHLPIKLNIPPVDASEDSMESSEEMVTPRAEAAEEEKKGATSEVPVERAVEVADEGATGEAGEEVMVDALPPEAADREQEGKVDVRAEAHAVVQEPEVQDIVVSEAPEVLEPEVKSEEAVIRDTAKVHPAHQPETKADEVVVRDADTAAVVQEPEAKGEVSRSREPAAAQTTEVVRGPAVAVAASGHRAKWWNCCGILEVFGGSER

SEQ ID NO: 7275 - DNA, 808 bp, Triticum aestivum
  misc_feature: Ceres CLONE ID no. 1326285
  misc_feature: Ceres CDNA ID no. 25445819
  CDS (67)..(645): REFERENCED BY SEQ ID NO: 7276
caaaaaaccctacctccgtggccgccacccctcgacaccctcaggcgaagaaagggcgaaagcaccatgtacacggcgaggaagaagatccagaaggacaagggcctcgagccctctgagttcgaggactccgtcgcgcaggcattcttcgacctggagaatggcagccaggagctcaagagcgacgttaaagacctctacatcaacgccgccttccagatggatgttgcagggaacaggaaggccgtggtcatccacgtgccgtacaggctccgcaagaacttcaggaagatccacgtcaggctcgtcagggagctcgagaagaagttcagcggcaaggatgttgttattgttgcaacaaggcggattgtgaggccacccaagaagggttctgctgttgttcgccctcgtaccaggactttgaccgctgttcatgatggtcttttggaggatgttgtgtacccagctgagattgtggggaaacgtgtcagatatcgcctagatggctcgaagatcattaagatcttcttgtacccaaaggaacgcaacaacacagagtacaagttggataccttcactgcagtgtaccgcaggctttgtggcaaggatgttgtgtacgagtacctggttgccgaaactgcttgaagatccatcttgatttgcatattggccctcttgttcatgtattgaatttgcgacggcttgcttgagcttgttgttgctcggatcatgtattcgaaaaatcaaaattatagctgtgatgccaaacctaaatatttgctagttcgagataaaaaaaaaaaaaaaa

SEQ ID NO: 7276 - protein, 192 aa, Triticum aestivum
  misc_feature: Ceres CLONE ID no. 1326285
  misc_feature: Ceres CDNA ID no. 25445819
  misc_feature: The plant is abnormally large.
  misc_feature: The plant is abnormally small.
  misc_feature: Useful for making plants with modulated biomass
  misc_feature (4)..(191): Pfam Name: Ribosomal_S7e PFAM Desc: Ribosomal protein S7e
  misc_feature: Homolog of GI Number: 4588906 NR Desc: ribosomal protein S7
  misc_feature: Homolog of GI Number: 57471724 NR Desc: ribosomal protein S7
  misc_feature: Homolog of GI Number: 22671664 NR Desc: ribosomal protein S7
  misc_feature: Homolog of GI Number: 14787424 NR Desc: Ribosomal protein S7
  misc_feature: Homolog of GI Number: 55167942 NR Desc: putative 40S ribosomal protein S7
  misc_feature: Homolog of GI Number: 77999315 NR Desc: ribosomal protein S7
  misc_feature: Homolog of GI Number: 5532505 NR Desc: 40S ribosomal protein S7 homolog
  misc_feature: Homolog of GI Number: 4128206 NR Desc: 40S ribosome protein S7
  misc_feature: Homolog of GI Number: 21555683 NR Desc: 40S ribosomal protein S7 homolog
  misc_feature: Homolog of GI Number: 6957719 NR Desc: putative 40S ribosomal protein
  misc_feature: Useful for decreasing plant size
  misc_feature: Useful for delaying flowering time
  misc_feature: Useful for increasing chlorophyll and photosynthetic capacity
  misc_feature: Useful for making larger plants
  misc_feature: Useful for making ornamental plants with modified flowers
  misc_feature: Useful for making ornamental plants with modified leaves
  misc_feature: Useful for making plants with altered leaf shape eg curled leaves
  misc_feature: Useful for making plants with increased biomass
  misc_feature: Useful for making plants with increased biomass and foliage
  misc_feature: Useful for making plants with increased biomass and foliage
MYTARKKIQKDKGLEPSEFEDSVAQAFFDLENGSQELKSDVKDLYINAAFQMDVAGNRKAVVIHVPYRLRKNFRKIHVRLVRELEKKFSGKDVVIVATRRIVRPPKKGSAVVRPRTRTLTAVHDGLLEDVVYPAEIVGKRVRYRLDGSKIIKIFLYPKERNNTEYKLDTFTAVYRRLCGKDVVYEYLVAETA

SEQ ID NO: 7277 - DNA, 920 bp, Triticum aestivum
  misc_feature: Ceres CLONE ID no. 1326403
  misc_feature: Ceres CDNA ID no. 29191538
  CDS (31)..(669): REFERENCED BY SEQ ID NO: 7278
atactcgaagcaccagcgcagtagcaagccatggccaacgcaatgttgctccccgtgctcatctccttcctcgtcttgcccttctccgccctggccctgacccaggacttctgcgtcgccgacctgtcctgcagcgacacgccggcggggtacccgtgcaaggccggcgtcggcgcgggggacttctactaccacggcctcgccgccgcgggcaacaccagcaacctcatcaaggcggccgtgaccccggccttcgtcggccagttccccggcgtcaacgggctcggcatctccgcggcgaggctcgacatcgccatgggcggcgtcgtgccgctgcacacccacccggccgcctctgagctcctcttcgtcaccgagggcaccatcctggcgggcttcatcagctcctcctccaacaccgtgtacaccaagacgctctacaagggcgacatcatggtgttcccccagggcctgctccactaccagtacaacggcggcagctcgccggcggtggcgctcgttgcgttcagcggccccaaccccggcctgcagatcaccgactacgcgctcttcgccaacaacctgccgtccgccgtcgttgagaaggtcaccttcttggacgacgcgcaggtgaagaagctcaagtccgtgctcggcggcagcggctaattgtgcagttctcaggtctcaacaaaggtcgtcgtggtgtcagcgtgtcggtttaatttgatgcatgtgtgcgtgcgcttgtgaggtcaactccgagtctgttccaagttgtgtttaatttttcatgtcaatttcatttgataattgtcaatgcacatttttttcagaaagaaggttgtaccctcggactctatctcgattgatgtacacaacccttttattgcaaagtttttccaaaaaaaaaaaaaaaa

SEQ ID NO: 7278 - protein, 212 aa, Triticum aestivum
  misc_feature: Ceres CLONE ID no. 1326403
  misc_feature: Ceres CDNA ID no. 29191538
  misc_feature (55)..(202): Pfam Name: Cupin_1 PFAM Desc: Cupin
  misc_feature: Homolog of GI Number: 13160411 NR Desc: adenosine diphosphate glucose pyrophosphatase
  misc_feature: Homolog of GI Number: 21322655 NR Desc: adenosine diphosphate glucose pyrophosphatase
  misc_feature: Homolog of GI Number: 2815292 NR Desc: Germin
  misc_feature: Homolog of GI Number: 50946521 NR Desc: germin
  misc_feature: Homolog of GI Number: 2961201 NR Desc: germin
  misc_feature: Homolog of GI Number: 4239821 NR Desc: germin
  misc_feature: Homolog of GI Number: 37623879 NR Desc: germin
  misc_feature: Homolog of GI Number: 1916807 NR Desc: auxin
  misc_feature: Homolog of GI Number: 4098517 NR Desc: auxin
  misc_feature: Homolog of GI Number: 1916809 NR Desc: auxin
MANAMLLPVLISFLVLPFSALALTQDFCVADLSCSDTPAGYPCKAGVGAGDFYYHGLAAAGNTSNLIKAAVTPAFVGQFPGVNGLGISAARLDIAMGGVVPLHTHPAASELLFVTEGTILAGFISSSSNTVYTKTLYKGDIMVFPQGLLHYQYNGGSSPAVALVAFSGPNPGLQITDYALFANNLPSAVVEKVTFLDDAQVKKLKSVLGGSG

SEQ ID NO: 7279 - DNA, 1447 bp, Triticum aestivum
  misc_feature: Ceres CLONE ID no. 1326452
  misc_feature: Ceres CDNA ID no. 25400905
  CDS (106)..(1302): REFERENCED BY SEQ ID NO: 7280
cttccatcagatcccctcttctctctctctctattcttcttgctctagcactctgcactgctctgttctttccggctaacaccggctacgcccaccccacggcggatggagggcgtcgaggagattgtcatcgccggcgccgggctcgccggtctcgcgacggccctggggttgcacaggaaaggggtgaggtgcgtggtgctggagtcgtcggcgacgctgcgtgcgtcggggtacgccttcaccacatggaccaacgccttccgcgccctggacgccctgggcgtcggggacaagatcagggagcaccacctgctctacgagaggctggtggccttctctgcatccacgggtgaggctgccgcaaaagtgagcctaaagatgcagggcaaaagcgggcctcacgagattcggtgcgtgaagcgcaacttcttgctggagacgctggaggaggagctgccggagggcaccatcaggtactcctccaagatcgtcgccatcgaggaagagggcaacgtcaagctgctgcacatggccgacggctccatcatcagagccaacgttcttgtggggtgtgacggagtgaactcggtggtggccaagtggctgggcctgcccaagccgatcctctcggggcggtccgccacccggggcctcgccgagtacccggacgggcacggcttcgggcccgagatgctgcagttcatcgggcagggcttccgctccggcgtgctcccctgctccgacacctccgtgtactggaactacacctggtacccgtccccggcggacgaggacgcggaggagagcgtggacaagatgcggcggcacgtgctggccaggcttcgggccgccaagatccccgcggaggcgctggacgtggtcgagcggggcgagatgagcgaggtggtgtcgtcgccgctgcggttccggtccccgctggcgctggtccggggcagcatctccaggcgcggcgtgtgcgtggccggcgacgcgttccacccgatgaccccggagctcgggcagggcggctgcgcggcgctggaggacggcgtcgtccttgcccgatgcctcggcgaggccttcgccgtcggcgggcacgggagcgccgaggcggccctggagaagtacgccggggagcggaggtggcgcgccgtccggctggtcactgccgcgtacgtcgtcggcttcgtgcagcagagcagcaacccggcgatcaagttcctgagggagaggttcctgtccgggttgctggccagagtgatggtcgacatggccgacttcgactgcgggaagctctagtagttatgtcactccttcacggcaaaacgagaacaacgagagaaaacgaatcggttaaaacggcatcaatcaaatcgatttgatgcctgtatttcgacttttcgagttaaataaagaaaatagtttgataaaaaaaaaaaaaaaa

SEQ ID NO: 7280 - protein, 398 aa, Triticum aestivum
  misc_feature: Ceres CLONE ID no. 1326452
  misc_feature: Ceres CDNA ID no. 25400905
  misc_feature (14)..(36): Pfam Name: Amino_oxidase PFAM Desc: Flavin containing amine oxidoreductase
  misc_feature (149)..(171): Pfam Name: FAD_binding_3 PFAM Desc: FAD binding domain
  misc_feature: Homolog of GI Number: 3426064 NR Desc: monooxygenase
  misc_feature: Homolog of GI Number: 27808600 NR Desc: At5g05320
  misc_feature: Homolog of GI Number: 21537119 NR Desc: monooxygenase
  misc_feature: Homolog of GI Number: 24745927 NR Desc: monooxygenase
  misc_feature: Homolog of GI Number: 50937317 NR Desc: putative monooxygenase 2
  misc_feature: Homolog of GI Number: 20197535 NR Desc: putative monooxygenase
  misc_feature: Homolog of GI Number: 21536869 NR Desc: putative monooxygenase
  misc_feature: Homolog of GI Number: 4164576 NR Desc: CTF2A
  misc_feature: Homolog of GI Number: 4164574 NR Desc: CTF2A
  misc_feature: Homolog of GI Number: 25408403 NR Desc: probable monooxygenase
  misc_feature: Useful for decreasing plant size
MEGVEEIVIAGAGLAGLATALGLHRKGVRCVVLESSATLRASGYAFTTWTNAFRALDALGVGDKIREHHLLYERLVAFSASTGEAAAKVSLKMQGKSGPHEIRCVKRNFLLETLEEELPEGTIRYSSKIVAIEEEGNVKLLHMADGSIIRANVLVGCDGVNSVVAKWLGLPKPILSGRSATRGLAEYPDGHGFGPEMLQFIGQGFRSGVLPCSDTSVYWNYTWYPSPADEDAEESVDKMRRHVLARLRAAKIPAEALDVVERGEMSEVVSSPLRFRSPLALVRGSISRRGVCVAGDAFHPMTPELGQGGCAALEDGVVLARCLGEAFAVGGHGSAEAALEKYAGERRWRAVRLVTAAYVVGFVQQSSNPAIKFLRERFLSGLLARVMVDMADFDCGKL

SEQ ID NO: 7281 - DNA, 1239 bp, Triticum aestivum
  misc_feature: Ceres CLONE ID no. 1326507
  misc_feature: Ceres CDNA ID no. 25891781
  CDS (39)..(1010): REFERENCED BY SEQ ID NO: 7282
acaaaaccccaaaccctttttctttctggttcgcggcaatggcggcgccggatgcagacgagacccctgcctccccggggtacgccctccgcgcgaccctcacggggcaccgccgcgccgtatccgccgtcaagttctccccggacggccgcctcctcgcctccgcctccgccgacaagctcctccgcgtctggtcctcggcggacctctccctcgtcgccgagctcgagggccacgaggagggcgtctccgatctctccttctcccccgacggccgcctgctcgcctccgcctccgacgaccgcaccgtccgcatctgggacctgggcgccggcggcggcgcccgcctcgtcaagacgctggccggccacaccaactacgccttctgcgtcgccttcagcccccacggcaacgtgctcgcctccggatccttcgacgagacggtgcgcgtttgggaggtcaggtcgggccggagcctccgcgtgctgcccgcccactccgagcctgtcaccgccgtcgatttcgaccgggacggggccatgatcgtgtcgggaagctacgatgggctctgccgcatctgggacgcagccaccgggcactgcgtcaagaccctcatcgacgacgagagcccgcccgtgtcctactccaagttctcgcccaatggcaagttcgtgcttgcatccacccttgacagcaccctgaggctctggaatttttcagctgggaagtttttgaagacatacactggccatgtgaacacaaaatactgcattccggcagcattttcgatcaccaacggcaagtacattgtgagtggctcggaagacaagtgtgtctacatgtgggatcttcagtcaaggaagattgtgcagaaactggaagggcatactgacacggtcattgccgtgtcatgccaccctaaggagaacatgattgcatcaggagctcttgacaacgacaagacggtgaaagtctgggttcaaaaggacggagatcaacgagatgcgtaagccagcttattattttcttggttgtcatgtgacctcactgatgatggtagccaggtaagctacttggctccctgagtaattatagattgctgcagtggagaatgcgatgctcctgggctgtgtattttcgtcttgtgttgccttcttcgctgctgtgcgatttgtagtgaaattaaactgttccagagagccgttaatgggatggttgtatagaaaaaaaaaaaaaaaa

SEQ ID NO: 7282 - protein, 323 aa, Triticum aestivum
  misc_feature: Ceres CLONE ID no. 1326507
  misc_feature: Ceres CDNA ID no. 25891781
  misc_feature (275)..(307): Pfam Name: WD40 PFAM Desc: WD domain
  misc_feature: Homolog of GI Number: 6723411 NR Desc: putative WD
  misc_feature: Homolog of GI Number: 19388008 NR Desc: Wdr5 protein
  misc_feature: Homolog of GI Number: 30353827 NR Desc: Zgc:76895 protein
  misc_feature: Homolog of GI Number: 17864654 NR Desc: CG17437
  misc_feature: Homolog of GI Number: 58395142 NR Desc: ENSANGP00000011204
  misc_feature: Homolog of GI Number: 54643952 NR Desc: GA14510
  misc_feature: Homolog of GI Number: 40949819 NR Desc: will die slowly
  misc_feature: Homolog of GI Number: 50428732 NR Desc: putative WD G
  misc_feature: Homolog of GI Number: 66848360 NR Desc: WD repeat protein
  misc_feature: Homolog of GI Number: 55622600 NR Desc:  similar to lipoic acid synthetase isoform 1 precursor
MAAPDADETPASPGYALRATLTGHRRAVSAVKFSPDGRLLASASADKLLRVWSSADLSLVAELEGHEEGVSDLSFSPDGRLLASASDDRTVRIWDLGAGGGARLVKTLAGHTNYAFCVAFSPHGNVLASGSFDETVRVWEVRSGRSLRVLPAHSEPVTAVDFDRDGAMIVSGSYDGLCRIWDAATGHCVKTLIDDESPPVSYSKFSPNGKFVLASTLDSTLRLWNFSAGKFLKTYTGHVNTKYCIPAAFSITNGKYIVSGSEDKCVYMWDLQSRKIVQKLEGHTDTVIAVSCHPKENMIASGALDNDKTVKVWVQKDGDQRDA

SEQ ID NO: 7283 - DNA, 648 bp, Triticum aestivum
  misc_feature: Ceres CLONE ID no. 1326544
  misc_feature: Ceres CDNA ID no. 25445623
  CDS (82)..(492): REFERENCED BY SEQ ID NO: 7284
agatcaccagaccaccgcgccgaacaactctcaccggaacgcagcaaattccccagccttccctcgacccagatccgcaaaatggcccgcacgaagcagaccgcgcgcaagtcgaccggcggcaaggccccgcggaagcagctggcgaccaaggcggcgcgcaagtcggcgccggcgaccggcggcgtgaagaagccccaccgcttccgccccggcaccgtcgcgctccgcgagatccgcaagtaccagaagagcaccgagctgctcatccgcaagctgcccttccagcgcctcgtccgggagatcgcgcaggacttcaagaccgacctccgcttccagagctccgccgtgtccgccctgcaggaggccgccgaggcctacctcgtggggctcttcgaggacaccaacctctgcgccatccacgccaagcgtgtcaccatcatgaccaaggacatccagctcgcccgccgcatccgcggggagcgcgcgtaggcgccctctcgctcctgcttgatctcttcatgcctcatcgtgccatgatctagccgtgctgtagtttttagtatgtgcaatggatgtatgaatgaaaagtatgcatatctgtttacctttctctctgcttaatcatatgttcagaaaaaaaaaaaa

SEQ ID NO: 7284 - protein, 136 aa, Triticum aestivum
  misc_feature: Ceres CLONE ID no. 1326544
  misc_feature: Ceres CDNA ID no. 25445623
  misc_feature (58)..(134): Pfam Name: Histone PFAM Desc: Core histone H2A/H2B/H3/H4
  misc_feature: Homolog of GI Number: 34898300 NR Desc: histone H3
  misc_feature: Homolog of GI Number: 166384 NR Desc: histone H3
  misc_feature: Homolog of GI Number: 70753 NR Desc: histone H3
  misc_feature: Homolog of GI Number: 1362108 NR Desc: histone H3 homolog
  misc_feature: Homolog of GI Number: 34876364 NR Desc: similar to CG31613
  misc_feature: Homolog of GI Number: 34858254 NR Desc: similar to histone protein Hist2h3c1
  misc_feature: Homolog of GI Number: 34858260 NR Desc: similar to histone protein Hist2h3c1
  misc_feature: Homolog of GI Number: 57110477 NR Desc:  similar to HIST1H3I protein
  misc_feature: Homolog of GI Number: 55775689 NR Desc: histone 3
  misc_feature: Homolog of GI Number: 61839509 NR Desc:  similar to histone 1
MARTKQTARKSTGGKAPRKQLATKAARKSAPATGGVKKPHRFRPGTVALREIRKYQKSTELLIRKLPFQRLVREIAQDFKTDLRFQSSAVSALQEAAEAYLVGLFEDTNLCAIHAKRVTIMTKDIQLARRIRGERA

SEQ ID NO: 7285 - DNA, 736 bp, Triticum aestivum
  misc_feature: Ceres CLONE ID no. 1326601
  misc_feature: Ceres CDNA ID no. 36705257
  CDS (106)..(561): REFERENCED BY SEQ ID NO: 7286
ctctgagctttcggcggcggcggcgcactcatcgtgatctcaaccaggcgcgcactcctcctcctcgccgtcgtcgtctccggtccaccgccgctccacgcgaccatgtcgtcgaagaggaagaccagggagcccaaggaggagaatgtcacccttggaccggctgtccgtgagggagagcatgtctttggcgttgctcacatctttgcatccttcaatgacactttcatccatgtgactgacttgtctgggagggaaaccctggtgcggatcactggtggaatgaaggtcaaggctgatcgtgatgagtcttcaccctatgctgctatgcttgcatctcaggatgttgctacacgttgcaaggagcttggtattaccgcactgcacattaagctccgtgccactggaggcaacaagaccaagacacctggacctggagctcagtctgctctcagggctcttgctcgttctgggatgaaaattgggcgcattgaggacgtgactccagttcccactgacagcacccgccggaagggaggaaggaggggaaggaggctgtaggctatcttccaactctactggtggcaatcaagaaacttactcctctctgggtagtcctgctgtttctatgaatgtcatgaggagctttaattttgctctgttgaggatcatttgctgttagtcgtactatgaatgttgcttggatcctatttttggtccaaaaaaaaaaaaaaaa

SEQ ID NO: 7286 - protein, 151 aa, Triticum aestivum; identical to SEQ ID NO: 6220
  misc_feature: Ceres CLONE ID no. 1326601
  misc_feature: Ceres CDNA ID no. 36705257
  misc_feature: The plant is abnormally large.
  misc_feature: Useful for making plants with modulated biomass
  misc_feature (29)..(147): Pfam Name: Ribosomal_S11 PFAM Desc: Ribosomal protein S11
  misc_feature: Homolog of GI Number: 50905421 NR Desc: putative ribosomal protein S14
  misc_feature: Homolog of GI Number: 50924099 NR Desc: OJ000126_13.9
  misc_feature: Homolog of GI Number: 131773 NR Desc: 40S ribosomal protein S14
  misc_feature: Homolog of GI Number: 28436071 NR Desc: cytoplasmic ribosomal protein S14
  misc_feature: Homolog of GI Number: 21618105 NR Desc: putative ribosomal protein S14
  misc_feature: Homolog of GI Number: 131772 NR Desc: 40S ribosomal protein S14
  misc_feature: Homolog of GI Number: 77745450 NR Desc: ribosomal protein S14
  misc_feature: Homolog of GI Number: 21595448 NR Desc: putative 40S ribosomal protein S14
  misc_feature: Homolog of GI Number: 21593698 NR Desc: 40S ribosomal protein S14
  misc_feature: Homolog of GI Number: 2565340 NR Desc: ribosomal protein S14

SEQ ID NO: 7287 - DNA, 951 bp, Triticum aestivum
  misc_feature: Ceres CLONE ID no. 1326694
  misc_feature: Ceres CDNA ID no. 25445703
  CDS (77)..(829): REFERENCED BY SEQ ID NO: 7288
atccacctcgctgccttcttcttcagttacccctcgccttctcccccgcctgatcggagtctcggccgcggcagccatggcgaagacctaccccgtcgtcagcgccgagtaccaggaggccgtcgagaaggcccggcaaaagctccgcgccctcatcgccgagaagaactgctccccgctcatgctccgcctcgcgtggcactcggctgggaccttcgacgtgtcgtccaagaccggcggcccgttcgggacgatgaagaagccggcggagcaggcgcacgccgccaacgcgggcctggacatcgccgtgcggatgctcgagcccatcaaggaggagatccccaccatctcctacgccgatctctaccagcttgcgggagttgtcgccgtggaggtgtctggtgggcccgtgatccccttccacccagggagggaggacaagcctcagcccccacctgagggtcgcctccctgatgctaccaagagttctgaccacctaaggcaagtcttcggcaagcagatgggcttgagtgatcaggatattgttgccctctctggtggccacaccctgggaaggtgccacaaggagaggtctggctttgagggaccctggacaaggaaccctttgaagtttgacaactcttacttcacggagcttctgagtggtgacaaagaggggcttcttcagcttccaagtgacaaaaccctgctgactgaccctgtctttcgccctcttgtggagaaatatgctgcggatgagaaggctttcttcgaggactacaaggaggcacacctcaggctctcggaactggggtacgccgaagcgtaagaggcgtgtctactactgctgctactatgcgatcagggtgatcttgttctgcgttagactaggggtcagtgtgaacctgcagactgctaagtaatcatctctgtagaaaaaaaaaaaaaaaa

SEQ ID NO: 7288 - protein, 250 aa, Triticum aestivum
  misc_feature: Ceres CLONE ID no. 1326694
  misc_feature: Ceres CDNA ID no. 25445703
  misc_feature (19)..(227): Pfam Name: peroxidase PFAM Desc: Peroxidase
  misc_feature: Homolog of GI Number: 3688398 NR Desc: ascorbate peroxidase
  misc_feature: Homolog of GI Number: 50920595 NR Desc: Putative ascorbate peroxidase
  misc_feature: Homolog of GI Number: 15808779 NR Desc: ascorbate peroxidase
  misc_feature: Homolog of GI Number: 50940199 NR Desc: ascorbate peroxidase
  misc_feature: Homolog of GI Number: 62910196 NR Desc: cytosolic ascorbate peroxidase
  misc_feature: Homolog of GI Number: 2738949 NR Desc: cytosolic ascorbate peroxidase
  misc_feature: Homolog of GI Number: 1420938 NR Desc: cytosolic ascorbate peroxidase
  misc_feature: Homolog of GI Number: 37196687 NR Desc: cytosolic ascorbate peroxidase 2
  misc_feature: Homolog of GI Number: 600116 NR Desc: cytosolic ascorbate peroxidase
  misc_feature: Homolog of GI Number: 37196685 NR Desc: cytosolic ascorbate peroxidase 1
  misc_feature: Useful for delaying flowering time
MAKTYPVVSAEYQEAVEKARQKLRALIAEKNCSPLMLRLAWHSAGTFDVSSKTGGPFGTMKKPAEQAHAANAGLDIAVRMLEPIKEEIPTISYADLYQLAGVVAVEVSGGPVIPFHPGREDKPQPPPEGRLPDATKSSDHLRQVFGKQMGLSDQDIVALSGGHTLGRCHKERSGFEGPWTRNPLKFDNSYFTELLSGDKEGLLQLPSDKTLLTDPVFRPLVEKYAADEKAFFEDYKEAHLRLSELGYAEA

SEQ ID NO: 7289 - DNA, 737 bp, Triticum aestivum
  misc_feature: Ceres CLONE ID no. 1326837
  misc_feature: Ceres CDNA ID no. 35383382
  CDS (31)..(564): REFERENCED BY SEQ ID NO: 7290
acacgcacaagcaagctcactacacacgccatggggatgaagcgatgcatcgttcctaccatcctgctgatgcttgcactgcagtctgcagccctcctcgtcgccggcgacgtgggcgccattctcctgccgagccaaggccaagttgcagacgaagcagccatggcggccaagaagaggccgtggaagtgctgcgaccaggcggtgtgcacccgctccatcccgccgatctgccgctgcatggaccaggttttcgagtgcccctccacctgcaaggcctgcgggccgtccgtgggcgacccgtcccgccgcgtctgccaagaccagtacgtcggcgaccccgggcccatctgccggccgtgggagtgctgcgactcgcctacctgcactaagtccaacccgccgacgtgccgctgcggggacgaggtcgacaagtgtgctccgacctgcaagacctgcctgccgtccaggccgcgcccctcccgccgcgtctgcctcgacagctacttcgggcccttcccgcccgcatgcacgcccaaggctgtcgccgccggcggtaactagcacgcccgttgatcacgcgatcaacgccgtcgagtgtcctcacctaccctgctgcagactgcagtagcagtgtgtaagaataaaataaaaatggatgacctatatgtgtggtggacacacgattatgaataagacaacgtggtgatgttcaatccttaaaaaaaaaaaaaaaa

SEQ ID NO: 7290 - protein, 133 aa, Triticum aestivum
  misc_feature: Ceres CLONE ID no. 1326837
  misc_feature: Ceres CDNA ID no. 35383382
  misc_feature (95)..(120): Pfam Name: Bowman PFAM Desc: Bowman
  misc_feature: Homolog of GI Number: 62738052 NR Desc: Chain J
  misc_feature: Homolog of GI Number: 124037 NR Desc: Bowman
  misc_feature: Homolog of GI Number: 6730112 NR Desc: Chain A
  misc_feature: Homolog of GI Number: 44888777 NR Desc: putative Bowman Birk trypsin inhibitor
  misc_feature: Homolog of GI Number: 7635919 NR Desc: putative Bowman Birk trypsin inhibitor
  misc_feature: Homolog of GI Number: 34895448 NR Desc: putative Bowman Birk trypsin inhibitor
  misc_feature: Homolog of GI Number: 124024 NR Desc: Bowman
  misc_feature: Homolog of GI Number: 34895436 NR Desc: putative Bowman Birk trypsin inhibitor
  misc_feature: Homolog of GI Number: 55769977 NR Desc: putative Bowman Birk trypsin inhibitor
  misc_feature: Homolog of GI Number: 7635923 NR Desc: putative Bowman Birk tryspin inhibitor
MAAKKRPWKCCDQAVCTRSIPPICRCMDQVFECPSTCKACGPSVGDPSRRVCQDQYVGDPGPICRPWECCDSPTCTKSNPPTCRCGDEVDKCAPTCKTCLPSRPRPSRRVCLDSYFGPFPPACTPKAVAAGGN

SEQ ID NO: 7291 - DNA, 645 bp, Triticum aestivum
  misc_feature: Ceres CLONE ID no. 1327156
  misc_feature: Ceres CDNA ID no. 25892813
  CDS (54)..(479): REFERENCED BY SEQ ID NO: 7292
atcacaaacccaaacccaaagcactgtctatcctcctcaagcacacgctcacgatggcatccagagctgccatcttcgtcaccctgagcctcctcctctccgccgtcaccacgcacggctgcggaccctactgccagccgccagtcgtcgtgccgacgccgcccattgtcgttccaccgccataccatggaggaggagcgcacggccacggcgggcagtgctccatcgacgcgctaaagctgagggtgtgcgtcaacgttctcggcggcctgctcggcctcaaggtcagcgtgccggcgcgcgacgagtgctgcccgctgctccacgggttggtcgaccttgacgccgtcatctgcctctgcaccgccgtcagggccaacgtcctcagcatccacctcgacgtgcctgtggacatcagcctcctcctcaaccactgcggcaagacgtgcccgtccgagttcacttgcccagcccattaacggacgcgtactgctgcacgtacgggcgcccaataagatttgctttcgatccgtacgtcgttgttattttcgtgtccacatttgaatccttataaccggtactactctttttgtaacaatcatcagccatccaaatcatgatctattgacaaaaaaaaaaaaaaaa

SEQ ID NO: 7292 - protein, 141 aa, Triticum aestivum
  misc_feature: Ceres CLONE ID no. 1327156
  misc_feature: Ceres CDNA ID no. 25892813
  misc_feature (56)..(138): Pfam Name: Tryp_alpha_amyl PFAM Desc: Protease inhibitor/seed storage/LTP family
  misc_feature: Homolog of GI Number: 37536704 NR Desc: putative lipid transfer protein
  misc_feature: Homolog of GI Number: 31431414 NR Desc: putative lipid transfer protein
  misc_feature: Homolog of GI Number: 37536702 NR Desc: putative lipid transfer protein
  misc_feature: Homolog of GI Number: 1084460 NR Desc: RCc2 protein
  misc_feature: Homolog of GI Number: 2226329 NR Desc: physical impedance induced protein
  misc_feature: Homolog of GI Number: 31431415 NR Desc: putative lipid tranfer protein
  misc_feature: Homolog of GI Number: 37536712 NR Desc: putative lipid transfer protein
  misc_feature: Homolog of GI Number: 39748092 NR Desc: lipid transfer protein
  misc_feature: Homolog of GI Number: 31431418 NR Desc: putative lipid tranfer protein
MASRAAIFVTLSLLLSAVTTHGCGPYCQPPVVVPTPPIVVPPPYHGGGAHGHGGQCSIDALKLRVCVNVLGGLLGLKVSVPARDECCPLLHGLVDLDAVICLCTAVRANVLSIHLDVPVDISLLLNHCGKTCPSEFTCPAH

SEQ ID NO: 7293 - DNA, 596 bp, Triticum aestivum
  misc_feature: Ceres CLONE ID no. 1327253
  misc_feature: Ceres CDNA ID no. 25447401
  CDS (192)..(530): REFERENCED BY SEQ ID NO: 7294
ccatctcttcccgttcagatccacatcatgaccacacctctgatccagccatggcctccccgtgcctctcctctccatcactcaccaccaccgccataacatggagctcagccgtccagcgtttcttcctccatcgttcctgctacgccggtctccaccaccgccttctctaagttcacctttggctcccgatgtcgccgtgtctcgagctgcgttgcttccctctccaacaggccaccttcccctcatctcagatccctccgtccgtggtcatggatgatgtgcaggccgcccgtgctgctcctggagctgcccttctcgagctcggtgttgctgtgctccccaaccccctccgccagcgtcagatccggcaagctggcccaagagcaccagcatcacgccctccccaccatggtaggccgagctcctcctcacgctggcctcctccatcaaggtcgtcgagctccctctcctctgcaacggcctcgaggtcgacactaccacagaattgtaagattggtactgtgtaatatgatggtgctttgaattcgatttctgtgatgaactgaagaatttttcgaaaaaaaaaaaaaaaa

SEQ ID NO: 7294 - protein, 112 aa, Triticum aestivum
  misc_feature: Ceres CLONE ID no. 1327253
  misc_feature: Ceres CDNA ID no. 25447401
MSPCLELRCFPLQQATFPSSQIPPSVVMDDVQAARAAPGAALLELGVAVLPNPLRQRQIRQAGPRAPASRPPHHGRPSSSSRWPPPSRSSSSLSSATASRSTLPQNCKIGTV

SEQ ID NO: 7295 - DNA, 526 bp, Triticum aestivum
  misc_feature: Ceres CLONE ID no. 1327260
  misc_feature: Ceres CDNA ID no. 29191539
  CDS (83)..(292): REFERENCED BY SEQ ID NO: 7296
agacacgagcaaacgcacctccaccttctgcctcccacctctccggcgagatctctctctccgccccgcgccgcagccagccatggacgccgtggactccgtggtcgacccgctccgggagttcgccaaggacagcgttcgcctcgtcaagcgctgccacaagcccgaccgaaaggagttcaccaaggtggccattcggacggccatcgggttcgtcgtcatgggcttcgtcgggttcttcgtcaagctcatcttcatccccatcaacaacatcatcgtcgggtccggctgatctcgtctccgcaggtgaggggccgcaggacgagaggatggtgtccattcatggaggcggcgctggttttcttatcctcgtaccttaaagcaattcatttaggacttcattgtagaggacagttcccttgtgttttcatttgaaacagttgtattggtagacctggagcagttttgaacctgattccggctagaccgtaatatcaagcagtgaatgacaaaaaaaaaaaaaaaa

SEQ ID NO: 7296 - protein, 69 aa, Triticum aestivum
  misc_feature: Ceres CLONE ID no. 1327260
  misc_feature: Ceres CDNA ID no. 29191539
  misc_feature (10)..(66): Pfam Name: SecE PFAM Desc: SecE/Sec61
  misc_feature: Homolog of GI Number: 50252067 NR Desc: transport protein SEC61
  misc_feature: Homolog of GI Number: 51535598 NR Desc: putative transport protein SEC61
  misc_feature: Homolog of GI Number: 38605207 NR Desc: Protein transport protein SEC61 gamma subunit
  misc_feature: Homolog of GI Number: 72076451 NR Desc:  similar to Protein transport protein SEC61 gamma subunit
  misc_feature: Homolog of GI Number: 38605331 NR Desc: Protein transport protein SEC61 gamma subunit
  misc_feature: Homolog of GI Number: 14701917 NR Desc: SEC61
  misc_feature: Homolog of GI Number: 24652905 NR Desc: CG8860
  misc_feature: Homolog of GI Number: 32441716 NR Desc: SEC61 gamma
  misc_feature: Homolog of GI Number: 37654254 NR Desc: LRRGT00019
MDAVDSVVDPLREFAKDSVRLVKRCHKPDRKEFTKVAIRTAIGFVVMGFVGFFVKLIFIPINNIIVGSG

SEQ ID NO: 7297 - DNA, 820 bp, Triticum aestivum
  misc_feature: Ceres CLONE ID no. 1327261
  misc_feature: Ceres CDNA ID no. 36526258
  CDS (1)..(615): REFERENCED BY SEQ ID NO: 7298
accatcgaccatctccggttcgctcgtcgccccatcccatcctccctccccccgaccgattttgacgactcctttgacctctcgcgctgtccctccccgccccgcctgcgtcgccgcgccgagctccaggcgccccccctccagtcggattccatggccaacagcaacctcccccgccggatcatcaaggagacgcagcggctgctcagcgagccagcgcccgggatcagcgcctcgccgtcggaggagaacatgcgctacttcaatgtcatggtccttggccccgcgcagtcgccctacgaaggtggagtcttcaagcttgaacttttcttacccgaggaatatccgatggctgctcctaaagttaggtttctcacaaaaatataccatcccaacattgacaagcttggtagaatatgcctcgacatcctaaaggacaagtggagtccagctcttcagatacgcactgttcttttgagcattcaggcactgctgagcgccccaaacccagatgatcctctctcagaaaacgtcgcaaaacactggaaatccaatgaagctgaagctgttgagacagcgaaggaatggactcgtatgtatgccagtggcgcatgacaagctaacgctgttatggatgtaataacaccgtgtcatagttgggcctaatcgaaaaccatttgcttgataaaaacacacttgaaatgatttgcgatggacgaatgtatccagagcggcatcatttctagttggtggttgtatttgtggtgcgtgttctggcacgcttcataacttgctgcttatagtaaaaaaaaaaaaaaaa

SEQ ID NO: 7298 - protein, 153 aa, Triticum aestivum
  misc_feature: Ceres CLONE ID no. 1327261
  misc_feature: Ceres CDNA ID no. 36526258
  misc_feature (9)..(146): Pfam Name: UQ_con PFAM Desc: Ubiquitin
  misc_feature: Homolog of GI Number: 66354480 NR Desc: ubiquitinating enzyme
  misc_feature: Homolog of GI Number: 34911052 NR Desc: ubiquitin
  misc_feature: Homolog of GI Number: 71040675 NR Desc: ubiquitin
  misc_feature: Homolog of GI Number: 23308287 NR Desc: At1g78870/F9K20_8
  misc_feature: Homolog of GI Number: 79590480 NR Desc: ubiquitin conjugating enzyme/ ubiquitin
  misc_feature: Homolog of GI Number: 5381319 NR Desc: ubiquitin
  misc_feature: Homolog of GI Number: 3834310 NR Desc: Similar to Ubiquitin
  misc_feature: Homolog of GI Number: 83754522 NR Desc: Chain K
  misc_feature: Homolog of GI Number: 61369434 NR Desc: ubiquitin
MANSNLPRRIIKETQRLLSEPAPGISASPSEENMRYFNVMVLGPAQSPYEGGVFKLELFLPEEYPMAAPKVRFLTKIYHPNIDKLGRICLDILKDKWSPALQIRTVLLSIQALLSAPNPDDPLSENVAKHWKSNEAEAVETAKEWTRMYASGA

SEQ ID NO: 7299 - DNA, 1033 bp, Triticum aestivum
  misc_feature: Ceres CLONE ID no. 1327372
  misc_feature: Ceres CDNA ID no. 25892815
  CDS (75)..(878): REFERENCED BY SEQ ID NO: 7300
atcacccaaccaaccgcctctacaagcgcagcccagatctcggctccttcccttcctcgaaccaagcatcagcaatggcgaccacggcagccgacgccacggccgcggttcccaaggagcagcagcccgccaacggttccgcggccgccaccaccggcggcgagcaggtcacgcgccactccgaggtcggacacaagagcctgctccagagcgacgccctctaccagtacatcctggagacgagcgtgtacccgcgcgagcacgagtgcatgaaggagctccgcgagatcaccgccaaccacccatggaacctgatgacgacgtcggcggacgagggccagttcctcaacatgctgctcaagctcatcggcgccaagaagaccatggagatcggcgtctacaccggctactccctgctcgccaccgcgctcgccatccccgacgacggcaccatcttggccatggacatcaaccgcgagaactacgagctggggctgccgtgcatcgagaaggccggcgtggcgcacaagatcgacttccgcgagggcccggcgctgcccgtcctggacgcgctgctggaggacgaggccaaccacgggaccttcgacttcgtcttcgtggacgccgacaaggacaactacctcaactaccacgagcgcctcatgaagctcgtcaaggtcggcggcctcctcggctacgacaacaccctctggaacggctccgtcgtgctccccgccgacgcccccatgcgcaagtacatccgctactaccgcgacttcgtcctcgagctcaacaaggccctcgccgccgaccagcgcgtcgagatctgccagctccccgtcggcgacggcatcaccctctgccgccgcgccaagtgaaccagagaacccatctccgccgctccgccatagatgccaagaacaagaattaattaattactccccattttgtctttcctgctcgccttctgtactctacatctatcttctgcaattcgtataaagatttctccagacgaaaaaaaaaaaaaaaa

SEQ ID NO: 7300 - protein, 267 aa, Triticum aestivum; identical to SEQ ID NO: 1356
  misc_feature: Ceres CLONE ID no. 1327372
  misc_feature: Ceres CDNA ID no. 25892815
  misc_feature: null
  misc_feature: Useful for making plants with altered Lignin content
  misc_feature: Useful for making plants with altered cell wall composition
  misc_feature: Useful for making plants with altered cell wall content and/or composition
  misc_feature (54)..(266): Pfam Name: Methyltransf_3 PFAM Desc: O
  misc_feature: Homolog of GI Number: 49618875 NR Desc: caffeoyl
  misc_feature: Homolog of GI Number: 37221605 NR Desc: caffeoyl
  misc_feature: Homolog of GI Number: 5101868 NR Desc: Caffeoyl CoA O
  misc_feature: Homolog of GI Number: 32347451 NR Desc: caffeoyl CoA 3
  misc_feature: Homolog of GI Number: 32347473 NR Desc: caffeoyl CoA 3
  misc_feature: Homolog of GI Number: 32347447 NR Desc: caffeoyl CoA 3
  misc_feature: Homolog of GI Number: 32347487 NR Desc: caffeoyl CoA 3
  misc_feature: Homolog of GI Number: 32347437 NR Desc: caffeoyl CoA 3
  misc_feature: Homolog of GI Number: 32347489 NR Desc: caffeoyl CoA 3
  misc_feature: Homolog of GI Number: 32347439 NR Desc: caffeoyl CoA 3

SEQ ID NO: 7301 - DNA, 813 bp, Triticum aestivum
  misc_feature: Ceres CLONE ID no. 1327420
  misc_feature: Ceres CDNA ID no. 24766834
  CDS (113)..(541): REFERENCED BY SEQ ID NO: 7302
aataacttcttcccctttccacattgtcggcgaacacccaccacaatccccacgcccgaggcttcctcccgcggcgaaaccctagcgaccggagcgctcggcggcggcagccatggcggacgacgactacaatgaagttgacatggggtacgaggatgagcctccagaggctgatattgaggaaggggttgaagaagatcctgagaacaacgaggatgcccctgatgacgtggtagggggtgaaggtgaagaaaaggaacaggaaaagactgcccgtccacgcaatacaacaaaatatatgaccaagtatgagcgggcacgcatccttggcacacgtgctttgcagataagcatgaatgccccagttatggttgagcttgagggcgaaactgatcctcttgagattgccatgaaagaactgagagcacgcaagatccccttcacgattaggcggtacttacctgatggaagctacgaggactggggagttgacgagctcattgtggaggactcgtggaagcgtcaggttggcggggactaaagctggtagactgtttgaatggaagactctgtgctgcaacaaaaccttgccctagtagctatatgcaatgtttagcactgaactgctgtgacaatgttatgctatcgtaacatgtgtgggctatgtctgcccattgtgttgtgctactactgtaaaccaattgcgtggttgcgttagtttgcttggaccattgctggcatgcagctacaagttgcgaatgaacacctatcctaacctctttttgtgggtgtggtgcaaaaaaaaaaaaaaaa

SEQ ID NO: 7302 - protein, 142 aa, Triticum aestivum
  misc_feature: Ceres CLONE ID no. 1327420
  misc_feature: Ceres CDNA ID no. 24766834
  misc_feature (61)..(114): Pfam Name: RNA_pol_Rpb6 PFAM Desc: RNA polymerase Rpb6
  misc_feature: Homolog of GI Number: 50399946 NR Desc: putative DNA
  misc_feature: Homolog of GI Number: 50936931 NR Desc: putative DNA
  misc_feature: Homolog of GI Number: 4960152 NR Desc: DNA
  misc_feature: Homolog of GI Number: 33589774 NR Desc: At2g04630
  misc_feature: Homolog of GI Number: 50540154 NR Desc: zgc:92790
  misc_feature: Homolog of GI Number: 34905016 NR Desc: putative DNA
  misc_feature: Homolog of GI Number: 50416676 NR Desc: Polr2f
  misc_feature: Homolog of GI Number: 66524012 NR Desc:  similar to ENSANGP00000017467
  misc_feature: Homolog of GI Number: 61815473 NR Desc:  similar to DNA directed RNA polymerase II polypeptide F
MADDDYNEVDMGYEDEPPEADIEEGVEEDPENNEDAPDDVVGGEGEEKEQEKTARPRNTTKYMTKYERARILGTRALQISMNAPVMVELEGETDPLEIAMKELRARKIPFTIRRYLPDGSYEDWGVDELIVEDSWKRQVGGD

SEQ ID NO: 7303 - DNA, 996 bp, Triticum aestivum
  misc_feature: Ceres CLONE ID no. 1327510
  misc_feature: Ceres CDNA ID no. 25087963
  CDS (259)..(768): REFERENCED BY SEQ ID NO: 7304
aaaaggagttcgaaataataacgaagcgtatctgaaattagccgggtcgttgtcgatcaccgcgcggccaaagcttttcgcagcagatatcatcatccggccttaccccctgccttctcccctcccccttcccggattcccaccctccacctccaaacgcgcacgcgtccacgaataaaggccgagggcggcgagccaggcccaatcgccaaaaaccctagcgccgatccgatccgatcgagctctgcctcccctcccatggcggcccccccgagccaggcgagcctcctgctccagaagcagctccgagatctagcgaagaaccccgtggacgggttctcggcggggctggtggacgacggcaacgtgtttgagtggcaggtcaccatcatcggcccgccggagacgttatatgatggaggctacttcaatgcagtaatgacctttcctcaggattatcccaacagtcctccatcagtaaggtttacttctgagatgtggcatccaaacgtctatcctgatgggcgtgtgtgcatttctattcttcatccacctggtgatgatccgaatggttacgagcttgcaagtgaacggtggacaccagtgcacacagttgagagtatagttttgagcattatttcgatgctctctagtccaaacgatgagtctccagcaaatattgaagcggctaaggactggagagaaaagagggccgaattcaagaaaaaggtgaggagccttgttcgcaaatctcaggaaatgctctgaaaaaggaggatcatccgggggagtccacaagcgctgcaattctcttgctttcaccaaatggggcacctgatgccagcacttgaacttctcccctgtttattttccgttcagcgtcggtcgaatggtgatgttggtcttgtctctccgagacacttggggtgctgcctattatgaactctcgattgtattgtggcatggagttggtcaatgtcaaaaaaaaaaaaaaaa

SEQ ID NO: 7304 - protein, 169 aa, Triticum aestivum
  misc_feature: Ceres CLONE ID no. 1327510
  misc_feature: Ceres CDNA ID no. 25087963
  misc_feature (11)..(162): Pfam Name: UQ_con PFAM Desc: Ubiquitin
  misc_feature: Homolog of GI Number: 2641619 NR Desc: ubiquitin
  misc_feature: Homolog of GI Number: 50931677 NR Desc: putative ubiquitin
  misc_feature: Homolog of GI Number: 34908132 NR Desc: putative Ubiquitin carrier protein UBC7
  misc_feature: Homolog of GI Number: 2624417 NR Desc: Ubiquitin carrier protein
  misc_feature: Homolog of GI Number: 19347846 NR Desc: putative E2
  misc_feature: Homolog of GI Number: 28973769 NR Desc: putative E2
  misc_feature: Homolog of GI Number: 9759251 NR Desc: ubiquitin
  misc_feature: Homolog of GI Number: 20334880 NR Desc: AT3g46460/F18L15_180
  misc_feature: Homolog of GI Number: 81076243 NR Desc: ubiquitin
  misc_feature: Homolog of GI Number: 21436335 NR Desc: putative E2 ubiquitin
MAAPPSQASLLLQKQLRDLAKNPVDGFSAGLVDDGNVFEWQVTIIGPPETLYDGGYFNAVMTFPQDYPNSPPSVRFTSEMWHPNVYPDGRVCISILHPPGDDPNGYELASERWTPVHTVESIVLSIISMLSSPNDESPANIEAAKDWREKRAEFKKKVRSLVRKSQEML

SEQ ID NO: 7305 - DNA, 1123 bp, Triticum aestivum
  misc_feature: Ceres CLONE ID no. 1327670
  misc_feature: Ceres CDNA ID no. 24726713
  CDS (187)..(840): REFERENCED BY SEQ ID NO: 7306
aaatgagcagcaaaaggagcgcagcgagcagcagtgcacagcagagaagcggcgggaagtacgatacgatccgaacgcgtctcgcctactctgcttcctctgctccccggctagctagggtttgctccctcgccgccggcgcgcgtggccgtctgaagcagatccatcccatcccaggtttttgtgatggctcccgctattgaagcagcagagaaggtcaaggtggcaagcgcacctgttaaggctcctgttcttaatgaaagaacactatcatccatgacccggagacctggttcagcgcattcttggcatgatcttgaaataggccctgatgcaccaactatcttcaactgtgtcattgagatacctaggggcagcaaggttaaatatgaacttgacaagaaaactggactgataatggtggaccgcgtgctttattcatcagtggtgtaccctcacaactatggattcattccccgcacactgtgcgatgacagtgatccgatggatgtgctagttattatgcaggagccagttgtgccgggctgtttcctccgtgcaaaggcgatcggcctcatgcctatgattgaccagggagaagcagatgataagatcattgcagtgtgcgctgacgaccctgaatacaagcatttcaatgatatcaaggagctcccacctcaccggttggctgaaatcagacgcttctttgaggactacaagaagaatgagaacaaggaggtcgctgtgaacgactttctgccggcgactgctgcttacgaggccattcagcattccatggatctgtatgctacttacgtcgtggagggcctgcggaggtaggctgctgcccggaggttcggctcgacgcgctgctccttgtcgtcggggccgggacgatgttggcgaaaaccggagaatgagacactgtcaccttacgaactaagtactgttattttgttggtgttggcatatgtaccactggttcttatgaccttgaatgtactagtagttagcacaagaaagagtggcgcaatattcttttgtggcctcggtgcccctatgttgttaccttcatgttgattctcttgacgattcaagtcaggcatgaaaaaaaaaaaaaaaa

SEQ ID NO: 7306 - protein, 217 aa, Triticum aestivum
  misc_feature: Ceres CLONE ID no. 1327670
  misc_feature: Ceres CDNA ID no. 24726713
  misc_feature: null
  misc_feature: Useful for making plants with modulated nitrogen use efficiency
  misc_feature (55)..(209): Pfam Name: Pyrophosphatase PFAM Desc: Inorganic pyrophosphatase
  misc_feature: Homolog of GI Number: 50931109 NR Desc: putative inorganic pyrophosphatase
  misc_feature: Homolog of GI Number: 6729513 NR Desc: inorganic pyrophosphatase
  misc_feature: Homolog of GI Number: 21593570 NR Desc: inorganic pyrophosphatase
  misc_feature: Homolog of GI Number: 48927683 NR Desc: putative inorganic pyrophosphatase
  misc_feature: Homolog of GI Number: 57899927 NR Desc: putative soluble inorganic pyrophosphatase
  misc_feature: Homolog of GI Number: 6752884 NR Desc: soluble inorganic pyrophosphatase
  misc_feature: Homolog of GI Number: 40642617 NR Desc: soluble pyrophosphatase
  misc_feature: Homolog of GI Number: 20197320 NR Desc: putative inorganic pyrophosphatase
  misc_feature: Homolog of GI Number: 21537232 NR Desc: soluble inorganic pyrophosphatase
  misc_feature: Homolog of GI Number: 4033424 NR Desc: Soluble inorganic pyrophosphatase
  misc_feature: Useful for making ornamental plants with modified flowers
  misc_feature: Useful for making plants with altered leaf shape eg curled leaves
MAPAIEAAEKVKVASAPVKAPVLNERTLSSMTRRPGSAHSWHDLEIGPDAPTIFNCVIEIPRGSKVKYELDKKTGLIMVDRVLYSSVVYPHNYGFIPRTLCDDSDPMDVLVIMQEPVVPGCFLRAKAIGLMPMIDQGEADDKIIAVCADDPEYKHFNDIKELPPHRLAEIRRFFEDYKKNENKEVAVNDFLPATAAYEAIQHSMDLYATYVVEGLRR

SEQ ID NO: 7307 - DNA, 602 bp, Triticum aestivum
  misc_feature: Ceres CLONE ID no. 1328334
  misc_feature: Ceres CDNA ID no. 24766784
  CDS (2)..(409): REFERENCED BY SEQ ID NO: 7308
aatacgggcaaacaaaatgggggagatcgtaagaaggccgcagaaaggtcccagctgctcgcaaagaaggcgaggagggtgcggtgcctggtccagatctcgtggccgccatggcggagcagttcgcggagtcagcgaacaatgtaatcatcgaagaggtgaacaagggcctgaaccctggaatgatagtcctgcttgtggttgcgaccaccctgctgcttttctttgttgggaactatgcgctgtacctgtatgcgcagaagacgctccctccgaagaagaagaagccagtctcgaagaagaagctcaagagggaaaagctgaagcaaggggtttctgcaccaggggagtgaagagatccatcgatttctcatgtcgattgctttatgctgggctcctctttacctgataaaaaatatataccatctggagctgcggtgttgagcgactgtttatgtagaagccttgtcttgagtggtacatcgtcggtattggacaccttatttaagtgaactgataaaccttagcctaaattaagctgctcctggtcatagtttctttaattaaaaactttgctggggatcacaaaaaaaaaaaaaaaa

SEQ ID NO: 7308 - protein, 80 aa, Triticum aestivum
  misc_feature: Ceres CLONE ID no. 1328334
  misc_feature: Ceres CDNA ID no. 24766784
  misc_feature: The plant is abnormally small.
  misc_feature: Useful for making plants with modulated growth and phenotype characteristics
  misc_feature: The sequence is a functional homolog of  SEQ ID NO 1765 in the  11/479,226 US patent application
  misc_feature: The sequence is a functional homolog of  SEQ ID NO 1769 in the  11/479,226 US patent application
  misc_feature: The sequence is a functional homolog of  SEQ ID NO 2604 in the  10/374,780 US patent application
  misc_feature: The sequence is a functional homolog of  SEQ ID NO 874 in the  10/412,699 US patent application
  misc_feature: The sequence is a functional homolog of  SEQ ID NO 960 in the  10/225,066 US patent application
  misc_feature: Useful for making plants with modulated biomass
  misc_feature (10)..(80): Pfam Name: S1FA PFAM Desc: DNA binding protein S1FA
  misc_feature: Homolog of GI Number: 38347601 NR Desc: OSJNBa0042I15.14
  misc_feature: Homolog of GI Number: 38347600 NR Desc: OSJNBa0042I15.13
  misc_feature: Homolog of GI Number: 1173349 NR Desc: DNA BINDING PROTEIN S1FA
  misc_feature: Homolog of GI Number: 498705 NR Desc: s1Fa
MAEQFAESANNVIIEEVNKGLNPGMIVLLVVATTLLLFFVGNYALYLYAQKTLPPKKKKPVSKKKLKREKLKQGVSAPGE

SEQ ID NO: 7309 - DNA, 799 bp, Triticum aestivum
  misc_feature: Ceres CLONE ID no. 1328466
  misc_feature: Ceres CDNA ID no. 25891729
  CDS (62)..(598): REFERENCED BY SEQ ID NO: 7310
acggccgccatctccttaggtttcagttctcctccgcctccggtctcgagagctcgccagaatggtcgcccacaggttccaccagtaccaggtggtgggtcgcgcgctgccgacccccggcgatgagcagcccaagatctaccgcatgaagctctgggccaccaatgaggtccgcgccaagtccaagttctggtacttcctgaggaagctcaagaaggtgaagaaggccaacggccagatgctcgccatcaacgagatctttgagaagaaccccaccaccatcaagaactacggcatctggctgaggtaccagagcaggaccggttaccacaacatgtacaaggagtaccgtgacacgaccctcaacggcggggtggagcagatgtacacggagatggcgtcgcggcaccgcgtgcgtgccccctgcatccagatcatcaagactgcgacggtggacttcaagctgtgcaagagggacaacacgaagcagttccacaactcgaagatcaagttcccgctggtgtaccagaaggttcgcccacccacccgcaagctcaagaccacctacaaggcgacgaggcccaacctcttcatgtgagcgggtccctactctactggcctgtgtgttttagcgtgtaagagtttgaagatttttgcatgtggaagttttggttaagcactttgatgatgttttcggtcgctaaggatgctgctgctttgatgcaactcttgactttgtttggtattagtaatgcgcagcagatccatcaactgctagcccgcaaaaaaaaaaaaaaaa

SEQ ID NO: 7310 - protein, 178 aa, Triticum aestivum
  misc_feature: Ceres CLONE ID no. 1328466
  misc_feature: Ceres CDNA ID no. 25891729
  misc_feature (5)..(178): Pfam Name: Ribosomal_L18ae PFAM Desc: Ribosomal L18ae protein family
  misc_feature: Homolog of GI Number: 50511482 NR Desc: putative 60S ribosomal protein L18a
  misc_feature: Homolog of GI Number: 34909590 NR Desc: putative ribosomal protein L18a
  misc_feature: Homolog of GI Number: 34910926 NR Desc: putative 60S ribosomal protein L18A
  misc_feature: Homolog of GI Number: 30102898 NR Desc: At2g34480
  misc_feature: Homolog of GI Number: 20453309 NR Desc: AT3g14600/MIE1_10
  misc_feature: Homolog of GI Number: 21593925 NR Desc: putative 60S ribosomal protein L18A
  misc_feature: Homolog of GI Number: 13430184 NR Desc: ribosomal protein L18a
  misc_feature: Useful for making ornamental plants with modified flowers
  misc_feature: Useful for making ornamental plants with modified leaves
  misc_feature: Useful for making plants with altered leaf shape eg curled leaves
  misc_feature: Useful for making shorter plants
MVAHRFHQYQVVGRALPTPGDEQPKIYRMKLWATNEVRAKSKFWYFLRKLKKVKKANGQMLAINEIFEKNPTTIKNYGIWLRYQSRTGYHNMYKEYRDTTLNGGVEQMYTEMASRHRVRAPCIQIIKTATVDFKLCKRDNTKQFHNSKIKFPLVYQKVRPPTRKLKTTYKATRPNLFM

SEQ ID NO: 7311 - DNA, 698 bp, Triticum aestivum
  misc_feature: Ceres CLONE ID no. 1328495
  misc_feature: Ceres CDNA ID no. 24766786
  CDS (83)..(559): REFERENCED BY SEQ ID NO: 7312
atcacagctctcaatcccaatctcccatcacaaaaccaatcctcctccgcgccccgatccccaagagcatcacctgcaagcaatggacgtctcaggcaccggagctggcgccaagggcaagaagggcgcggccgggcgcaaggccggcggccccaggaagaagtcggtgacgcgctccgtcaaggccgggctccagttccccgtcggccgcatcgggcgctacctcaagaagggccgctacgcccagcgcgtcggcaccggcgcccccgtctacctcgccgccgtcctcgagtacctcgccgccgagctgctggagctcgccggaaacgccgccaaggacaacaagaagagccgcatcatcccgcgccacctgctgctcgctgtcaggaacgacgaggagctcggaaagctgctggccggcgtcaccatcgcgcacggtggcgtgatccccaagatcaacccggtgctcctccccaagaggaccgcggagaaggagggcaaggagcccaagtctcctaagaagacgaccaagtcccccaagaagaccaccaaggcttagatcgatgcgttccatgtcgtagtgttcttcgtagtggtccggtggtgttcctgtagcggtttcgtttcatcttgttatgtgcatgtttaatggaagaacgtcagaaatctctctgacttgcacaaaaaaaaaaaaaaaa

SEQ ID NO: 7312 - protein, 158 aa, Triticum aestivum
  misc_feature: Ceres CLONE ID no. 1328495
  misc_feature: Ceres CDNA ID no. 24766786
  misc_feature (31)..(106): Pfam Name: Histone PFAM Desc: Core histone H2A/H2B/H3/H4
  misc_feature: Homolog of GI Number: 729671 NR Desc: Histone H2A
  misc_feature: Homolog of GI Number: 34914498 NR Desc: putative histone H2A
  misc_feature: Homolog of GI Number: 47026912 NR Desc: histone H2A
  misc_feature: Homolog of GI Number: 47026919 NR Desc: histone H2A
  misc_feature: Homolog of GI Number: 121974 NR Desc: HISTONE H2A.2.1
  misc_feature: Homolog of GI Number: 121982 NR Desc: HISTONE H2A.2.2
  misc_feature: Homolog of GI Number: 122006 NR Desc: HISTONE H2A
  misc_feature: Homolog of GI Number: 7649159 NR Desc: histone H2A
  misc_feature: Homolog of GI Number: 50931693 NR Desc: putative histone H2A
  misc_feature: Homolog of GI Number: 61826353 NR Desc:  similar to Histone H2A.x
MDVSGTGAGAKGKKGAAGRKAGGPRKKSVTRSVKAGLQFPVGRIGRYLKKGRYAQRVGTGAPVYLAAVLEYLAAELLELAGNAAKDNKKSRIIPRHLLLAVRNDEELGKLLAGVTIAHGGVIPKINPVLLPKRTAEKEGKEPKSPKKTTKSPKKTTKA

SEQ ID NO: 7313 - DNA, 751 bp, Triticum aestivum
  misc_feature: Ceres CLONE ID no. 1328637
  misc_feature: Ceres CDNA ID no. 35383383
  CDS (86)..(565): REFERENCED BY SEQ ID NO: 7314
aacaaaaatccactgcaaaaaaccactagcagttcttcgttgcagcatcatcacacagatttaaggttcaatctccagatagaaaatggcgaacgcggtgtcgggcgtggcggtgagcgaggagtgcgtgagggcgttccaggagatgcgcgcggggcgcgcgcaccgcttcgtggtgtacaagatggacgacgccgtgcagcgggtggtggtggacaaggtgggcggccgcgacgccggcttcgacgacctcaccgcggccctccccaccgccgactgccgctacgccgtctatgacctcgacttcaccgtcggcgacgccaccgccaaaggcgccgacggggaggcgccgcgcagcaagattttcttcatctcctggtcgccggcgagtgcggaggtgaagagcaagatgatctacgccagctccaacgaggggttcaagaaggagctggacggcacgcagatcgacgtgcaggccaccgaccccagcgagctcacgctcgacatcctaggaccacgccacctaaccaatcaatcaatccctcccgtgtgtatgtatgattgacggttcacgcgtgcacgttacgtgcgtgcgtgtgctagttttgtgctgtgcatgtatctttgccctcttcgattgtgttgtgtgcttccaactggatcgtgtcgtccgcacgaagaatgatgatgatttcccttgtactacgtggtgtgcaaataattgactctttcctcaaaaaaaaaaaaaaaa

SEQ ID NO: 7314 - protein, 159 aa, Triticum aestivum
  misc_feature: Ceres CLONE ID no. 1328637
  misc_feature: Ceres CDNA ID no. 35383383
  misc_feature (12)..(147): Pfam Name: Cofilin_ADF PFAM Desc: Cofilin/tropomyosin
  misc_feature: Homolog of GI Number: 50919481 NR Desc: putative actin
  misc_feature: Homolog of GI Number: 1381154 NR Desc: WCOR719
  misc_feature: Homolog of GI Number: 11066101 NR Desc: actin depolymerization factor
  misc_feature: Homolog of GI Number: 7441447 NR Desc: actin
  misc_feature: Homolog of GI Number: 48374972 NR Desc: putative actin depolymerizing factor
  misc_feature: Homolog of GI Number: 50927855 NR Desc: OSJNBb0012E24.5
  misc_feature: Homolog of GI Number: 1419370 NR Desc: actin depolymerizing factor
  misc_feature: Homolog of GI Number: 50251759 NR Desc: putative actin
  misc_feature: Homolog of GI Number: 50919483 NR Desc: putative actin depolymerizing factor
  misc_feature: Homolog of GI Number: 21593877 NR Desc: Actin
MANAVSGVAVSEECVRAFQEMRAGRAHRFVVYKMDDAVQRVVVDKVGGRDAGFDDLTAALPTADCRYAVYDLDFTVGDATAKGADGEAPRSKIFFISWSPASAEVKSKMIYASSNEGFKKELDGTQIDVQATDPSELTLDILGPRHLTNQSIPPVCMYD

SEQ ID NO: 7315 - DNA, 974 bp, Triticum aestivum
  misc_feature: Ceres CLONE ID no. 1328639
  misc_feature: Ceres CDNA ID no. 29191540
  CDS (80)..(658): REFERENCED BY SEQ ID NO: 7316
cccaaaccctagcgccggcgcctccacttctctgctccctcctctcctcgcgcgcagggcccggcgaaagggaagcaagatgtacaccgccaggaagaagatccagaaggacaagggcgtcgagccctccgagttcgaggacaccgtcgcgcaggctttctttgacctggagaatggcaaccaggagctcaagagcgacctcaaggacctgtacatcaacactgcaatccagatggatgttgttggcaacaggaaggccgtggtgatccatgtgccgtaccgtctgcgcaagcccttcaggaagatccatgtcaggctcgtcagggagctggagaagaagtttagtggcaaggatgtggtctttgttgcaacaagaaggattgtgaggccacccaagaagggttctgctgttcagcgccctcgcaccaggaccctgacagctgttcatgatggtatcttggaggatgtcgtgtacccagctgagattgtggggaagcgtgtcagataccgtttggatggtgccaaggtcatcaagatctacttggacccaaaggagcgcaacaacactgaatacaagctggagaccttctctgcagtctaccgcaggctttgtgggaaagacgttgtctttgagtaccctgtgactgaaaccgcctgaagatccatgccttgaatgtctccatttcatatctttctgatccaaatgttttggttgaggtcttggttagttgtgctatcaatgtattccagaaacatagttttgttaactatctggggttaggaagtttgatgaagatggcaatgaacgtgaacaatgttaaagttttgagcatttaaattatgaacctatgctccgttatcttgttgcacttgattgtcatctctaattgttcaacatctatgcttagtcactgcaattcactattgcatatctgttggtataaaaaaaaaaaaaaagaaaaaaaaaaaaaaaa

SEQ ID NO: 7316 - protein, 192 aa, Triticum aestivum; identical to SEQ ID NO: 5114
  misc_feature: Ceres CLONE ID no. 1328639
  misc_feature: Ceres CDNA ID no. 29191540
  misc_feature: The plant is abnormally large.
  misc_feature: The plant is abnormally small.
  misc_feature: Useful for making plants with modulated biomass
  misc_feature (4)..(191): Pfam Name: Ribosomal_S7e PFAM Desc: Ribosomal protein S7e
  misc_feature: Homolog of GI Number: 57471724 NR Desc: ribosomal protein S7
  misc_feature: Homolog of GI Number: 14787424 NR Desc: Ribosomal protein S7
  misc_feature: Homolog of GI Number: 4588906 NR Desc: ribosomal protein S7
  misc_feature: Homolog of GI Number: 22671664 NR Desc: ribosomal protein S7
  misc_feature: Homolog of GI Number: 55167942 NR Desc: putative 40S ribosomal protein S7
  misc_feature: Homolog of GI Number: 77999315 NR Desc: ribosomal protein S7
  misc_feature: Homolog of GI Number: 5532505 NR Desc: 40S ribosomal protein S7 homolog
  misc_feature: Homolog of GI Number: 4128206 NR Desc: 40S ribosome protein S7
  misc_feature: Homolog of GI Number: 21555683 NR Desc: 40S ribosomal protein S7 homolog
  misc_feature: Homolog of GI Number: 6957719 NR Desc: putative 40S ribosomal protein
  misc_feature: Useful for decreasing plant size
  misc_feature: Useful for delaying flowering time
  misc_feature: Useful for increasing chlorophyll and photosynthetic capacity
  misc_feature: Useful for making larger plants
  misc_feature: Useful for making ornamental plants with modified flowers
  misc_feature: Useful for making ornamental plants with modified leaves
  misc_feature: Useful for making plants with altered leaf shape eg curled leaves
  misc_feature: Useful for making plants with increased biomass
  misc_feature: Useful for making plants with increased biomass and foliage
  misc_feature: Useful for making plants with increased biomass and foliage

SEQ ID NO: 7317 - DNA, 763 bp, Triticum aestivum
  misc_feature: Ceres CLONE ID no. 1328651
  misc_feature: Ceres CDNA ID no. 25445765
  CDS (79)..(579): REFERENCED BY SEQ ID NO: 7318
attccagtgtcagcacctgctagctaccactcctctcatcctcttggacgatcaccctcctccgctgcgttgacaaagatggccgcacgcctcgcgctggtggtggcgctcctgtgcgccggtgccgcggccgccgcggcgcagcaggcgagcaacgtccgggcgacctaccactactaccgcccggctcagaacgggtgggacctgggcgcccccgccgtgagcgcctactgctccacctgggacgccggcaagccgtactcgtggcggtccaggtacggctggacggcgttctgcggccccgccggcccccgcggccaggcgtcctgcgggcggtgcatccgggtgaccaacacgggcacgggggcgcagatcacggcgaggatcgtggaccagtgcgccaacggcgggctggacctcgactgggacacggtgttcgtcaagatcgacaccgacggcatggggtaccagaggggccacctcatcgtcaactaccagttcgtcgactgccgcgacaaccacatcaacttccatggaaagaacgagacgctcccagccagcactgatgctgttgcgtaagtaaaagctactgtagtagcacatgcatgatgctcaaatgccgcattgttgcgctgtacgcacacatgtatgaatgcatggcacggatcaagtggaataaatttcatgtatggatcttatggttgtaagttgtaacagcggaaagtggaataaatctcagaagttggcaaaaaaaaaaaaaaaa

SEQ ID NO: 7318 - protein, 166 aa, Triticum aestivum
  misc_feature: Ceres CLONE ID no. 1328651
  misc_feature: Ceres CDNA ID no. 25445765
  misc_feature (23)..(144): Pfam Name: Barwin PFAM Desc: Barwin family
  misc_feature: Homolog of GI Number: 45862004 NR Desc: putative vacuolar defense protein
  misc_feature: Homolog of GI Number: 78096543 NR Desc: putative vacuolar defense protein
  misc_feature: Homolog of GI Number: 3135959 NR Desc: wheatwin2
  misc_feature: Homolog of GI Number: 3135957 NR Desc: wheatwin1
  misc_feature: Homolog of GI Number: 1808651 NR Desc: pathogenesis
  misc_feature: Homolog of GI Number: 77551733 NR Desc: barwin
  misc_feature: Homolog of GI Number: 77551734 NR Desc: Barwin family
  misc_feature: Homolog of GI Number: 38018635 NR Desc: pathogenesis
  misc_feature: Homolog of GI Number: 322831 NR Desc: barwin
  misc_feature: Homolog of GI Number: 442694 NR Desc: Barwin
MAARLALVVALLCAGAAAAAAQQASNVRATYHYYRPAQNGWDLGAPAVSAYCSTWDAGKPYSWRSRYGWTAFCGPAGPRGQASCGRCIRVTNTGTGAQITARIVDQCANGGLDLDWDTVFVKIDTDGMGYQRGHLIVNYQFVDCRDNHINFHGKNETLPASTDAVA

SEQ ID NO: 7319 - DNA, 795 bp, Triticum aestivum
  misc_feature: Ceres CLONE ID no. 1328699
  misc_feature: Ceres CDNA ID no. 36527586
  CDS (69)..(581): REFERENCED BY SEQ ID NO: 7320
aaaaaagaaaatccccatcccggcggccgttggacgacagcgtcaggtcgaccttcgacggcgagagcatgcagcagtcacgcgcatggtcgtcccttgcccgcggcttagcgcgccgcctcgccggaggagcgccgtcagctccgattcctcctctccagtcctcgggaatctccaccggctcggcctgtctgctcgcccgccaggacggaggttttgttcatggtgggttcatggattccattcgtattggtggcgttgtgatacctaaccacaagagggtggagtacgcgctgcaatccatccatggcattggccgggcacgcgcccgtcagatcctttcagagctcaatttggagaacaaggtcaccaaagacctctccaaggaggagatcatcaccctccgtgaggggatcgcaaagtacatgattgaaacagacctaagacggtttaagagtgcggcagttgagagattggaagggattagatgctacaggggcatccggcacgcggatgctctcccggtacgtggccagagaacaaagaccaatggcaggactcacaaggaaaagagggcttgagttgccaacaagtcgttctcgagcctcccaagaataattagtcatgctaccattatttagctcctttttggttttgtttgtcctgcactaccgcgctactgttaatcgacagttaatccgataataaatgctaggtgtctcccagctggcctctgctggactttccaaactttcaaattcaactagtttggtttggttaaaaaaaaaaaaaaaa

SEQ ID NO: 7320 - protein, 115 aa, Triticum aestivum
  misc_feature: Ceres CLONE ID no. 1328699
  misc_feature: Ceres CDNA ID no. 36527586
  misc_feature (5)..(109): Pfam Name: Ribosomal_S13 PFAM Desc: Ribosomal protein S13/S18
  misc_feature: Homolog of GI Number: 50918105 NR Desc: putative 30S ribosomal protein S13
  misc_feature: Homolog of GI Number: 1107483 NR Desc: 30S ribosomal protein S13
  misc_feature: Homolog of GI Number: 7573457 NR Desc: ribosomal protein precursor
  misc_feature: Homolog of GI Number: 20977547 NR Desc: ribosomal protein S13
  misc_feature: Homolog of GI Number: 56477616 NR Desc: 30S ribosomal protein S13
  misc_feature: Homolog of GI Number: 21672748 NR Desc: 30S ribosomal protein S13
  misc_feature: Homolog of GI Number: 15594845 NR Desc: ribosomal protein S13
  misc_feature: Homolog of GI Number: 82409987 NR Desc: Ribosomal protein S13
  misc_feature: Homolog of GI Number: 75828521 NR Desc: COG0099: Ribosomal protein S13
  misc_feature: Homolog of GI Number: 9657160 NR Desc: ribosomal protein S13
MDSIRIGGVVIPNHKRVEYALQSIHGIGRARARQILSELNLENKVTKDLSKEEIITLREGIAKYMIETDLRRFKSAAVERLEGIRCYRGIRHADALPVRGQRTKTNGRTHKEKRA

SEQ ID NO: 7321 - DNA, 1221 bp, Triticum aestivum
  misc_feature: Ceres CLONE ID no. 1328993
  misc_feature: Ceres CDNA ID no. 25445818
  CDS (124)..(972): REFERENCED BY SEQ ID NO: 7322
ttccattgcttgcttgctcctctgttctcttctccttgcattattatttccctccgtctccttcctcgcatccagccgcaactctccccctcctttgacttgcttccaagaaagccgatcgccatgcgcgtgcagtgcgacgtctgcggcctcgagccggccgccgtgctctgctgcgccgacgaggccgcgctctgctccccctgcaaccgccgcgtccaccgcgccaacaagctcgccggcaagcaccgccgcctcaccctcctccagccctccccggccgccaacgacgccgccgcgccgctctgcgacgtctgcaaggagcggagggggctcgtgttctgcgtggaggaccgggcgatcctgtgcgccgactgcgacgagcccattcacagcgccaacgagctcacggccaagcacagccgcttcctcctcgtcggtgccaagctctccgccgaccccgtggaccaggagatcccctccccggacgggagctccgtcgagcaggacgactgctcggcctcggccgccgaggaagcccctgcagttcatgacgccagccacgccggaggaggaggaggaggaagcagcatctcagactacctcaccaacatctgccccggctggcaagtcgacgaactcctcttcgacgacgccgccttcgtcgccaagcagaaggggcgcgacgagcaggtgccgttcctggacgccgacctgttcgacgtggtcgccgccgagcgtccggggaagcgcggcgcgtgggcgccccacgtgccgcatacgccggttccggcctggggcctgcaggagtttccggccgctttggtggccccggcggcggcggcgaaggccaagcaggggcacgtgcgggagtggtaccacagcgacagcgacagcgacgtgttcgccgtgccggagatcacgtcgccgccggccaagcgggcgcggccgtcgtcgttctggtgcctgtgaaccagctagcgcggcggccaaccacccacgccgccgcagcaaccgggcgagctacgtacccgtgactcgatcgatccatcactagtgtaatctttgctcgttgtagcttggtgtgaccgaagtagtaccgaactctagtagcgcatctatggtagtagagtacgctgttttatgcatataagaatgttgctgtcgtatcataaataagtagcgaacgaatcgtgatctcctccaaaaaaaaaaaaaaaa

SEQ ID NO: 7322 - protein, 282 aa, Triticum aestivum
  misc_feature: Ceres CLONE ID no. 1328993
  misc_feature: Ceres CDNA ID no. 25445818
  misc_feature (59)..(104): Pfam Name: zf PFAM Desc: B
  misc_feature: Homolog of GI Number: 53793349 NR Desc: zinc finger protein
  misc_feature: Homolog of GI Number: 50911231 NR Desc: putative zinc finger protein
  misc_feature: Homolog of GI Number: 50927033 NR Desc: OSJNBa0011L07.9
  misc_feature: Homolog of GI Number: 26452767 NR Desc: putative zinc finger protein
  misc_feature: Homolog of GI Number: 22329252 NR Desc: zinc finger
  misc_feature: Homolog of GI Number: 50925803 NR Desc: OJ990528_30.8
  misc_feature: Homolog of GI Number: 25404982 NR Desc: protein F10A5.24
  misc_feature: Homolog of GI Number: 55775454 NR Desc: zinc
  misc_feature: Homolog of GI Number: 50910283 NR Desc: zinc finger protein
  misc_feature: Homolog of GI Number: 34903708 NR Desc: putative zinc
MRVQCDVCGLEPAAVLCCADEAALCSPCNRRVHRANKLAGKHRRLTLLQPSPAANDAAAPLCDVCKERRGLVFCVEDRAILCADCDEPIHSANELTAKHSRFLLVGAKLSADPVDQEIPSPDGSSVEQDDCSASAAEEAPAVHDASHAGGGGGGSSISDYLTNICPGWQVDELLFDDAAFVAKQKGRDEQVPFLDADLFDVVAAERPGKRGAWAPHVPHTPVPAWGLQEFPAALVAPAAAAKAKQGHVREWYHSDSDSDVFAVPEITSPPAKRARPSSFWCL

SEQ ID NO: 7323 - DNA, 926 bp, Triticum aestivum
  misc_feature: Ceres CLONE ID no. 1329060
  misc_feature: Ceres CDNA ID no. 29191541
  CDS (81)..(719): REFERENCED BY SEQ ID NO: 7324
atcccatcccatccgcagcggctttacctaccgagaagaagagagaaaaaaggttcgagtgcgttgcagagtgagaagagatggctccggtgaagctgtacggcgcgaccctgtcgtggaacgtcaccaggtgcgtggcggcgctggaggaggccggcgtcgagtacgagctcgtccccatcaacttcggcaccggcgagcacaagagccccgaccacctcgccaggaacccctttggccaggtgccagctttgcaggatggtgacttgtacgtcttcgaatcacgtgctatttgcaagtatgcgtgccgcaagaacaagccagagctgttgaaggagggcgacatcaaggagtcagcaatggtggatgtgtggctcgaggtggaggcccatcagtacaccgccgctctgagccccattctcttcgagtgccttatccatcctatgcttgggggagccactgaccagaaggtcattgacgacaaccttgttaagatcaagaacgtgctggcagtgtacgaggcgcacctgagcaagtccaagtacctggctggagactccctcagtcttgcggaccttaaccatgtgtctgtcaccctgtgcttggcggctacaccctacgcatctctgttcgacgcgtacccgcatgtgaaggcctggtggactgacctgttggcgaggccgtccgtccagaaggtcgctgcgctgatgaagccatgatcttagtttctggcgctcgttcgtcgcgaaataagccgaggtgtgtcccccctgatgtgtgcctgtacgagtgtgtgttcttgtgatgtctcctcgtgttgattgttcaggcttgtgcttgcgatcctgtctaatcttgtactgaaatgagcattcctgtgctctggtttaataataaattgtgcccaggtaaaaaaaaaaaaaaaa

SEQ ID NO: 7324 - protein, 212 aa, Triticum aestivum
  misc_feature: Ceres CLONE ID no. 1329060
  misc_feature: Ceres CDNA ID no. 29191541
  misc_feature (4)..(77): Pfam Name: GST_N PFAM Desc: Glutathione S
  misc_feature (93)..(201): Pfam Name: GST_C PFAM Desc: Glutathione S
  misc_feature: Homolog of GI Number: 5923877 NR Desc: glutathione S
  misc_feature: Homolog of GI Number: 23504749 NR Desc: glutathione transferase F1
  misc_feature: Homolog of GI Number: 21212950 NR Desc: glutathione
  misc_feature: Homolog of GI Number: 44894209 NR Desc: glutathione s
  misc_feature: Homolog of GI Number: 554565 NR Desc: glutathione S
  misc_feature: Homolog of GI Number: 168491 NR Desc: glutathione S
  misc_feature: Homolog of GI Number: 3891708 NR Desc: Chain D
  misc_feature: Homolog of GI Number: 56412207 NR Desc: glutathione S
  misc_feature: Homolog of GI Number: 66615 NR Desc: glutathione transferase
  misc_feature: Homolog of GI Number: 21790 NR Desc: glutathione transferase
  misc_feature: Useful for making larger plants
MAPVKLYGATLSWNVTRCVAALEEAGVEYELVPINFGTGEHKSPDHLARNPFGQVPALQDGDLYVFESRAICKYACRKNKPELLKEGDIKESAMVDVWLEVEAHQYTAALSPILFECLIHPMLGGATDQKVIDDNLVKIKNVLAVYEAHLSKSKYLAGDSLSLADLNHVSVTLCLAATPYASLFDAYPHVKAWWTDLLARPSVQKVAALMKP

SEQ ID NO: 7325 - DNA, 839 bp, Triticum aestivum
  misc_feature: Ceres CLONE ID no. 1329061
  misc_feature: Ceres CDNA ID no. 35383384
  CDS (263)..(658): REFERENCED BY SEQ ID NO: 7326
aataaaataaaataacaccggctagctacctagctaattatcaccctacggtcccgtccacaccaccaccaccggcccttctccaatcgccaccgattcctctggccggagaccgatccctcccacccgccgccacctccgtcgcagctgccggcgcagcctcctcgtcgcgcggcggccgccgtctccgccgcacgcgcctcgcgctcgagacttgcatacctgaacagcctcgaaaggaacgatggcgctatcacgtagtatgaggacatgcttgcatagtggaagacttgccgccctggcaatactggtctctgctgggatcgtattgcagattttggcatgtgctctttataacaactggtggccaatgttaacagttctgatgtacctcatactacccatgccactcatatttttcctgggctccgattctccgtcgatcatgtcgaacgagaatgatgggtgggtgaacttcaccaagttcctgacgggcgcgtcgatcgtgggcagcatcgccatcccgtcgatactgaagcacgccggcgttatcgggtggggcgcgctgacgatggagctgtcctccttcgccgtcttcgggctggccatcgtgtggttcctccagatgaactctgaggacgagtacagcgccttctgatctccagagcttcatcctctcctgaatctatggtctgcgtgctattggcggtaccacactagaaatagggatcatcaacttgtgaatatctacagtatgatttggagcattggtgtgcttgaccttgcttatatcagtgaagtgtgcctgttcagttgcgtgtacaaaaaaaaaaaaaaaa

SEQ ID NO: 7326 - protein, 137 aa, Triticum aestivum
  misc_feature: Ceres CLONE ID no. 1329061
  misc_feature: Ceres CDNA ID no. 35383384
  misc_feature (10)..(136): Pfam Name: Vps55 PFAM Desc: Vacuolar protein sorting 55
  misc_feature: Homolog of GI Number: 51090588 NR Desc: vacuolar protein sorting 55 protein
  misc_feature: Homolog of GI Number: 57900172 NR Desc: vacuolar protein sorting 55 family
  misc_feature: Homolog of GI Number: 18399269 NR Desc: vacuolar protein sorting 55 family protein / VPS55 family protein
  misc_feature: Homolog of GI Number: 45198869 NR Desc: AFR351Cp
  misc_feature: Homolog of GI Number: 34905898 NR Desc: P0458E05.25
  misc_feature: Useful for making ornamental plants with modified leaves
MALSRSMRTCLHSGRLAALAILVSAGIVLQILACALYNNWWPMLTVLMYLILPMPLIFFLGSDSPSIMSNENDGWVNFTKFLTGASIVGSIAIPSILKHAGVIGWGALTMELSSFAVFGLAIVWFLQMNSEDEYSAF

SEQ ID NO: 7327 - DNA, 655 bp, Triticum aestivum
  misc_feature: Ceres CLONE ID no. 1329079
  misc_feature: Ceres CDNA ID no. 25445766
  CDS (61)..(444): REFERENCED BY SEQ ID NO: 7328
ttttttttcagacagagttggcaagcgcagacagacagaacttgagagagcgcacgcgagatggcagcctccatgatcacctcgccgattgtggcgccgacgagcgtgccgtccctctcccgccggggctcctccttcgccgtcgtctgcagcggtggcaagaagatcaaggtcgataagcccctcggactcggaggcggcttgacagtcgacatcgacgccaacggcaggaaggtcggcaagaagggcgtgtaccagtttgttgacaagtacggtgccaacgtcgacggctacagcccaatctacacgccagaggaatggtctgagtctggtgaccgctacgccggcggaacgaccgggcttcttatctgggccgtcaccctcgccggcctcctcggcggcggcgtcctcctcgtctacaacaccagcgctctcgccggctaagagagcatctacgtgtaacacagggccgggtctctgcttgcatgcacgtctctgtaatctgcgtagctacctcctgtgaatgtatgcaatcaacgatgcaaagtaattgatccgaacagatggtttatgtgtatgtacgtaacgctgttacgatatacttcctactttggaaactgtaaaagggtggattcttggaaaaaaaaaaaaaaaa

SEQ ID NO: 7328 - protein, 127 aa, Triticum aestivum
  misc_feature: Ceres CLONE ID no. 1329079
  misc_feature: Ceres CDNA ID no. 25445766
  misc_feature (31)..(127): Pfam Name: PsbR PFAM Desc: Photosystem II 10 kDa polypeptide PsbR
  misc_feature: Homolog of GI Number: 50942069 NR Desc: putative photosystem II 10K protein
  misc_feature: Homolog of GI Number: 1835731 NR Desc: photosystem II 10 kDa polypeptide
  misc_feature: Homolog of GI Number: 37783281 NR Desc: photosystem II polypeptide
  misc_feature: Homolog of GI Number: 81471 NR Desc: photosystem II 10K protein precursor
  misc_feature: Homolog of GI Number: 25989650 NR Desc: photosystem II 10 kDa protein
  misc_feature: Homolog of GI Number: 83776786 NR Desc: chloroplast photosystem II 10 kDa protein
  misc_feature: Homolog of GI Number: 1217642 NR Desc: PSII polypeptide
  misc_feature: Homolog of GI Number: 21489 NR Desc: ST
  misc_feature: Homolog of GI Number: 1418984 NR Desc: photosystem II 10 kD polypeptide
  misc_feature: Homolog of GI Number: 33694227 NR Desc: 10 kDa photosystem II polypeptide
MAASMITSPIVAPTSVPSLSRRGSSFAVVCSGGKKIKVDKPLGLGGGLTVDIDANGRKVGKKGVYQFVDKYGANVDGYSPIYTPEEWSESGDRYAGGTTGLLIWAVTLAGLLGGGVLLVYNTSALAG

SEQ ID NO: 7329 - DNA, 796 bp, Triticum aestivum
  misc_feature: Ceres CLONE ID no. 1329096
  misc_feature: Ceres CDNA ID no. 25445642
  CDS (86)..(553): REFERENCED BY SEQ ID NO: 7330
aaaccacctcaaccgcaccacagctcagctcccacccactcccaaaccctctcgccggagccccagcaacccgccagcaagcaagatggacggcagcaaggcgaagaaggtggcggcgaagaagttcggcgggccgaggaagaagtcggtgaccaagtccatcaaggccgggctccagttccccgtcggccgcatcgggcgctacctcaagaagggccgctacgcccagcgcgtcggctccggcgcccccgtctacctcgccgccgtcctcgagtacctcgcagcagaggtgctggagctggccgggaacgccgccaaggacaacaagaagagccgcatcgtgcccaggcacctgctgctggccatccgcaacgaccaggagctcgggaggctgctgtccggcgtcaccatcgcccacggcggcgtcatccccaacatcaacccggtgctgctccccaagaaggccgccgagaaggctgagaaggccgagaagaccgccaccaagtcgcccaagaaggccaccaagtcccccaagaaggccaccaaggcgtagatctggctccgagcgcccgtgccggtgaactggactgatggtgctccgtcagccctcgtgtgcctagtgtctctgtgttaagttagctgtggtgtgttccagagtgtgttgaagcttgttcttttgctttgccccgccatgtaaccgtgaacgaagaggaagcgtcttgcttcctctgttctgctatatcaatctggtttctaatgcagtgtttgttaaaacgccagaaaaaaaaaaaaaaaa

SEQ ID NO: 7330 - protein, 155 aa, Triticum aestivum
  misc_feature: Ceres CLONE ID no. 1329096
  misc_feature: Ceres CDNA ID no. 25445642
  misc_feature (30)..(94): Pfam Name: CBFD_NFYB_HMF PFAM Desc: Histone
  misc_feature: Homolog of GI Number: 121974 NR Desc: Histone H2A.2.1
  misc_feature: Homolog of GI Number: 121982 NR Desc: Histone H2A.2.2
  misc_feature: Homolog of GI Number: 729671 NR Desc: Histone H2A
  misc_feature: Homolog of GI Number: 34914498 NR Desc: putative histone H2A
  misc_feature: Homolog of GI Number: 7649159 NR Desc: histone H2A
  misc_feature: Homolog of GI Number: 536890 NR Desc: protein H2A
  misc_feature: Homolog of GI Number: 47026912 NR Desc: histone H2A
  misc_feature: Homolog of GI Number: 47026919 NR Desc: histone H2A
  misc_feature: Homolog of GI Number: 122003 NR Desc: Histone H2A
  misc_feature: Homolog of GI Number: 5777792 NR Desc: histone H2A
MDGSKAKKVAAKKFGGPRKKSVTKSIKAGLQFPVGRIGRYLKKGRYAQRVGSGAPVYLAAVLEYLAAEVLELAGNAAKDNKKSRIVPRHLLLAIRNDQELGRLLSGVTIAHGGVIPNINPVLLPKKAAEKAEKAEKTATKSPKKATKSPKKATKA

SEQ ID NO: 7331 - DNA, 656 bp, Triticum aestivum
  misc_feature: Ceres CLONE ID no. 1329143
  misc_feature: Ceres CDNA ID no. 25445767
  CDS (3)..(488): REFERENCED BY SEQ ID NO: 7332
aaatttcccagaccacccaaacccacacaacccactcggcggcggcgacggcggcggcggcggagcacgcgaagatggtgaagttcctgaagccgggcaaggcggtgatccttctccagggtcggttcgccggccggaaggcggtcattgtgcgcgttttcgaggagggcacgcgcgaccgcccctacggccactgcctcgtcgccggcctagccaagtaccccaagaaggtgatccgtaaggactcggccaagaagacggcgaagaagtcgcgcgtgaagtgcttcctgaagctggtcaacttcacccacatcatgcccacccgctacaccctggatgtcgacttcaaggacgtggcctccggcgggcccgacgccctcgccacccgcgacaagaaggtcgcctcctgcaaggccgccaaggcacgtctcgaggagaggttcaagaccggcaagaacaggtggttcttcaccaagctccgcttctaggagcagagcgtctttacaatactagtattccttgttcttgcaatcaatagcacactgagctatctctatcactgtttttgtattgtccatgaggattttgtggttagtatggatctcggagagagtttaattaaggcatgatgatgatgatgaaaaaaaaaaaaaaaa

SEQ ID NO: 7332 - protein, 137 aa, Triticum aestivum
  misc_feature: Ceres CLONE ID no. 1329143
  misc_feature: Ceres CDNA ID no. 25445767
  misc_feature (5)..(40): Pfam Name: KOW PFAM Desc: KOW motif
  misc_feature (52)..(137): Pfam Name: Ribosomal_L27e PFAM Desc: Ribosomal L27e protein family
  misc_feature: Homolog of GI Number: 50906961 NR Desc: putative 60S ribosomal protein L27
  misc_feature: Homolog of GI Number: 37536910 NR Desc: putative ribosomal protein L27
  misc_feature: Homolog of GI Number: 20466061 NR Desc: putative ribosomal protein
  misc_feature: Homolog of GI Number: 8131701 NR Desc: ribosomal protein L27
  misc_feature: Homolog of GI Number: 23198420 NR Desc: putative ribosomal protein L27
  misc_feature: Homolog of GI Number: 21554529 NR Desc: ribosomal protein L27
  misc_feature: Homolog of GI Number: 7441035 NR Desc: ribosomal protein L27
  misc_feature: Homolog of GI Number: 7441033 NR Desc: ribosomal protein L27
  misc_feature: Homolog of GI Number: 6010292 NR Desc: 60S ribosomal protein L27
  misc_feature: Homolog of GI Number: 20768 NR Desc: ribosomal protein L27
  misc_feature: Useful for making taller plants and plants with longer inflorescences
MVKFLKPGKAVILLQGRFAGRKAVIVRVFEEGTRDRPYGHCLVAGLAKYPKKVIRKDSAKKTAKKSRVKCFLKLVNFTHIMPTRYTLDVDFKDVASGGPDALATRDKKVASCKAAKARLEERFKTGKNRWFFTKLRF

SEQ ID NO: 7333 - DNA, 750 bp, Triticum aestivum
  misc_feature: Ceres CLONE ID no. 1329388
  misc_feature: Ceres CDNA ID no. 25445805
  CDS (77)..(526): REFERENCED BY SEQ ID NO: 7334
aaactacgcgccgccaccaaaaaccctaacctgcgccgccgcgctcacagcaaccaagcacaccgccgcagccaccatggcagccgttctcacccgcccgacgccgggcaccgtccagtgcttcggccggaagaagaccgccgtcgccgtggcctactgcaaacccgggcgcggcctcatcaaggtcaacggcgcccccatcgagctcatccgccccgagatgctccgcctgaaggccttcgagccgatccttctcgccggcaggtcccgcttcaaggacatcgacatgcgtatccgcgtccgcggcggagggaagacgagccagatctactccatccgccaggccatcgcgaagtctctcgtcgcctactaccagaagtacgtcgacgaggcggccaagaaggaggtgaaggagatcttcggccgctacgaccggacgctcctcgtcgccgacccgcgccgctgcgagcccaagaagtttggcggtcgcggtgcccgcgcgcgtttccagaagtcgtaccgttgagctccggcgagatctcttgttgggtatggcggcggtggcctactccttgcctgcctatctatctaccttttaccgctagtagtttgttttcttttgaaccaatgaattggatatgatctctaagaactgtgagttgtctgcagtatcctgcctagttgacgaaggggttttgctatcataatcttatgttaaaaaaaaaaaaaaaaagaaaaaaaaaaaaaaaa

SEQ ID NO: 7334 - protein, 149 aa, Triticum aestivum; identical to SEQ ID NO: 2758
  misc_feature: Ceres CLONE ID no. 1329388
  misc_feature: Ceres CDNA ID no. 25445805
  misc_feature (17)..(149): Pfam Name: Ribosomal_S9 PFAM Desc: Ribosomal protein S9/S16
  misc_feature: Homolog of GI Number: 77552917 NR Desc: ribosomal protein S9
  misc_feature: Homolog of GI Number: 7440266 NR Desc: probable ribosomal protein S16
  misc_feature: Homolog of GI Number: 2641209 NR Desc: ribosomal protein S16
  misc_feature: Homolog of GI Number: 6984222 NR Desc: 40S ribosomal protein S16
  misc_feature: Homolog of GI Number: 439654 NR Desc: RS16 protein
  misc_feature: Homolog of GI Number: 21555842 NR Desc: 40S ribosomal protein S16
  misc_feature: Homolog of GI Number: 16323500 NR Desc: putative 40S ribosomal protein S16
  misc_feature: Homolog of GI Number: 4574242 NR Desc: ribosomal protein S16
  misc_feature: Homolog of GI Number: 6721162 NR Desc: putative 40S ribosomal protein S16
  misc_feature: Homolog of GI Number: 66853021 NR Desc: ribosomal protein S9

SEQ ID NO: 7335 - DNA, 740 bp, Triticum aestivum
  misc_feature: Ceres CLONE ID no. 1329390
  misc_feature: Ceres CDNA ID no. 25445771
  CDS (36)..(503): REFERENCED BY SEQ ID NO: 7336
aagtcccccaactctccaagtccaaccccacgaccatggcgaccaagcagagcctcctcgccgccgcagccgtctgtctcctcctcctcctccccctcccggcagcctacgccgtcaccgatgtcgagtactgcaataagggcaaaaactacccggtgaaggtgagcggcgtggagatcgtgcctgatccggtcgagcgcggcgtgccggccaccttcaagatctccgctacaacagataaaaacatcaccgaggggaagctggttattgatgttaaatattggatcttcaatgtttactctgaaacggatgacatctgtacgaagacccaatgcccggcaacttctgattttgagctatctcactcgcaaaccttaccatcaatcactccaccgggttcttacaccattcagatgaagatgctcggaaagcacgatgaggaattgagctgcatctccttcgggttcaacattggcttccttgcgccggttgccttgagttgaaggcatgcacgggttgcatgcggaactacacacttgtggattgtaactctagaaacctctttatcctagtatatgttttctgtgtaacactcgtcggtgccgcaacactttgtgttcgactaagaagtttttatcaagagttgaacatcacaataaaatgaaaatctggtgtaatgagacatggaaccgtgttagtttctgagaacatcagctctgggcgcaaagaaaaaaaaaaaa

SEQ ID NO: 7336 - protein, 155 aa, Triticum aestivum
  misc_feature: Ceres CLONE ID no. 1329390
  misc_feature: Ceres CDNA ID no. 25445771
  misc_feature (26)..(146): Pfam Name: E1_DerP2_DerF2 PFAM Desc: ML domain
  misc_feature: Homolog of GI Number: 50355738 NR Desc: putative  ML domain protein
  misc_feature: Homolog of GI Number: 55294668 NR Desc: putative ML domain protein
MATKQSLLAAAAVCLLLLLPLPAAYAVTDVEYCNKGKNYPVKVSGVEIVPDPVERGVPATFKISATTDKNITEGKLVIDVKYWIFNVYSETDDICTKTQCPATSDFELSHSQTLPSITPPGSYTIQMKMLGKHDEELSCISFGFNIGFLAPVALS

SEQ ID NO: 7337 - DNA, 1344 bp, Triticum aestivum
  misc_feature: Ceres CLONE ID no. 1329400
  misc_feature: Ceres CDNA ID no. 25402444
  CDS (100)..(1113): REFERENCED BY SEQ ID NO: 7338
tcgaaaaactcgctgtctcagtctccagcaacaaaaggagcacactaccctgccggctcacacccgctgccggggcacctacgcacagactaggcagccatgcgtcgcctccactacaccatcaccaccctgctctccgcaacctgcctccttctgcacgccatggcgtcgccggcactgcctgacccggggtcgctcgagccgtccctgctcttcccgtcggccggcgcctcccaggcccaacccgccgcggcatccaccatcccggcattccccgagcagtccgaggccgcggccacctcttccgtctgccagctcaccccttccccgccgctcctcccggccgtcctggcctcctgcaacgccggcagcggcagcggcgtcctcccgccgcggctgcggtgctgcccggccctggccgcgtggctgtacgccgcgtacgcgcccaccgcgttggggagcgacggcagcaggtggtcgaagctccccgccgcggcggcggacgtgacggacctgccgctgctgccggacgacgtggaggagtgcgcgggcgccgcggagcgcgcgctgaggtccgcgggagcgacgctgccgcagccgcaggcggggagcaacaatgggacgacgtgcgacgtgcccttctgctactgcgggataaggctgaggcggccggtctgcgcgctgccggcgggcagggctgcgaggaggctggagagggactgcgcgcggccggggctcgccggctgctcccggtgcctccgggcgctgaacctgctgaacgccattggagagaagaacgccacgtcggggaaggccagtcatggcgggaagccacgtgagcgtgactgccagctcatggggctgacgtggctgctgcagcggaacgccacgcggcatcgggcggccgccacggcggtcctccaggccctcatggcggccgaggaggcgggggctaccagcgcgcccgccacgtgctcgctccccgtcgatggcctgccgcttgccgtcgcgtcgtcggagatcaacggcgccgccgatgtgtcccccatgggcagcctgcttcttcgctttctgctggggacgtctgccttcatcttgtcccggcggttctgagcaaaatctgatcttcgctgcgcggtctctttgctatttcttctgtgtttgcacttctgatgttgaattagtagttgttcaatttgtttgtacttctgatgatgtttagttcttgaaaggctagggactagagagtggacttcgttactgtaattatatgcaatcccggtggggatgcctaatctagtgagcgtgcattgcatctccatttaaacaaaaaaaaaaaaaaaa

SEQ ID NO: 7338 - protein, 337 aa, Triticum aestivum
  misc_feature: Ceres CLONE ID no. 1329400
  misc_feature: Ceres CDNA ID no. 25402444
  misc_feature: Homolog of GI Number: 55239156 NR Desc: ENSANGP00000028192
  misc_feature: Homolog of GI Number: 66776896 NR Desc: LigA
  misc_feature: Homolog of GI Number: 66778010 NR Desc: Cytochrome c  heme
  misc_feature: Homolog of GI Number: 66776175 NR Desc: ABC
  misc_feature: Homolog of GI Number: 55665385 NR Desc: serine\/arginine repetitive matrix 1
  misc_feature: Homolog of GI Number: 55586489 NR Desc:  similar to Ser/Arg
  misc_feature: Homolog of GI Number: 50759930 NR Desc:  similar to Ser/Arg
  misc_feature: Homolog of GI Number: 57043292 NR Desc:  similar to serine/arginine repetitive matrix 1
  misc_feature: Homolog of GI Number: 23274133 NR Desc: Serine/arginine repetitive matrix 1
MRRLHYTITTLLSATCLLLHAMASPALPDPGSLEPSLLFPSAGASQAQPAAASTIPAFPEQSEAAATSSVCQLTPSPPLLPAVLASCNAGSGSGVLPPRLRCCPALAAWLYAAYAPTALGSDGSRWSKLPAAAADVTDLPLLPDDVEECAGAAERALRSAGATLPQPQAGSNNGTTCDVPFCYCGIRLRRPVCALPAGRAARRLERDCARPGLAGCSRCLRALNLLNAIGEKNATSGKASHGGKPRERDCQLMGLTWLLQRNATRHRAAATAVLQALMAAEEAGATSAPATCSLPVDGLPLAVASSEINGAADVSPMGSLLLRFLLGTSAFILSRRF

SEQ ID NO: 7339 - DNA, 1083 bp, Triticum aestivum
  misc_feature: Ceres CLONE ID no. 1329425
  misc_feature: Ceres CDNA ID no. 29191542
  CDS (106)..(903): REFERENCED BY SEQ ID NO: 7340
ctcattctttgtcatcccggcggcggcgcgtagaacaggagaaggagcaggcggcggcggtgcccgaagaggagaagcacggcgacctagcccgagctcgcaaccatggctaggggtttgaagaagcatctgaagaggctcaatgccccgtctcactggatgcttgacaagcttggtggagcttttgcccccaagccatcatctggtcctcacaaggccagggagtgcctgcctctgatcctcatcctgaggaacagactgaaatatgctctcacctaccgtgaagtgcaatctatccttatgcagcgtcatatcatggttgatggaaaggtccgcactgacaagacctaccctgctgggttcatggacatcatttccattcccaagactggtgagaactacaggcttctttatgacaccaagggtcgcttccgccttcactctgtcagggatgaggatgctaagttcaagctctgcaaggtcaggtctgtccagttcggccagaagggcatcccctacctgaacacctatgatggccgcaccatccgctacccagacccactcatcaaggccaatgacaccatcaagctcgacctggagaccaacaagattgttgacttcatcaagtttgacgtcggcaatgtggtcatggttactggtgggcgcaacactgggcgtgttggtgtgatcaagaacagggagaagcataagggaaccttcgagaccatccacgttgaggatgcgcagggccaccagtttgccacccgtctgggcaacgtgttcaccatcggcaagggcaccaagccgtgggtgagcctccccaagggcaagggtatcaagctcaccatcattgaggagcagaggaagcgggatgccgctgcccaggctgctgccaaggcctgattctgaggcgttgagtcgttttgctatagccagttatcttcaaggatatagacctatgttcctggaaccgtcgtttttaagttttgcctgatgtttgttgatttgcgaactcgtggttgctgctagatgtaatgtggatgtttaccttattaagtgctatttcgaaaaaaaaaaaaaaaa

SEQ ID NO: 7340 - protein, 265 aa, Triticum aestivum; identical to SEQ ID NO: 7134
  misc_feature: Ceres CLONE ID no. 1329425
  misc_feature: Ceres CDNA ID no. 29191542
  misc_feature (175)..(211): Pfam Name: KOW PFAM Desc: KOW motif
  misc_feature (3)..(40): Pfam Name: RS4NT PFAM Desc: RS4NT
  misc_feature (42)..(90): Pfam Name: S4 PFAM Desc: S4 domain
  misc_feature (94)..(170): Pfam Name: Ribosomal_S4e PFAM Desc: Ribosomal family S4e
  misc_feature: Homolog of GI Number: 53791616 NR Desc: putative 40S ribosomal protein S4
  misc_feature: Homolog of GI Number: 50252099 NR Desc: putative ribosomal protein S4
  misc_feature: Homolog of GI Number: 44894458 NR Desc: ribosomal protein S4
  misc_feature: Homolog of GI Number: 2331301 NR Desc: ribosomal protein S4 type I
  misc_feature: Homolog of GI Number: 48596901 NR Desc: ribosomal protein
  misc_feature: Homolog of GI Number: 2345154 NR Desc: ribsomal protein S4
  misc_feature: Homolog of GI Number: 73759787 NR Desc: ribosomal protein S4
  misc_feature: Homolog of GI Number: 22138108 NR Desc: 40S ribosomal S4 protein
  misc_feature: Homolog of GI Number: 457803 NR Desc: ribosomal protein S4
  misc_feature: Homolog of GI Number: 82400118 NR Desc: 40S ribosomal protein S4
  misc_feature: Useful for increasing chlorophyll and photosynthetic capacity

SEQ ID NO: 7341 - DNA, 1246 bp, Triticum aestivum
  misc_feature: Ceres CLONE ID no. 1329861
  misc_feature: Ceres CDNA ID no. 25446102
  CDS (316)..(822): REFERENCED BY SEQ ID NO: 7342
aaaaatgtcccaggccggcccctctctccccactccttccttaaaccccccataagccttgttcctttcccttctctctagctactcttgcagcctcgctcctcttctccagcaggcctctccggctccaaacacgaacggtgaggaggcgccggagcaagctgccgtcgcggcgcgccactgccggtggagtcgagtctcgaagccggagtagtggagatagagcttctgccccctctcggcggcgttgatcctctgcagcaggaaaaaaggggcgaacgtacgcgtagccagcagcagtagcgggggaggaagatgatgatgactcaagtggccaaccacagcaagaggaaccacaccgacagctacttcagcgggaagcagcagcagcagcagcagcaggccggcgccaccaccaccagcggcggctcggaggagttcgcgggcatggggtccaagaagccgaggaacgccagcccccggggcagcggcggccccatttctcccaaggagaagaaggacaaggtcggcgagagagtggcggcgctgcagcagctcgtgtcgccatttgggaagacggacacagcttctgttcttcaggaggcctcgggctacatcaagttcctgcaccagcagctcgaggttcttagctccccgtacatgcgccctcctccggcgcccggcgccgagcctgaggaccccgaccactacagcctgcggaaccgcggcctgtgcctggtgccggtagagcagacgctgcagctgacccagagcaacggggccgacctctgggcgccggcgaacaccaccagacgcacctgaagtgaagcccgaggcaggcctcgacggcggcgatggccgcactgcgtggcaggggtagaattccggtgcaagcgcgcgcatgcgcatggctgacccaattcggtcaatctcctaacacaatcgtttcgtttcgtttatgtgaacctcctcaacaggccctgtgctggcgccggtagtatgtaatgtgtaatcgtcgtgtatagcgagacgacgtaccgccgatcgatggatcgatcggtccccgtggtcgttgcgtgggtgactctgtggtttaacattggtagcgacctgttgctgtcgccgactaatcatcaaaagcagcagtttcattcatgcccgtccgtgctcatcaacccttgtagtactagagagtatcaacatgcggtgcatgcatttgtgcggggtgcgaaaaaaaaaaaaaaaa

SEQ ID NO: 7342 - protein, 168 aa, Triticum aestivum
  misc_feature: Ceres CLONE ID no. 1329861
  misc_feature: Ceres CDNA ID no. 25446102
  misc_feature: Homolog of GI Number: 50925813 NR Desc: OJ990528_30.9
  misc_feature: Homolog of GI Number: 32562996 NR Desc: bHLH transcription factor
  misc_feature: Homolog of GI Number: 21593443 NR Desc: ER33 protein
  misc_feature: Homolog of GI Number: 5669656 NR Desc: ER33 protein
  misc_feature: Homolog of GI Number: 32562998 NR Desc: bHLH transcription factor
  misc_feature: Homolog of GI Number: 33111977 NR Desc: putative bHLH133 transcription factor
  misc_feature: Homolog of GI Number: 42562634 NR Desc: ethylene
  misc_feature: Homolog of GI Number: 25403382 NR Desc: protein F17F8.3
  misc_feature: Homolog of GI Number: 50937043 NR Desc: bHLH transcription factor
MMMTQVANHSKRNHTDSYFSGKQQQQQQQAGATTTSGGSEEFAGMGSKKPRNASPRGSGGPISPKEKKDKVGERVAALQQLVSPFGKTDTASVLQEASGYIKFLHQQLEVLSSPYMRPPPAPGAEPEDPDHYSLRNRGLCLVPVEQTLQLTQSNGADLWAPANTTRRT

SEQ ID NO: 7343 - DNA, 1108 bp, Triticum aestivum
  misc_feature: Ceres CLONE ID no. 1329913
  misc_feature: Ceres CDNA ID no. 40351758
  CDS (73)..(741): REFERENCED BY SEQ ID NO: 7344
actcatcacccacacagcgtacacaacacagcacaaacacaaaccaatcgagatccaaagcaaccaagagcaatggcgggcgagaaggggctggtgctgctggacttctgggtgagcccgttcgggcagcgcgtccgcatcgcgctggccgagaagggcctgccctacgagtacgtggaggaggacctgatggccggcaagagcgaccgcctcctccgctccaacccggtgcacaagaagatcccggtgctcctccacgacggccgccccgtcaacgagtccctcatcatcctccagtacctcgaggacgccttcccggacgccccggccctcctcccctccgacccctacgcgcgcgcgcaggcccgcttctgggccgactacgtcgacaagaaggtctacgactgcggctcccggctctggaagctcaagggcgagccgcaggcgcaggcgcgcgccgagatgctggagatcctcaagaccctcgacggcgcgctcggggacaagcccttcttcggcggcgacaagttcgggttcgtggacgccgccttcgcgcccttcaccgcgtggttccacagctacgagaggtacggcgagttcagcctggcggaggtggcgcccaagatcgccgcgtgggccaagcgctgcggcgagcgggagagcgtcgccaagagcctctactcgccggacaaggtgtacgacttcatcggcctgctcaagaagaagtacggcatcgagtagggcgcgcgggcgggcgggcggccatgcaggcgacagccggccggccgtccggaggaaaggaacaaataaatcatggagcgatttgggtggcctacaatgcgtacgtctggatatttgtttctttcttcgtggaataaagtgttccgtgtgtgtgtggttggtggtagttggttgggtcagtcagtgtgggtgcgtgttgcgtactcgtgatgtgtgtgtgtcaatgtgtcaaccctggtcttcagtggtggcagctgtgatttcatttccattccgtgcgatgaataaattaagagggggtcttcgttgttttaaaaaaaaaaaaaaaaaaaaaaaaaaaaaaaaaaaaagaaaaaaaaaaaaaaaa

SEQ ID NO: 7344 - protein, 222 aa, Triticum aestivum
  misc_feature: Ceres CLONE ID no. 1329913
  misc_feature: Ceres CDNA ID no. 40351758
  misc_feature (7)..(79): Pfam Name: GST_N PFAM Desc: Glutathione S
  misc_feature (88)..(196): Pfam Name: GST_C PFAM Desc: Glutathione S
MAGEKGLVLLDFWVSPFGQRVRIALAEKGLPYEYVEEDLMAGKSDRLLRSNPVHKKIPVLLHDGRPVNESLIILQYLEDAFPDAPALLPSDPYARAQARFWADYVDKKVYDCGSRLWKLKGEPQAQARAEMLEILKTLDGALGDKPFFGGDKFGFVDAAFAPFTAWFHSYERYGEFSLAEVAPKIAAWAKRCGERESVAKSLYSPDKVYDFIGLLKKKYGIE

SEQ ID NO: 7345 - DNA, 1037 bp, Triticum aestivum
  misc_feature: Ceres CLONE ID no. 1329960
  misc_feature: Ceres CDNA ID no. 24727389
  CDS (83)..(835): REFERENCED BY SEQ ID NO: 7346
catttaagcttaaacccatgtcccctaacccccccgtaggtctccgtcccgaattccccattccccatctccctccctctccatggccgccgccgccgcttccatggcccgcaggctgctctcccccaccacctcctcgccgtccaccgccatacgcctcctcatctcccgccgcatcgcctccgccccgtccatcccgcacgccccggccgcggcggcgagggagatgctgcgcccggcggccgtcgcctcctcgtcctccttcctcctccgcggcgccgggggcgccaggggaatggcgcggcggccggggggcgacgggtactcccccgcgcggggcgggggcgggggcggggccggaggggaccgcgcgcccacggagatggcgccgctgttccccgggtgcgactacgagcactggctgatcgtcatggacaagcccggcggcgagggcgcctccaagcaccagatgatcgactgctacgtccagaccctcgccaaggtcctcggaagcgaggaggaggccaagaggaagatttacaacgtctcgtgcgagcgctacttcgggttcgggtgtgagattgatgaggagacatccaacaagcttgaagggattcctggtgttctgtttgtactccccgattcctatgtggaccctgaacacaaggactatggagccgagctgtttgtgaatggggagattgtgcagagatcacccgagaggcagaggagggtggagcccgttccgcagagagcgtcggacaggccgaggtacaacgacaggacccggtacgcgcgccggagggagaaccagcagcagcagcagcagcgatgatccaccacacgaccgagctagaggcaacctgctgtgctgttttcatcccctcgacacagcaagtagctggtattgcttggttttagcaatccgtttcatgttgctactactctgttatgtgtatgtatttgacgacttggagcttgaaactaagaagcttgatagcataaaagaattttagagctgaaaaaaaaaaaaaaaa

SEQ ID NO: 7346 - protein, 250 aa, Triticum aestivum
  misc_feature: Ceres CLONE ID no. 1329960
  misc_feature: Ceres CDNA ID no. 24727389
  misc_feature: Homolog of GI Number: 34897972 NR Desc: putative plastid protein
  misc_feature: Homolog of GI Number: 2440029 NR Desc: DAL1 protein
  misc_feature: Homolog of GI Number: 20453405 NR Desc: At2g33430/F4P9.20
  misc_feature: Homolog of GI Number: 2246378 NR Desc: plastid protein
  misc_feature: Homolog of GI Number: 21617909 NR Desc: plastid protein
  misc_feature: Homolog of GI Number: 20465721 NR Desc: putative plastid protein
  misc_feature: Homolog of GI Number: 51979643 NR Desc: PREDICTED OJ1119_D01.18 gene product
  misc_feature: Homolog of GI Number: 50726526 NR Desc: putative plastid protein
  misc_feature: Homolog of GI Number: 21593052 NR Desc: DAG protein
  misc_feature: Homolog of GI Number: 50912421 NR Desc: RNA recognition motif
MAAAAASMARRLLSPTTSSPSTAIRLLISRRIASAPSIPHAPAAAAREMLRPAAVASSSSFLLRGAGGARGMARRPGGDGYSPARGGGGGGAGGDRAPTEMAPLFPGCDYEHWLIVMDKPGGEGASKHQMIDCYVQTLAKVLGSEEEAKRKIYNVSCERYFGFGCEIDEETSNKLEGIPGVLFVLPDSYVDPEHKDYGAELFVNGEIVQRSPERQRRVEPVPQRASDRPRYNDRTRYARRRENQQQQQQR

SEQ ID NO: 7347 - DNA, 1314 bp, Triticum aestivum
  misc_feature: Ceres CLONE ID no. 1330169
  misc_feature: Ceres CDNA ID no. 25891074
  CDS (1)..(909): REFERENCED BY SEQ ID NO: 7348
cttctttgctgccgtccctccctctctctcttcctgcttcgtcctcgtcggttgcatctcctcctcggcccgatccagctccgccgaccgactgctgttgttctctctgtcttctcggtgcgtgcgtgggtgatccaagggagtgaagggggagcggggagtggagagttaggggggcggatggatccgtcgggcgcgttcgcgcggagctcgagcaatgtgtcgctggcgtcactggtgaggagcgggagcggcggcagcgggagcagccgcgggaggggcggcgccggcggcagccggaggatggtgcgccgggtgctccgcggcgtcatcaccttcatcttcgccatcgccggcctgttcctgggagccgtcaccggcgggctgatcggactggccaccgagagcggcctcttccgcggcaccggcatcggcgccatcactggggcgctcgtgtccatcgaggtcgtcgactcctccatccgcctctggcgctcccgccggtccgggatctggagcatcttgtacgtgcttaatgtgatctacagcctcctgacgggcaggctcgtccgcgagaaggttgatccggcagtgcagcgggtggtccgcagccagatgaatgcagtggactcatcacagttcagggaggcccctgacctcttcgagatcgagggaaccaacgggatgccgagggcgtccatcgacaaactgcccgagggaatcatcaccgaggagtataaccggaatgccgtcggtgacctctctgggtgctcagtatgcctgcaggatttccagattggggagaaggtgcggagcttgcccgattgcctgcacgtgttccacgtgccgtgcatcgacggttggctgatcaagcacggatcgtgcccgctctgcaggaggaagctctagatcatcatcatcaccatcatccacgaccgacgacgaagaccgacgaggaacttctaaaattctgtctgctgctattaggaaggaggtcttgctctgcttgctgctttgcatgctgtgtgtgcgcgcgctatgcctgtgttgctgttgctgctgttaggaggctgacatatctatagaacgaaccctaaatttatagagctcttttttttttgccttcttttctttttgcattttgatttttgatctctctcttctcccggcggatgtaatatagtagtacgtacgaccaccggaacaaaaaaagcactggaccggcttgcgcttcgttgttgttctccggactgatgaactcctcaaatcatcatgtaatgttatatatatcacactgcaaaaaaaaaaaaaaaa

SEQ ID NO: 7348 - protein, 242 aa, Triticum aestivum
  misc_feature: Ceres CLONE ID no. 1330169
  misc_feature: Ceres CDNA ID no. 25891074
  misc_feature (197)..(238): Pfam Name: zf PFAM Desc: Zinc finger
  misc_feature: Homolog of GI Number: 18855037 NR Desc: putative zinc finger protein
  misc_feature: Homolog of GI Number: 50948297 NR Desc: putative NEP1
  misc_feature: Homolog of GI Number: 27524904 NR Desc: NEP1
  misc_feature: Homolog of GI Number: 27524902 NR Desc: NEP1
  misc_feature: Homolog of GI Number: 50912679 NR Desc: putative NEP1
  misc_feature: Homolog of GI Number: 52076527 NR Desc: RING zinc finger protein
  misc_feature: Homolog of GI Number: 17065626 NR Desc: putative RING zinc finger protein
  misc_feature: Homolog of GI Number: 13592175 NR Desc: ppg3
  misc_feature: Homolog of GI Number: 72547023 NR Desc: proteophosphoglycan ppg4
  misc_feature: Homolog of GI Number: 72547036 NR Desc: proteophosphoglycan 5
  misc_feature: Useful for making bigger plants
  misc_feature: Useful for making shorter plants
MDPSGAFARSSSNVSLASLVRSGSGGSGSSRGRGGAGGSRRMVRRVLRGVITFIFAIAGLFLGAVTGGLIGLATESGLFRGTGIGAITGALVSIEVVDSSIRLWRSRRSGIWSILYVLNVIYSLLTGRLVREKVDPAVQRVVRSQMNAVDSSQFREAPDLFEIEGTNGMPRASIDKLPEGIITEEYNRNAVGDLSGCSVCLQDFQIGEKVRSLPDCLHVFHVPCIDGWLIKHGSCPLCRRKL

SEQ ID NO: 7349 - DNA, 666 bp, Triticum aestivum
  misc_feature: Ceres CLONE ID no. 1330226
  misc_feature: Ceres CDNA ID no. 40351759
  CDS (91)..(507): REFERENCED BY SEQ ID NO: 7350
acaaccccaacacaaacctccagtcctccccgcgcgccgcaaccttccccaacccgatccctcgtcgcctccacctccggcgaaaccgccatggcgcccaaggccgagaagaagcccaccgcggagaagaagccggtggagacggagaagaagcccaaggccgagaagcgcgtgcccggcaaggacggcggcgccggcgccgacaagaagaagaagaaggccaagaagagcgtcgagacctacaagatctacatcttcaaggtcctgaagcaggtgcaccccgacatcggcatctcctccaaggccatgtccatcatgaactccttcatcaacgacatcttcgagaagctcgctggcgagtcggccaagctggctcgctacaacaagaagcccaccatcacctcccgggagatccagaccgccgtgcgcctcgtcctccccggcgagctcgccaagcacgccgtctccgagggcaccaaggccgtcaccaagttcacctcctcttagattgcctgccgcccgccgaggctcttgtcagtctggttccgtttcttcgtgtgtcaacaatcgcaggggcttaggatcccctatacaaacagtgtaaaatgagtcggattatctgaatcaatgaatcatccagtggttgtttcaaaaaaaaaaaaaaaa

SEQ ID NO: 7350 - protein, 138 aa, Triticum aestivum
  misc_feature: Ceres CLONE ID no. 1330226
  misc_feature: Ceres CDNA ID no. 40351759
  misc_feature: No seed is being produced by the plant
  misc_feature: The plant flowers significantly late compared to wild-type.
  misc_feature: Useful for biocontainment applications
  misc_feature: Useful for making plants with modulated flowering time
  misc_feature (45)..(117): Pfam Name: Histone PFAM Desc: Core histone H2A/H2B/H3/H4
MAPKAEKKPTAEKKPVETEKKPKAEKRVPGKDGGAGADKKKKKAKKSVETYKIYIFKVLKQVHPDIGISSKAMSIMNSFINDIFEKLAGESAKLARYNKKPTITSREIQTAVRLVLPGELAKHAVSEGTKAVTKFTSS

SEQ ID NO: 7351 - DNA, 684 bp, Triticum aestivum
  misc_feature: Ceres CLONE ID no. 1330232
  misc_feature: Ceres CDNA ID no. 25892816
  CDS (137)..(565): REFERENCED BY SEQ ID NO: 7352
gagaacctttcgttcatctccaaaaatatcttcctcctctttcctgcgcctccattatcccttgcgtggttttagtctgtgaactcgagagaccgagcgaggaaagttgccgtgtgagacctgagagttaggagatatggctgggattggtcctatcaggcaggactgggagccgatagtggtgcggaagaaggcgcagaacgccgccgacaagaaggacgaaaaggccgtcaacgctgcccgccgctccggcgccgagatcgacaccaccaagaagtacaacgctggaacgaacaaggctgcatctagcggaacttccctcaacaccaagcggctcgacgacgacaccgagaacctttcccatgagcgtgtttcaagtgacctcaagaaaaaccttatgcaagcaaggctggataagaagatgacccaggcacaacttgctcagatgatcaatgagaagccacaggtgatccaggagtacgagtcgggcaaagcgattccgaacaatcagataattggaaagcttgagagggcacttggagctaagctgcgtagcaagaagtaatgccttgaagtagcccaaaagctcttgtaggctgttgctgttggttgatactgaataactatgccacagaacgactttatgtatcattatattctcgtgctctaaaaaaaaaaaaaaaa

SEQ ID NO: 7352 - protein, 142 aa, Triticum aestivum
  misc_feature: Ceres CLONE ID no. 1330232
  misc_feature: Ceres CDNA ID no. 25892816
  misc_feature: null
  misc_feature: Useful for making plants with altered Lignin content
  misc_feature: Useful for making plants with modulated heat sensitivity
  misc_feature (87)..(141): Pfam Name: HTH_3 PFAM Desc: Helix
  misc_feature: Homolog of GI Number: 50944921 NR Desc: putative ethylene
  misc_feature: Homolog of GI Number: 12642936 NR Desc: putative transcriptional coactivator protein
  misc_feature: Homolog of GI Number: 8895787 NR Desc: multiprotein bridging factor 1
  misc_feature: Homolog of GI Number: 20086364 NR Desc: putative multiprotein bridging factor 1
  misc_feature: Homolog of GI Number: 28466837 NR Desc: At3g24500
  misc_feature: Homolog of GI Number: 21553721 NR Desc: ethylene
  misc_feature: Homolog of GI Number: 5669634 NR Desc: ethylene
  misc_feature: Homolog of GI Number: 19225065 NR Desc: ethylene
  misc_feature: Homolog of GI Number: 57091993 NR Desc:  similar to endothelial differentiation
  misc_feature: Useful for making ornamental plants with modified flowers
  misc_feature: Useful for making plants with increased biomass and foliage
  misc_feature: Useful for sterility
MAGIGPIRQDWEPIVVRKKAQNAADKKDEKAVNAARRSGAEIDTTKKYNAGTNKAASSGTSLNTKRLDDDTENLSHERVSSDLKKNLMQARLDKKMTQAQLAQMINEKPQVIQEYESGKAIPNNQIIGKLERALGAKLRSKK

SEQ ID NO: 7353 - DNA, 823 bp, Triticum aestivum
  misc_feature: Ceres CLONE ID no. 1330283
  misc_feature: Ceres CDNA ID no. 25445768
  CDS (31)..(555): REFERENCED BY SEQ ID NO: 7354
catcgatctcgagtcacctactagctaatcatggcatcttccaagagcagtcttgcaatgttcgcgctggccatagtcatggccgtggtggccggcgtctcggcgcagaacaccccgcaggacttcgtcaacctgcacaaccgcgcccgcgccgcggacggcgtcggcgcggtgacatgggacaacagcgtggccaggttcgcgcaggactacgcgaacaagcgcgccgccgactgccggctgcagcactccggcgggccgttcggcgagaacatcttctggggttccgggcagtcgtggacggccgcgaacgccgtgaagtcgtgggtggacgagaagcggaactaccacctcaacaccaacacctgcgacgccggcaaagtgtgcgggcactacacgcaggtggtgtggcgcaagtcgacccgcatcggctgcgcgcgcgtggtctgcgccgggaaccggggcgtcttcatcatctgcaactacaaccccccgggcaacttcaacggcgaccgcccgttcgcgttcctcacccttgacgccgaagccaagtagtatgtacgtgtgaatgtgatcatacatgcataggtgtgtgtgtttatgtgtgtggattttgaatatttacttctataaatatgttatacgtactgtacgtacgtaaataagcgcacattccggcctgcatgtatccatgcggctctgtggagcgtgtaagtgcaatcttttttttttaagaatgcgtgtaagtgtaatcatatacacctccatgcaaatgtctttccttttgttttcttgttcaaatcttggaaaaaaaaaaaaaaaa

SEQ ID NO: 7354 - protein, 174 aa, Triticum aestivum
  misc_feature: Ceres CLONE ID no. 1330283
  misc_feature: Ceres CDNA ID no. 25445768
  misc_feature (33)..(151): Pfam Name: SCP PFAM Desc: SCP
  misc_feature: Homolog of GI Number: 3702665 NR Desc: pathogenisis
  misc_feature: Homolog of GI Number: 732807 NR Desc: type
  misc_feature: Homolog of GI Number: 31430685 NR Desc: putative type
  misc_feature: Homolog of GI Number: 402211 NR Desc: pathogenesis
  misc_feature: Homolog of GI Number: 401833 NR Desc: PR
  misc_feature: Homolog of GI Number: 22761 NR Desc: Pathogenesis
  misc_feature: Homolog of GI Number: 73921468 NR Desc: pathogenesis
  misc_feature: Homolog of GI Number: 34914936 NR Desc: putative pathogenesis
  misc_feature: Homolog of GI Number: 401831 NR Desc: PR
  misc_feature: Homolog of GI Number: 3702663 NR Desc: pathogenisis
MASSKSSLAMFALAIVMAVVAGVSAQNTPQDFVNLHNRARAADGVGAVTWDNSVARFAQDYANKRAADCRLQHSGGPFGENIFWGSGQSWTAANAVKSWVDEKRNYHLNTNTCDAGKVCGHYTQVVWRKSTRIGCARVVCAGNRGVFIICNYNPPGNFNGDRPFAFLTLDAEAK

SEQ ID NO: 7355 - DNA, 652 bp, Triticum aestivum
  misc_feature: Ceres CLONE ID no. 1330531
  misc_feature: Ceres CDNA ID no. 25445676
  CDS (85)..(507): REFERENCED BY SEQ ID NO: 7356
aatctctcagcccccacaatctcacctactccggccatctctccggcgaccaccgcagcaccacccttccttccgactccagcgatggcgacagcggcagccggcggcgggaggggcaagccgaagggcagcaagtcggtgtcgcggtcggtgaaggcgggcctgcagttccccgtcggccgcgtcgcccggcacctcaaggtcggccgctacgcgaagcgcgtgggcgcgggcgcccccgtctacctctgcgccgtcctcgagtacctcgccgccgaggccctggagctggccggcaacgcggcgcgcgacaacaagaagacccggatctcgccgcgccacatccagctcgccgtccgcaacgacgaggagctcagccggctgctcggcggcgtcaccatcgccgccggcggcgtcctgcccaacatccactccgtgctcctccccaagaaggccggcaagggcgccggcaccggcgggtccgcttcgcagtcccaggagttctagagtaccagagatctgagtatggcgtggtgatggttttaggttggtagattagttcttggccaatgttcttgttggtacatgtatcgagggtggatctggttggaatggaatgcatctggttctgctgtcaaaaaaaaaaaaaaaa

SEQ ID NO: 7356 - protein, 140 aa, Triticum aestivum; identical to SEQ ID NO: 1936
  misc_feature: Ceres CLONE ID no. 1330531
  misc_feature: Ceres CDNA ID no. 25445676
  misc_feature (21)..(96): Pfam Name: Histone PFAM Desc: Core histone H2A/H2B/H3/H4
  misc_feature: Homolog of GI Number: 77555982 NR Desc: histone h2a.
  misc_feature: Homolog of GI Number: 3204129 NR Desc: histone H2A
  misc_feature: Homolog of GI Number: 297871 NR Desc: histone H2A
  misc_feature: Homolog of GI Number: 21553797 NR Desc: histone H2A
  misc_feature: Homolog of GI Number: 20334750 NR Desc: At1g08880/F7G19_24
  misc_feature: Homolog of GI Number: 21593507 NR Desc: putative histone H2A
  misc_feature: Homolog of GI Number: 571481 NR Desc: histone H2A
  misc_feature: Homolog of GI Number: 1708102 NR Desc: Histone H2A
  misc_feature: Homolog of GI Number: 121981 NR Desc: Histone H2A
  misc_feature: Homolog of GI Number: 121985 NR Desc: Histone H2A

SEQ ID NO: 7357 - DNA, 543 bp, Triticum aestivum
  misc_feature: Ceres CLONE ID no. 1330898
  misc_feature: Ceres CDNA ID no. 35383385
  CDS (151)..(303): REFERENCED BY SEQ ID NO: 7358
acctggatcccacccccctttatcatccctctggtcgccttctcacccacgaaagagagagagagagagaagaggagcactcgaccccgccgtcgcagcgccaaccaaaccctcgtcgtcgtctccgatcccgccgtcgccgccgcagccatgccgttcaccccgggaccctactccggcaagagcaccctcgccctcgtcgccagggtctccgccgtcggcatcggcgtcgtctacggctccgtcaagctcggcatcctcaagatgaccaagcccaaggaggaagcagctgctcatcactgaggacaagtagctccagcgggttgacgccgtagattcgcaatgtaccttctatatgcccatccggttctgtgatttgtgtcttgaaacccaaaaaaccccaggcccatgtgggagctgaaccttagttttttgcttggtggaaaataatatcctcggctgaatcgacttgaaatcaggaagagtgaaactttaaatcatttccttttgcgtggtgctgcgatccgaaaaaaaaaaaaaaaa

SEQ ID NO: 7358 - protein, 50 aa, Triticum aestivum
  misc_feature: Ceres CLONE ID no. 1330898
  misc_feature: Ceres CDNA ID no. 35383385
  misc_feature: Homolog of GI Number: 50921369 NR Desc: OSJNBb0050O03.8
  misc_feature: Homolog of GI Number: 50926032 NR Desc: OSJNBa0067K08.24
  misc_feature: Homolog of GI Number: 13447449 NR Desc: receptor protein kinase PERK1
  misc_feature: Homolog of GI Number: 12018147 NR Desc: vegetative cell wall protein gp1
  misc_feature: Homolog of GI Number: 258215 NR Desc: NaPRP3
  misc_feature: Homolog of GI Number: 60678627 NR Desc: plus agglutinin
  misc_feature: Homolog of GI Number: 322747 NR Desc: extensin
  misc_feature: Homolog of GI Number: 6523547 NR Desc: hydroxyproline
MPFTPGPYSGKSTLALVARVSAVGIGVVYGSVKLGILKMTKPKEEAAAHH

SEQ ID NO: 7359 - DNA, 825 bp, Triticum aestivum; identical to SEQ ID NO: 4555
  misc_feature: Ceres CLONE ID no. 1330968
  misc_feature: Ceres CDNA ID no. 25445644
  CDS (62)..(676): REFERENCED BY SEQ ID NO: 7360

SEQ ID NO: 7360 - protein, 204 aa, Triticum aestivum; identical to SEQ ID NO: 4556
  misc_feature: Ceres CLONE ID no. 1330968
  misc_feature: Ceres CDNA ID no. 25445644
  misc_feature (2)..(193): Pfam Name: Ribosomal_L15e PFAM Desc: Ribosomal L15
  misc_feature: Homolog of GI Number: 14585879 NR Desc: ribosomal protein L15
  misc_feature: Homolog of GI Number: 48596903 NR Desc: ribosomal protein
  misc_feature: Homolog of GI Number: 34896990 NR Desc: ribosomal protein L15
  misc_feature: Homolog of GI Number: 21689875 NR Desc: putative 60S ribosomal protein L15
  misc_feature: Homolog of GI Number: 23505795 NR Desc: At4g16720/dl4385c
  misc_feature: Homolog of GI Number: 50878349 NR Desc: putative 60s ribosomal protein L15
  misc_feature: Homolog of GI Number: 3608479 NR Desc: ribosomal protein L15
  misc_feature: Homolog of GI Number: 7268491 NR Desc: ribosomal protein
  misc_feature: Homolog of GI Number: 2982318 NR Desc: probable 60S ribosomal protein L15
  misc_feature: Homolog of GI Number: 2982249 NR Desc: probable 60S ribosomal protein L15
  misc_feature: Useful for decreasing plant size
  misc_feature: Useful for making plants with increased biomass
  misc_feature: Useful for making shorter plants
  misc_feature: Useful for sterility
  misc_feature: Useful for sterility

SEQ ID NO: 7361 - DNA, 1461 bp, Triticum aestivum
  misc_feature: Ceres CLONE ID no. 1331150
  misc_feature: Ceres CDNA ID no. 25446616
  CDS (433)..(1104): REFERENCED BY SEQ ID NO: 7362
ataatcgcactccccacgccgcctcccactttcccccacttccaaggacccgagtgccgcaatccccttctccctcctcgccggagaagctttcttccttccgcagacggccggcgctgcgatggcgtgatatggatcttgtaaccgtggactgagttgattggatgattgcgttttctctcgttgccgcggagcagcagcagcagcagaggggggtggcatcaggatgagcttcagcgttgcgcgctcttctccggcgtctccgccgcgctctacccggccgtcgtcgtcaagacgcacctgcaggtcgcgccgcccccgcaggccgccgccgccaccgtcagggccatcctcggccgcgacggcctccggggcttctaccgcggcttcggcgcctcgctggccggcaccgtccccgcgcgcgcgctctacatggccgcgctcgaggccaccaagagctccgtcgggtccgcggccgtccggttcggcgtctccgagcccgcggcgtcggcggtcgcctcggccgcggcgggggtctcggccgccgtcgccgcgcaggtggtgtggaccccggtcgacgtcatcagccagcggctgatggtccagacctccgccgcctgccgctacgccggcggcgcggacgcgttccggaagatcctcgcggccgacggcgtccgcggcctgtaccgcggcttcggcctctccatcatcacctacgcgccgtccaacgcggtgtggtgggcgtcctacgccatggcgcagcgcttcgcgtggcgcgtggtgggcgcggaccgctccgagagctacccggccctgatggccgtgcaaggcgccagcgcggccgtggccgggggcgcggcggcgctggtgaccatgccgctggacacggtgaagacgcggctgcaggtgatggagacggacgcggcggtggcgcggccgacgctggggagcaccatgcggggcctgctcaaggagggcgggtgggcagcgtgctaccgcgggctggggccgaggtggggctccatgtcgctctccgccgccacaatggtcaccacctacgagctcctcaagcggctgtcggccaaggagggctccctgggctagatcgacccttctcaccactactactaccagtagcgccgtcgttcaccaggtgactcggaccaaactggccccgaagcgagatcgatccgtgaaggtgctgcccggccggcctcaattagttaggtttcttgtacatatgctcaagatcttttgcttcatttctcgtttgggttcgtcgatctggtgctatagagggatggatggcgaagaacaagcactagaaggtgggtggggttttaggatgccaggttttgctggttatgcccatggtggcggcgccgccgccgccgccgatgatgatgatgaaaaattagctgattttcagtaacttcttataaaccaaaaaaaaaaaaaaaa

SEQ ID NO: 7362 - protein, 223 aa, Triticum aestivum
  misc_feature: Ceres CLONE ID no. 1331150
  misc_feature: Ceres CDNA ID no. 25446616
  misc_feature (128)..(220): Pfam Name: Mito_carr PFAM Desc: Mitochondrial carrier protein
  misc_feature: Homolog of GI Number: 31431909 NR Desc: putative Tricarboxylate transport protein
  misc_feature: Homolog of GI Number: 21594326 NR Desc: mitochondrial carrier
  misc_feature: Homolog of GI Number: 23308179 NR Desc: At5g26200/T19G15_50
  misc_feature: Homolog of GI Number: 51536141 NR Desc: mitochondrial substrate carrier
  misc_feature: Homolog of GI Number: 21326111 NR Desc: putative mitochondrial carrier protein
  misc_feature: Homolog of GI Number: 21553961 NR Desc: putative mitochondrial carrier protein
  misc_feature: Homolog of GI Number: 20258917 NR Desc: putative mitochondrial carrier protein
  misc_feature: Homolog of GI Number: 9755609 NR Desc: putative mitochondrial carrier protein
  misc_feature: Homolog of GI Number: 57089559 NR Desc:  similar to KIAA0446 protein
  misc_feature: Homolog of GI Number: 61824495 NR Desc:  similar to KIAA0446 gene product
MAALEATKSSVGSAAVRFGVSEPAASAVASAAAGVSAAVAAQVVWTPVDVISQRLMVQTSAACRYAGGADAFRKILAADGVRGLYRGFGLSIITYAPSNAVWWASYAMAQRFAWRVVGADRSESYPALMAVQGASAAVAGGAAALVTMPLDTVKTRLQVMETDAAVARPTLGSTMRGLLKEGGWAACYRGLGPRWGSMSLSAATMVTTYELLKRLSAKEGSLG

SEQ ID NO: 7363 - DNA, 683 bp, Triticum aestivum
  misc_feature: Ceres CLONE ID no. 1331301
  misc_feature: Ceres CDNA ID no. 25400937
  CDS (51)..(500): REFERENCED BY SEQ ID NO: 7364
atcgatatctctccccgctccgctccccatcacgaacagctggtctatcaatggcggaggagaccgagaccgagaagccgctcttctctccgacagatgtctcgctccacgcatccacgaaggactgctgggtcgtcatccatggcaaggtgtacgatgtgaccaagttcttggaggaccaccccggcggagaggatgtcctgctccatgcatctgcctctggggatgctacggaggcttttgaagatgtgggacacagcacatcagccatcagcatgatgagcagctacctgatcggaagcatcgaggactatgtgcctcccagtgcaacgaaggacgccacagctattggcagtgatgtgctgccagattccagaacaatgcagaggaacaaaggctctcccgctccaaacacatttctggacttcgtgctccctttatgtatgcttggcatggcctttgcagcttggtactacctaacattcgtggccgagagctagtgaattcggacaagattcatatcattgcacatttttacgttaatagtgttgctgcatcgatacattgagggaacataaacttggtcacagaaccatttgctctaaaaaaaaaaaaaaaaaaaaaaaaaaaaaaaaaaaaaaaaaaaaaaaaaaaaaaaaaaaaaaataaaaaaaaaaaaaaaa

SEQ ID NO: 7364 - protein, 149 aa, Triticum aestivum
  misc_feature: Ceres CLONE ID no. 1331301
  misc_feature: Ceres CDNA ID no. 25400937
  misc_feature (11)..(86): Pfam Name: Cyt PFAM Desc: Cytochrome b5
  misc_feature: Homolog of GI Number: 77553982 NR Desc: Cytochrome b5
  misc_feature: Homolog of GI Number: 40644254 NR Desc: cytochrome b5
  misc_feature: Homolog of GI Number: 1345882 NR Desc: Cytochrome b5
  misc_feature: Homolog of GI Number: 296386 NR Desc: cytochrome b5
  misc_feature: Homolog of GI Number: 17104717 NR Desc: putative cytochrome b5 protein
  misc_feature: Homolog of GI Number: 50844675 NR Desc: cytochrome b5 isoform Cb5
  misc_feature: Homolog of GI Number: 50844677 NR Desc: cytochrome b5 isoform Cb5
  misc_feature: Homolog of GI Number: 50844673 NR Desc: cytochrome b5 isoform Cb5
  misc_feature: Homolog of GI Number: 25044825 NR Desc: cytochrome b5
  misc_feature: Homolog of GI Number: 510539 NR Desc: cytochrome b5
MAEETETEKPLFSPTDVSLHASTKDCWVVIHGKVYDVTKFLEDHPGGEDVLLHASASGDATEAFEDVGHSTSAISMMSSYLIGSIEDYVPPSATKDATAIGSDVLPDSRTMQRNKGSPAPNTFLDFVLPLCMLGMAFAAWYYLTFVAES

SEQ ID NO: 7365 - DNA, 582 bp, Zea mays
  misc_feature: Ceres CLONE ID no. 1336337
  misc_feature: Ceres CDNA ID no. 25445859
  CDS (2)..(292): REFERENCED BY SEQ ID NO: 7366
aagttgtaaccctagcttctcatgtctccgcgcctccacctccagtctccagccccaaggagtggcggcggcgcatcgtcagttagcttcgtcaccgttagagcccgaaggactctccctcggccctcgccgcctcgccggctcactgtcattggctgcatccgaagccggcagctcacaacgcctcttgtcaaacttcgacgactgctatctatctgtgctgctcatcgccttgttcgttgccgttgccggcgtgccccacggccacgcgccccacttcccggagtcctgagtgcctgctgaagttgcgtgtttgcgtagcgctcaaaatctgaaaggtcctagctcgcaatcgcaacggagtcttgccgatgaacaggatgtgttgactgctgttattgtgcttcaaacttcagagaatttgctgctgtgcagcctgctatgtcttaccgaagacttatgtccttgttaactctgtgaagactatgttgttagctcgtcagtctatgtctaattgtcaatcatacacttgtatattgtgaactgttctatttaaatttgtatcaaaaaaaaaaaaaaaaa

SEQ ID NO: 7366 - protein, 93 aa, Zea mays; identical to SEQ ID NO: 6936
  misc_feature: Ceres CLONE ID no. 1336337
  misc_feature: Ceres CDNA ID no. 25445859

SEQ ID NO: 7367 - DNA, 1809 bp, Glycine max
  misc_feature: Ceres CLONE ID no. 1345767
  misc_feature: Ceres CDNA ID no. 29191386
  CDS (214)..(1656): REFERENCED BY SEQ ID NO: 7368
gggtccaacggaccaactccaccgccatcttcggcgtcattgtaactgtacttcaccagcaccactaaccggaaatctggcccttgccagaaaatttatccgccagtgctggcggaggtcttctctttccacttggaaccgctaactgcattcgaagtttgttgatcattacgcatttttgcagtacaggttacaatacaaccatttgctctgatggatcctcatactgaagagttgcctcagtacatacatataaatcagaatgagttttgcatacgaaggcataagaagcagaaggaggaggatattgctatatgtgaatgcaaatatgatgctgatgaccctgacaatgcatgtggggatagctgcctgaatgtattaaccagcactgaatgcacccctggttattgtcattgtgatatattatgcaaaaatcagaaatttcagaagtgtgaatatgcaaaaacaaagttgtttaaaactgaaggccgtggatggggtcttttggctgatgaggatattaaggcaggacaatttgtcattgaatactgtggagaagtaatatcatggaaagaagccaaacgtagatcccaggcttatgaaaatcaaggtcttaaagatgcatttatcattttccttaatgtgtctgaatctattgatgcaaccaggaaaggaagccttgctagatttataaatcattcctgtcaaccgaactgtgagacgagaaaatggaatgtgttgggggaaataagagttggaatatttgcaaaacatgatattcctattggaactgagttagcttatgattataattttgaatggtttggtggtgccaaggttcgttgcctctgtggtgcactaaaatgttctggattccttggagcaaaatctcgaggttttcaggaggatacttatctatgggaagatgatgatggcaggtactcagttgagaaaattcctgtatatgattctgcagaggatgaaccggtgtcaaattttaatggacgaaccgaaccctctttggatgttatagttaaagctgagcaattatcggagtccactgctttccatgttcagccccttgattcagttcagatgaaagatttagatgttaagaagattaaaactgatgtagcagacgaggatatgaacttttattcacaggatagtgaacataccctttctcaaaagaatgcaatatcacatatccgaagtaatactgcaggcagaaactattgccttggacctaggtccatgtctaccaaaagatcaagggcatataatggtggaaggttcaaaaatctcatagagaagaagatcgatgttaagtttgctgctgccctcctagcatccaaggaagcacaagaggagatttttaattgtgagaaaatgaaggatgatgctacatctgctcttgattccttatatgatgaaatacggcctgccattgaagaacacgagagggatagccaagacagtgtatccacgactgtagcagagaagtggatacaggcttgctgcctgaaattaaaggcggagtttgacctttactcatccattgtcaaaaatgttgcttgcactgcgcaaagggcatctggccaagtaaaacctactgaagttgataacgaaaacgaaattaagctcctgacaggttgaaattcttatcacatttcccccacccctccccatatataatctgtaatttacagtgtcacaaaatatgtgggcaactttgaggaaacttcttttttgaaattcataaataaaatagagaatctaagactcgatgacaaaaaaaaaaaaaaaaaa

SEQ ID NO: 7368 - protein, 480 aa, Glycine max [sequence omitted]

SEQ ID NO: 7369 - DNA, 1150 bp, Glycine max
  misc_feature: Ceres CLONE ID no. 1357048
  misc_feature: Ceres CDNA ID no. 25446817
  CDS (59)..(928): REFERENCED BY SEQ ID NO: 7370
aatcacaccaaccaaagccacaaaagaaaagcagtagcaacagcccatataaaatataatggccgaaacctgcgactccaacaataaagtgatccgtgaataccaccatgatgcttcctttatgtcaaggtgtgacatctttactgatgttaccgagtaccaactgtgtctggcatatgccggagaatctggtaaaggaaagttcgaacctaagtgggacacagacaatgtcactccccaacttatcgagcagttcaagctaaattgtgatgcctcgggtctgccagtcaaagtatttgtcagcatcggaggagatgaccccttcaaagttgctgctggtggtgccgatgattgggttctcaatgccacaaccacactccaccacatcatcaacgagtaccacatcgatggaatcgatgttaactacaccacaatccagtgcaaccaaacattgtttgttaactgcattaagggtctcataaagggcctaagggaagctctatgcaccactgggtttgtggcttccttagctccagatgctgccaccaatgagactttctacttgcccttgtaccgatctattgataattcttggattggaactgttgtgtttcagtgcttcgttgatttcgaacctctagatcctaacagaccagttgaaagcttggtgcgccaggttgagaagatagtgggagagtatgattattatgactctaagatcttgcttggctacagcgccattaaggaggattggaataaagtttcaccacccctcttctttcttgctctcaatcgcctagtgcattcttggcctagggttaagggtgcatctgtcaaggttattagtgacacctatgccttcattcccccaacgtggatccctaaactcctgtctttggccgtctccgatgctggaaaatatccttaattgaagatccataattattaagttctatctatggaataagacccatgctatatctattaattctatgtgtgtgttccttctgcctatatctatatatgttgtgcgtgcatttgaaaaaacaatgcatgcatgcatatttgtgctctgttaatgcctacgtgcatctttgtctcatcaataaaatatattatatgtctttgtgcttcaaaaaaaaaaaaaaaa

SEQ ID NO: 7370 - protein, 289 aa, Glycine max
  misc_feature: Ceres CLONE ID no. 1357048
  misc_feature: Ceres CDNA ID no. 25446817
  misc_feature: Homolog of GI Number: 730692 NR Desc: RuBisCO
  misc_feature: Homolog of GI Number: 7434971 NR Desc: chitinase
  misc_feature: Homolog of GI Number: 11262118 NR Desc: chitinase
  misc_feature: Homolog of GI Number: 396829 NR Desc: narbonin
  misc_feature: Homolog of GI Number: 7434972 NR Desc: chitinase
  misc_feature: Homolog of GI Number: 7434970 NR Desc: chitinase
  misc_feature: Homolog of GI Number: 31432085 NR Desc: putative class III chitinase
MAETCDSNNKVIREYHHDASFMSRCDIFTDVTEYQLCLAYAGESGKGKFEPKWDTDNVTPQLIEQFKLNCDASGLPVKVFVSIGGDDPFKVAAGGADDWVLNATTTLHHIINEYHIDGIDVNYTTIQCNQTLFVNCIKGLIKGLREALCTTGFVASLAPDAATNETFYLPLYRSIDNSWIGTVVFQCFVDFEPLDPNRPVESLVRQVEKIVGEYDYYDSKILLGYSAIKEDWNKVSPPLFFLALNRLVHSWPRVKGASVKVISDTYAFIPPTWIPKLLSLAVSDAGKYP

SEQ ID NO: 7371 - DNA, 1056 bp, Glycine max
  misc_feature: Ceres CLONE ID no. 1357093
  misc_feature: Ceres CDNA ID no. 24766495
  CDS (114)..(866): REFERENCED BY SEQ ID NO: 7372
agttgtagtgtgtggtatcatcaaaacgacggattggtgggggtggcgccttcggccattggcacgtacacctcctaaaaacgacaacttgtgtcccgcagcttggtggctaaatggcagttccagagaggaaccataaccattatcatcatttctcagtgttgatcgtcctcatactcgtcgacaatgctctctgcatcaggttcccggatcgggtcgcccaacccgccctcgacccgggagaccaacaccgcctgcatgtcgccgtcttcgccctcggcagcttctggagatccgaagcggtgttcggctgcttgcccggcgtcgttcgcaccaccgtcggctacgccggcggatccaaacccaaccccgaatatcgaagcctcggtgaccacgccgagtccgtcaaggtcgagtatgacccacagctgattagctttagggaactcctggatgtcttttggtcaagtcatgatcctaggcaagtgtatggccaaggtcctgatgtgggtaatcagtacagatctattatttttgttaatggaaccgaagaatcaagaatggctgctgtcagcaaagaacaggaacaaaccaggtcaagaagcagcattgtgactactcaaattctgcaacttggaacattttaccctgcagagccagagcaccagaaatttgaactcaagcaaaataccatccttcttcagttaattgggaaccttcctgcagaggagcttgagaggtctagcctggcaacaaaattgaatggatatgtggccgagctttgccctccaaatatccaaaagcaaattgatgccaagatcaacgatattattaaaaagggttggcctattttgagggatttgtagttggcctcgtgggaagtttgctcagattgtcaacttgtcattcttcaactagcttgcttcgcttcagttcctataggttttgttcaatagcttgcatcagttgcagggctttgattaaacgattgtgttgtaattactgtacttgtaaagtcttgagtctccctcttatccttcaaaaaaaaaaaaaaaa

SEQ ID NO: 7372 - protein, 250 aa, Glycine max
  misc_feature: Ceres CLONE ID no. 1357093
  misc_feature: Ceres CDNA ID no. 24766495
  misc_feature (49)..(201): Pfam Name: PMSR PFAM Desc: Peptide methionine sulfoxide reductase
  misc_feature: Homolog of GI Number: 55296461 NR Desc: putative methionine sulfoxide reductase
  misc_feature: Homolog of GI Number: 42570819 NR Desc: peptide methionine sulfoxide reductase family protein
  misc_feature: Homolog of GI Number: 46409088 NR Desc: RH74182p
  misc_feature: Homolog of GI Number: 7937 NR Desc: Eip28/29
  misc_feature: Homolog of GI Number: 84941 NR Desc: ecdysone
  misc_feature: Homolog of GI Number: 33089114 NR Desc: methionine sulfoxide reductase
  misc_feature: Homolog of GI Number: 55234261 NR Desc: ENSANGP00000011685
  misc_feature: Homolog of GI Number: 311724 NR Desc: EIP29
  misc_feature: Homolog of GI Number: 78368498 NR Desc: Peptide methionine sulfoxide reductase
  misc_feature: Homolog of GI Number: 3881930 NR Desc: protein
MAVPERNHNHYHHFSVLIVLILVDNALCIRFPDRVAQPALDPGDQHRLHVAVFALGSFWRSEAVFGCLPGVVRTTVGYAGGSKPNPEYRSLGDHAESVKVEYDPQLISFRELLDVFWSSHDPRQVYGQGPDVGNQYRSIIFVNGTEESRMAAVSKEQEQTRSRSSIVTTQILQLGTFYPAEPEHQKFELKQNTILLQLIGNLPAEELERSSLATKLNGYVAELCPPNIQKQIDAKINDIIKKGWPILRDL

SEQ ID NO: 7373 - DNA, 936 bp, Zea mays
  misc_feature: Ceres CLONE ID no. 1357137
  misc_feature: Ceres CDNA ID no. 35383386
  CDS (84)..(713): REFERENCED BY SEQ ID NO: 7374
atttccgttttccacaccaccaccaacgcctttaacttttttattactcctctcccaaagttcctcccttttcgactccaaagatgactgaggaaacgaaggagaaccagcgacctgctcctcgtcttaacgagaggatcctctcttccttgtctagacgctccgtagctgctcatccctggcacgatcttgagattggccctggagctccacagattttcaacgtggtggttgagatcacaaagggaagcaaggtcaaatatgaacttgacaaaaagactggactcatcaaggtggatcgtattctctactcatcagttgtttaccctcacaactatggtttcgtccctcgcacactttgtgaagacaatgaccctattgatgttttagtcatcatgcaggaaccggtgcttccaggttgtttcctgcgtgcccgagctattggattaatgcctatgattgatcagggtgagaaagatgacaagatcattgcagtttgtgttgatgaccctgagtacaagcattacactgacatcaaagaacttcctcctcaccgtctctctgagatccgtcgtttctttgaagactacaagaagaatgagaacaaggaagttgcagttaatgatttcctgccgtctgagaaagctattgaagctatccagtactcaatggacctttatgctgagtacattctccataccctgcgacgttgacgcttcttctcctcggaacatttctgcatcgtctttgtttctgtttctttcaatgatataataagaagcaaaattgatactttctctgcattttcttgttgactttggatttttatcattttctccttgtgtaactcaataattttgttttaaatcttctttggggcattttaacgtttggttcatataaattctacatagaaatacaaaaaaaaaaaaaaaa

SEQ ID NO: 7374 - protein, 209 aa, Zea mays
  misc_feature: Ceres CLONE ID no. 1357137
  misc_feature: Ceres CDNA ID no. 35383386
  misc_feature: null
  misc_feature: Useful for making plants with modulated nitrogen use efficiency
  misc_feature (47)..(201): Pfam Name: Pyrophosphatase PFAM Desc: Inorganic pyrophosphatase
  misc_feature: Homolog of GI Number: 21537232 NR Desc: soluble inorganic pyrophosphatase
  misc_feature: Homolog of GI Number: 6715648 NR Desc: T25K16.5
  misc_feature: Homolog of GI Number: 5669924 NR Desc: soluble inorganic pyrophosphatase
  misc_feature: Homolog of GI Number: 20197320 NR Desc: putative inorganic pyrophosphatase
  misc_feature: Homolog of GI Number: 20148677 NR Desc: similar to inorganic pyrophosphatase
  misc_feature: Homolog of GI Number: 26451240 NR Desc: putative inorganic pyrophosphatase
  misc_feature: Homolog of GI Number: 534916 NR Desc: soluble inorganic pyrophosphatase
  misc_feature: Homolog of GI Number: 50931571 NR Desc: putative soluble inorganic pyrophosphatase
  misc_feature: Homolog of GI Number: 78708597 NR Desc: inorganic pyrophosphatase
  misc_feature: Homolog of GI Number: 50929813 NR Desc: OSJNBa0070M12.12
  misc_feature: Useful for making plants with altered leaf shape eg curled leaves
MTEETKENQRPAPRLNERILSSLSRRSVAAHPWHDLEIGPGAPQIFNVVVEITKGSKVKYELDKKTGLIKVDRILYSSVVYPHNYGFVPRTLCEDNDPIDVLVIMQEPVLPGCFLRARAIGLMPMIDQGEKDDKIIAVCVDDPEYKHYTDIKELPPHRLSEIRRFFEDYKKNENKEVAVNDFLPSEKAIEAIQYSMDLYAEYILHTLRR

SEQ ID NO: 7375 - DNA, 692 bp, Glycine max
  misc_feature: Ceres CLONE ID no. 1357558
  misc_feature: Ceres CDNA ID no. 24727044
  CDS (171)..(518): REFERENCED BY SEQ ID NO: 7376
aattattgatccgagtgttattgatgtgcagcatcagtgagaaagccaaaaggaagcgccaatctgcattccgcggagtgcgcaaacgcagctggggacgctacgtctctgagataaggctcccgggccagaaaacacgcatatggctcggctccttcggctcgcctgagatggcggctcgcgcttatgactccgctgctttcttcctcaaaggaacatctgccactcttaatttccccgacctcgtacactccctgcctcgacctctctcatcttcccggagggacatacagtccgccgcagctgaagccgctctccactctccgcctcccaaagaagaacaagaatctattttcacttccaccaccacctcgtcctttcacgatgtcatggaagctcctcttatgagtccccttagggtggactccactttcggagatttctcatgggaccaactcttcgatttcaacgatgacattctcatcgtgggatcaacttctgccactcttgtcccttaacgctgcttttgcaattcgccacccactgcttctagaaactagctggattttctttcactttctgttaataactcttctctgcttttctaagacttgcttctgaactcttgtacaaaggagctctccaagacaaatatatatatatatatgtttactggaaaaaaaaaaaaaaaa

SEQ ID NO: 7376 - protein, 164 aa, Glycine max
  misc_feature: Ceres CLONE ID no. 1357558
  misc_feature: Ceres CDNA ID no. 24727044
  misc_feature (14)..(77): Pfam Name: AP2 PFAM Desc: AP2 domain
  misc_feature: Homolog of GI Number: 38257023 NR Desc: DREB
  misc_feature: Homolog of GI Number: 50251297 NR Desc: putative AP2 domain
  misc_feature: Homolog of GI Number: 25352180 NR Desc: TINY
  misc_feature: Homolog of GI Number: 60593399 NR Desc: TmCBF7
  misc_feature: Homolog of GI Number: 21618174 NR Desc: transcription factor TINY homolog
  misc_feature: Homolog of GI Number: 60547461 NR Desc: HvCBF7
  misc_feature: Homolog of GI Number: 48479284 NR Desc: putative AP2/EREBP transcription factor
  misc_feature: Homolog of GI Number: 9279711 NR Desc: transcription factor TINY
  misc_feature: Homolog of GI Number: 25992102 NR Desc: dehydration responsive element binding protein
  misc_feature: Homolog of GI Number: 42564253 NR Desc: AP2 domain
MCSISEKAKRKRQSAFRGVRKRSWGRYVSEIRLPGQKTRIWLGSFGSPEMAARAYDSAAFFLKGTSATLNFPDLVHSLPRPLSSSRRDIQSAAAEAALHSPPPKEEQESIFTSTTTSSFHDVMEAPLMSPLRVDSTFGDFSWDQLFDFNDDILIVGSTSATLVP

SEQ ID NO: 7377 - DNA, 748 bp, Glycine max
  misc_feature: Ceres CLONE ID no. 1358801
  misc_feature: Ceres CDNA ID no. 24766496
  CDS (42)..(608): REFERENCED BY SEQ ID NO: 7378
atcacccaatccacttcctctaattgacacccacctaaaccatggcttcccacttcctcaaatccctccttctcctctccacctatgccctcaccatctcagcagaatacacaggcttcgtgggaacactagacccaaagtccataggcatacaccacaagaaaaccctaagccacttcaggttctactggcacgaagtcttcagcggagaaaaccccacatcggttagaatcattccctcactccccaaatacaacgcaaccacaaccttcggctccgttggaatctttgacacccctttaaccgtgggacctgaggtgtactccaaggttgtcggaaaagccgagggcttgtttgcctccacgtcacaaacgcagtttgacctgttactgatttacaacttcgcgttgacccaagggaagtacaacggcagcaccatcacgttcacggggaggagccccctctcggagaaggtgagggagctgcccattgttggtggtagtggggtcttcaaatttgccactgggtatgttgagtctaggacgctaagttttgatccccaaacaaggaataacacggttcagttcgacgtgtatatttactattgatgattattgaaagtgtttttttcatgttgatgcgttatcgctttggtctgtctcacctagtttctacataagtttcctcttttgagggcatgtggtgtcatggaataaagtcatctttgggcaaaaaaaaaaaaaaaaaa

SEQ ID NO: 7378 - protein, 188 aa, Glycine max
  misc_feature: Ceres CLONE ID no. 1358801
  misc_feature: Ceres CDNA ID no. 24766496
  misc_feature (17)..(188): Pfam Name: Dirigent PFAM Desc: Dirigent
  misc_feature: Homolog of GI Number: 37201988 NR Desc: At3g13650
  misc_feature: Homolog of GI Number: 71040679 NR Desc: disease resistance
  misc_feature: Homolog of GI Number: 6227011 NR Desc: F12P19.3
  misc_feature: Homolog of GI Number: 51971026 NR Desc: putative disease resistance response protein
  misc_feature: Homolog of GI Number: 42567516 NR Desc: disease resistance
  misc_feature: Homolog of GI Number: 4803933 NR Desc: putative disease resistance response protein
  misc_feature: Homolog of GI Number: 34899362 NR Desc: putative disease resistance response protein
  misc_feature: Homolog of GI Number: 50945095 NR Desc: disease resistance response protein
  misc_feature: Homolog of GI Number: 34906704 NR Desc: disease resistance response protein
  misc_feature: Homolog of GI Number: 30725346 NR Desc: At3g24020
MASHFLKSLLLLSTYALTISAEYTGFVGTLDPKSIGIHHKKTLSHFRFYWHEVFSGENPTSVRIIPSLPKYNATTTFGSVGIFDTPLTVGPEVYSKVVGKAEGLFASTSQTQFDLLLIYNFALTQGKYNGSTITFTGRSPLSEKVRELPIVGGSGVFKFATGYVESRTLSFDPQTRNNTVQFDVYIYY

SEQ ID NO: 7379 - DNA, 771 bp, Zea mays
  misc_feature: Ceres CLONE ID no. 1359019
  misc_feature: Ceres CDNA ID no. 40351760
  CDS (81)..(539): REFERENCED BY SEQ ID NO: 7380
ctttttcgtgttttagcttgcagagatcgtcacttcttgaaggcggcttctcctcacgcatctcatctccgctaatcacaatgtctctggtcgcgaatgaggagtttcagcacattctccgtgtgcttaacacaaatgtcgatgggaagcagaagatcatgttcgcccttacctcaatcaagggtattgggaggcgtttggcaaacatcgtctgcaagaaagcagatgtcgacatgaacaagagggctggtgagctatctgcagctgagatcgacaacctgatgaccatcgttgccaacccgaagcagtacaagatcccagactggttcttgaacaggcagaaggactacaaggacggcaagtactcccaagttgtctccaatgcccttgacatgaagctcagggacgatctcgagcgtctcaagaagatcaggaaccaccgtgggctgagacactactggggtctccgtgtccgcggacagcacaccaagacaaccggtcgcagaggaaagaccgttggtgtctcaaagaagcgttaagcaagccacatgttgctagttactgctgctttattggatatgcttcatatgaaccggctttgatttatgtttctgcttcgaactagtttatgtgttgcttttggatatttgaaatagtttatgtcacttttggatcttccaaatagtttgtgtgatacttttggtccttcttgtcctctcttattatcttttccattggttaaatctgtttttactaaaaaaaaaaaaaaaa

SEQ ID NO: 7380 - protein, 152 aa, Zea mays; identical to SEQ ID NO: 6138
  misc_feature: Ceres CLONE ID no. 1359019
  misc_feature: Ceres CDNA ID no. 40351760
  misc_feature (14)..(142): Pfam Name: Ribosomal_S13 PFAM Desc: Ribosomal protein S13/S18

SEQ ID NO: 7381 - DNA, 1703 bp, Glycine max
  misc_feature: Ceres CLONE ID no. 1359237
  misc_feature: Ceres CDNA ID no. 40041402
  CDS (72)..(1511): REFERENCED BY SEQ ID NO: 7382
aacgcacctttctttctcttttccctttttcttaggcacaccacacacccactcaaataatagaaactgagatgaatcctgatcagtttcagaagaacagcatgttcgtagaaacccctgaagatggtggcaaaaacttcgacgatgatggacgagtcaaaagaactggtacatggataactgcgagtgcccatatcataacggcagtgataggttctggagtgttgtcacttgcatgggcaattgcacaaatgggttgggtggcaggccctgcggttctctttgccttctctttcatcacatacttcacctccactcttcttgccgactgttatcgttcacctgaccctgttcatggcaagcgaaactacacctattcagatgttgtcagatccgtgttaggaggtaggaaatttcagctgtgtggattagctcagtacataaatcttgtcggtgtaactatcggttacacgataacggcttcaattagtatggtggcggtgaagaggtccaactgttttcacaaacatggtcatcatgataagtgctacacgtcaaacaaccctttcatgatcctctttgcctgcattcaaatcgtgcttagtcaaataccaaatttccataagctttggtggctctccattgttgcagcagttatgtcttttgcttattcttccattggccttgggctctccgtagctaaagtggcaggtggtggagaacctgtacggacaaccttaacgggggtgcaagttggggtggacgttacgggatccgagaaggtctggaggacgtttcaagctattggtgatattgccttcgcttacgcttattctaacgtgctcattgagatacaggataccctgaaatcgagccctccagaaaacaaggtcatgaaaagagcaagtttgattggcatcttgactacaaccttgttctatgtgctatgtggctgcctaggttatgcagcatttggaaacgacgcaccaggaaatttcctcacagggttcggtttctacgagcccttttggctaatagactttgctaacatctgcatagccgtacacttggttggagcatatcatgtcttctgtcagcccatatttgggttcgtagagaactggggtaaggaaaggtggcccaatagccattttgtaaatggagaacacgctttaaagttttcactatttggaaccttccctgtgaactttttcagggtggtatggagaacaacatatgtcatcatcactgctttgatagctatgatgtttccattcttcaatgacttcctaggcctgattggttcactgtcattttggccattaacggtttacttccccatagagatgtacattaagcagtcaaagatgcaaaagttttccttcacttggacatggctcaagatattgagctgggcttgcttgatcgtttctattatctcagctgctggctccatccaaggcctcgctcaagatctcaagaaatatcagcccttcaaagcccagcaataattaaatttgttccaaagtgttctaaattgctttcttccctaagtcactttgttttaataagtttcagcatgttcatggataatgtattgttatcaagtgcttatgaaagaaagaatatagcacacagctgcattgtataaaatgtcaagaacaattctaagatttaaaaaaaaaaaaaaaaaaaaaaaaaaa

SEQ ID NO: 7382 - protein, 479 aa, Glycine max
  misc_feature: Ceres CLONE ID no. 1359237
  misc_feature: Ceres CDNA ID no. 40041402
  misc_feature (31)..(467): Pfam Name: Aa_trans PFAM Desc: Transmembrane amino acid transporter protein
  misc_feature: Homolog of GI Number: 31455391 NR Desc: amino acid permease 1
  misc_feature: Homolog of GI Number: 8809686 NR Desc: amino acid permease 6
  misc_feature: Homolog of GI Number: 31455393 NR Desc: amino acid permease 6
  misc_feature: Homolog of GI Number: 15216030 NR Desc: amino acid permease AAP4
  misc_feature: Homolog of GI Number: 18181930 NR Desc: amino acid permease I
  misc_feature: Homolog of GI Number: 13676299 NR Desc: amino acid transporter
  misc_feature: Homolog of GI Number: 27447655 NR Desc: amino acid transporter
  misc_feature: Homolog of GI Number: 24370975 NR Desc: amino acid transporter
  misc_feature: Homolog of GI Number: 2654019 NR Desc: neutral amino acid transport system II
  misc_feature: Homolog of GI Number: 3540179 NR Desc: putative amino acid permease
  misc_feature: Useful for delaying flowering time
  misc_feature: Useful for making larger plants
  misc_feature: Useful for making plants with increased biomass and foliage
  misc_feature: Useful for making shorter plants
  misc_feature: Useful for making stronger plants
  misc_feature: Useful for sterility
MNPDQFQKNSMFVETPEDGGKNFDDDGRVKRTGTWITASAHIITAVIGSGVLSLAWAIAQMGWVAGPAVLFAFSFITYFTSTLLADCYRSPDPVHGKRNYTYSDVVRSVLGGRKFQLCGLAQYINLVGVTIGYTITASISMVAVKRSNCFHKHGHHDKCYTSNNPFMILFACIQIVLSQIPNFHKLWWLSIVAAVMSFAYSSIGLGLSVAKVAGGGEPVRTTLTGVQVGVDVTGSEKVWRTFQAIGDIAFAYAYSNVLIEIQDTLKSSPPENKVMKRASLIGILTTTLFYVLCGCLGYAAFGNDAPGNFLTGFGFYEPFWLIDFANICIAVHLVGAYHVFCQPIFGFVENWGKERWPNSHFVNGEHALKFSLFGTFPVNFFRVVWRTTYVIITALIAMMFPFFNDFLGLIGSLSFWPLTVYFPIEMYIKQSKMQKFSFTWTWLKILSWACLIVSIISAAGSIQGLAQDLKKYQPFKAQQ

SEQ ID NO: 7383 - DNA, 562 bp, Zea mays
  misc_feature: Ceres CLONE ID no. 1360910
  misc_feature: Ceres CDNA ID no. 36707165
  CDS (82)..(363): REFERENCED BY SEQ ID NO: 7384
atccaccatcacacagcaatccacacaagcacttcgacgtcacacgggcgctgcgcacagacacaccaagcgtcggcaccaatggcttactaccaggaggtggactactgctcggaggaggtgaggtcggtggccccggccggcttcggccgccacggcggcggcgtccagcagcacgtcgtcaaggagaagttcgaggaggtcgacacggtctcacgcgccggcgccaaccaccaccaccaccatggtcaccacggcggccacggcttcgtggtgcgcgagaccagggtcgaagaggacatcaacacctgcaccggcgagttccacgagcgcagggagagcttcctcgccagggctaactgagccgcccggcggccggcatccacgcccgttcgtgcttgcctgcgtgccttatgtatgtctgtggttgactggttgtgcagggtcatcgtacttggctatcgtacgtgcacgcactcagctcctgtacgaattacgacaataagctcgtgacctgaataaaacttcttcgtaatactaatacctaaaaaaaaaaaaaaaa

SEQ ID NO: 7384 - protein, 93 aa, Zea mays
  misc_feature: Ceres CLONE ID no. 1360910
  misc_feature: Ceres CDNA ID no. 36707165
  misc_feature: Homolog of GI Number: 50902350 NR Desc: P0456E05.27
  misc_feature: Homolog of GI Number: 6478144 NR Desc: putative glycine
  misc_feature: Homolog of GI Number: 50902348 NR Desc: P0456E05.26
MAYYQEVDYCSEEVRSVAPAGFGRHGGGVQQHVVKEKFEEVDTVSRAGANHHHHHGHHGGHGFVVRETRVEEDINTCTGEFHERRESFLARAN

SEQ ID NO: 7385 - DNA, 792 bp, Glycine max
  misc_feature: Ceres CLONE ID no. 1360984
  misc_feature: Ceres CDNA ID no. 25446818
  CDS (21)..(578): REFERENCED BY SEQ ID NO: 7386
gaaattcatcgcagcataaaatgtcaaagacaagtttccttgacttccaatacaacctctcaaggagaaaatacctgaggaagccatcgcgcctgttctcccgggacaggcagaactctgggcttaagggtgtgtttcttcagcctaatgctgatgagatgaagcaggtgtttgacaaatttgattccaataaagatgggaaaatttctcaacaggagtacaaagccaccatgaaggctctaggcatgggggactcggttcatgaagtgccaaatattttcagggtggttgatttggatggagatggattcatcaacttcaaggaatttatggaagctcagaacaagggtggtggggttaggacgatggatatacatagtgcatttaggacgtttgataggaatggcgacggtagaataagtgctgaagaagttaaagaaacgctaggaaggctgggagaaaggtgcagcattgaggactgtcggcgaatggtgagagctgtggacactgacggagatggcatggttgacatggacgagttcacaaccatgatgacacagtccctgagacatgtttgaatgtttatggctatcatgtttcttgagcttgtatttaggatcacctcaatgaaagctatgtgtgctgtatttagatttgtgcatgtgttaaataaactggattttaaaatcagtggaacaatacaattgtactgttaaaacggacaactctattgcttgtaatgaataatactaatataaaaactttcttgtgtttacaaaaaaaaaaaaaaaa

SEQ ID NO: 7386 - protein, 185 aa, Glycine max
  misc_feature: Ceres CLONE ID no. 1360984
  misc_feature: Ceres CDNA ID no. 25446818
  misc_feature (153)..(181): Pfam Name: efhand PFAM Desc: EF hand
  misc_feature: Homolog of GI Number: 30102922 NR Desc: At2g15680
  misc_feature: Homolog of GI Number: 51536206 NR Desc: calmodulin
  misc_feature: Homolog of GI Number: 71040671 NR Desc: calcium
  misc_feature: Homolog of GI Number: 5391446 NR Desc: pollen allergen Jun o 4
  misc_feature: Homolog of GI Number: 13397927 NR Desc: putative calmodulin
  misc_feature: Homolog of GI Number: 25403253 NR Desc: protein F21J9.28
  misc_feature: Homolog of GI Number: 21554396 NR Desc: touch
  misc_feature: Homolog of GI Number: 19310789 NR Desc: putative calcium
  misc_feature: Homolog of GI Number: 12324222 NR Desc: putative calmodulin
  misc_feature: Homolog of GI Number: 21618025 NR Desc: putative calmodulin
MSKTSFLDFQYNLSRRKYLRKPSRLFSRDRQNSGLKGVFLQPNADEMKQVFDKFDSNKDGKISQQEYKATMKALGMGDSVHEVPNIFRVVDLDGDGFINFKEFMEAQNKGGGVRTMDIHSAFRTFDRNGDGRISAEEVKETLGRLGERCSIEDCRRMVRAVDTDGDGMVDMDEFTTMMTQSLRHV

SEQ ID NO: 7387 - DNA, 1414 bp, Glycine max
  misc_feature: Ceres CLONE ID no. 1361051
  misc_feature: Ceres CDNA ID no. 25446679
  CDS (94)..(960): REFERENCED BY SEQ ID NO: 7388
acttggtggcgagcgagtgttgaaggttaaaacgttacgtttaaacctctctgcattgcattcgcatatgatccgttaacgttagcaacaacgatggatgattcgaagcagcagcagcaacgaaaaaaaaactaccgaaagagaagcgctccaacagacgaagatgaacttcctcaatctcaaagtaacaatgaatccgacgacgaacgagaaagaagaatggcattggaggaaattaagctcctccagaagcagcgggaaaggaaatcgggaattccagcaaaccctagtttgcaggtgcagagtggaaccggcggcggtttagctgctaaagccgccgaaaagaacgatggcgatggcggcgacaaggacgagctcgttcttcaagacaccttcgctcaagagaccgctgttatggatgaagaccccaatatggtgaattatatcgagcacgagttagcgaagaagaggggaaggaaaattgatgcagcggatcaagctgagaatgagctgaaacgtgctgaagatgaactatataagatccctgagcatcttaaagtaaaaaggcgaaattcagaagaaagctctactcagtggactactggtattgctgaggttcagcttccaatcgaatataaattaaaaaatattgaagaaacagaagccgccaaaaagcttctacaggaaaagaggcttatgggtcgaacaaaatcagatttcagcattccatcaagttacagtgctgattatttccagcgtggcagggattatgcggaaaaacttagaagagaacatccagagttgtacaaagatagaaatcaccaggatgatagttctggatccaagaaaaatgattccagcactgatgcagctggagcagtccagaggcaggctgcaaccgatgaattcatgttagagcgcttcaggaaacgagaacgtcaccgtgtaatgcgaagatgacatgaacgctatatttatggtgcactttacgacagtacatcaaagattggtggaagttgagcttctgttgattgggatgccactgatttgcaccggttccttattcaaactgtagcagaagatcattgggctacttgagcgttaatttctgttggttctattccttttaagaacaactgttaagaattatcaagaatatattattttaatcactgaccgaatgagaggccttatatcaagaggcagcaaaagaattgtaatattcagcactcctttgattggtcatcaataagttgctgttagcctgtaagatatggtatgaacagttttggcaatggttagaagaatggtggtgatgccaccaggttccttgtaagaggatctgtatcagactgtatgcattttactgacattcaaaatatttaacttttccgtttgaaaaaaaaaaaaaaaa

SEQ ID NO: 7388 - protein, 288 aa, Glycine max
  misc_feature: Ceres CLONE ID no. 1361051
  misc_feature: Ceres CDNA ID no. 25446679
  misc_feature (114)..(207): Pfam Name: Hep_59 PFAM Desc: Hepatocellular carcinoma
  misc_feature: Homolog of GI Number: 22137212 NR Desc: At1g02330/T6A9_12
  misc_feature: Homolog of GI Number: 51950077 NR Desc: MGC84248 protein
  misc_feature: Homolog of GI Number: 50757325 NR Desc:  similar to chromosome 9 open reading frame 78
  misc_feature: Homolog of GI Number: 17068385 NR Desc: Chromosome 9 open reading frame 78
  misc_feature: Homolog of GI Number: 7706557 NR Desc: chromosome 9 open reading frame 78
  misc_feature: Homolog of GI Number: 54640711 NR Desc: GA20734
  misc_feature: Homolog of GI Number: 55632457 NR Desc:  similar to chromosome 9 open reading frame 78
  misc_feature: Homolog of GI Number: 61842957 NR Desc:  similar to CDNA sequence BC005624
  misc_feature: Homolog of GI Number: 61862318 NR Desc:  similar to CDNA sequence BC005624
MDDSKQQQQRKKNYRKRSAPTDEDELPQSQSNNESDDERERRMALEEIKLLQKQRERKSGIPANPSLQVQSGTGGGLAAKAAEKNDGDGGDKDELVLQDTFAQETAVMDEDPNMVNYIEHELAKKRGRKIDAADQAENELKRAEDELYKIPEHLKVKRRNSEESSTQWTTGIAEVQLPIEYKLKNIEETEAAKKLLQEKRLMGRTKSDFSIPSSYSADYFQRGRDYAEKLRREHPELYKDRNHQDDSSGSKKNDSSTDAAGAVQRQAATDEFMLERFRKRERHRVMRR

SEQ ID NO: 7389 - DNA, 825 bp, Glycine max
  misc_feature: Ceres CLONE ID no. 1362247
  misc_feature: Ceres CDNA ID no. 25446006
  CDS (49)..(561): REFERENCED BY SEQ ID NO: 7390
atcagtgttcactactttttcattcatttagcatctacaccgagagagatgggggcttgtttttcatgtaactcatcctccacattgaagaatatccgtgtggttcatctcaatggttatgtagaggattttgatcaaccaatttcagtgaggcaagtaattggataccccaaaaaacactttgtttgcacttccactcagcttctttccccatgctcaacatcaatgaatggagacaccaacctccaacctggtcaagtgtatttcatgctaccatactcggtactacaagccgatgtttcgccggtggaactggctggccttgcaaagagactcaccacaatagccaaatcaggtcctttgtcaagccaaacccaaacattttggaattcaccctccaggagtcctggtggagttggggtggcagagaaatatggtgttggtttgatcaatattggaggaagaagccctagtaaagtgcaaccttggaaacctatcttggacaccataacagagaagccattccataagagaagtgaatcggatttgcaagaaagttaatgatttttgcaagaacttggattgaggcaaccagataggactaagacatgtaaggcggtgtattgattgtttaaaaaaataaaaaattgagacaattgtttcagtttgctgaacctttcatgttatgatcaggagaattagacttgcataatatgtatttgagattttttgtatctgattctccaaagatgtacttacgaatgtctctggggatatatttatattagtaaccaattattacgcgctggaaaaaaaaaaaaaaaa

SEQ ID NO: 7390 - protein, 170 aa, Glycine max
  misc_feature: Ceres CLONE ID no. 1362247
  misc_feature: Ceres CDNA ID no. 25446006
MGACFSCNSSSTLKNIRVVHLNGYVEDFDQPISVRQVIGYPKKHFVCTSTQLLSPCSTSMNGDTNLQPGQVYFMLPYSVLQADVSPVELAGLAKRLTTIAKSGPLSSQTQTFWNSPSRSPGGVGVAEKYGVGLINIGGRSPSKVQPWKPILDTITEKPFHKRSESDLQES

SEQ ID NO: 7391 - DNA, 1893 bp, Glycine max
  misc_feature: Ceres CLONE ID no. 1362265
  misc_feature: Ceres CDNA ID no. 24766096
  CDS (105)..(1637): REFERENCED BY SEQ ID NO: 7392
gcacacaaccactctttcttcttcttctcttaaaagagcctttgctttttctttaggcctttccgaattaagtacttgtttcattttctctcgaagcaagaaaaatgttcatcgagagtttcaaggttgagagtcctaacgtgaagtacacagagactgagattcagtccgtgtacaactatgaaaccactgaacttgttcacgagaacaagaatggcacttatcagtgggttgtcaagcccaaaactgtcaaatatgaatttaaaaccaacacccatgtccctaaactaggggtaatgcttgtggggtggggtggaaacaatggctcaaccctcaccggtggtgttattgctaaccgagagggtatttcatgggcaacaaaggacaagattcaacaagccaattactttgggtcgctgacccaggcatcagctattagagttgggtctttccaaggggaggaaatatatgccccattcaagagcctgcttccaatggtaaaccctgatgatgttgtgtttgggggatgggatatcagtaacttgaacctggcagatgccatggccagggccaaggtgtttgatatcgacctgcagaaacagttgaggccttacatggaatctatggttccactccccggaatctatgaccccgatttcattgctgccaaccaaggagaccgtgccaacaacgtgatcaagggcacaaagaaagaacaagttcaacaaatcatcaaagacattaaggagtttaaggaaagcactaaggttgacaaggtggttgtcctgtggacagccaacacagagaggtacagcaacctagttgtgggactaaacgacaccatggaaaacctctttgcttccttggacaggaacgaggctgagatttccccttccaccttgtatgccattgcttgtgttatggaaaatgttcctttcatcaatggaagccctcagaacacctttgtcccagggctgattgatctggccatcaagaggaacagtttgattggaggagatgactttaagagtggtcagaccaaaatgaaatctgtgttggtggatttccttgtgggggccggcatcaagccaacatctatagtgagttacaaccatctgggcaacaatgatggcatgaatctctcagcccctcaaaccttccgctctaaggaaatctccaagagcaatgttgttgacgatatggtcaacagcaacgccatcctctatgagcccggtgaacatccagaccatgtggttgtcattaagtacgtgccttatgtaggggacagcaagagggccatggatgagtacacttctgagatattcatgggtggaaagaacacaattgtgttgcacaacacatgtgaggattcactgttagctgctcctattatcttggacttggtccttcttgctgagctcagcactcgaatcgagtttaaagctgaaaatgagggaaaattccactcattccacccagttgcgaccatccttagttacctgaccaaggcccctctggttccaccgggtacaccagtggtgaatgcgttgtcaaagcagcgagctatgctggaaaacatcctgagggcttgtgttggattagctcctgagaacaacatgatcctagagtacaagtgaagttcaaagtcttaagagtaacggtttgggatagtgtagttgaatgtgatcaaaacttaactcatatcccatacccctcttttctgttatatagttctggcaaatgtgaaatttgaagatcgttgaatctctctatctttgttcctgccgacttatttgagagcaggctatctatgcatgtatgtaataaaataatatcaagttatccacgtcttttgtgcttaattcatgtttctcttcaaaaaaaaaaaaaaaa

SEQ ID NO: 7392 - protein, 510 aa, Glycine max
  misc_feature: Ceres CLONE ID no. 1362265
  misc_feature: Ceres CDNA ID no. 24766096
  misc_feature (62)..(494): Pfam Name: NAD_binding_5 PFAM Desc: Myo
  misc_feature: Homolog of GI Number: 23505967 NR Desc: At2g22240/T26C19.10
  misc_feature: Homolog of GI Number: 558648 NR Desc: D
  misc_feature: Homolog of GI Number: 54635949 NR Desc: GA15890
  misc_feature: Homolog of GI Number: 14548099 NR Desc: Inositol
  misc_feature: Homolog of GI Number: 14548096 NR Desc: Inositol
  misc_feature: Homolog of GI Number: 66546786 NR Desc:  similar to MGC52653 protein
  misc_feature: Homolog of GI Number: 7484627 NR Desc: inositol
  misc_feature: Homolog of GI Number: 55250902 NR Desc: myo
  misc_feature: Homolog of GI Number: 60417544 NR Desc: myo
  misc_feature: Homolog of GI Number: 9858816 NR Desc: myo
MFIESFKVESPNVKYTETEIQSVYNYETTELVHENKNGTYQWVVKPKTVKYEFKTNTHVPKLGVMLVGWGGNNGSTLTGGVIANREGISWATKDKIQQANYFGSLTQASAIRVGSFQGEEIYAPFKSLLPMVNPDDVVFGGWDISNLNLADAMARAKVFDIDLQKQLRPYMESMVPLPGIYDPDFIAANQGDRANNVIKGTKKEQVQQIIKDIKEFKESTKVDKVVVLWTANTERYSNLVVGLNDTMENLFASLDRNEAEISPSTLYAIACVMENVPFINGSPQNTFVPGLIDLAIKRNSLIGGDDFKSGQTKMKSVLVDFLVGAGIKPTSIVSYNHLGNNDGMNLSAPQTFRSKEISKSNVVDDMVNSNAILYEPGEHPDHVVVIKYVPYVGDSKRAMDEYTSEIFMGGKNTIVLHNTCEDSLLAAPIILDLVLLAELSTRIEFKAENEGKFHSFHPVATILSYLTKAPLVPPGTPVVNALSKQRAMLENILRACVGLAPENNMILEYK

SEQ ID NO: 7393 - DNA, 696 bp, Glycine max
  misc_feature: Ceres CLONE ID no. 1362293
  misc_feature: Ceres CDNA ID no. 25447052
  CDS (59)..(448): REFERENCED BY SEQ ID NO: 7394
atgctttctacattttgttccctattcgtgtgcgtacgttgttcgtatataaagacaaatgagcagtggtggaagggctgtgaagcccaaagaggaggagcaagatggcatgtctgtccactctccttgcaaacctcctccttcctctgcttcctctctccccaaggagcagtcacaggttgaattggagctgagattgttggaagctcttgagatttaccctccaatgaaactacaaggagtacatcgtcactttgtcctttatggtctgatggaatttctaaggaggaagtttgacagacaattttcttctgaggaggtcctacaattgctggatcggttctacaacttagaaatgctgaaaacagatgatgacgagattgatttgcttactcacgaagaagaattttccttgcctcagagttactttgtcaaggaagaaccctgagcaacaatttttggagtatatacattttttgtttcaaccgttattcatcttttgatgtgtacagctggttattctattattcctttcccctcttccctcttttgggattatatgttcatggtagaacccgtcaagtgttgctggtgttctcatcgcttgtctgtcaagtttcaccggtggttccggttggtactctcaatcataatgtatttagctacactggttcggatataaaaaaaaaaaaaaaa

SEQ ID NO: 7394 - protein, 129 aa, Glycine max
  misc_feature: Ceres CLONE ID no. 1362293
  misc_feature: Ceres CDNA ID no. 25447052
  misc_feature (42)..(127): Pfam Name: CT20 PFAM Desc: CT20 family
MSSGGRAVKPKEEEQDGMSVHSPCKPPPSSASSLPKEQSQVELELRLLEALEIYPPMKLQGVHRHFVLYGLMEFLRRKFDRQFSSEEVLQLLDRFYNLEMLKTDDDEIDLLTHEEEFSLPQSYFVKEEP

SEQ ID NO: 7395 - DNA, 1498 bp, Glycine max
  misc_feature: Ceres CLONE ID no. 1362548
  misc_feature: Ceres CDNA ID no. 25447053
  CDS (71)..(1405): REFERENCED BY SEQ ID NO: 7396
ctgttgtcctctgttttgtttgtactacttcacttcgtttcattctctcaaacaccaaaccaaagtaacaatgtgttgcttcagaaaacggttcaatttgttcttcattttccttgccttggatgcaacacccatcttctcattaacagattcctcaaatcaactctccacaaactatctagaaaatgccaagaagcctgaagtatttgattggatggtgaaaatcagaaggaagattcatgagaatccagagttgggttatgaagaatttgagaccagtaaactgattagagaggaattagataaactgggtatctcatataaacacccagttgctgtcactggtgttattggctacattgggacaggaagctcgccttttgttgcaataagaactgatatggatgcactcccgattcaggaaatggtggagtgggagcacaagagtaaagtacctggaaagatgcatgcgtgtgcccatgatgctcatgtcgctatgcttcttggggcagcaaagattctcaaacaacatgaaaaacagttgcagggaactattgttcttgttttccaaccagcagaggaaggaggtgcaggggctaagaaaattttagatactggagccttagataatgttattgctatctttggattacatgtgaagcctgagattcctgtaggtgaagtggcctctaggtctggtccattattggcaggaagtggtgtatttgaagcaataataagaggaaagggaggtcatgcagctcttccccaactttctatagaccctgtaatggctgctaccaatgtcattattagcttacaaaaccttgtttctcgcgaggctgatcctcttgaccctcaggttttgacaattgcaaagctccaaggaggtgatgctttcaatgttattccagattatgtcacaattggtggcactttccgagctttttctagagaaacattggagcaccttaaacaacgcattgagcaggttatcattggtcaagctgctgtgctaaggtgcaatgcaagtgtcaacttctttgaagaagagaatcctttatatcctccaactataaataatggtgacctgcacaagctttttgttgatgtagctgggaatttgcttggtatcaataaagttgacactaatatggaacaagacatggctgctgaagactttgcgttttatcaagaggtcatacctggctactacttcacgcttggaatgaagaatgcttcttcatttgaaccggttgcgccattacactcaccctatcttgtaatcaatgaagatggacttccttatggggctgcacttcatgcatcattggccactggttatcttacaaaatatcagcggggcatagccaaggtagtagggaaatatcatgatcaattgtaagtgtcagcaattgttaaaagctattgtagtcttatttcttgcaacaatgacctgatatatatgtggcattgttatacaaaaaaaaaaaaaaaa

SEQ ID NO: 7396 - protein, 444 aa, Glycine max
  misc_feature: Ceres CLONE ID no. 1362548
  misc_feature: Ceres CDNA ID no. 25447053
  misc_feature (106)..(424): Pfam Name: Peptidase_M20 PFAM Desc: Peptidase family M20/M25/M40
  misc_feature: Homolog of GI Number: 23506081 NR Desc: At1g51760/F19C24_4
  misc_feature: Homolog of GI Number: 27948556 NR Desc: IAA
  misc_feature: Homolog of GI Number: 2181184 NR Desc: JR3 protein
  misc_feature: Homolog of GI Number: 51538213 NR Desc: auxin amidohydrolase
  misc_feature: Homolog of GI Number: 12321667 NR Desc: auxin conjugate hydrolase
  misc_feature: Homolog of GI Number: 34914096 NR Desc: putative IAA
  misc_feature: Homolog of GI Number: 49524068 NR Desc: putative auxin
  misc_feature: Homolog of GI Number: 902791 NR Desc: ILL2
  misc_feature: Homolog of GI Number: 10176770 NR Desc: IAA
  misc_feature: Homolog of GI Number: 56554606 NR Desc: Chain A
MCCFRKRFNLFFIFLALDATPIFSLTDSSNQLSTNYLENAKKPEVFDWMVKIRRKIHENPELGYEEFETSKLIREELDKLGISYKHPVAVTGVIGYIGTGSSPFVAIRTDMDALPIQEMVEWEHKSKVPGKMHACAHDAHVAMLLGAAKILKQHEKQLQGTIVLVFQPAEEGGAGAKKILDTGALDNVIAIFGLHVKPEIPVGEVASRSGPLLAGSGVFEAIIRGKGGHAALPQLSIDPVMAATNVIISLQNLVSREADPLDPQVLTIAKLQGGDAFNVIPDYVTIGGTFRAFSRETLEHLKQRIEQVIIGQAAVLRCNASVNFFEEENPLYPPTINNGDLHKLFVDVAGNLLGINKVDTNMEQDMAAEDFAFYQEVIPGYYFTLGMKNASSFEPVAPLHSPYLVINEDGLPYGAALHASLATGYLTKYQRGIAKVVGKYHDQL

SEQ ID NO: 7397 - DNA, 1328 bp, Glycine max
  misc_feature: Ceres CLONE ID no. 1362732
  misc_feature: Ceres CDNA ID no. 40351761
  CDS (161)..(1081): REFERENCED BY SEQ ID NO: 7398
aaaaaggttatgatgccagaaaagaaaagaaaaaacacttgggacgggatttttaaatccaaggcagatagatctgtagactgaagttaattgtccaaaattcgccagttagtcactgagttcatccattcatccttcgcttattcctcttgtttgggtcatggcaatttgttcctcactttcatcgtcatcgtcatcgtcttcttcttctacatcgtcctttggttcctcgagcaccgcgaaggcgtggatcatccatggcattgtggccggagtggcgattgctgcggcggtgggtgcacgcgcttacatgactcgattcagcaagtttcggagccgggtcgtgggcatcatacccgcccgattcgcttcctcgcgcttccagggaaagcctctcgttcaaatccttggcaagcccatgatccagagaacatgggaaagggcaaagctggcagctacattggatcatattgttgtggcaactgatgatgaaaagattgctgattgctgtcgacaatttggagctgatgttataatgacatcagaatcttgcagaaatggtactgagcgctgcaatgaagccctacagaagcttgggaaaaaatatgatattgttgtcaacattcagggtgatgagccacttattgaacctgagataatagatggtgttgtgaaagctttgcaggcagctcctgatgcagtgttcagcactgcagtcacatctttaaagcctgaagatgcacatgatccaaatagagtgaaatgtgtggtagataatcgtggttatgccatttatttttcacgaggattaatcccattcaacaagtcaggaatggtcaatcaacagttcccgtatttgcttcatcttgggattcagagctacgatgcaaagtttctgaatatataccctgatcttcaacctactccgttgcaactcgaggaggatttggagcagcttaaagtccttgagaatggctacaagatgaaggtgataaaagttgatcatgaggctcatggtgttgacactcctgaagatgttggaaagatagaatctctaatgcgtgagaggaacttgtcttgaactctcagacacagcagtgaaatcatatgcaaattaatcattagcacaccgcatcgcaaatagaaaaagggttcattttatttttttgttttagtataaaccttcttgttgcttacaacatagtacgcgtgttattatttataatatattttattttataacatcggcagtatgactaggtttctcggtttcttgtacaattattaatataatatatatgtgcagagaattaaaaaaaaaaaaaaaa

SEQ ID NO: 7398 - protein, 306 aa, Glycine max
  misc_feature: Ceres CLONE ID no. 1362732
  misc_feature: Ceres CDNA ID no. 40351761
  misc_feature (62)..(277): Pfam Name: CTP_transf_3 PFAM Desc: Cytidylyltransferase
MAICSSLSSSSSSSSSSTSSFGSSSTAKAWIIHGIVAGVAIAAAVGARAYMTRFSKFRSRVVGIIPARFASSRFQGKPLVQILGKPMIQRTWERAKLAATLDHIVVATDDEKIADCCRQFGADVIMTSESCRNGTERCNEALQKLGKKYDIVVNIQGDEPLIEPEIIDGVVKALQAAPDAVFSTAVTSLKPEDAHDPNRVKCVVDNRGYAIYFSRGLIPFNKSGMVNQQFPYLLHLGIQSYDAKFLNIYPDLQPTPLQLEEDLEQLKVLENGYKMKVIKVDHEAHGVDTPEDVGKIESLMRERNLS

SEQ ID NO: 7399 - DNA, 1040 bp, Glycine max
  misc_feature: Ceres CLONE ID no. 1362751
  misc_feature: Ceres CDNA ID no. 29191840
  CDS (41)..(829): REFERENCED BY SEQ ID NO: 7400
agaagtcgtcgtcgttgtcagctccgaaacacctgcaaacatggcgaggggattgaagaagcatttgaagaggctcaatgcccccaagcactgggatcttgacaaacttggtggtgccttcgctcccaagccgtcttctggacctcacaagtcgagggagtgtcttcctctcgtcttgatcatcaggaacaagttgaagtacgctttgacgtaccgtgaagtcatctccatcctcatgcaaaggcatatccaagttgatggtaaagttaggactgacaagacataccctgctggtttcatggatgttgtatcgatcccaaagacgaatgagaactttcgtcttctgtatgacaccaagggacgtttccgcctccactccatcagggacgaggaagcaaagttcaagctttgtaaggttaggactatccaggtggggcagaaggggatcccttacctcaacacttacgacggtcgcaccatccgttaccctgacccactcatcaagccaaacgacaccatcaagctcgaccttgaggagaacaagatcgtcgactccatcaagtttgatgtcggcaacgttgtgatggtgacgggagggagaaacagagggcgtgtgggtgtgatcaagaaccgtgagaagcataagggaagctttgagacgatccacatccaagactcgacgggacacgagtttgctacgaggttgggcaatgtgttcaccctcgggaaaggtacaaagccatgggtgtctcttccaaagggtaaaggtattaagctgaccatcattgaggaagccaggaagaggctttctgcccagcaagctgcttaaaagttgaatcatcgaagactgtgtttcgtttctcttgtcataaactctagcttcttatctcagttttgagcttttgttctttcatgttgctttctcgcaaaacccattttgaaacatctgaaaattccagtagaacgttttgtaatgtctgcgtctttgtcttaatttttttttaataatttactcgttaaaatcaaaaaaaaaaaaaaaa

SEQ ID NO: 7400 - protein, 262 aa, Glycine max
  misc_feature: Ceres CLONE ID no. 1362751
  misc_feature: Ceres CDNA ID no. 29191840
  misc_feature (175)..(211): Pfam Name: KOW PFAM Desc: KOW motif
  misc_feature (3)..(40): Pfam Name: RS4NT PFAM Desc: RS4NT
  misc_feature (42)..(90): Pfam Name: S4 PFAM Desc: S4 domain
  misc_feature (94)..(170): Pfam Name: Ribosomal_S4e PFAM Desc: Ribosomal family S4e
  misc_feature: Homolog of GI Number: 9759565 NR Desc: 40S ribosomal protein S4
  misc_feature: Homolog of GI Number: 23505827 NR Desc: At5g58420/mqj2_10
  misc_feature: Homolog of GI Number: 19310835 NR Desc: putative 40S ribosomal protein S4
  misc_feature: Homolog of GI Number: 17104537 NR Desc: putative ribosomal protein S4
  misc_feature: Homolog of GI Number: 21592333 NR Desc: ribosomal protein S4
  misc_feature: Homolog of GI Number: 22138108 NR Desc: 40S ribosomal S4 protein
  misc_feature: Homolog of GI Number: 457803 NR Desc: ribosomal protein S4
  misc_feature: Homolog of GI Number: 82400118 NR Desc: 40S ribosomal protein S4
  misc_feature: Homolog of GI Number: 73759787 NR Desc: ribosomal protein S4
  misc_feature: Homolog of GI Number: 2331301 NR Desc: ribosomal protein S4 type I
  misc_feature: Useful for increasing chlorophyll and photosynthetic capacity
MARGLKKHLKRLNAPKHWDLDKLGGAFAPKPSSGPHKSRECLPLVLIIRNKLKYALTYREVISILMQRHIQVDGKVRTDKTYPAGFMDVVSIPKTNENFRLLYDTKGRFRLHSIRDEEAKFKLCKVRTIQVGQKGIPYLNTYDGRTIRYPDPLIKPNDTIKLDLEENKIVDSIKFDVGNVVMVTGGRNRGRVGVIKNREKHKGSFETIHIQDSTGHEFATRLGNVFTLGKGTKPWVSLPKGKGIKLTIIEEARKRLSAQQAA

SEQ ID NO: 7401 - DNA, 691 bp, Zea mays
  misc_feature: Ceres CLONE ID no. 1362811
  misc_feature: Ceres CDNA ID no. 35385345
  CDS (97)..(525): REFERENCED BY SEQ ID NO: 7402
ctcgagtttcctattttcctctcctcccccacagcagcccggcgaaaaccctagtaagcaaaccaccggagcagcggcgcttgcgcgagcggagccatggcggacgacgattacaacgaaattgacatggggtatgaggatgagcccccagaaccggagattgaggaaggagctgaagaagagcctgagaacaatgaagatgcccctgatgacgtcataggtggtgagggtgaagataaggaacaggaaaagaccaagcgtgaacgcaaaacaacaaaatacatgacgaagtacgaacgtgcgcgcatcctgggtacacgagccttgcagataagcatgaatgctccagtcatggttgagcttgagggagaaactgaccctcttgagattgcaatgaaggagctgagagcgcgcaagatacccttcacgatcagacgttacttacctgatggaagctatgaagactggggagtagacgagctcattgtggaggactcctggaaacgtcaggttggtggagactgaagacgcggatatacttggcatggaaagggtctgtggtgcagtgggtgtttcctgtagttacaattcttcgttgccactatgagtggatattgtagcgaatgaaccaagacgaaatgatgctatgttaacttaacgtctgaggttgccttgaaaaaaaaaaaaaaaa

SEQ ID NO: 7402 - protein, 142 aa, Zea mays
  misc_feature: Ceres CLONE ID no. 1362811
  misc_feature: Ceres CDNA ID no. 35385345
  misc_feature (61)..(114): Pfam Name: RNA_pol_Rpb6 PFAM Desc: RNA polymerase Rpb6
  misc_feature: Homolog of GI Number: 50399946 NR Desc: putative DNA
  misc_feature: Homolog of GI Number: 50936931 NR Desc: putative DNA
  misc_feature: Homolog of GI Number: 4960152 NR Desc: DNA
  misc_feature: Homolog of GI Number: 17104747 NR Desc: putative DNA
  misc_feature: Homolog of GI Number: 33589774 NR Desc: At2g04630
  misc_feature: Homolog of GI Number: 34905016 NR Desc: putative DNA
  misc_feature: Homolog of GI Number: 50540154 NR Desc: zgc:92790
  misc_feature: Homolog of GI Number: 50416676 NR Desc: Polymerase
  misc_feature: Homolog of GI Number: 72167637 NR Desc:  similar to polymerase II
MADDDYNEIDMGYEDEPPEPEIEEGAEEEPENNEDAPDDVIGGEGEDKEQEKTKRERKTTKYMTKYERARILGTRALQISMNAPVMVELEGETDPLEIAMKELRARKIPFTIRRYLPDGSYEDWGVDELIVEDSWKRQVGGD

SEQ ID NO: 7403 - DNA, 669 bp, Zea mays
  misc_feature: Ceres CLONE ID no. 1364075
  misc_feature: Ceres CDNA ID no. 25445568
  CDS (399)..(623): REFERENCED BY SEQ ID NO: 7404
ctgagaaaaaagaaaagcaattcccgttcccgtccttcctgagacgagaaggctaggctagctagagaaaggggggggggagggggcgacaccgaggcgggggcaacgggagcaagcaaggcaaggcaaggcagcagcatgggggagaagcgaacaagaccgcggggcgcgcggacgcccatgtggacgccatgcgcggacgcggcgcggacgtcgtgacacctgcagccccccggcacccggcctgcaccgccatggccctgccgccgccgccgcattgcgcctcaaaacccccctccgcgcctcccgccctctaggctccccgctcgccaaggccaaaccccccaccgttcggttcctgatccggcctctcggcctctccgctggaggtaggggacatggcggaagaggcatcgcctccgcctccgccgcccaagctgctctacattgccgtcgccgacggcgggggccgccgggcgttccggtacacgcgccccgtgctgcagagcaccctgcatctcatgggatgcaagcctcgccatgccttcaaggtccctctcttcctccctctccccgctcgctcttgcgtgtcatcctgctttgctcctatagctttgttataaataaataaataaaaagaagctcgggttgctaaaaaaaaaaaaaaaa

SEQ ID NO: 7404 - protein, 74 aa, Zea mays
  misc_feature: Ceres CLONE ID no. 1364075
  misc_feature: Ceres CDNA ID no. 25445568
MAEEASPPPPPPKLLYIAVADGGGRRAFRYTRPVLQSTLHLMGCKPRHAFKVPLFLPLPARSCVSSCFAPIALL

SEQ ID NO: 7405 - DNA, 1254 bp, Glycine max
  misc_feature: Ceres CLONE ID no. 1364129
  misc_feature: Ceres CDNA ID no. 40041403
  CDS (163)..(903): REFERENCED BY SEQ ID NO: 7406
acacactcacacacacacacacactgggtctttgcattctgtggaagagcttgttgggttctctcagctttcacctttccaggctcggatccaaagaaaaatctcaactttcttcaacaattcatctccacaatttctgggtagtggctttttttagcaggaatggctcaacgttctaatgttccaatgttaggcaagagtgaagagaatgtttcagatacagctcattctgacaaagcccagaaaggtcagccaggttcaaagatgattaatccaaatgacaccaaggaaaattcagatgtagtttcttctgctggcctaccccattcaaaacccagagttcattcagaggatccatctggaaagggatcagtgagatcaatacatgagttacaaatgagtagggaggatggtgatcctaaacaatttactgactctccagctcgccatggtggcagtgattctgcctatcgaggtcacggagtaggttctgctgacaaccgtaaaagaccttcaagacaaagtactgggtctgagcacagcattgaccgttcaccccttcatcgccaggcaaagacccctggaagagatagtccttcttgggaaggaaaaaattcatatgacagtagccatggtaccccaggaaggtcccgattaagaccacctaaccgaggggatgaaactcctgataaaggtgctgctgttccaaagtttggtgagtgggatgagagcaaccctgcatcggctgatggctacactcacattttcaacaaagtgcgggaggagaaacaggtgggggctggacacgtgccagttacgcctaatgggagacaatatgctgctcggaaccaacctgccgacgacaaagctcagagttgctgcttttgctggggcaaaaaatgatttatgtgaagcatgaattatattctgaacagaagagataaaaatagggttgtgaatggtcatgaggtgtgtgtagcacttgtaaatattcaaggctctctcttcccaggaaagcatcattgaaaaacatttgtcttaaatttgtgcctttttctccctttctgtgtctttctttgttttggtcaatagagacactttgtgtgcaagattgtgatttgttctttttatctttttattaatttgctatgtaactgccacactttatataacttaatttatctgtatttagctgggaaatacaagatttattatacaattcttttggttgtgattctaaaaaaaaaaaaaaaa

SEQ ID NO: 7406 - protein, 246 aa, Glycine max
  misc_feature: Ceres CLONE ID no. 1364129
  misc_feature: Ceres CDNA ID no. 40041403
  misc_feature (172)..(241): Pfam Name: NOI PFAM Desc: Nitrate
  misc_feature: Homolog of GI Number: 34897468 NR Desc: putative nitrate
  misc_feature: Homolog of GI Number: 50923725 NR Desc: OSJNBa0083D01.24
  misc_feature: Homolog of GI Number: 20465673 NR Desc: putative nitrate
  misc_feature: Homolog of GI Number: 50928789 NR Desc: OSJNBa0058K23.20
  misc_feature: Homolog of GI Number: 50899034 NR Desc: NOI protein
  misc_feature: Homolog of GI Number: 79537400 NR Desc: NOI
MAQRSNVPMLGKSEENVSDTAHSDKAQKGQPGSKMINPNDTKENSDVVSSAGLPHSKPRVHSEDPSGKGSVRSIHELQMSREDGDPKQFTDSPARHGGSDSAYRGHGVGSADNRKRPSRQSTGSEHSIDRSPLHRQAKTPGRDSPSWEGKNSYDSSHGTPGRSRLRPPNRGDETPDKGAAVPKFGEWDESNPASADGYTHIFNKVREEKQVGAGHVPVTPNGRQYAARNQPADDKAQSCCFCWGKK

SEQ ID NO: 7407 - DNA, 1567 bp, Glycine max
  misc_feature: Ceres CLONE ID no. 1364287
  misc_feature: Ceres CDNA ID no. 25446879
  CDS (438)..(1424): REFERENCED BY SEQ ID NO: 7408
aaaaatttcacacaaatggcgtgttgctataagtaccagtttttgtttcttcactctctctctctctctctctctctctctctcccactttctcccctaatctcgctccatctctgtgtgagtttcagtctcagcagtgtcggaattgcaagtgaaacccgcgccacgttaccgcctcgggtttcacttgcaatcttcaaaccccgtcgctgcttctttcttcgcgctcgcgcgcgctactctctaatggttattgtagagctacttcagaatcgccgggagccgttcccgcaactccgcgaagtgccgccgcgtcggggacgttgattcccgaagccggaatcggaatcggaaccggaaccgctcaagcgctgcagtcaggttctgctggcaatgcggaactcgtgacgaacgccgagcctttgaatggcagagttatgatcattgacggaacttcgattattcaccgcgcgtactacaagcttttagcaaagttgcatcatggtcatctaacacatgctgatggaaatggagattgggttttaatgatgtttacagcactatctcttataattgatgttctgaaatttatcccttcccatgttgtggtagtgtttgaccatgatggaattcctattggtcatacatataattcatcaaaagaaagttttactgcaaaaggccagaattttcggcacaatctataccccgcatacaagagcaaccgtcctccaactcctgataccattgttcagggacttcaatacttcaaagcatccatcaaggctatgtccataaaaataattgaggttccaggtgtagaggcagatgatgtgattggaacattagccttaaggagtgttgatgctgggtacaaggtacgagttgtctcccccgacaaagacttttttcagattttatctccttcgctacgtctacttcgaattgctccgcgtggtgatgagatggtttcgtttggagttgaggattttgaagagagatatggaggtctgaaaccatcccagtttgcagatatgatcgcacttactggtgatagatctgataatattccaggagttcatggaatcggagatgttcatgctgtgcaattacttagtagatttggcacattggagaggttgttggattccgttgatcaaattaaagaggatcacattaaaaaggccttgatcgaaaatgctgagcaggcagtcttgagcaaggaactggcattgttgcgctctgatcttccattgtacatggtaccgctcgctataaaagatctctcatttaataaaccagaggacaacggtagcaagttcaacagccttttaacagctatcagtgcatacgcagaagggttttcagctgatcctatcatcaggagaacagttcatttgtggcaaaagttggattcaagatgaaactgagtcatcggggtttcttgtatagaggggattctttgaatagaacatttcaatacttggaacagtacacaacacgagggtttttaagtgtatatagtaagcagaacgagttgttcttctgtggaaaaaaaaaaaaaaaa

SEQ ID NO: 7408 - protein, 328 aa, Glycine max
  misc_feature: Ceres CLONE ID no. 1364287
  misc_feature: Ceres CDNA ID no. 25446879
  misc_feature (1)..(189): Pfam Name: 5_3_exonuc_N PFAM Desc: 5'
  misc_feature (192)..(273): Pfam Name: 5_3_exonuc PFAM Desc: 5'
  misc_feature: Homolog of GI Number: 42565846 NR Desc: 5'
  misc_feature: Homolog of GI Number: 42572637 NR Desc: 5'
  misc_feature: Homolog of GI Number: 4090935 NR Desc: DNA polymerase type I
  misc_feature: Homolog of GI Number: 4731571 NR Desc: DNA polymerase I
  misc_feature: Homolog of GI Number: 15644367 NR Desc: DNA
  misc_feature: Homolog of GI Number: 38146983 NR Desc: DNA polymerase I
  misc_feature: Homolog of GI Number: 2739139 NR Desc: thermostable DNA polymerase
  misc_feature: Homolog of GI Number: 83814085 NR Desc: DNA polymerase I
  misc_feature: Homolog of GI Number: 83755479 NR Desc: DNA polymerase I
  misc_feature: Homolog of GI Number: 1097211 NR Desc: DNA polymerase
MIIDGTSIIHRAYYKLLAKLHHGHLTHADGNGDWVLMMFTALSLIIDVLKFIPSHVVVVFDHDGIPIGHTYNSSKESFTAKGQNFRHNLYPAYKSNRPPTPDTIVQGLQYFKASIKAMSIKIIEVPGVEADDVIGTLALRSVDAGYKVRVVSPDKDFFQILSPSLRLLRIAPRGDEMVSFGVEDFEERYGGLKPSQFADMIALTGDRSDNIPGVHGIGDVHAVQLLSRFGTLERLLDSVDQIKEDHIKKALIENAEQAVLSKELALLRSDLPLYMVPLAIKDLSFNKPEDNGSKFNSLLTAISAYAEGFSADPIIRRTVHLWQKLDSR

SEQ ID NO: 7409 - DNA, 1059 bp, Glycine max
  misc_feature: Ceres CLONE ID no. 1364342
  misc_feature: Ceres CDNA ID no. 25891914
  CDS (69)..(953): REFERENCED BY SEQ ID NO: 7410
tagtaaaatgaaccatgttgatgttgttcgccgccactgaacactgaacactgattactcactccttcatggccacttcgctgctatctttctccatttcgcccacaacctcagccttcagattcaaagcctccgccatggctaccaccatcgccgcccctgctaccaaggtggctcccgccgtcattgtcggcggcggaagagtgggcagggccttgcaggacatgggcaccggccaagacctcctcgttcgccgaggagagtccgtaccactcaatttcgagggccccatttttgtgtgcacgaggaacgatgatcttgaatctgtgcttcaatctacaccttcttctagatggggtgatttggtgttcttccagaacggaatgctggagccgtggcttgagagcaaaggtttggaagatgcaaaccaggtgttggcttattttgctgtgtccaaaattggagaaacccctattgatggtaggactgatatcaatcctgaaggactcactgctgcatatggcaagtgggcttctattgtagctgctagattaaatgctggaggcctctcttgcaaggttcttgacaaggaggtgtttcaaaagcagatgttggagaagcttatatggatttgttccgttatgcttgttggagcacgtcatggaggggtttcagtaggtgtcgtggacaaggaattccgcactgaattgtccagccttataacagaactggcatcagcagcatcaagtgaaaaggggttaacatttgaagaggccatggaagagcgcttatgtgcatattcccgagccgtagcccactttcccacggcagttaaggagttcaaatggagaaatggttggttttattctctctctgagaaggctacggctcaaggcaagccagacccatgccctttgcattcccaatggctaaaagagttgagaattgtatgaagcttaagtcttcaaccctagtgtgtggtgtgtgatgtgtggagtgttgtaattttaatgtttattttaaaagaattttttattattattaaaaaaaaaaaaaaaa

SEQ ID NO: 7410 - protein, 189 aa, Glycine max
  misc_feature: Ceres CLONE ID no. 1364342
  misc_feature: Ceres CDNA ID no. 25891914
MLEPWLESKGLEDANQVLAYFAVSKIGETPIDGRTDINPEGLTAAYGKWASIVAARLNAGGLSCKVLDKEVFQKQMLEKLIWICSVMLVGARHGGVSVGVVDKEFRTELSSLITELASAASSEKGLTFEEAMEERLCAYSRAVAHFPTAVKEFKWRNGWFYSLSEKATAQGKPDPCPLHSQWLKELRIV

SEQ ID NO: 7411 - DNA, 977 bp, Glycine max
  misc_feature: Ceres CLONE ID no. 1364477
  misc_feature: Ceres CDNA ID no. 35383387
  CDS (98)..(769): REFERENCED BY SEQ ID NO: 7412
accaacattcaaatcattcactgatttcactcccaaacaaacaaagaagaagttagatttgaaattgaaagagaaacaaacttgggatataagaagaatggctagtggaggaggctatggagacgcgaaccagaaggtagattacgtgttcaaggtggtgctaattggtgattcagcggtggggaagtcgcagatacttgcacgcttcgcgagaaacgagttcagtttggattcaaaggccacaatcggcgtcgagttccaaacgcgcactttggtcattcagcacaagagcgtaaaggctcagatctgggacactgccggccaagaacgatacagagcagttacaagtgcatactacaggggtgctgttggggcaatgttggtttatgacataaccaaacgccaaagctttgatcacatacctcgttggttagaagaattgcgtaaccatgccgataagaatatagtcatcattcttataggaaacaaaagtgatcttgagaaccagcgccaagtacccacagaggatgcaaaagaatttgccgagaaagaaggcttatttttcctagagacctcagcactggaagcaactaatgttgaaacggctttcatgactgttttgacagaaatattcaacattgtcaacaagaagaacctagctgctggtgataatcagggaaatggcaacgcagcatctctgtctggcaagcagataattgttcctggtactgcacaagaaatccccaagaggagcatgtgttgtcagtaatcctgactttatttataatttgtttaaatttactagatttccatggttctgtgttcctatcaccaatttttaatgatttggtgcatttcattttgtatatttttacattatttgaaattattttgcatgagttgctgattaaggaccagcagagggaagtaattacaatttccttggtacaacgtaggagacaaaaaaaaaaaaaaaa

SEQ ID NO: 7412 - protein, 223 aa, Glycine max
  misc_feature: Ceres CLONE ID no. 1364477
  misc_feature: Ceres CDNA ID no. 35383387
  misc_feature (4)..(178): Pfam Name: Arf PFAM Desc: ADP
  misc_feature: Homolog of GI Number: 1370142 NR Desc: RAB11A
  misc_feature: Homolog of GI Number: 1381676 NR Desc: small GTP
  misc_feature: Homolog of GI Number: 303738 NR Desc: GTP
  misc_feature: Homolog of GI Number: 3024505 NR Desc: Ras
  misc_feature: Homolog of GI Number: 3024503 NR Desc: Ras
  misc_feature: Homolog of GI Number: 19310619 NR Desc: putative GTP
  misc_feature: Homolog of GI Number: 72384499 NR Desc: 80A08_30
  misc_feature: Homolog of GI Number: 22136472 NR Desc: GTP
  misc_feature: Homolog of GI Number: 1184985 NR Desc: ATGB3
  misc_feature: Homolog of GI Number: 21617896 NR Desc: GTP
  misc_feature: Useful for making plants with increased biomass and foliage
  misc_feature: Useful for making plants with increased biomass and foliage
MASGGGYGDANQKVDYVFKVVLIGDSAVGKSQILARFARNEFSLDSKATIGVEFQTRTLVIQHKSVKAQIWDTAGQERYRAVTSAYYRGAVGAMLVYDITKRQSFDHIPRWLEELRNHADKNIVIILIGNKSDLENQRQVPTEDAKEFAEKEGLFFLETSALEATNVETAFMTVLTEIFNIVNKKNLAAGDNQGNGNAASLSGKQIIVPGTAQEIPKRSMCCQ

SEQ ID NO: 7413 - DNA, 692 bp, Zea mays
  misc_feature: Ceres CLONE ID no. 1366258
  misc_feature: Ceres CDNA ID no. 25446820
  CDS (129)..(413): REFERENCED BY SEQ ID NO: 7414
atccccctctctctttctctctctctcttcgacgactccgccgctgtcttccactcgggggccgccgtccctgtcgtcttccgcccatcactgtcttcttcgctccaccacacttgggaaacgcagcgatggatggccagccaggtgctgctgcgttgtcgagtcctggtccgagagtaaaagcaagcctggttctgggatccgaatcgttcgctatcaactccgagttcggtaccctgtcggagcagctggccgcggtgaaggagaagagcatggcggtcctcaaggaacacatcgccaggcacaatgctccgaacgaggtccccgacgaggccgccgagggcgagtctgacagtgagggcgaagcgccgcttgtcgacaacccgccgaagaaacctaagaagcagaagtgaccgtctctagtcatgcacttgacttttttttttttttttgccatgcgttgcttgtgtaacgccagactgttgtcagtcacaatagcaatatgcaggtgttagcactcacttgctgttcgtaccactatcattagttctgcttctctgtcatgtgttcatatttttcttcccatacacttgcaagggtgttcttgtctgtcggtgtgctgcacgctccgtatatctgtagcagaaacacaattcactaacagcttggtttgaggaaaaaaaaaaaaaaaa

SEQ ID NO: 7414 - protein, 94 aa, Zea mays
  misc_feature: Ceres CLONE ID no. 1366258
  misc_feature: Ceres CDNA ID no. 25446820
MDGQPGAAALSSPGPRVKASLVLGSESFAINSEFGTLSEQLAAVKEKSMAVLKEHIARHNAPNEVPDEAAEGESDSEGEAPLVDNPPKKPKKQK

SEQ ID NO: 7415 - DNA, 847 bp, Glycine max
  misc_feature: Ceres CLONE ID no. 1366270
  misc_feature: Ceres CDNA ID no. 29191225
  CDS (26)..(643): REFERENCED BY SEQ ID NO: 7416
acgtttagctatctgagaatacaaaatggcggcggcgaaagcagcggtggtattgccacgtccggtgacgtttgtgacgggaaatgcgaagaagctcgaagaggtcaaagctatcatcgggagttccattcctttcaagtctctcaaactcgacctgcctgagcttcaaggagagcctgaggatatctccaaagagaaagctcgtttggctgctcttcaggtaaatgggccagtgctagtggaggatacatgcctctgtttcaatgctttgaagggtcttcctgggccttacattaagtggtttcttgagaagcttggccatgaaggtttgaacaacttactgatggcctatgaagataaatcagcttatgcattgtgtgcattctctttctcgcatggtccaggtgctgaacctcttacatttttggggaaaactccgggtaagatagttccagcaagaggaccaactgatttcgggtgggatccagtgtttcaacctgatggatatgaccaaacttatgcagaaatggcaaaggaagaaaagaacaagatatcccatcggtacaagtctttagcaatggtgaaatctcactttaaggaggctggctacgtgttccagacaacagatgatgataccaattaaagtgaaaacccattccccattttccttcagcttttaaagatttgagcactggttctcctttttttctgaattgcaattagaaacacttttgttcacaagtttctaaccaaaacataaaatggcaaaacatattcattggattttgctgtgttctcaagagacagtaatactaatcattgtcttgattcaaaaaaaaaaaaaaaa

SEQ ID NO: 7416 - protein, 205 aa, Glycine max
  misc_feature: Ceres CLONE ID no. 1366270
  misc_feature: Ceres CDNA ID no. 29191225
  misc_feature (14)..(190): Pfam Name: Ham1p_like PFAM Desc: Ham1 family
  misc_feature: Homolog of GI Number: 31432469 NR Desc: putative HAM
  misc_feature: Homolog of GI Number: 58389507 NR Desc: ENSANGP00000019707
  misc_feature: Homolog of GI Number: 19920712 NR Desc: CG8891
  misc_feature: Homolog of GI Number: 50751047 NR Desc:  similar to Inosine triphosphate pyrophosphatase
  misc_feature: Homolog of GI Number: 63101583 NR Desc: Itpa protein
  misc_feature: Homolog of GI Number: 54644268 NR Desc: GA21395
  misc_feature: Homolog of GI Number: 68394187 NR Desc:  similar to inosine triphosphatase isoform a
  misc_feature: Homolog of GI Number: 73991962 NR Desc:  similar to inosine triphosphatase isoform a
  misc_feature: Homolog of GI Number: 57104450 NR Desc:  similar to brain my049 protein
  misc_feature: Homolog of GI Number: 55651009 NR Desc:  similar to inosine triphosphate pyrophosphatase
MAAAKAAVVLPRPVTFVTGNAKKLEEVKAIIGSSIPFKSLKLDLPELQGEPEDISKEKARLAALQVNGPVLVEDTCLCFNALKGLPGPYIKWFLEKLGHEGLNNLLMAYEDKSAYALCAFSFSHGPGAEPLTFLGKTPGKIVPARGPTDFGWDPVFQPDGYDQTYAEMAKEEKNKISHRYKSLAMVKSHFKEAGYVFQTTDDDTN

SEQ ID NO: 7417 - DNA, 714 bp, Zea mays
  misc_feature: Ceres CLONE ID no. 1366354
  misc_feature: Ceres CDNA ID no. 25445956
  CDS (75)..(569): REFERENCED BY SEQ ID NO: 7418
agttcagcctgtttcgcagtagcctagaactcgtccttgtcgaatccgatccaaagatccaacaaacgaagggcatgaccccgatggagatggcgccggcggctgcagctccggcctcgcgcatgccgatgatgcacatgtctttcttctggggcaaccgcgcggtggtgctgttcccgggatggcccggcgcgcgcggcgcgggggcgtacctgctctgcctcctcctagtgctcgcgctcgccgcgctcgccgaggcgctcgcagcggcctcgcgctgcgtcgcgcgccgtggcgcgggtgcgggggcaggccgcgtgccggcctcctcggccgcgctgctcacggcggcgcacgctgccaggatggggacggcttacctcgtcatgctggccgtcatgtcgttcaacggcggagtgctcctcgccgccgtggccggccacgcgctcgggttcctcctcgcgcggagcagggtgcacaatcggggcgggagtgccgctgcggcctccgcccgtgaccacgggctcgatggcatggacgtccaccctccggatggctccaaggcataagactgcagggcaaatgcacgagaaaattgaaatttatcgcttttattgttgctcttcgcaacattaacatcttattctaagtctttgcaaaatcatgacctattagatggagtatttgcatcccacgccaaaaaaaaaaaaaaaa

SEQ ID NO: 7418 - protein, 164 aa, Zea mays
  misc_feature: Ceres CLONE ID no. 1366354
  misc_feature: Ceres CDNA ID no. 25445956
  misc_feature (20)..(134): Pfam Name: Ctr PFAM Desc: Ctr copper transporter family
  misc_feature: Homolog of GI Number: 50924123 NR Desc: OJ991214_12.9
  misc_feature: Homolog of GI Number: 34909918 NR Desc: P0665A11.19
  misc_feature: Homolog of GI Number: 53791370 NR Desc: putative copper transporter protein
  misc_feature: Homolog of GI Number: 34909916 NR Desc: P0665A11.18
  misc_feature: Homolog of GI Number: 1082054 NR Desc: copper transporter protein
  misc_feature: Homolog of GI Number: 21689855 NR Desc: putative copper transport protein
  misc_feature: Homolog of GI Number: 28827258 NR Desc: putative copper transport protein
  misc_feature: Homolog of GI Number: 18496854 NR Desc: copper transporter
MTPMEMAPAAAAPASRMPMMHMSFFWGNRAVVLFPGWPGARGAGAYLLCLLLVLALAALAEALAAASRCVARRGAGAGAGRVPASSAALLTAAHAARMGTAYLVMLAVMSFNGGVLLAAVAGHALGFLLARSRVHNRGGSAAAASARDHGLDGMDVHPPDGSKA

SEQ ID NO: 7419 - DNA, 1022 bp, Glycine max
  misc_feature: Ceres CLONE ID no. 1367770
  misc_feature: Ceres CDNA ID no. 40351762
  CDS (24)..(641): REFERENCED BY SEQ ID NO: 7420
aaaacgataaagataaataaaagatgcaattgcaattggtgtcgccgtgtagggttccacgtgtaggaggtgcagtggtagtgggaggcattcatagaattgggaccttgacctccactgtcaccgtgagaagaagaagtaaagcagtgactactgcaatgcgagcggtggttcagcgcgtggcctctgcctccgtcgaggtcgaaggccgcatcgtctccgagattggccccggccttctcgtcctcgtcggaatccacgactccgattccgacgccgacgccgattacatatgccgaaaggtcttgaacatgaggctgttcccaaatgaaaatacgggcaaagcgtgggaccacagtgtgatgcagaaaaattatcaagtcttattggtgagtcagtttacgttgtatggattcctgaagggtaacaaaccggattttcacgtagccatggcgcctcagagagccaagcccttctatgcctctttagttgacaggtttaggaacgcctataactctgatgcaatcaaggacggtgtatttggagcaatgatgaaggtaaatttggttaatgatggaccagttaccatgcagcttgattcaaattcaccaaagaatacagttgatgcagcagaatcttgatcagtggttgatctggcttgatgaaattgagcttgaattttggctcttccgtcagaaagaccaaatgcaagacacacattatgtgttattcattctagttgaagttctttctcccccaatgtagtgactagtgaccccactttgtaacactatttagttcaaagaatgccttagattgtccctgttcgttctgccatagctcatatgggaatagagtttggaacccttttggactaaacaagctaataccggatgactactaatccgggttacccttattcaaggttgtattttaactggttccatccaatattgttaaataaccattataatgccaccataaagctataacatgccgtttttttaaaaaaaaaaaaaaaa

SEQ ID NO: 7420 - protein, 160 aa, Glycine max; identical to SEQ ID NO: 6088
  misc_feature: Ceres CLONE ID no. 1367770
  misc_feature: Ceres CDNA ID no. 40351762
  misc_feature (28)..(148): Pfam Name: Tyr_Deacylase PFAM Desc: D

SEQ ID NO: 7421 - DNA, 1332 bp, Glycine max
  misc_feature: Ceres CLONE ID no. 1368057
  misc_feature: Ceres CDNA ID no. 24766072
  CDS (88)..(960): REFERENCED BY SEQ ID NO: 7422
ccccaccacacaccccaagcccccacctccattttttccagccaggtttgcagcgagaaggaacagcaaggctagctacacaagccgatggccaaggacgaggtgatggagaccggcggcggcggcgacttcgcggccaaggactacacggacccgccgccggccccgctgatcgacgcggccgagctggcctcctggtcgctctaccgcgccgtcatcgccgagttcatcgccacgctgctcttcctctacatcaccgtggccaccgtcatcgggtacaagcaccagacggacccggcggtgaacagcgccgccgacgcagcgtgcggcggcgtgggcgtgctcggcatcgcctgggccttcggcggcatgatcttcgtcctcgtctactgcaccgccggcatctccgggggccacatcaacccggccgtcaccttcggcctcttcctggcgcgcaaggtgtccctggtccgcgcgctgctctacatgattgcgcagtgcctcggcgccatgtgcggggtcggcctcgtcaagaccttccagagcgcctacttcgtcaggtacggcggcggcgccaacacgctcgccgccggctactccaagggcaccggcctcgctgcggagatcatcggcaccttcgtgctcgtctacaccgtcttctccgccaccgaccccaagcgcagcgcacgcgactctcacgtcccggtgctggcgcccctcccgatcggcttcgccgtgttcatggtccacctggccaccatccccatcaccgtcaccggcatcaacccggcccggagcctgggggccgccgtcatctacaacaaggacaaggcctgggatgatcagtggatcttctgggtcggccccatgatcggcgcggcgatcgcggccttctaccaccagtacatcctcagggccggcgccatcaaggccctcggctccttcaggagcaacgcgtaacaagttatcatccatgtcatctgtatgcaagactgaagcaatggcgacccgtgttgtgtccatccatccagagagaaatgcgcttttgcaacttctcgacagttcagttcggccgccgcaatggtcgtgttattatgtgtcggcagctgcatatgcgtagtacgtggtccggtcatgcgtgccgtgtcttgtaattcggtccatgggatcgcttgtcttaattagcccgcattgcttttcctacttgtatttaaatttagcgaccatatgtatgatcgatccaacgtcgccacctttctatctaagtcatcaatccaccaagcaagtgatcatcccaaaaaaaaaaaaaaaaaaagaaaaaaaaaaaaaaaa

SEQ ID NO: 7422 - protein, 290 aa, Glycine max
  misc_feature: Ceres CLONE ID no. 1368057
  misc_feature: Ceres CDNA ID no. 24766072
  misc_feature (33)..(271): Pfam Name: MIP PFAM Desc: Major intrinsic protein
  misc_feature: Homolog of GI Number: 3135543 NR Desc: aquaporin
  misc_feature: Homolog of GI Number: 29650727 NR Desc: aquaporin
  misc_feature: Homolog of GI Number: 13447801 NR Desc: plasma membrane integral protein ZmPIP2
  misc_feature: Homolog of GI Number: 13447803 NR Desc: plasma membrane integral protein ZmPIP2
  misc_feature: Homolog of GI Number: 13447805 NR Desc: plasma membrane integral protein ZmPIP2
  misc_feature: Homolog of GI Number: 13447807 NR Desc: plasma membrane integral protein ZmPIP2
  misc_feature: Homolog of GI Number: 7381267 NR Desc: plasma membrane intrinsic protein 1
  misc_feature: Homolog of GI Number: 68299599 NR Desc: PIP aquaporin
  misc_feature: Homolog of GI Number: 2662310 NR Desc: HvPIP2
  misc_feature: Homolog of GI Number: 50910761 NR Desc: putative plasma membrane integral protein
  misc_feature: Useful for delaying flowering time
  misc_feature: Useful for increasing chlorophyll and photosynthetic capacity
  misc_feature: Useful for making bigger plants
  misc_feature: Useful for making larger plants
  misc_feature: Useful for making ornamental plants with modified leaves
  misc_feature: Useful for making plants with increased biomass and foliage
  misc_feature: Useful for making shorter plants
  misc_feature: Useful for making smaller plants
  misc_feature: Useful for making stronger plants
  misc_feature: Useful for sterility
MAKDEVMETGGGGDFAAKDYTDPPPAPLIDAAELASWSLYRAVIAEFIATLLFLYITVATVIGYKHQTDPAVNSAADAACGGVGVLGIAWAFGGMIFVLVYCTAGISGGHINPAVTFGLFLARKVSLVRALLYMIAQCLGAMCGVGLVKTFQSAYFVRYGGGANTLAAGYSKGTGLAAEIIGTFVLVYTVFSATDPKRSARDSHVPVLAPLPIGFAVFMVHLATIPITVTGINPARSLGAAVIYNKDKAWDDQWIFWVGPMIGAAIAAFYHQYILRAGAIKALGSFRSNA

SEQ ID NO: 7423 - DNA, 1421 bp, Glycine max
  misc_feature: Ceres CLONE ID no. 1369357
  misc_feature: Ceres CDNA ID no. 25088023
  CDS (80)..(1315): REFERENCED BY SEQ ID NO: 7424
atttttctcacagccaaggttgttgtactagttgtattgttgtatctgaaacactctcaatgtgttcctgaagggagccatgagatctttagcatttcttctgattttccatctccttgtatctcccaccattgtcaaatctctctctctcccccaccctccatccaatggtactttggacccaaaacaagcaatggccctagaatccctcaacatccccacctcaaaggacccctgcgcccaaccctccttccacaatgccaccctctgcgacgccgccaagcccttccgccacctcatctccctccgcctggccaactgctcctcctacctctccctctccttcaccgccctcaagtccctctccaccctccaatccctctccctcctcaactgccccgtcgcccccatccgcctccccgtcgacctcgccctctccctcacctccttcacctgcgtcaacagcctccgcaaactctccggcgtctggctctccaacctcctgaacctcaccgacctcgccgtctccgacgtcaacgtcaaggcctccggccccttcgtcatcctcgcccgcatgaccaagctcaaaaccctcaccatctccaacgccaacctcaccggatccctccccggccacctccactccaacctcactcacatcgatttctccaacaaccgcctcaaaggcagcattcccccttccataacaatgctcgacagcctccaggtcctcaatctctcctctaactccctcgccggagaaatgcctccttccatcggtgacctaatttcactcaaaaacctttccttagcctccaactcattctccggttccattcctgattctatatctgctttaccaagtttgattcacttggatctgagctcgaaccagctcaatggaaccattcccaaattcatttcacacatgaagtctcttaagcacttgaatctcgccaacaacaacctccacggggttgttccttttaacctaagttttattaagcgtttggaggtattcaaggttggtggaaatagtaacctttgctataaccactccgtggtgtcttcgaagttgaagcttgggatctctccttgtgataagttcggaatgccggtgactccgccttcaaaggattcttctgccgatgatagcagcgacgatgattacgacgagggtgatggggaggggagtaggcacaagaaggagcatcatcatgggcctaacaagtttgttctcggcgtcgccattgcgctgtcttccattgtctttctcattgttttcttgatcctctgctccaaatgttgtcgttaattagatttagaggaaatttttggtttcggggatttacagatttttagattaggaatattcataaattcagttgagtgcagcttgtttgacaaaaaaaaaaaaaaaa

SEQ ID NO: 7424 - protein, 411 aa, Glycine max
  misc_feature: Ceres CLONE ID no. 1369357
  misc_feature: Ceres CDNA ID no. 25088023
  misc_feature (262)..(285): Pfam Name: LRR_1 PFAM Desc: Leucine Rich Repeat
  misc_feature: Homolog of GI Number: 49333375 NR Desc: putative leucine
  misc_feature: Homolog of GI Number: 49333390 NR Desc: putative leucine
  misc_feature: Homolog of GI Number: 34909552 NR Desc: P0046E05.6
  misc_feature: Homolog of GI Number: 12018147 NR Desc: vegetative cell wall protein gp1
  misc_feature: Homolog of GI Number: 41400384 NR Desc: plus agglutinin
  misc_feature: Homolog of GI Number: 48843812 NR Desc: putative leucine
  misc_feature: Homolog of GI Number: 41400381 NR Desc: minus agglutinin
  misc_feature: Homolog of GI Number: 6523547 NR Desc: hydroxyproline
MRSLAFLLIFHLLVSPTIVKSLSLPHPPSNGTLDPKQAMALESLNIPTSKDPCAQPSFHNATLCDAAKPFRHLISLRLANCSSYLSLSFTALKSLSTLQSLSLLNCPVAPIRLPVDLALSLTSFTCVNSLRKLSGVWLSNLLNLTDLAVSDVNVKASGPFVILARMTKLKTLTISNANLTGSLPGHLHSNLTHIDFSNNRLKGSIPPSITMLDSLQVLNLSSNSLAGEMPPSIGDLISLKNLSLASNSFSGSIPDSISALPSLIHLDLSSNQLNGTIPKFISHMKSLKHLNLANNNLHGVVPFNLSFIKRLEVFKVGGNSNLCYNHSVVSSKLKLGISPCDKFGMPVTPPSKDSSADDSSDDDYDEGDGEGSRHKKEHHHGPNKFVLGVAIALSSIVFLIVFLILCSKCCR

SEQ ID NO: 7425 - DNA, 1702 bp, Glycine max
  misc_feature: Ceres CLONE ID no. 1369820
  misc_feature: Ceres CDNA ID no. 25446966
  CDS (105)..(1400): REFERENCED BY SEQ ID NO: 7426
aaacccgttcttctctgctattttgtttggaacactgcgtcttcaacccgaaggctgcgccaccacctcagcctccatcgtccacgaattggctaagaataccaatggcataccgacggtgcctcttgataagagggaacctcgtggatcggaggtgccatccgtctttcagttatgttctccacagtgaccaggggaagcacgaaaacaccaatgaaaaatcatcttcaggaggggatggtgattttacccaaacaaggtcctttggaagctctcttaatggaccaatgggtttttttgcacattcccgtgatagatttctttctccgtgctccagatatggtttctgccgatatatgtcgacggtgaatcagggttcggataagattagtagtgacgtaatgactgatgtggctgatgtcctcaccaacacaaccatggatgctgtagtttctcaggctcccgttgtcaatgaggttgctattgctgctgctgattcttttttgcctgtacaggccttgcagtacgttatagatgctgtgcattcctacactggcttaaattggtgggcagccatagttctaacaaccctgttgattcgaaccgctacagttccactcttaataaatcaacttaaggccacttctaaacttacgttaatgaggcctcatttggaagagataaagcaacaaatggagggactgactatggatcccgtagctgttgctaaaggtcagcagcagatgaagaaactatttaaggaatatggtgtgagtccttttacgccattgaagggactctttatccaagggcctatttttgttagtttttttcttgcgataacaaatatggctgaaaaagtgccatcattcaagcatggcggagcttcttggtttattgatctctcaactcctgatgccttgtacatttttccagctttgacagcattgtcattcttaataacagtagagtgtaatatgcaagaagggatggaaggaaatcctgtggctggcaccatgaaaaatgtctctaggggtcttgctgttcttacagttcctttcaccatgggatttccaaaggcaatattctgttactgggttacatcaaatttgttttcacttgtgtatggacttgtgcttaaagttcctggtgtaaagaaaactttgggtattcctgaaatacctgttgcaccacccaccaccaccagtgctcctcaatctcccttttctatatttccagctctaaaacaagctacatcatcaacaacaaatgggcaaagctcaattccagaagaagcttcaaaacattcaaataaaaaaatatcttcttcttctgttattagtcaaaggcttagaagtttagagaaacaagtgaaaggaagaaagaagaaccagaagtgaggaaaatttacaataatcctaaattaagccatctatacatggagcaattgtgctcagatttttgttatattttatgatcctgggatgagggagaaattagtttaaactttgtttgcttaggaagttaaaacttttgcttatcgtgttgtctacactcgattcatgggtttctcaattcttgtgtaaaacttggtccctatcagactgggaggcctcaataattttgtataacttttcttcaatttttcatattcattttaaaaattaatgtgatcaaaagattgctaaaaaaaaaaaaaaaa

SEQ ID NO: 7426 - protein, 431 aa, Glycine max
  misc_feature: Ceres CLONE ID no. 1369820
  misc_feature: Ceres CDNA ID no. 25446966
  misc_feature (319)..(340): Pfam Name: 60KD_IMP PFAM Desc: 60Kd inner membrane protein
  misc_feature: Homolog of GI Number: 30387505 NR Desc: At5g62050
  misc_feature: Homolog of GI Number: 24030491 NR Desc: putative cytochrome oxidase biogenesis protein
  misc_feature: Homolog of GI Number: 37536158 NR Desc: putative Oxa1 protein
  misc_feature: Homolog of GI Number: 22122905 NR Desc: putative cytochrome oxidase assembly protein
  misc_feature: Homolog of GI Number: 72016674 NR Desc:  similar to Inner membrane protein OXA1L
  misc_feature: Homolog of GI Number: 72158991 NR Desc:  similar to Inner membrane protein OXA1L
  misc_feature: Homolog of GI Number: 2739285 NR Desc: oxa1Sp2
  misc_feature: Homolog of GI Number: 19112969 NR Desc: oxa1sp2 protein
  misc_feature: Homolog of GI Number: 38372882 NR Desc: Inner membrane protein OXA1L
  misc_feature: Homolog of GI Number: 37589026 NR Desc: OXA1L protein
MAYRRCLLIRGNLVDRRCHPSFSYVLHSDQGKHENTNEKSSSGGDGDFTQTRSFGSSLNGPMGFFAHSRDRFLSPCSRYGFCRYMSTVNQGSDKISSDVMTDVADVLTNTTMDAVVSQAPVVNEVAIAAADSFLPVQALQYVIDAVHSYTGLNWWAAIVLTTLLIRTATVPLLINQLKATSKLTLMRPHLEEIKQQMEGLTMDPVAVAKGQQQMKKLFKEYGVSPFTPLKGLFIQGPIFVSFFLAITNMAEKVPSFKHGGASWFIDLSTPDALYIFPALTALSFLITVECNMQEGMEGNPVAGTMKNVSRGLAVLTVPFTMGFPKAIFCYWVTSNLFSLVYGLVLKVPGVKKTLGIPEIPVAPPTTTSAPQSPFSIFPALKQATSSTTNGQSSIPEEASKHSNKKISSSSVISQRLRSLEKQVKGRKKNQK

SEQ ID NO: 7427 - DNA, 934 bp, Glycine max
  misc_feature: Ceres CLONE ID no. 1369853
  misc_feature: Ceres CDNA ID no. 29191226
  CDS (60)..(770): REFERENCED BY SEQ ID NO: 7428
aaagaaaaccctacattacgtagagcttcgtctctccatcgaatccagcaacgacgacgatgatgatctctcgtcgattagcttccagattccttaaaccctcgtcttcctcatccctaagcatctcccttcaccatctccactcttcttcttccataagaaaccatttgatccacagatcagaacagcttcaagagctgggtctctttagatccttctctgctttcatcaccaatcccaacaccgagaagcttcgatctcagacacgatcaacgaggtacttctcaacaccgagccaagaggtcaatccgaatccagaggaggagccaaagatgaagcaccaggagatcgaaggcccgacggtggagcgcgacgtgtcggctttaggtaacgagacgagaaaagtgttcgaagggatgatgaagaacatgtacagtctaagtggagccatgggtcttctcggtttgactcagttagtcgtggggggaacgattatgtacgcgacgcgtttgaatccgatgcatgtgatgacgatgcagagctgtatagcgttcggattcccgttcgcgatggcgttgatggtgagacgctcgttgaagccgatgtatttcttcaagaagatggaggaagcggggaggttgcagatcctgactttgactcttcaggttgcgaagaatctcaatgtcttgttcgttagagcacgtgttgtgtccatcttgtgcgttgccgggttgtcttgcggcaatctatacctcctgttgtctccatgaaaatggaacatttttttattgtctttttttttttaatatccatacaaatggaaccataatgtcatcaataaggaaggaaaacgaaatgagaaaatccgagaaggcagattcttgcttctgttttttgatcaaaaaaaaaaaaaaaaagaaaaaaaaaaaaaaaa

SEQ ID NO: 7428 - protein, 236 aa, Glycine max
  misc_feature: Ceres CLONE ID no. 1369853
  misc_feature: Ceres CDNA ID no. 29191226
MMISRRLASRFLKPSSSSSLSISLHHLHSSSSIRNHLIHRSEQLQELGLFRSFSAFITNPNTEKLRSQTRSTRYFSTPSQEVNPNPEEEPKMKHQEIEGPTVERDVSALGNETRKVFEGMMKNMYSLSGAMGLLGLTQLVVGGTIMYATRLNPMHVMTMQSCIAFGFPFAMALMVRRSLKPMYFFKKMEEAGRLQILTLTLQVAKNLNVLFVRARVVSILCVAGLSCGNLYLLLSP

SEQ ID NO: 7429 - DNA, 1566 bp, Glycine max
  misc_feature: Ceres CLONE ID no. 1370209
  misc_feature: Ceres CDNA ID no. 25087965
  CDS (81)..(1124): REFERENCED BY SEQ ID NO: 7430
acttcttagcttctctctctctcaaatcagttgttgcacttcccatcaaagaagaaaggatattttcaattgtcaagaaaatggttggacctaacttcatggatgagatagactgcggcagcttctttgaccacatcgacgaccttctcgattttcccgtcgaggacgtcgacggcggcgctgccaccttgccttccgtctccgccggaaacagcaactcgctggcgagcatctggccctccgagtccgactcgtttcccgcctccgactcggtgttttccggcaacagtgcttcggacctctcggccgagctatccgttccgtatgaagacattgtccaattggaatggttgtccaactttgtggaggattccttttgtggggggagcctaacaatgaacaaagtggaagagccatcatgtaccactaaggaggactcagtcaacacccaatttcacacatcaagcccagtttctgtcctcgaaagtagcagttcttgctctggtggcaagactttgccacctcgcagtccagagatttacatccctgtgccgtgtggacgtgcacgcagcaagcgtccacgtccagcaaccttcaatcctaggcctgccatgaaccttatttcccctgcctcctcttttgttggggagaatatgcagcctaatgtcatatcatccaaggcctcttcagattctgagaattttgctgagtctcaacttgttcccaagatgccgaagctagcttctggggagcctaagaagaaaaagaaagtgaaggtgccacttccagtagctccagctgataacaatcaaaatgcctcacaacctgttaggaaatgcatgcattgtgagataaccaagacaccgcagtggagggcagggccaatggggccaaaaacactatgcaatgcatgtggtgttcgttacaagtccggccggctcttccccgaataccggcctgctgcaagtccaactttttgcccatccgtgcactccaattctcataagaaggtcctggaaatgagatgcaggggatttgacaaatctggttttgcaatcaattcagctgcctcacctgaactcattccaaacactaacagcagccttaccctggagtacatgtgatgtgaaggaggattgatcctttgttggaaatttctctttcattgctgccctctagagtcatgtcttatgttatttcttttgatatttcatttctttggttcattggtttttgtacagggttggactgggggaataggagcaatagatgatgatgatcttattttagcagttaggggaagattgtaatgagaagtgaggaaaaaaagggtagacatatgcaggtcaaaaagggtagggtcttaggtctagtaattgtaggtcccttaaggtcattaggagttggtgtctcggttgttttttttttatttttcttggaattcttttcatttttttccctttttatatatatccctatttgtgggaattctttttgcagttcattttgtagcaaaaatttcgagttgagtaagagagtttttaatttgtaaaaaaaaaaaaaaaa

SEQ ID NO: 7430 - protein, 347 aa, Glycine max
  misc_feature: Ceres CLONE ID no. 1370209
  misc_feature: Ceres CDNA ID no. 25087965
  misc_feature (253)..(288): Pfam Name: GATA PFAM Desc: GATA zinc finger
  misc_feature: Homolog of GI Number: 37572443 NR Desc: AG
  misc_feature: Homolog of GI Number: 37572451 NR Desc: AG
  misc_feature: Homolog of GI Number: 15451574 NR Desc: Putative GATA
  misc_feature: Homolog of GI Number: 34098855 NR Desc: At5g66320
  misc_feature: Homolog of GI Number: 12711287 NR Desc: GATA
  misc_feature: Homolog of GI Number: 34909448 NR Desc: OSJNBa0014K08.18
  misc_feature: Homolog of GI Number: 21436205 NR Desc: putative transcription factor
  misc_feature: Homolog of GI Number: 24030302 NR Desc: putative GATA
  misc_feature: Homolog of GI Number: 37536778 NR Desc: putative transcription factor
  misc_feature: Homolog of GI Number: 50911202 NR Desc: putative AG
  misc_feature: Useful for delaying flowering time
  misc_feature: Useful for making bigger plants
  misc_feature: Useful for making shorter plants
MVGPNFMDEIDCGSFFDHIDDLLDFPVEDVDGGAATLPSVSAGNSNSLASIWPSESDSFPASDSVFSGNSASDLSAELSVPYEDIVQLEWLSNFVEDSFCGGSLTMNKVEEPSCTTKEDSVNTQFHTSSPVSVLESSSSCSGGKTLPPRSPEIYIPVPCGRARSKRPRPATFNPRPAMNLISPASSFVGENMQPNVISSKASSDSENFAESQLVPKMPKLASGEPKKKKKVKVPLPVAPADNNQNASQPVRKCMHCEITKTPQWRAGPMGPKTLCNACGVRYKSGRLFPEYRPAASPTFCPSVHSNSHKKVLEMRCRGFDKSGFAINSAASPELIPNTNSSLTLEYM

SEQ ID NO: 7431 - DNA, 809 bp, Glycine max
  misc_feature: Ceres CLONE ID no. 1370260
  misc_feature: Ceres CDNA ID no. 29191446
  CDS (58)..(714): REFERENCED BY SEQ ID NO: 7432
aaggaagacaaaacacaagacagagtcattcagcaaggcttgaaacgagaagcgaggatgcccatcagatgtattctgcattggcaaccgaaccaaggaagcgttgtgaacagccaagtcctgaatgagatctcgcagtgcgtcgaaagccttaacggcgtcaaagaaggaagatgcaaagcctccctcactttctacagacccaatttacgagaccaatcggtgaccatcgattttcctcgcgattttctggggatatcgatgctggagcagccgaacaaatactacttaatcattcgcggccagaagattgttctcgaggccgattcttctatcttgcttatcatggagaaactccagtcctacaagtccaaagtcgcccttcatttcgagggagtgctgtataagttgggtgactttcagatcagggtgattaaagttgttcccagtcaagcggagagtctcagaggaattatgattgagattgagtatctccctatctcgtcagttgaaaaatccaagcaaattttggaagagttcattgatatatggaaagaagtcgtgtctaaaaaatcattagccggtcagttcatgcatacagaaccaaattatgcagaatatgggctttctgacaattatacctctcagcatacagctgttcagtatgctgctgcattggcccaactgattcaatctgcacagttacggaactaggaactaggacctttgaagggtatgtaagggatatttattttatgaaatcttattggattcttgtgagtgtggagatggtaaaaaaaaaaaaaaaa

SEQ ID NO: 7432 - protein, 218 aa, Glycine max
  misc_feature: Ceres CLONE ID no. 1370260
  misc_feature: Ceres CDNA ID no. 29191446
MPIRCILHWQPNQGSVVNSQVLNEISQCVESLNGVKEGRCKASLTFYRPNLRDQSVTIDFPRDFLGISMLEQPNKYYLIIRGQKIVLEADSSILLIMEKLQSYKSKVALHFEGVLYKLGDFQIRVIKVVPSQAESLRGIMIEIEYLPISSVEKSKQILEEFIDIWKEVVSKKSLAGQFMHTEPNYAEYGLSDNYTSQHTAVQYAAALAQLIQSAQLRN

SEQ ID NO: 7433 - DNA, 1375 bp, Zea mays
  misc_feature: Ceres CLONE ID no. 1370288
  misc_feature: Ceres CDNA ID no. 25891918
  CDS (81)..(998): REFERENCED BY SEQ ID NO: 7434
aagatccaccaccccaccaaccaactactctcacagtctcacctcccgctcctgccccctccctctcgttctcttcctaaatggcggccgagtccgccaggccgccctcgccgccgcgcgactccggctgccccgcgggcgcgggagactccaccagctcccagctgaccgcgacctacctcggcgtcagcttcgcgctcttcctcgccacgctcccgtcgggcaccgcggcgcgccacgtggcctcgctccagtcgcggggccgcctcctcgcctcgcgcctgctggccgccgaggaccagctgcggcagctgcgcgcgcgccgccgcgaggacgcccgcgccaacgcccgcgccgccgagatcttcgcgggccaccgcgccgcctggatggaggccgagcgccgcctgcaggcccgcgccgccgccgccgcggacgaggccgcctccctccgcgcgcacctcgccgacgccgaggccgacgccgctgcgctgcgcgcccgcgccgagcgactcgagcgcgaggccgccgagcgggatgagctgctcaccgcgctcctcgcggccacctcgcgcgccgggtactccggcggcgggcccctgccccgcgtccacgacggggaggagcaggaggaggaggagcgggcgcgccacgacgcgcgtggggagcgggagccggagcacgagcaggacccgctgcccgcgccgccgttggaccacgccgctgacaccaccgacgccgaggccctcgctgccgccgccgcgctctacgctcagcagcgccagaagcacgacgacgacttctacacggcggccatggccgcgtcgggaatgccgccgtggatggagatggaccgatcaaaagcctggcaggtctgtgacacgacaaaaagttgcctccccttttcgaccctttttacctgctgccagcttcggaatcgaaaggacacaaatctaagggtggattgctttatcgttgcttttctaatgatagtatgagtgtagattttagtacaagtaggatctactctattctttccatctgtgttaatgaaatctatcagatgagctttggttcatggcttcatgcaagttccagtatccttcaatagctctgctctgcatacacatatttccatgagtgatagtgataccatgtatccccacgcacagcacaatgctatgctatgcctgcggcagagtagaacggacagacaaccactttgatagcctctccatcaaacagaatccgatactgtatccgtggggcaacgcctcctccaagaaagctacctgttttttgttatctactccaccgaagtcacctgaatattatctggtccatatggtgtctagaatcaaaaaaaaaaaaaaaa

SEQ ID NO: 7434 - protein, 305 aa, Zea mays
  misc_feature: Ceres CLONE ID no. 1370288
  misc_feature: Ceres CDNA ID no. 25891918
  misc_feature: Homolog of GI Number: 58388035 NR Desc: ENSANGP00000010844
  misc_feature: Homolog of GI Number: 78490449 NR Desc: possible OmpA family member
  misc_feature: Homolog of GI Number: 67987177 NR Desc: 4Fe
  misc_feature: Homolog of GI Number: 66776103 NR Desc: LigA
  misc_feature: Homolog of GI Number: 66780099 NR Desc: PE
  misc_feature: Homolog of GI Number: 53718955 NR Desc: putative lipoprotein
  misc_feature: Homolog of GI Number: 66778264 NR Desc: LigA
  misc_feature: Homolog of GI Number: 41400381 NR Desc: minus agglutinin
  misc_feature: Homolog of GI Number: 22092 NR Desc: hydroxyproline
  misc_feature: Homolog of GI Number: 60678627 NR Desc: plus agglutinin
MAAESARPPSPPRDSGCPAGAGDSTSSQLTATYLGVSFALFLATLPSGTAARHVASLQSRGRLLASRLLAAEDQLRQLRARRREDARANARAAEIFAGHRAAWMEAERRLQARAAAAADEAASLRAHLADAEADAAALRARAERLEREAAERDELLTALLAATSRAGYSGGGPLPRVHDGEEQEEEERARHDARGEREPEHEQDPLPAPPLDHAADTTDAEALAAAAALYAQQRQKHDDDFYTAAMAASGMPPWMEMDRSKAWQVCDTTKSCLPFSTLFTCCQLRNRKDTNLRVDCFIVAFLMIV

SEQ ID NO: 7435 - DNA, 737 bp, Glycine max
  misc_feature: Ceres CLONE ID no. 1370347
  misc_feature: Ceres CDNA ID no. 40351763
  CDS (38)..(529): REFERENCED BY SEQ ID NO: 7436
agattgcttctgtgtcagagaaatcagtgcaacaaaaatggacgacaccgaaaccaaaggaagaatcgaagaaactgtgcgtaggattttgcaagaatcggacatggacgaggttactgagtctaagattcgaaaacaggcctccgaacaccttggcctcgacctgtctcagccttatttcaaagcctttgtcaaacaggtcgtgaaggcttttctccaagaagaagaacaacgacagaaacaacaacaacaagatgaagatgaagaagaagaactaggaggaggttccaagggcaaggagtacgatgatgaaggcgatctcatcatctgcaggctttcagataagagaagggtgacgattcaggatttcagagggaaaacattggtctccattcgggagtattataaaaaggatggcaaggaacttcctacttccaaaggaataagtttgacagaagagcagtggtcagcctttaagaaaaatgtgcctgccatagaaaaagccattaagaaaatggagtcaagttgacacatggctttgcttgtttctttttgttgaatatatcctgcaccgcaccatggtgcctctttgatattggaccattttgttaaaggacttggagtcactgtttaagtgttttgcaacctgagtgcctaaagccatttcaggaagactaaactgaatgccagtaactttaaaaactcaatacatttaattctgaaaaaaaaaaaaaaaa

SEQ ID NO: 7436 - protein, 163 aa, Glycine max
  misc_feature: Ceres CLONE ID no. 1370347
  misc_feature: Ceres CDNA ID no. 40351763
  misc_feature (67)..(157): Pfam Name: PC4 PFAM Desc: Transcriptional Coactivator p15
MDDTETKGRIEETVRRILQESDMDEVTESKIRKQASEHLGLDLSQPYFKAFVKQVVKAFLQEEEQRQKQQQQDEDEEEELGGGSKGKEYDDEGDLIICRLSDKRRVTIQDFRGKTLVSIREYYKKDGKELPTSKGISLTEEQWSAFKKNVPAIEKAIKKMESS

SEQ ID NO: 7437 - DNA, 711 bp, Glycine max
  misc_feature: Ceres CLONE ID no. 1370364
  misc_feature: Ceres CDNA ID no. 25891915
  CDS (22)..(558): REFERENCED BY SEQ ID NO: 7438
aggcattcgaaatcggtgaagatggttgctatgaggtttcatcagtaccaggtggtgggaagggctcttcctaccgaatccgatgagcatcctaagatctaccgcatgaaactctgggcaactaacgaggtccgtgccaaatccaagttctggtattttttgagaaaattgaagaaggttaagaaaagcaatgggcaagtgctagccataaatgagatttttgagaggaatcctaccaagattaagaattatggaatttggctgcggtatcagagtcgtactgggtatcacaatatgtacaaggaataccgagatactactctgaacggtgcagttgagcatatgtacaccgaaatggcgtctcgacatagggtgaggcatccatgcatccagataatcaagactgccaccatcccagctaagctgtgcaaaagggagagcaccaagcagttccacaattctaaaatcaagttcccattggtgttcaagaaggttaggcccccaactaggaagctgaagacaacatacaaggcatccaggccaaacctgtttatgtgattcagttaatgggatttccctgtttcttgattcatttaaataggaagagctttagaggtgatcatgtagtgacaaactttgtttccctgaagattttgttttgaaagatggtgttttatttaattttatatttttgcaaaaaaaaaaaaaaaa

SEQ ID NO: 7438 - protein, 178 aa, Glycine max
  misc_feature: Ceres CLONE ID no. 1370364
  misc_feature: Ceres CDNA ID no. 25891915
  misc_feature (5)..(178): Pfam Name: Ribosomal_L18ae PFAM Desc: Ribosomal L18ae protein family
  misc_feature: Homolog of GI Number: 13430184 NR Desc: ribosomal protein L18a
  misc_feature: Homolog of GI Number: 50511482 NR Desc: putative 60S ribosomal protein L18a
  misc_feature: Homolog of GI Number: 30102898 NR Desc: At2g34480
  misc_feature: Homolog of GI Number: 20453309 NR Desc: AT3g14600/MIE1_10
  misc_feature: Homolog of GI Number: 21593925 NR Desc: putative 60S ribosomal protein L18A
  misc_feature: Homolog of GI Number: 34909590 NR Desc: putative ribosomal protein L18a
  misc_feature: Homolog of GI Number: 23197702 NR Desc: 60S ribosomal protein L18A
  misc_feature: Useful for making ornamental plants with modified flowers
  misc_feature: Useful for making ornamental plants with modified leaves
  misc_feature: Useful for making plants with altered leaf shape eg curled leaves
  misc_feature: Useful for making shorter plants
MVAMRFHQYQVVGRALPTESDEHPKIYRMKLWATNEVRAKSKFWYFLRKLKKVKKSNGQVLAINEIFERNPTKIKNYGIWLRYQSRTGYHNMYKEYRDTTLNGAVEHMYTEMASRHRVRHPCIQIIKTATIPAKLCKRESTKQFHNSKIKFPLVFKKVRPPTRKLKTTYKASRPNLFM

SEQ ID NO: 7439 - DNA, 1068 bp, Glycine max
  misc_feature: Ceres CLONE ID no. 1370365
  misc_feature: Ceres CDNA ID no. 40351764
  CDS (119)..(844): REFERENCED BY SEQ ID NO: 7440
attttttttcattagagtgagagagagagagagagagagagagaggtatcacagtgaaacgaagaagccctaactacgcacgcactcattcttgagaaagctcaatattcattcgtccatggcactctcttctcgtctcttttccaaatccaaattgatctatggctgtcaaatacttctgcaaaaggagcatgctattccagttcgtcactttgctaaagagtctgcccctcctgcccttaagggagatcagatgctgaagaacatttttgtggaggtgaagaacaaatttgagactgccataggaatattaaagaaggagaagatcaccattgacccagaagatccagctgctgtttctcattatgcaaaggtcatgaaaacagttagagagaaggcaagcttgttgtcggagtcccaagacatactatccaccattgaaattgagactcaggatattccagatgctcggacctatcttctgactttgaaggaaataagagtcaagaaaggtcttacagatgatcttggtgcagaggctctgatgatagatgcattggacaaaattgaaaaggatttaaaaaaacctttactgagaaatgataagaaaggaatggaccttctcttggcagagtttgataagattaataagaaaattggaattcgaaaggaagatctaccaaagtatgaagaggagctagaacttaaagtagccaaagcacaactggaggagctgaagaaggatgctctcgaggcaatggaaactcaaaagaaaagggaggaattcaaggatgagcctgaatcggtcgatgtcaaaactttggacatcagaaacttcctttaaaatgtcttcaggatgtttttgcacacactagaaattattgcatttggataatgatgaagctgtgttcaataagtagacaccactggtttgaagtgcaacattgatgccagtttgaatattcttgagttttttcaagatcttttttgtatttcagattccatgttaaactggaagttgaggctgtcaaattttctaaatttttcttgtcaaaaaaaaaaaaaaaa

SEQ ID NO: 7440 - protein, 241 aa, Glycine max
  misc_feature: Ceres CLONE ID no. 1370365
  misc_feature: Ceres CDNA ID no. 40351764
MALSSRLFSKSKLIYGCQILLQKEHAIPVRHFAKESAPPALKGDQMLKNIFVEVKNKFETAIGILKKEKITIDPEDPAAVSHYAKVMKTVREKASLLSESQDILSTIEIETQDIPDARTYLLTLKEIRVKKGLTDDLGAEALMIDALDKIEKDLKKPLLRNDKKGMDLLLAEFDKINKKIGIRKEDLPKYEEELELKVAKAQLEELKKDALEAMETQKKREEFKDEPESVDVKTLDIRNFL

SEQ ID NO: 7441 - DNA, 729 bp, Glycine max
  misc_feature: Ceres CLONE ID no. 1370394
  misc_feature: Ceres CDNA ID no. 25445739
  CDS (58)..(411): REFERENCED BY SEQ ID NO: 7442
accccccattactcacttttcatccttcgatcatacacttagttgcttccaattaagatggttctgctagagaagctctgggatgatgttgtggctggccctcaacctgagcgtggccttggcaagctcagaaaactcaccaccctcaaaactattgatgaaggagaaagtagcaagctgcagaagacgttgtcgatgccgtcgacaccaacaaccccgatgactccgacgactccaacgacaccgggatcggcccgtaaagctgacaacgtttggaggagcgtcttccatcctgggagcaactccgccacaaagaccatcggtgctcagatgtttgacaaaccacttcccaacactcccactgtctatgactggctgtacagtggggagaccagaagcaggcaccgctgaagctgaagtctttagctaagatgaccgtgggttgcatgtaaatattgtcgtttttcgttaagcatctgccacgtttgcagctactattactattatgtgtcgggaatttattgctccgttgctgactcaaacataatattactagcgtgtttggtttttttgagcaagtgaatgtaaaaatgctaaataattcgttagtatgctaagttttgttaagccagatctgccttgaactttggcgattggttaatctttttctccctttgttaaatgattagtattaaaataaataaatttttgttaaaaaaaaaaaaaaaa

SEQ ID NO: 7442 - protein, 117 aa, Glycine max; identical to SEQ ID NO: 5322
  misc_feature: Ceres CLONE ID no. 1370394
  misc_feature: Ceres CDNA ID no. 25445739
  misc_feature (7)..(117): Pfam Name: Auxin_repressed PFAM Desc: Dormancy/auxin associated protein
  misc_feature: Homolog of GI Number: 11386111 NR Desc: auxin
  misc_feature: Homolog of GI Number: 62526583 NR Desc: auxin
  misc_feature: Homolog of GI Number: 2605887 NR Desc: dormancy
  misc_feature: Homolog of GI Number: 71040687 NR Desc: auxin
  misc_feature: Homolog of GI Number: 58700653 NR Desc: auxin
  misc_feature: Homolog of GI Number: 22573 NR Desc: 12.5 kDa protein
  misc_feature: Homolog of GI Number: 45738252 NR Desc: auxin
  misc_feature: Homolog of GI Number: 9795604 NR Desc: dormancy
  misc_feature: Homolog of GI Number: 7488618 NR Desc: dormancy
  misc_feature: Homolog of GI Number: 45758711 NR Desc: auxin

SEQ ID NO: 7443 - DNA, 1039 bp, Glycine max
  misc_feature: Ceres CLONE ID no. 1370493
  misc_feature: Ceres CDNA ID no. 36707166
  CDS (1)..(867): REFERENCED BY SEQ ID NO: 7444
ccctcgcgccccagaagccccgacgctcaagcccccagacgccgcagcgccgccactccacccgcagcggcaaccatggcggtcggcaagaacaagcgcatctccaaggggaggaagggaagcaagaagaaggccgtcgatccgttcaccaagaagcagtggtatgacatcaaggcgccgctgctgttcaccagccgcaacgtcggcaagaccctcgtgtccaggacgcagggtaccaagattgcctcagagggtctgaagcacagggtgttcgaagtatctctagctgatcttcagaacgatgaggaccaggcctacaggaagatcagactccgtgctgaggatgtgcaagggatgaatgtcctcacaaacttctggggcatggacttcaccactgacaagctcaggtctcttgtgaggaagtggcagacactcattgaggctcatgtggatgtgaagaccactgacaactacatgctccgcatgttcgccattggcttcaccaagagacgcccaaaccaggtgaagcgcacttgctatgcccaagcaagtcagatcagacagatccgccgcaagatggttgagatcatggtcaaccaagctgcaagctgtgacttgaaggagcttgtgaacaagttcatccctgaggtgattggaaaggagattgagaaggccacctcaggcatcttccccctccagaacgtgtacgtccgcaaggtgaagatcctgaaggcccccaagttcgacctggggaagctcatggaggttcacggtgactacaaggaggatgttggtgtgaagcttgacaggcctgctgatggagatgaggtgattcctggagcagaggaggttgctgctgctgagtagaggatagaagttgctattttgctgcttcatatctagaagatgatatatgtgccacctgggtgtcgtgaactttgtagtcagttttgatggctgatttcttgagtacttctgtcgacattcctagccagtgttccgctatcttattttgttcgtgttaaaaaaaaaaaaaaaa

SEQ ID NO: 7444 - protein, 263 aa, Glycine max
  misc_feature: Ceres CLONE ID no. 1370493
  misc_feature: Ceres CDNA ID no. 36707166
  misc_feature (11)..(222): Pfam Name: Ribosomal_S3Ae PFAM Desc: Ribosomal S3Ae family
  misc_feature: Homolog of GI Number: 50907013 NR Desc: putative ribosomal protein S3a
  misc_feature: Homolog of GI Number: 77554756 NR Desc: Ribosomal S3Ae family
  misc_feature: Homolog of GI Number: 483431 NR Desc: cyc07
  misc_feature: Homolog of GI Number: 4079800 NR Desc: S
  misc_feature: Homolog of GI Number: 24817254 NR Desc: ribosomal protein S3a
  misc_feature: Homolog of GI Number: 7270417 NR Desc: Putative S
  misc_feature: Homolog of GI Number: 7441118 NR Desc: ribosomal protein S3a
  misc_feature: Homolog of GI Number: 81074465 NR Desc: cyc07
  misc_feature: Homolog of GI Number: 32401367 NR Desc: cyc07
  misc_feature: Homolog of GI Number: 6714564 NR Desc: cyc07
MAVGKNKRISKGRKGSKKKAVDPFTKKQWYDIKAPLLFTSRNVGKTLVSRTQGTKIASEGLKHRVFEVSLADLQNDEDQAYRKIRLRAEDVQGMNVLTNFWGMDFTTDKLRSLVRKWQTLIEAHVDVKTTDNYMLRMFAIGFTKRRPNQVKRTCYAQASQIRQIRRKMVEIMVNQAASCDLKELVNKFIPEVIGKEIEKATSGIFPLQNVYVRKVKILKAPKFDLGKLMEVHGDYKEDVGVKLDRPADGDEVIPGAEEVAAAE

SEQ ID NO: 7445 - DNA, 644 bp, Glycine max
  misc_feature: Ceres CLONE ID no. 1370692
  misc_feature: Ceres CDNA ID no. 29191637
  CDS (63)..(464): REFERENCED BY SEQ ID NO: 7446
attccccgccgcctcgcgcccccgctcgcttcacttctctaggtgcgcaccgatcagaagagatggcggtgccgctgctgacgaagaagatcgtgaagaagcgggtcaagcagttcaagaggccccacctcgaccgctacaagtgccttaagccaagctggcgcaggccaaagggtattgattcccgtgtcaggaggaagttcaagggatgcaccttgatgcccaacattggttatggttctgacaagtcgaccaggcactacctccccagcaagttcaagaagtttgtggtccacaacgtttctgagctggagttgctcatgatgcacaacaggacctactgcgctgaaattgctcacaacgtgtccaccaagaagcgcaaggagatcgtggagcgtgctgcacagctcgacattgtggtcaccaacaagcttgctaggctccgcagccaggaggacgagtagtctggtttcttgtcttaacgacgaactggatgttgccattcctttctgtagggaactactttgcttgtgtcttgttagtactgaaaaccagaggcactcctacctttttgcaatcagtagccactaaaatgtggcagattccactgtttaccttgcatctatctaaaaaaaaaaaaaaaa

SEQ ID NO: 7446 - protein, 133 aa, Glycine max; identical to SEQ ID NO: 40
  misc_feature: Ceres CLONE ID no. 1370692
  misc_feature: Ceres CDNA ID no. 29191637
  misc_feature (14)..(123): Pfam Name: Ribosomal_L32e PFAM Desc: Ribosomal protein L32
  misc_feature: Homolog of GI Number: 50947773 NR Desc: putative ribosomal protein L32
  misc_feature: Homolog of GI Number: 76057835 NR Desc: ribosomal L32
  misc_feature: Homolog of GI Number: 71534997 NR Desc: ribosomal protein L32
  misc_feature: Homolog of GI Number: 13899057 NR Desc: ribosomal protein L32
  misc_feature: Homolog of GI Number: 40287540 NR Desc: ly200 protein
  misc_feature: Homolog of GI Number: 77745481 NR Desc: ly200
  misc_feature: Homolog of GI Number: 23198054 NR Desc: ribosomal protein L32
  misc_feature: Homolog of GI Number: 21555143 NR Desc: ribosomal protein L32
  misc_feature: Homolog of GI Number: 10177580 NR Desc: ribosomal protein L32
  misc_feature: Homolog of GI Number: 31241003 NR Desc: ENSANGP00000017702

SEQ ID NO: 7447 - DNA, 802 bp, Glycine max
  misc_feature: Ceres CLONE ID no. 1370886
  misc_feature: Ceres CDNA ID no. 25892503
  CDS (167)..(529): REFERENCED BY SEQ ID NO: 7448
atcatattcggatggactaaatggacttttcacgtacacagcattagggttgcaaaacctcactggtacataaacgattcgctcaactcaaattgccgcactgcaactttgctctctgtgaggcttcaatttctaattagggtttcgcttagagtaaccaataaccatgggagtcttcacctttgtcgtccgcaaatccggcagcgaatggagcgccaagcaacattccggcgacatcgaggcctccgccgattccaccttcgatctccaacggaagctcgtgcaagccgctctcgccgttgattcctccggtggagttcagtcctctttctctcccgtgtctcctacctccgctgtgttccaggtgatagtgggtggtgcagtattcgttggaggtggtggtggtgctgttgcagctgcacctgcaggtggtgctgccgcagctgatgctgccccagctgctgagaaaaaggaagaaaaggtggaggaagagtccgatgatgatatgggattgggactgtttgattagagttttttctgctttttattgagttttgatggaaaagtgtttttagtgtttaatcctataaattgtttgtttattgatttgcaccagttaatggtacattgaacttcgtcggatagagttatgttctgtgacccaaatggttcttctgtattgggttttagtaatttttttcttttttaaacaaatgtctctctcttcttttatcactggcggatagattgtgctgatgataccttcaagcggtttttgctgttaataaaaaaaaaaaaaaaa

SEQ ID NO: 7448 - protein, 120 aa, Glycine max
  misc_feature: Ceres CLONE ID no. 1370886
  misc_feature: Ceres CDNA ID no. 25892503
  misc_feature (25)..(119): Pfam Name: Ribosomal_60s PFAM Desc: 60s Acidic ribosomal protein
  misc_feature: Homolog of GI Number: 7489709 NR Desc: acidic ribosomal protein P3a
  misc_feature: Homolog of GI Number: 21617903 NR Desc: 60S acidic ribosomal protein P3
  misc_feature: Homolog of GI Number: 53792736 NR Desc: putative 60S acidic ribosomal protein P3
  misc_feature: Homolog of GI Number: 20259603 NR Desc: putative acidic ribosomal protein
  misc_feature: Homolog of GI Number: 6226017 NR Desc: 60S acidic ribosomal protein P3
  misc_feature: Homolog of GI Number: 56783875 NR Desc: putative acidic ribosomal protein P3a
  misc_feature: Homolog of GI Number: 38503544 NR Desc: 60S acidic ribosomal protein P3
  misc_feature: Homolog of GI Number: 38503547 NR Desc: 60S acidic ribosomal protein P3
  misc_feature: Homolog of GI Number: 38503536 NR Desc: 60S acidic ribosomal protein P3
  misc_feature: Homolog of GI Number: 78191426 NR Desc: acidic ribosomal protein P1a
MGVFTFVVRKSGSEWSAKQHSGDIEASADSTFDLQRKLVQAALAVDSSGGVQSSFSPVSPTSAVFQVIVGGAVFVGGGGGAVAAAPAGGAAAADAAPAAEKKEEKVEEESDDDMGLGLFD

SEQ ID NO: 7449 - DNA, 982 bp, Glycine max
  misc_feature: Ceres CLONE ID no. 1370979
  misc_feature: Ceres CDNA ID no. 25893167
  CDS (1)..(849): REFERENCED BY SEQ ID NO: 7450
ctagcccagctgcccacccattcccctcgccgccgccgccactccgccgctgccgccgccgagatgggtcgcgtgatccgctctcagcgtaagggtgcgggctccgtcttcaagtcccacacccaccaccgcaagggccccgcccgcttcaggtcgctcgacttcggcgagcgcaacgggtacctcaagggcgtcgtcaccgatgtcatccacgacccggggcgtggtgcgccgctggccaaggtgaccttccgccacccgttcaggtacaagcaccagaaggagctcttcgtcgccgccgagggtatgtacaccggccagttcgtctactgcggacgccgcgccaccctctccgttggtaacgtcctcccgctccgctccgtgcctgagggaggcgtcatctgcaacgtcgagcaccacgtcggcgaccgtggtgtcttcgccagggcctccggtgactacgccatcgtcatcagccacaaccctgacaacggcacctcaaggatcaagctcccctctggtgccaagaagattgtcccaagcagctgccgtgccatgattggtcaggttgctggtggtggcaggactgagaagccaatgctcaaggctggtaacgcctaccacaagtaccgcgtgaagaggaactcctggcctaaggtgcgtggtgtggccatgaaccctgtggagcatccccacggaggaggtaaccaccagcatattggtcacgcttccactgtccgccgtgatgcaccacctggccagaaggttggtctcatcgctgccaggaggactggtcgtctcagaggccaggctgccgcctctgctgccaaggccgacaaggccacttagagctatcgttgctgtttatctatgtttgctgcctctagattacccgtcaaggacatgtattgcaatatggatgtcgtttttgctcggtactttggtaacgtggtgatatttgttaacaaaaaaaaaaaaaaaa

SEQ ID NO: 7450 - protein, 261 aa, Glycine max
  misc_feature: Ceres CLONE ID no. 1370979
  misc_feature: Ceres CDNA ID no. 25893167
  misc_feature (11)..(90): Pfam Name: Ribosomal_L2 PFAM Desc: Ribosomal Proteins L2
  misc_feature (96)..(231): Pfam Name: Ribosomal_L2_C PFAM Desc: Ribosomal Proteins L2
  misc_feature: Homolog of GI Number: 77556802 NR Desc: 60s ribosomal protein l2
  misc_feature: Homolog of GI Number: 19343 NR Desc: ribosomal protein L2
  misc_feature: Homolog of GI Number: 81074776 NR Desc: ribosomal protein L2
  misc_feature: Homolog of GI Number: 22135870 NR Desc: 60S ribosomal protein L2
  misc_feature: Homolog of GI Number: 20001 NR Desc: 60S ribosomal protein L2
  misc_feature: Homolog of GI Number: 13605569 NR Desc: AT4g36130/F23E13_20
  misc_feature: Homolog of GI Number: 12054507 NR Desc: ribosomal protein L2
  misc_feature: Homolog of GI Number: 798818 NR Desc: 60S ribosomal protein L2
  misc_feature: Homolog of GI Number: 67633686 NR Desc: 60S ribosomal protein L8
  misc_feature: Homolog of GI Number: 6562271 NR Desc: ribosomal protein L8 homolog
  misc_feature: Useful for increasing chlorophyll and photosynthetic capacity
  misc_feature: Useful for making bigger plants
  misc_feature: Useful for making plants with increased biomass and foliage
  misc_feature: Useful for making plants with increased biomass and foliage
  misc_feature: Useful for making plants with modified flowers
  misc_feature: Useful for making shorter plants
  misc_feature: Useful for making smaller plants
  misc_feature: Useful for sterility
MGRVIRSQRKGAGSVFKSHTHHRKGPARFRSLDFGERNGYLKGVVTDVIHDPGRGAPLAKVTFRHPFRYKHQKELFVAAEGMYTGQFVYCGRRATLSVGNVLPLRSVPEGGVICNVEHHVGDRGVFARASGDYAIVISHNPDNGTSRIKLPSGAKKIVPSSCRAMIGQVAGGGRTEKPMLKAGNAYHKYRVKRNSWPKVRGVAMNPVEHPHGGGNHQHIGHASTVRRDAPPGQKVGLIAARRTGRLRGQAAASAAKADKAT

SEQ ID NO: 7451 - DNA, 944 bp, Glycine max
  misc_feature: Ceres CLONE ID no. 1371045
  misc_feature: Ceres CDNA ID no. 40351765
  CDS (67)..(681): REFERENCED BY SEQ ID NO: 7452
attgtgtctcactcacatcacacacactctcatagctgtagcggcgacactaagatcggagaaagaatggcgaaaacgacgtcgttgctgctctttacactgctcctcttcggaaccctagctctcatccaggcgaagaaatcgaaggaggatttgaaggaggtgacccacaaggtttactttgatgttgagattaatggaaaagaagcaggtcgtattgtaatgggtctttatgggaaggctgttccaaaaactgcagaaaacttccgagcactttgcacaggggaaaagggaactggtaaaagtggaaagcctctccattacaaaggtagctcattccatagaattattcctagctttatgcttcaaggaggtgattttacacaaggaaatggaatgggtggagaatcaatttacggagagaagtttgctgatgagaacttcaagttaaagcatactggaccaggacttctatcaatggcaaatgctggtcctaataccaatggttcacaatttttcattacaactgtgacaactagctggttggacggaaggcatgttgtttttggtaaagttctttctggaatggatgttgtttacaagattgaagctgaaggaacacaaagtggcactcccaagagcaaggttgtgattgttgacagtggtgaactccctctataattgtacttcttgattctcaatcaggacttgttgaaggtgttcccagttttcatttcaattccatctacgagactacttatcttttataagcatgttctaatagatcaatgactagttgtatgtttgtgatacttattagataaagtttttccccctaatgataatatggaaaatggcatttgtgaacatgaacattgtagagggaaatctaagtgaacatggctgttgaatattagcagctgccctcaaaaaaaaaaaaaaaa

SEQ ID NO: 7452 - protein, 204 aa, Glycine max
  misc_feature: Ceres CLONE ID no. 1371045
  misc_feature: Ceres CDNA ID no. 40351765
  misc_feature (36)..(202): Pfam Name: Pro_isomerase PFAM Desc: Cyclophilin type peptidyl
MAKTTSLLLFTLLLFGTLALIQAKKSKEDLKEVTHKVYFDVEINGKEAGRIVMGLYGKAVPKTAENFRALCTGEKGTGKSGKPLHYKGSSFHRIIPSFMLQGGDFTQGNGMGGESIYGEKFADENFKLKHTGPGLLSMANAGPNTNGSQFFITTVTTSWLDGRHVVFGKVLSGMDVVYKIEAEGTQSGTPKSKVVIVDSGELPL

SEQ ID NO: 7453 - DNA, 1529 bp, Glycine max
  misc_feature: Ceres CLONE ID no. 1371211
  misc_feature: Ceres CDNA ID no. 40351766
  CDS (67)..(1191): REFERENCED BY SEQ ID NO: 7454
gtttatttatctttctgactcaaagtgtaagtgctgttccgacaacagaggtgaaagaaaccaactatggcggcccctgttgtagtgtctacctctgtatctgtgtgttccaactatggctatcatcgtcgtccatccctttccgctctctcttattattcgaactcaatctccaacgcaaacctaaaactgagttcgcaatgtttctccaacttgcttcgttcgaattcaaaagccccgatttattgtcgcaagtttgttgctcgcacttcaattggagagaatgagagtgagagtgagagtgagaaggatttagggttagtaggggaggactctgcggcgtttgaattgggcaaacagaaaatatcttcgtggatttatttcaccgctattttaggagtcgttctctgcgttctcaacgtcgcatggattgataattcaactggctacggcaaagcttttattgacgccgtttctaccctttccgattctcacgaggtggtaatgttgattctaattcttatatttgctggtgttcatagtggcttagctagcttccggaacactggcgagaaactcattggagaaagacctttccgtgtaatttttgcagggatatcactacctttggctgtcagtactgttgtgtattttattaaccacagatatgatggacttcaactctggctgctccaggatgctcctgggcttcatcaacttctgtggctttcgaatttcatttctttctttttcctatatccttcaactttcaatcttttagaggttgcagctgttgacaagcctaaattacatctatgggaaactgggatcataagaataacccggcatccacagatggttggccaggttatctggtgtcttgctcatacgatttggatcggaaattccgtggctgttgcagcttcaattggcttaattgcacatcatctatttggtgtctggaatggagacaggcgactggctataagatatggggaggattttgaattagtcaagagtcgaacaagtgttgtcccttttgcagcaatccttgatggccgacaaaagctacctaaagatttctacaaggagtttattcgactgccatacttgacagttactgcactaactttaggtgcttactttgcacacccgcttatgcagactgctagtttcaatcttcattggtaggttgaacacagcaaatcctgttgcttttgtgtaaaatctactgtttgtcaataggcggagatgaagatattaaagaaaagaaaataatatgaagcaataggttattatcacaaagttgcacctggtgttttggatgcgcatgttatatcagttttttacagcagctgcaactttgtgacacccacacattacattcttcaattatacggagtaaatgtacatgttgttagcagtgcttactaaagtgctcctttaacatttctccccaaaatgtattaatattctcaaagtgaaatcagaaaatatctatgattgattttctaaaaaaaaaaaaaaaa

SEQ ID NO: 7454 - protein, 228 aa, Glycine max
  misc_feature: Ceres CLONE ID no. 1371211
  misc_feature: Ceres CDNA ID no. 40351766
  misc_feature (109)..(128): Pfam Name: NnrU PFAM Desc: NnrU protein
MLILILIFAGVHSGLASFRNTGEKLIGERPFRVIFAGISLPLAVSTVVYFINHRYDGLQLWLLQDAPGLHQLLWLSNFISFFFLYPSTFNLLEVAAVDKPKLHLWETGIIRITRHPQMVGQVIWCLAHTIWIGNSVAVAASIGLIAHHLFGVWNGDRRLAIRYGEDFELVKSRTSVVPFAAILDGRQKLPKDFYKEFIRLPYLTVTALTLGAYFAHPLMQTASFNLHW

SEQ ID NO: 7455 - DNA, 1107 bp, Glycine max
  misc_feature: Ceres CLONE ID no. 1371225
  misc_feature: Ceres CDNA ID no. 24766073
  CDS (244)..(924): REFERENCED BY SEQ ID NO: 7456
gtgcgggagagacgagcgatggctcgataggcatcctccccaggttcagatcccgacggcatcctccccaggttccagaaccgctgacgtggcgctcctcttcctcctcctcccgcctctcccatcaccgcctcgtctgcctcaccgccggcgaccgtcgctcccgtacccacactccggcgcagggatggctcaatgaggtgtgtgtgagccgcgttgatctggcttctggtggagtgtgaaatggtggatttcccggaagggttgcgacggctcgctgctctcctgctcaagtgctgcgatctcgacataccaaatcgtcccaagggcctcgaggatcctgagcgtctggcaagggaaacagtttttagcgtaaatgagattgaggcattgtatgagctgttcaagaagatcagcagtgctgtggttgatgatggtgtgattaataaggaagaattccaactggcgctgtttaagactaacaggaaagatagcatgtttgctgaccgggtgtttgatttgttcgacacaaagcacaatgggattctagaatttgaagaatttgtgcgagctctttctgtattccatcctaatgcaccagttgatgacaaaattgattttgctttcaaactctatgatctcaaacaacaaggtttcattgaaaagcaagaggtgaagcaaatggtggttgccacacttgctgaatcaggaatgaacctttctgatgaggttatagagggtattatcgacaagacatttgaggaagcagatacaaagcacgatggtaaaatcgacaaggaggaatggcgcaatcttgtcttgaggcatccatctttgttgaagaatatgacactcccatatctaagggatattaccacaacatttccaagctttgtcttcaactctcaggtcgaggatgcttgagaatccagtttctaggttaccactgaagcttgtgaaaggccacggcagaccatgtcgtaggtggaccttgtgtatttttatttctttattcctttttggcgatatccttcttgtgcttggaacaattcttgtaattttttcacttctttaaaatgtgaattcccagcaaaaaaaaaaaaaaaa

SEQ ID NO: 7456 - protein, 226 aa, Glycine max
  misc_feature: Ceres CLONE ID no. 1371225
  misc_feature: Ceres CDNA ID no. 24766073
  misc_feature (123)..(151): Pfam Name: efhand PFAM Desc: EF hand
  misc_feature: Homolog of GI Number: 76577797 NR Desc: calcineurin B
  misc_feature: Homolog of GI Number: 77553753 NR Desc: EF hand
  misc_feature: Homolog of GI Number: 57472399 NR Desc: calcineurin B
  misc_feature: Homolog of GI Number: 22137326 NR Desc: calcineurin B
  misc_feature: Homolog of GI Number: 60460514 NR Desc: calcineurin B
  misc_feature: Homolog of GI Number: 76577789 NR Desc: calcineurin B
  misc_feature: Homolog of GI Number: 22136404 NR Desc: calcineurin B
  misc_feature: Homolog of GI Number: 56748808 NR Desc: Calcineurin B
  misc_feature: Homolog of GI Number: 60460516 NR Desc: calcineurin B
  misc_feature: Homolog of GI Number: 22655046 NR Desc: At5g55990/MDA7_3
  misc_feature: Useful for making plants with increased biomass and foliage
  misc_feature: Useful for making plants with increased biomass and foliage
MVDFPEGLRRLAALLLKCCDLDIPNRPKGLEDPERLARETVFSVNEIEALYELFKKISSAVVDDGVINKEEFQLALFKTNRKDSMFADRVFDLFDTKHNGILEFEEFVRALSVFHPNAPVDDKIDFAFKLYDLKQQGFIEKQEVKQMVVATLAESGMNLSDEVIEGIIDKTFEEADTKHDGKIDKEEWRNLVLRHPSLLKNMTLPYLRDITTTFPSFVFNSQVEDA

SEQ ID NO: 7457 - DNA, 1100 bp, Glycine max
  misc_feature: Ceres CLONE ID no. 1371260
  misc_feature: Ceres CDNA ID no. 25891916
  CDS (85)..(783): REFERENCED BY SEQ ID NO: 7458
gtgtggtagtgtggcagcgacacgtatcaacttcaataatcgcatcgcagaagcagtttccggtgcatctcatcgtctccgaaaatgaacgacgcagatgtctcgaagcaaatccagcagatggtgcggttcatccgccaggaagctgaggaaaaggccaacgagatctctgtctccgccgaagaggaattcaatatcgagaagctgcagttggtcgaagccgacaagaagaagatcaggcaagaatacgaacgcaaagagcgccaagttgaaattcgcaagaagattgagtactcaatgcagctgaatgcttctcggattaaagttcttcaagctcaagatgacgtgatcagttccatgaaagaagctgcatccaaggaacttttgactgtgagtcatcatcatgatgatcatgtgtacagaaaccttctgaaagatctcattgttcagtgtttgctaagactgaaagaaccttctgtcttattgagatgtcggaaagatgacctgcacttggtagagaacgtgctggattcagctgctcaggagtatgctgagaaagcaaatgtcgatcccccagagatcattgttgacaaccaagtctatcttccacctggacccagtcgtcacaattctcacgatctctactgctccggtggggtggtgttggcttctcgtgatggaaagattgtgtgtgaaaatactcttgatgcacgtcttgatgtagttttccgtaaaaagcttccagagatccgaaagcagctctttggacaaattgttgcttgaagattttgattgtaatgtttggttacccctggaactatatcccgaagcataagcttgtcttcatgtcttggacctgaatagctatcaagccattgcttctgtgaacttataattattgtcccttaaattacgtcattttcggtagtccagttgtccggcgttctagatttgatttacttatgattgttatgacgacaagtgttttcagctttgagcttcttggcaataaagtagcagatgtaatatatattgaacattactgtcaatattgtgacagaaatatagtaaccgttgtcgtgccaaaaaaaaaaaaaaaa

SEQ ID NO: 7458 - protein, 232 aa, Glycine max; identical to SEQ ID NO: 3676
  misc_feature: Ceres CLONE ID no. 1371260
  misc_feature: Ceres CDNA ID no. 25891916
  misc_feature (16)..(227): Pfam Name: vATP PFAM Desc: ATP synthase
  misc_feature: Homolog of GI Number: 29290712 NR Desc: vacuolar ATPase subunit E
  misc_feature: Homolog of GI Number: 5733660 NR Desc: vacuolar V
  misc_feature: Homolog of GI Number: 12585474 NR Desc: Vacuolar ATP synthase subunit E
  misc_feature: Homolog of GI Number: 34912000 NR Desc: putative YLP
  misc_feature: Homolog of GI Number: 2267583 NR Desc: vacuolar H+
  misc_feature: Homolog of GI Number: 15222641 NR Desc: vacuolar ATP synthase subunit E
  misc_feature: Homolog of GI Number: 9652289 NR Desc: putative vacuolar proton ATPase subunit E
  misc_feature: Homolog of GI Number: 20148607 NR Desc: similar to vacuolar ATPases
  misc_feature: Homolog of GI Number: 1143394 NR Desc: V
  misc_feature: Homolog of GI Number: 1263911 NR Desc: vacuolar H

SEQ ID NO: 7459 - DNA, 970 bp, Glycine max
  misc_feature: Ceres CLONE ID no. 1371283
  misc_feature: Ceres CDNA ID no. 40351767
  CDS (176)..(727): REFERENCED BY SEQ ID NO: 7460
agggatgctatagagggttttcggtgcagagaatccaaacgcttctatggacgaaagagaaaatagagttaaaaaggttactactcagattttgcagagcctggagctgagctgagaaaacccccaaccccaacctcaaccttaacctctcctcactttcttttcaaccagaactatgattaagctttttaaagtaaaggaaaaacagagagaactggcagaaaatgcgagtggcggaccacccgttaagaagcaaagtgccggcgagttgcgtcttcacaaagatataagcgagctgaatctaccaaaatcatgtaccatgcaattccccaatggcaaagatgacctgatgaactttgaagtttcaattcgacctgatgatggatattacttaggtggcacatttttgttttcctttcaagtgtctcccatctatccacatgaagcaccaaaggttaaatgcaagacaaaggtctatcatccaaatattgacttggaaggaaatgtttgtctcaacatcttacgagaagattggaaacctgtccttaatataaacactgtcatctatggcttgtatcatctcttcacggaaccaaattacgaggatccactgaatcatgatgctgctgctgtgttgagagagaaccctaagatgtttgaatctaatgtgaggagggcaatggctggagggtatgtggggcaaacctttttcccacgctgtatttagaccttttgcacgataccttcaagttcctgttcaaatatgttatcaatgcgtgaaggcccttggtttgtaaaatttatcaaaaaattggattttactttcgtcagttatgttatttttcttggtggagcgacaggccaagttcctaagaccaccaagcgcgtctaaaagccaaacaagtggaatgttcttgtaacctgtgctttaattgaatgttaacgtttaattctaaaaaaaaaaaaaaaa

SEQ ID NO: 7460 - protein, 183 aa, Glycine max
  misc_feature: Ceres CLONE ID no. 1371283
  misc_feature: Ceres CDNA ID no. 40351767
  misc_feature (33)..(169): Pfam Name: UQ_con PFAM Desc: Ubiquitin
MIKLFKVKEKQRELAENASGGPPVKKQSAGELRLHKDISELNLPKSCTMQFPNGKDDLMNFEVSIRPDDGYYLGGTFLFSFQVSPIYPHEAPKVKCKTKVYHPNIDLEGNVCLNILREDWKPVLNINTVIYGLYHLFTEPNYEDPLNHDAAAVLRENPKMFESNVRRAMAGGYVGQTFFPRCI

SEQ ID NO: 7461 - DNA, 600 bp, Glycine max
  misc_feature: Ceres CLONE ID no. 1371291
  misc_feature: Ceres CDNA ID no. 25891621
  CDS (75)..(488): REFERENCED BY SEQ ID NO: 7462
aaaccacccaaattcttctcagatctgtacttgtacttgtacttcttctaaaacccagaaagaaaattaaagcaatggctccaaaagcagcagagaagaagccagtagaggagaaagctccggcggagaagaagccgaaggccgggaagaagctgcccaaggaagcaggtgcaggcgttgacatgaagaagaagaagaaatcgaagaagagcgtggagacgtataagatttacatcttcaaggttctgaagcaggttcatccagatgtcggaatctctagtaaagccatggggatcatgaacagtttcatcaatgacatcttcgagaagctcgcccaggaatcgtcaaagcttgcaaggtacaacaagaagccaacaatcacctcgagggagattcagactgctgttaggctcgttcttccaggagagctcgccaaacacgccgtctccgaaggcaccaaggccgtcactaaattcaccagctcttgaacatccaatctaaattaagtttcagttacctttcaatctcagttgtaattagttctatgaatctgtttggaatctaaaatatttgcgttttctcaaaaaaaaaaaaaaaaaa

SEQ ID NO: 7462 - protein, 137 aa, Glycine max
  misc_feature: Ceres CLONE ID no. 1371291
  misc_feature: Ceres CDNA ID no. 25891621
  misc_feature: No seed is being produced by the plant
  misc_feature: The plant flowers significantly late compared to wild-type.
  misc_feature: Useful for biocontainment applications
  misc_feature: Useful for making plants with modulated flowering time
  misc_feature (44)..(116): Pfam Name: Histone PFAM Desc: Core histone H2A/H2B/H3/H4
  misc_feature: Homolog of GI Number: 21536602 NR Desc: histone H2B
  misc_feature: Homolog of GI Number: 30102580 NR Desc: At3g45980
  misc_feature: Homolog of GI Number: 21554180 NR Desc: histone H2B
  misc_feature: Homolog of GI Number: 2558962 NR Desc: histone H2B1
  misc_feature: Homolog of GI Number: 3021485 NR Desc: histone H2B
  misc_feature: Homolog of GI Number: 82400146 NR Desc: histone H2B
  misc_feature: Homolog of GI Number: 3021489 NR Desc: histone H2B
  misc_feature: Homolog of GI Number: 21617908 NR Desc: histone H2B
  misc_feature: Homolog of GI Number: 21553526 NR Desc: putative histone H2B
  misc_feature: Homolog of GI Number: 2746719 NR Desc: histone H2B
MAPKAAEKKPVEEKAPAEKKPKAGKKLPKEAGAGVDMKKKKKSKKSVETYKIYIFKVLKQVHPDVGISSKAMGIMNSFINDIFEKLAQESSKLARYNKKPTITSREIQTAVRLVLPGELAKHAVSEGTKAVTKFTSS

SEQ ID NO: 7463 - DNA, 1384 bp, Glycine max
  misc_feature: Ceres CLONE ID no. 1371354
  misc_feature: Ceres CDNA ID no. 24766074
  CDS (147)..(1232): REFERENCED BY SEQ ID NO: 7464
ttgccaacaaagctctctcctttcctcatcatcacagctcagcctgaccccaactctctctcaggcttccgatctcagatctctgcgatccggtgagatctctctcttcttccgaggaaaaaaaaagggagttcagtagaatcaagatgaaggctctcattctcgttggagggttcgggactcggttgagaccattgactctcagtttcccaaagccccttgttgacttcgccaacaaacccatgatccttcatcagatagaggcgctcaaggcagttggagttgatgaagttgttttggccatcaattaccaaccagaggtgatgcttaacttcttgaaagactttgaggcaaagctcgaaatcaaaatcacttgctcacaagagactgagcctatgggtacggctggtcctctggctctagctagagacaaactggttgacggatctggagagcccttttttgtccttaacagtgatgtgattagtgagtacccactcaaagagatgattgaatttcacaaagctcacggtggggaagcctccattatggtgacaaaggttgatgaaccgtccaagtatggagttgtggtcatggatgaaactacaggaaaagtggagaagtttgtggaaaagccaaaactgtttgtaggcaacaagatcaacgctgggatataccttctgaacccatctgttctcgacaagatcgagctaagaccgacatcgatcgagaaagaaaccttccccaagattgcagcagctcaaggactctacgcgatggtgttaccaggattctggatggacatcgggcaaccccgtgattacataacgggcctgagactctacttagactctctgagaaagaaatctcccgccaagctaaccactggtgcacacattgttgggaacgttctggtggatgaaaccgctaagattggggaagggtgtttgataggtccagacgtggccattggtccaggctgcgttgttgagtcaggggtgaggctttcacggtgcacggtcatgcgtggggcgaggatcaagaaacatgcgtgtatctcgagcagtatcatagggtggcactcgacggttgggcagtgggctaggattgagaacatgacgatcttgggggaagatgttcatgtgtgtgatgagatatacaccaatggaggagttgttttgccacacaaggagatcaaatccaacatcttgaagccagagatagttatgtgattatctatgttggaacctttttttgttttttttttttgtgtatttttatctctcaaactttgtgtttctgttattcttctttggctttgaataaaatataaacaaaatgatgtataaaaaaaaaaaaaaaaaaaccaaaaaaaaaaaaaaaa

SEQ ID NO: 7464 - protein, 361 aa, Glycine max
  misc_feature: Ceres CLONE ID no. 1371354
  misc_feature: Ceres CDNA ID no. 24766074
  misc_feature (2)..(236): Pfam Name: NTP_transferase PFAM Desc: Nucleotidyl transferase
  misc_feature (266)..(283): Pfam Name: Hexapep PFAM Desc: Bacterial transferase hexapeptide
  misc_feature: Homolog of GI Number: 34902046 NR Desc: COG1208
  misc_feature: Homolog of GI Number: 14971013 NR Desc: GDP
  misc_feature: Homolog of GI Number: 13509287 NR Desc: GDP
  misc_feature: Homolog of GI Number: 47681456 NR Desc: GDP
  misc_feature: Homolog of GI Number: 4103324 NR Desc: GDP
  misc_feature: Homolog of GI Number: 49246467 NR Desc: GMPase
  misc_feature: Homolog of GI Number: 7076802 NR Desc: mannose
  misc_feature: Homolog of GI Number: 23397114 NR Desc: putative GDP
  misc_feature: Homolog of GI Number: 34908274 NR Desc: putative GDP
  misc_feature: Homolog of GI Number: 50942685 NR Desc: putative GDP
MKALILVGGFGTRLRPLTLSFPKPLVDFANKPMILHQIEALKAVGVDEVVLAINYQPEVMLNFLKDFEAKLEIKITCSQETEPMGTAGPLALARDKLVDGSGEPFFVLNSDVISEYPLKEMIEFHKAHGGEASIMVTKVDEPSKYGVVVMDETTGKVEKFVEKPKLFVGNKINAGIYLLNPSVLDKIELRPTSIEKETFPKIAAAQGLYAMVLPGFWMDIGQPRDYITGLRLYLDSLRKKSPAKLTTGAHIVGNVLVDETAKIGEGCLIGPDVAIGPGCVVESGVRLSRCTVMRGARIKKHACISSSIIGWHSTVGQWARIENMTILGEDVHVCDEIYTNGGVVLPHKEIKSNILKPEIVM

SEQ ID NO: 7465 - DNA, 831 bp, Glycine max
  misc_feature: Ceres CLONE ID no. 1371365
  misc_feature: Ceres CDNA ID no. 29191707
  CDS (115)..(561): REFERENCED BY SEQ ID NO: 7466
ttctctcagttcttcgtcaatcaagtcaacccccctttcaatttcaaccctatctctgctctctttttcttcatcatttgtttttgggtctctctgtttccaagtttttgagttatggcatcgaaacgcatcgtgaaggagctcaaggatttgcagaaggaccctcctacatcctgcagcgcaggtcccgtggcggaggatatgtttcactggcaggcaacaatcatgggacctcctgatagcccatatacaggtggcgtattcctagtttcaattcattttcctcctgactatccattcaaaccaccaaaggttgcatttaggactaaggtattccacccaaacatcaatagtaatggaagtatatgccttgacattctaaaagaacaatggagcccagcactaaccatttctaaggtccttttgtccatttgctcattgttgacggatcccaaccctgatgacccgcttgtgcctgaaattgcccacatgtacaaggctgacaaggctaagtatgaagccactgctcgtagctggacacagaagtatgccatgggataatcatgctcctcctttagctgctcactgtagctgcgcaatcatgatttatgaagaaacaagatatacttttaatgaatgttttgtcttttttttgtcagtggaaatcaaccatggtaagggaattgatgattacttgtgaatatttctttgcaagacatcggtcatggaagaaattgttgtaaaatgtcacaaattttctgcttgttgacttgctattccaaatgatggtaatgaaattatagttaggaacaggtaaaaaaaaaaaaaaaa

SEQ ID NO: 7466 - protein, 148 aa, Glycine max
  misc_feature: Ceres CLONE ID no. 1371365
  misc_feature: Ceres CDNA ID no. 29191707
  misc_feature: The plant produces a reduced number of seeds.
  misc_feature: Useful for biocontainment applications
  misc_feature (5)..(142): Pfam Name: UQ_con PFAM Desc: Ubiquitin
  misc_feature: Homolog of GI Number: 464981 NR Desc: Ubiquitin
  misc_feature: Homolog of GI Number: 28569271 NR Desc: ubiquitin
  misc_feature: Homolog of GI Number: 40287554 NR Desc: ubiquitin
  misc_feature: Homolog of GI Number: 28569267 NR Desc: ubiquitin
  misc_feature: Homolog of GI Number: 66354464 NR Desc: ubiquitinating enzyme
  misc_feature: Homolog of GI Number: 66354420 NR Desc: ubiquitinating enzyme
  misc_feature: Homolog of GI Number: 77416935 NR Desc: ubiquitin
  misc_feature: Homolog of GI Number: 22597164 NR Desc: ubiquitin
  misc_feature: Homolog of GI Number: 11762186 NR Desc: AT4g27960
  misc_feature: Homolog of GI Number: 23297139 NR Desc: E2 ubiquitin
MASKRIVKELKDLQKDPPTSCSAGPVAEDMFHWQATIMGPPDSPYTGGVFLVSIHFPPDYPFKPPKVAFRTKVFHPNINSNGSICLDILKEQWSPALTISKVLLSICSLLTDPNPDDPLVPEIAHMYKADKAKYEATARSWTQKYAMG

SEQ ID NO: 7467 - DNA, 716 bp, Zea mays
  misc_feature: Ceres CLONE ID no. 1371408
  misc_feature: Ceres CDNA ID no. 29191894
  CDS (89)..(568): REFERENCED BY SEQ ID NO: 7468
attactttcatttcatcagtcgctgcctcgcctctcgcatctcttttacagcccttgcttcagcggagagcagcagcaaccagtagccatggctgaacagactgagaaggcttttcttaagcaacccaaggttttcctaagctcgaagaaatctgggaaaggaaagagacctggcaaaggtggaaaccgtttctggaagaacattggcttgagtttcaagactcctcgtgacgccattgacggaacttacattgataggaaatgtccattcactggaaccgtttctataaggggacgtatcttagctggtacttgccactctgccaagatgcagcgaaccatcattgttcgcaggaactatctccacttcgtcaagaagtatcaaaggtatgagaagagacactccaacatccctgcccacgtctcaccctgcttccgtgtcaaagaaggtgatcatgtcatcattggccagtgcaggccgttgtcaaagacggtgaggttcaatgtgctgaaggtgatcccggcaggcgcatctgcctttgcaaagaaggcattcactggaatgtaagagctttgaagttatggagatttaactttgcttgttttgatgttggaatgttttgtttggtgatctccttttgttgtagtcccatagacttaatagacctactttggttatttgaaatttactacattcatcaaaaaaaaaaaaaaaa

SEQ ID NO: 7468 - protein, 159 aa, Zea mays
  misc_feature: Ceres CLONE ID no. 1371408
  misc_feature: Ceres CDNA ID no. 29191894
  misc_feature (74)..(143): Pfam Name: Ribosomal_S17 PFAM Desc: Ribosomal protein S17
  misc_feature: Homolog of GI Number: 17065614 NR Desc: putative 40S ribosomal protein S11
  misc_feature: Homolog of GI Number: 166867 NR Desc: ribosomal protein S11
  misc_feature: Homolog of GI Number: 21593611 NR Desc: cytosolic ribosomal protein S11
  misc_feature: Homolog of GI Number: 20258899 NR Desc: putative ribosomal protein S11
  misc_feature: Homolog of GI Number: 6984142 NR Desc: 40S ribosomal protein S11
  misc_feature: Homolog of GI Number: 166869 NR Desc: ribosomal protein S11
  misc_feature: Homolog of GI Number: 454848 NR Desc: ribosomal protein S11
  misc_feature: Homolog of GI Number: 22470 NR Desc: ribosomal protein S11
  misc_feature: Homolog of GI Number: 50938417 NR Desc: putative 40S ribosomal protein S11
  misc_feature: Homolog of GI Number: 50928689 NR Desc: OSJNBa0070C17.20
MAEQTEKAFLKQPKVFLSSKKSGKGKRPGKGGNRFWKNIGLSFKTPRDAIDGTYIDRKCPFTGTVSIRGRILAGTCHSAKMQRTIIVRRNYLHFVKKYQRYEKRHSNIPAHVSPCFRVKEGDHVIIGQCRPLSKTVRFNVLKVIPAGASAFAKKAFTGM

SEQ ID NO: 7469 - DNA, 707 bp, Zea mays
  misc_feature: Ceres CLONE ID no. 1371441
  misc_feature: Ceres CDNA ID no. 36590033
  CDS (66)..(494): REFERENCED BY SEQ ID NO: 7470
aaaaagagagaaactgaaacagatcggaattttcgagaaagcgcgagagagagagagacgaaacgatgtcgtatcttctaccgcatcttcactccggctgggctgtagatcaggcgattctagcagaggaagagcgtcttgtcgtcatacgtttcggccatgattgggatgagacttgtatgcagatggatgaggtgcttgcatctgttgctgagacgataaagaactttgcggtgatatatctggtggacatcaccgaggttccagacttcaacaccatgtacgagctctacgatccttcgacggtgatgttcttctttaggaacaagcacattatgatcgatcttgggactggtaacaacaacaagatcaattgggctatgaaggacaagcaggagttcatcgatatcattgagaccgtcttccgtggtgcaaggaaaggccgtgggctggtgattgctcctaaagattactccaccaaataccgctactaaccggacttggcaaaaacattaagatcaaaaaaactatgtctactgattctagtcagttgaaaaatatcctgtgaacttgtggcttatatgctttggtgatttgtgattctggtttgtttgctctttatcagctttttgccatttatgtgtaagtgcttcaaactttaattcagtgaaatgaatacttggaagctaataaaaaaaaaaaaaaaa

SEQ ID NO: 7470 - protein, 142 aa, Zea mays; identical to SEQ ID NO: 6278
  misc_feature: Ceres CLONE ID no. 1371441
  misc_feature: Ceres CDNA ID no. 36590033
  misc_feature (4)..(136): Pfam Name: DIM1 PFAM Desc: Mitosis protein DIM1
  misc_feature: Homolog of GI Number: 31432762 NR Desc: putative thioredoxin
  misc_feature: Homolog of GI Number: 21537271 NR Desc: putative thioredoxin
  misc_feature: Homolog of GI Number: 32493106 NR Desc: putative DIM
  misc_feature: Homolog of GI Number: 61831228 NR Desc:  similar to dim1
  misc_feature: Homolog of GI Number: 51474526 NR Desc:  thioredoxin
  misc_feature: Homolog of GI Number: 5729802 NR Desc: thioredoxin
  misc_feature: Homolog of GI Number: 62860202 NR Desc: TXNL4A
  misc_feature: Homolog of GI Number: 53734161 NR Desc: Zgc:103632
  misc_feature: Homolog of GI Number: 78101454 NR Desc: Chain A

SEQ ID NO: 7471 - DNA, 710 bp, Zea mays
  misc_feature: Ceres CLONE ID no. 1371443
  misc_feature: Ceres CDNA ID no. 40351768
  CDS (43)..(357): REFERENCED BY SEQ ID NO: 7472
gaaggacctagcgagcggcagcggcggcggcgatcggagaagatggtgcgcaaggcgaaggttgagttcgacgagcagccgccggataacttcgacccgaagaacccgtatgccgacccggtggcgatgctcgagtaccgggaacacctggtgcgagagaagtggatccagatcgagaccgccaagatcatccgggagcgcctccgctggtgctaccgcatcgagggcatcaaccaccaccagaagtgccgccacctcgtcgaccaatacctagaggctacccgcggcgtgggttggggcaaggatgcccgcccgcctgaactccacgagcccaagaagaccgtcaaggcggagtagcggcgctgctgccttgcttctcgtgctgctgttcctggattggagaggtgatctgacccttccattgagttgaatgaagtagcctggaactgtggtagttcgtcttttacatcttaagctgctgatagacttcaaataaaatcttgtccaagaaaacattctgtgagcgtacatgttgtcgtcgagctgtgtaattgagcaaatcgtcagattgaaactcgttgtctgccttgttcttcaaataccgcttatccagacggtgcttttgttttcacttttccactgcatctttgctctgcaaggatacgaaaggcatcattggttgctgttgactgttaaaaaaaaaaaaaaaa

SEQ ID NO: 7472 - protein, 104 aa, Zea mays
  misc_feature: Ceres CLONE ID no. 1371443
  misc_feature: Ceres CDNA ID no. 40351768
MVRKAKVEFDEQPPDNFDPKNPYADPVAMLEYREHLVREKWIQIETAKIIRERLRWCYRIEGINHHQKCRHLVDQYLEATRGVGWGKDARPPELHEPKKTVKAE

SEQ ID NO: 7473 - DNA, 951 bp, Glycine max
  misc_feature: Ceres CLONE ID no. 1371550
  misc_feature: Ceres CDNA ID no. 40351769
  CDS (30)..(674): REFERENCED BY SEQ ID NO: 7474
actgattagacaactctcttccaaccaccatggccaatttcaaaactttcttcatttcccaaaccctaaccctaaccctccttttctccaccctagtgactgccacttaccaccacaacatctctccaagtcttgtacgttctcgtgagaagctgacccaccttcacttctacttgcatgaaatttttactagcgaaaaaccctcgaacatcgtaatcgacccccccaaggtggtagccagctctccacttccatttgggtcgcaagtggtgatcgaggacccattaacaattgggcctgatgtgaagtccaaagaaataggcaaggcccaagggttttacctatccgcaacccaaaggcccggtttggagttagagatagtcatggggatggctttgaccttcttagaaggcgaattcaacggtagcagtttaagtgtattggggagaaacaaaatcttcaatgaggtaagggagttgccaattattggtggcacgggtgagtttcgcttcgcacgtggctatatccttgctaggactgtcaaggtcgattaccataaaggggatgctaccgtcgaatacaatgcatatgtctaccattattcttccaccagctcttcttcctctccccacctttttaatcagggacttcatttatgtcatggagactactaagcttataataaactcagaaaagaaattagactacagaaggtgggggcataaatccaaagaccaagttgctaatttactcctctgaatctgtccagtactataaataaatttgctcttttcgtacacggaattaagtctttgttgtagtgcaagttgcgtcagctaaataatgtgccactcaaatattttttcttttggaaatgttgcccgttgattattatttgtattgtgcaattgaaaagatagagagaaagtggcccgaaaaaaaaaaaaaaaa

SEQ ID NO: 7474 - protein, 214 aa, Glycine max
  misc_feature: Ceres CLONE ID no. 1371550
  misc_feature: Ceres CDNA ID no. 40351769
  misc_feature (18)..(190): Pfam Name: Dirigent PFAM Desc: Dirigent
MANFKTFFISQTLTLTLLFSTLVTATYHHNISPSLVRSREKLTHLHFYLHEIFTSEKPSNIVIDPPKVVASSPLPFGSQVVIEDPLTIGPDVKSKEIGKAQGFYLSATQRPGLELEIVMGMALTFLEGEFNGSSLSVLGRNKIFNEVRELPIIGGTGEFRFARGYILARTVKVDYHKGDATVEYNAYVYHYSSTSSSSSPHLFNQGLHLCHGDY

SEQ ID NO: 7475 - DNA, 1445 bp, Glycine max
  misc_feature: Ceres CLONE ID no. 1371627
  misc_feature: Ceres CDNA ID no. 29191227
  CDS (3)..(1169): REFERENCED BY SEQ ID NO: 7476
accgtcgattcgcagctcgctcgccaatccaaccaatccataacccggctgcccctcgcccgtctccgccgcacccccaaaaccctagctcccctccccaccccaccccgtccccccaccgcctccggccgccgccgccgcccgcgaagatgccgccgaacctcgagtgccggatgtacgagccgcggttcccggaggtggacgcggcggtgatgatccaggtgaagcacatcgccgacatgggcgcctacgtctccctcctcgagtacaacaacatcgagggcatgatcctcttctccgagctctcccgccgccgcatccgctccatctcctccctcatcaaggtcggccgccaggagccctccatggtgctccgcgtcgaccgcgacaagggctacatcgacctctccaagcgccgcgtctccgaggaggaggccgccacctgcgaggaccgctacaacaagtccaagctcgtccactccatcatgcgccacgccgccgacaccctcggcgtcgacctcgagcccctctaccagcgcatcggctggcccctctaccgcaggtacggccacgccttcgaggccttcaagctcatcgtcaccgaccccgacgccgtgctcgacgtcctcacctacgaggagaccgtcgtcggtcccgatggtgtggaggtgactaacactgtgccggctgtcacccctgaggttaaggatgccctggtcaagaacataaggaggagaatgacaccacagccactcaagattcgtgctgatgttgagatgaaatgcttccagtttgatggtgttctccacattaaggaagccatgaggaaagctgaagctgctggaaatgctgattgccctgtgaagattaagctagttgctcctccgctttatgttctgaccacacagacacttgacaaagaccaggggatagcagttctgacaaatgcaaccaaagtttgtgcagaggcaattgaaaagcacaaggggaaattggtggtgaaggaagcagccagagctgtgagcgagagagacgacaagctgtttgcggacacgattgagaagctgaagctagcaggcgaggaggtcgacggcgacgacgacagcgaggaggaggacaatggcatgggggacgtggacttcacaaaggctggcgctggcacggactgagcgagtctcctcccaagtgggatgaggtcacttgtacagcgccagcaacgaaatgaaggggaagaatgtttggctcctctttgaggaggcacgttggatggatggatgagttttttttactctgttactgatattgatcagttgtaggctacccgtagttttacagattgatttgcttttctctgagcactgatgctgaatactgttaattgcgctttttggtacctgttttcatcaacatttatacatggattttcctcaaaaaaaaaaaaaaaa

SEQ ID NO: 7476 - protein, 339 aa, Glycine max
  misc_feature: Ceres CLONE ID no. 1371627
  misc_feature: Ceres CDNA ID no. 29191227
  misc_feature (126)..(257): Pfam Name: EIF_2_alpha PFAM Desc: Eukaryotic translation initiation factor 2 alpha subunit
  misc_feature (25)..(89): Pfam Name: S1 PFAM Desc: S1 RNA binding domain
  misc_feature: Homolog of GI Number: 83306210 NR Desc: eukaryotic translation initiation factor 2 alpha
  misc_feature: Homolog of GI Number: 21436249 NR Desc: putative eukaryotic translation initiation factor 2 alpha subunit eIF2
  misc_feature: Homolog of GI Number: 34898218 NR Desc: putative eukaryotic translation initiation factor 2 alpha subunit eIF2
  misc_feature: Homolog of GI Number: 21537411 NR Desc: putative eukaryotic translation initiation factor 2 alpha subunit
  misc_feature: Homolog of GI Number: 26450113 NR Desc: putative eukaryotic translation initiation factor 2 alpha subunit
  misc_feature: Homolog of GI Number: 13549160 NR Desc: protein synthesis initiation factor eIF2 alpha
  misc_feature: Homolog of GI Number: 4588003 NR Desc: hypothetical EIF
  misc_feature: Homolog of GI Number: 42571149 NR Desc: eukaryotic translation initiation factor 2 subunit 1 eIF-2A
  misc_feature: Homolog of GI Number: 66851911 NR Desc: translation initiation factor 2 alpha subunit
  misc_feature: Homolog of GI Number: 65304922 NR Desc: eukaryotic translation initiation factor 2 alpha subunit
MPPNLECRMYEPRFPEVDAAVMIQVKHIADMGAYVSLLEYNNIEGMILFSELSRRRIRSISSLIKVGRQEPSMVLRVDRDKGYIDLSKRRVSEEEAATCEDRYNKSKLVHSIMRHAADTLGVDLEPLYQRIGWPLYRRYGHAFEAFKLIVTDPDAVLDVLTYEETVVGPDGVEVTNTVPAVTPEVKDALVKNIRRRMTPQPLKIRADVEMKCFQFDGVLHIKEAMRKAEAAGNADCPVKIKLVAPPLYVLTTQTLDKDQGIAVLTNATKVCAEAIEKHKGKLVVKEAARAVSERDDKLFADTIEKLKLAGEEVDGDDDSEEEDNGMGDVDFTKAGAGTD

SEQ ID NO: 7477 - DNA, 1342 bp, Zea mays
  misc_feature: Ceres CLONE ID no. 1371669
  misc_feature: Ceres CDNA ID no. 25447413
  CDS (115)..(1068): REFERENCED BY SEQ ID NO: 7478
gtcagtcagtcacccaccccacaccgccgccgggaacttgttcatcgagccgagaggatagatagatagatagatagatagatagggtaaccgatcgaatccgccaaccaaacaatggcgtccgacggcagtggcgtggtgacggtgtacggcaacaacggcgcggcgctgctggagccgccgaagcagcccaagtcgtcgactttctccgtgaaggtgggcctggcgcagatgctccgcggcggtgtgatcatggacgtggtgaccccggagcaggcccgcctcgccgaggaggccggcgcctgcgccgtgatggcgctggagcgtgtccccgccgacatccgcgcgcagggtggcgtggcgcgcatgtcggacccgggcctgatccgcgacatcaagcgcgccgtgaccatccccgtcatggccaaggcccgcatcgggcacttcgtggaggcgcagatcctggaggccgtgggcgtggactacgtggacgagagcgaggtgctgaccccggccgacgacgcccaccacatcaacaagcacaacttccgcgtgcccttcgtgtgcggctgccgcgacctcggcgaggcgctgcgcagggtccgcgagggcgccgccatgatccgcaccaagggggaggccggcacgggcaacgtcgtggaggcggtgcgccacgtgcgctccgtcgcgggcgccgtccgcgcgctccgcggcatggacgacgacgaggtgttcgcctacgccaagcgcatcgccgcgccctacgacctggtcatgcagaccaagcagctggggcggctccccgtcgtgcagttcgcggcggggggcgtggccacgcccgccgacgccgcgctcatgatgcagctcggctgcgacggcgtcttcgtcggctccggcatcttcaagagcggcgaccccgcgcgccgcgcccgcgccatcgtccaggcggtcacccactacagcgaccccaccatcctgaccgacgtcagcgcggggctcggggaggccatggtcggcatcaacctcaacgacccaaaggtggagcgatacgccgccagatccgagtgaacacttccctttcctactccacttatatttatcagtatcatctccgctccgccggctctgccaacaaatttttttgcactgcatgcagtagcttaagtaataatggaatgagtgaatgaaatggtgagaaacgaagctagaagctctgtaattttgtgccgttcttataaagtttgcataggctcccctggattatgaatcagtcactcagcctgcttatgacttatgaatcacatgctcttcatcaaaaaaaaaaagaaaaaaaaaaaaaaaa

SEQ ID NO: 7478 - protein, 317 aa, Zea mays
  misc_feature: Ceres CLONE ID no. 1371669
  misc_feature: Ceres CDNA ID no. 25447413
  misc_feature (31)..(236): Pfam Name: SOR_SNZ PFAM Desc: SOR/SNZ family
  misc_feature: Homolog of GI Number: 20453411 NR Desc: AT5g01410/T10O8_120
  misc_feature: Homolog of GI Number: 2501578 NR Desc: Probable pyridoxin biosynthesis protein ER1
  misc_feature: Homolog of GI Number: 45477167 NR Desc: Probable pyridoxin biosynthesis protein PDX1
  misc_feature: Homolog of GI Number: 45477162 NR Desc: Pyridoxin biosynthesis protein PDX1
  misc_feature: Homolog of GI Number: 50933621 NR Desc: putative ethylene
  misc_feature: Homolog of GI Number: 46399271 NR Desc: putative pyridoxine biosynthesis protein isoform B
  misc_feature: Homolog of GI Number: 31429734 NR Desc: putative pyridoxine/pyridoxal 5
  misc_feature: Homolog of GI Number: 72256519 NR Desc: pyridoxine biosynthesis protein
  misc_feature: Homolog of GI Number: 62733309 NR Desc: pyridoxine biosynthesis protein
  misc_feature: Homolog of GI Number: 21617922 NR Desc: pyridoxine biosynthesis protein
  misc_feature: Useful for increasing chlorophyll and photosynthetic capacity
  misc_feature: Useful for making ornamental plants with modified leaves
  misc_feature: Useful for making plants with altered leaf shape eg curled leaves
  misc_feature: Useful for making plants with altered leaf shape eg curled leaves
  misc_feature: Useful for making plants with increased biomass and foliage
  misc_feature: Useful for making shorter plants
  misc_feature: Utility: Mannitol Useful for making plants with enhanced tolerance to drought
MASDGSGVVTVYGNNGAALLEPPKQPKSSTFSVKVGLAQMLRGGVIMDVVTPEQARLAEEAGACAVMALERVPADIRAQGGVARMSDPGLIRDIKRAVTIPVMAKARIGHFVEAQILEAVGVDYVDESEVLTPADDAHHINKHNFRVPFVCGCRDLGEALRRVREGAAMIRTKGEAGTGNVVEAVRHVRSVAGAVRALRGMDDDEVFAYAKRIAAPYDLVMQTKQLGRLPVVQFAAGGVATPADAALMMQLGCDGVFVGSGIFKSGDPARRARAIVQAVTHYSDPTILTDVSAGLGEAMVGINLNDPKVERYAARSE

SEQ ID NO: 7479 - DNA, 808 bp, Glycine max
  misc_feature: Ceres CLONE ID no. 1371813
  misc_feature: Ceres CDNA ID no. 25891917
  CDS (136)..(573): REFERENCED BY SEQ ID NO: 7480
actttatcatctgctttaccatttgatttgctggcaccctcttcttcacgggagctgaaaaaaatgggagaaagtgctttgttctctgtgtagagtttggcagagaaagataacaacattttttagccctttataatgccagttccacttgccccatacccaacaccaccagctccatatacaccaccagctaatggtgtacagagtcaacttgtctgttctgggtgcagaaaccttctagtgttcccagttggagccacctctgtgtgctgtgctgtttgcaatgctgtcacagcagtaccacctcctggcacagaaatggcccagttagtatgtggaggttgccatactttactcatgtacatccggggcgcgacaagtgtgcaatgttcttgttgtcacactgtcaatctagctttggaagcaaatcaggtggcacatgtcaactgtggcaactgcaggatgctactcgcgtaccaatatggagcaagatccgtgaaatgtgcagtttgcaattttgtaacatcagttggggccacagcaagcaccactgagcagaagttcagcacttaaaacatacaaaatagcgaggtcattatagactctacaaccttggttttgctagtcacatatcgcccgtaaggaataaagagttatcagattggagaggaaactagtatcacatgtatagagttatttttctcttgcgtgattgtattaaatatatttttgtttgattgggtgtatcaaaaactatttatgataagttttcagtttctgatgagtgtttcgaaaaaaaaaaaaaaaa

SEQ ID NO: 7480 - protein, 145 aa, Glycine max
  misc_feature: Ceres CLONE ID no. 1371813
  misc_feature: Ceres CDNA ID no. 25891917
  misc_feature: Useful for making plants with modulated growth and phenotype characteristics
  misc_feature: null
  misc_feature: The sequence is a functional homolog of  SEQ ID NO 464 in the  10/666,642 US patent application
  misc_feature: Useful for making plants with modulated oxidative stress sensitivity
  misc_feature (28)..(52): Pfam Name: zf PFAM Desc: LSD1 zinc finger
  misc_feature: Homolog of GI Number: 33867796 NR Desc: LSD1
  misc_feature: Homolog of GI Number: 40809629 NR Desc: zinc finger protein
  misc_feature: Homolog of GI Number: 62751057 NR Desc: LSD
  misc_feature: Homolog of GI Number: 42406064 NR Desc: zinc finger protein LSD1
  misc_feature: Homolog of GI Number: 42570227 NR Desc: zinc finger protein
  misc_feature: Homolog of GI Number: 12322448 NR Desc: zinc
  misc_feature: Homolog of GI Number: 77556573 NR Desc: zinc finger protein LSD1
  misc_feature: Homolog of GI Number: 50881432 NR Desc: zinc finger protein
  misc_feature: Homolog of GI Number: 21436207 NR Desc: putative zinc
  misc_feature: Homolog of GI Number: 7268834 NR Desc: zinc
MPVPLAPYPTPPAPYTPPANGVQSQLVCSGCRNLLVFPVGATSVCCAVCNAVTAVPPPGTEMAQLVCGGCHTLLMYIRGATSVQCSCCHTVNLALEANQVAHVNCGNCRMLLAYQYGARSVKCAVCNFVTSVGATASTTEQKFST

SEQ ID NO: 7481 - DNA, 1345 bp, Glycine max
  misc_feature: Ceres CLONE ID no. 1371900
  misc_feature: Ceres CDNA ID no. 25446821
  CDS (115)..(1038): REFERENCED BY SEQ ID NO: 7482
actcgaactcatttctaattaatttgcttcctactgctgttagcttcatctttgttctgatccatatcacactttctttgtaacttgaagaagaaccccacaaaaacaccaaccatgtccacaattgcaaagagagatttgagttgtaatgaagaagagagtgagctgagaagaggtccttggactcttgaagaagacagcttacttatacactatattgctcgtcatggtgaaggtcgttggaatatgttagccaaaagtgcaggattgaagaggactggaaaaagttgcagactcagatggctgaattatttgaaaccagacattaagagagggaacctcactccacaggagcaactcttgatcctcgaactccattccaagtggggtaacaggtggtcaaaaattgctcagcatctgccaggaagaacagacaatgagatcaagaactattggagaacaagggtacagaaacaggcacgccagcttaacattgaatctggtagcaagagattcattgatgctgtcaagtgtttttggatgccaagattgctccaaaagatggaacagagcaattctccaagccctcagtcttccatgacaaccatgatgaatttagggaattctggagaagcttctatgagttcaatgtcaagcagcttcaatattaatccttctatgtcttcttcatcatctcctccacaaaggaaatttattatggatgatgctaatcattttagtactatgtccaaccccatcaatccatccccagattccttccaattttcacagccacttgaaatttctgaacaccccaaaagtcctcccaatgtgtttgagaacaatgtttgcagctatccaatccaggacaattgctatcttgataccaataactatggcatggaaggcataaacatggatcccctttcagcaatggatacttatgacttctcacagtttgattttcagactgcagggaatggatggatgctagacagcatgggggattccactttatggaacatggatgctatgtgacagtgttgacaagtgaaggcatgcatctcaagttctttacattgtgggatgttatatcagagaaaaaaagtttgaagattcttatgctatactgattcttagtgtgagtatacagtctcaaaggtagaaattagtaccaagtgtaaggacatataatatgaacctcttaaaatataatatttaaaatagaaaatgcaggagatgatattaaagttcccctgtttcagatttattaaaagttgtaatttgactaagacaatgtatcttggctgctataagtgcattttggacaaaaaaaaaaaaaaaa

SEQ ID NO: 7482 - protein, 307 aa, Glycine max
  misc_feature: Ceres CLONE ID no. 1371900
  misc_feature: Ceres CDNA ID no. 25446821
  misc_feature (73)..(118): Pfam Name: Myb_DNA PFAM Desc: Myb
  misc_feature: Homolog of GI Number: 12325331 NR Desc: putative transcription factor
  misc_feature: Homolog of GI Number: 34895506 NR Desc: putative dehydration
  misc_feature: Homolog of GI Number: 15375295 NR Desc: putative transcription factor MYB116
  misc_feature: Homolog of GI Number: 13177578 NR Desc: Myb transcription factor JAMyb
  misc_feature: Homolog of GI Number: 23476305 NR Desc: myb
  misc_feature: Homolog of GI Number: 23476299 NR Desc: myb
  misc_feature: Homolog of GI Number: 14249017 NR Desc: myb
  misc_feature: Homolog of GI Number: 14249019 NR Desc: recombinant myb
  misc_feature: Homolog of GI Number: 23476303 NR Desc: myb
  misc_feature: Homolog of GI Number: 14249015 NR Desc: myb
  misc_feature: Useful for making plants with increased biomass and foliage
  misc_feature: Useful for making plants with increased biomass and foliage
MSTIAKRDLSCNEEESELRRGPWTLEEDSLLIHYIARHGEGRWNMLAKSAGLKRTGKSCRLRWLNYLKPDIKRGNLTPQEQLLILELHSKWGNRWSKIAQHLPGRTDNEIKNYWRTRVQKQARQLNIESGSKRFIDAVKCFWMPRLLQKMEQSNSPSPQSSMTTMMNLGNSGEASMSSMSSSFNINPSMSSSSSPPQRKFIMDDANHFSTMSNPINPSPDSFQFSQPLEISEHPKSPPNVFENNVCSYPIQDNCYLDTNNYGMEGINMDPLSAMDTYDFSQFDFQTAGNGWMLDSMGDSTLWNMDAM

SEQ ID NO: 7483 - DNA, 747 bp, Zea mays
  misc_feature: Ceres CLONE ID no. 1372232
  misc_feature: Ceres CDNA ID no. 40351770
  CDS (85)..(564): REFERENCED BY SEQ ID NO: 7484
atcaactcgcaattccgcattcgttccaactcctgagcactttctcctcgtcccagacaagccaatcgaagccgagatacgaccatggactccaccggcaccggagcagggggtaaggggaagaagggagcggccgggcgcaaggtcggcgggccaaggaagaagtcggtgtcgaggtccgtgaaggccggtctccagttccccgtcggccgcatcgggcgctacttgaagaagggccgctacgcgcagcgtgtcggcaccggcgcccccgtctacctcgccgctgtcctcgaatacctcgccgctgaggttctggagctcgccggtaatgctgccagggacaacaagaagactcgcattattccgcgccacgtgcttctggcgatccggaacgacgaggagcttgggaagctgttgggcggcgtgaccatcgctcacggcggtgtgctccccaatatcaaccctgttctgctgcccaagaagacggcggagaaggcgtccagtggcgggagcaaggaggcaaagtcgcccaagaaggccgccaagtcccctaagaaggcatagactgactgtccggagtgatctgatgtttagcagtaccttgttaccagtatgcggtgatgcgtaggctgcagatgggacgaatgtgcttgtatgtgtatgtgtcctgctgcaagttgtcctttgctatttagaatggaagaagaaatgccttgtttctctgaggttgcaaaaaaaaaaaaaaaa

SEQ ID NO: 7484 - protein, 159 aa, Zea mays
  misc_feature: Ceres CLONE ID no. 1372232
  misc_feature: Ceres CDNA ID no. 40351770
  misc_feature (31)..(106): Pfam Name: Histone PFAM Desc: Core histone H2A/H2B/H3/H4
MDSTGTGAGGKGKKGAAGRKVGGPRKKSVSRSVKAGLQFPVGRIGRYLKKGRYAQRVGTGAPVYLAAVLEYLAAEVLELAGNAARDNKKTRIIPRHVLLAIRNDEELGKLLGGVTIAHGGVLPNINPVLLPKKTAEKASSGGSKEAKSPKKAAKSPKKA

SEQ ID NO: 7485 - DNA, 901 bp, Zea mays
  misc_feature: Ceres CLONE ID no. 1372320
  misc_feature: Ceres CDNA ID no. 36706178
  CDS (83)..(631): REFERENCED BY SEQ ID NO: 7486
aaaaaatcaccaccatctcacttcatataccactccctaggaggacccagcaacacacacagccgagctttgcttaggcaagatgaacaggaagccaggagactgggactgcagggcgtgccagcacctcaacttcagccgccgagacatatgccagcgctgcagcgagccacgtggagttgctgatcgtggcggcggaggaggaggaggcgactacgccagcttcggtggccgcggtggctcctccttcggcggcggctttggcgctgctggctctgacgtccggcctggtgactggtactgctcctgcggcgcgcacaacttcgccagccgctccagctgcttcaagtgctccgcctacaaggaggaggccgctgtgaacagtggcgctggcggctttgacggcgacatgtcacgctcacggggctacggcttcggcagcggtgctgctggtgctggtgctggcgctgcccgtactaccaaccgccccggttggaagtccggagactggatctgcaccagatccggatgcaacgagcacaacttcgccagcaggatggagtgcttcaggtgcaacgcaccgcgggactctggtagcgctgccatgacctacgaaaactacttgcactgaggtgtaggatcgagcaagttaaaaagtctgcagcgccgaagaaagcgacgacaagaggagtcctcatcacgtcgtaacgtaagagagagagagagtagtggatttgcaacaaaaaaaaaaaaagacggccgcgatgctctgttactagctagctagttttgttcaaccacccatgccgtctcttctcttttattagatttggtttggttctcatagccctttaattaccatttgggacctatgtttgctgttctaaaaaaaaaaaaaaaa

SEQ ID NO: 7486 - protein, 182 aa, Zea mays
  misc_feature: Ceres CLONE ID no. 1372320
  misc_feature: Ceres CDNA ID no. 36706178
  misc_feature (4)..(33): Pfam Name: zf PFAM Desc: Zn
  misc_feature: Homolog of GI Number: 48374868 NR Desc: putative zinc finger protein ZF1
  misc_feature: Homolog of GI Number: 50906111 NR Desc: zinc finger transcription factor ZFP30
  misc_feature: Homolog of GI Number: 28849863 NR Desc: zinc finger transcription factor ZFP30
  misc_feature: Homolog of GI Number: 11994340 NR Desc: zinc finger protein
  misc_feature: Homolog of GI Number: 21595771 NR Desc: putative zinc finger protein
  misc_feature: Homolog of GI Number: 5679336 NR Desc: putative zinc finger protein
  misc_feature: Homolog of GI Number: 50948731 NR Desc: putative zinc finger transcription factor ZFP30
  misc_feature: Homolog of GI Number: 42570927 NR Desc: zinc finger
  misc_feature: Homolog of GI Number: 50198944 NR Desc: At2g26695
  misc_feature: Homolog of GI Number: 50725051 NR Desc: RNA
MNRKPGDWDCRACQHLNFSRRDICQRCSEPRGVADRGGGGGGGDYASFGGRGGSSFGGGFGAAGSDVRPGDWYCSCGAHNFASRSSCFKCSAYKEEAAVNSGAGGFDGDMSRSRGYGFGSGAAGAGAGAARTTNRPGWKSGDWICTRSGCNEHNFASRMECFRCNAPRDSGSAAMTYENYLH

SEQ ID NO: 7487 - DNA, 546 bp, Zea mays
  misc_feature: Ceres CLONE ID no. 1372615
  misc_feature: Ceres CDNA ID no. 36706120
  CDS (97)..(336): REFERENCED BY SEQ ID NO: 7488
atctagccatcagatcaaacaatccccaaacgcctccgcctccgcctccctagggttttgctctcggctcgtcggatccagttcgggggatcctccatggcgtcgcgtccgtcgctgaagtcgaagcccaagggcaagggcgggaagaaggccaccgccgacgacgaggacgccaccgcggcggcgaccacggtgcggctcatgaaggagtggaccacgtggacgatgaagaaggcgaaggtggtggcgcactacggcttcatccccctcgtcatcgtcatcggcatgaactccgagcccaagccctccgtgttccagctcctctcccccgtctgatcggatctccccgtcagggcccggatgaggtcggtccgtagtagtttgtagctggtacttcatttgcttacatatgtccgagatcgagttgaagaaggtggatcatgctttctgggcgaatttgaaggatttggtttaataattttgtagtggcggatgtcttctatacatcggatcaaaaatgtcttggttaaaaaaaaaaaaaaaaaa

SEQ ID NO: 7488 - protein, 79 aa, Zea mays; identical to SEQ ID NO: 4764
  misc_feature: Ceres CLONE ID no. 1372615
  misc_feature: Ceres CDNA ID no. 36706120
  misc_feature (37)..(76): Pfam Name: Tom7 PFAM Desc: TOM7 family
  misc_feature: Homolog of GI Number: 34912862 NR Desc: P0006C01.15
  misc_feature: Homolog of GI Number: 50313239 NR Desc: TOM7
  misc_feature: Homolog of GI Number: 3319774 NR Desc: TOM7 protein
  misc_feature: Homolog of GI Number: 13605535 NR Desc: AT5g41690/MBK23_23
  misc_feature: Homolog of GI Number: 15222645 NR Desc: preprotein translocase
  misc_feature: Homolog of GI Number: 7949115 NR Desc: Ser/Arg

SEQ ID NO: 7489 - DNA, 1485 bp, Zea mays
  misc_feature: Ceres CLONE ID no. 1372921
  misc_feature: Ceres CDNA ID no. 25445957
  CDS (146)..(1255): REFERENCED BY SEQ ID NO: 7490
acgcaactcgatttgtgccctctccttttgcaggcaacttttgtgcagccgcccccgcttttccccccgcgaaaacccagccgccgccgccgctgccaccgccgccgccacatccagtcctgccccggggccctgaaccctagccatggcgtcctccatactctccgactgctcctcggcccgcctcctccctctccgccgctcgctcctcccgccgcgggcgccccgcctccgctcctgccccgctctagctacccccaggcgcctactcgtcgccgccaggccccagctgcttccgcgcccgcgccgcatggactcggtccccgcagccaccgcctcttccgccgactcagcaaccgtctcagccgatgcgcctgccaaactgattgacgggaagctcgtggcgaagcaagtgagagaagaaatagctgtccaagtcaccaggatgaaggatgtgatcggcattgtgcccggcctggctgtcatccttgttgggtcgaggaaggattctcagacttacgtgcggaacaagaagaaggcatgcgaagcggtcggtataaagtcgtacgaggtcaacttgcctgaggacagctccgaggaggaggttatcaagcacatagcgagtttcaacagtgacccgtccgtgcatggcatcttggttcagttgcccttaccaaggcatatgaacgatgagaacattctgaatgcggtcagtattgaaaaggatgttgatggctttcatccgctgaacatcggacggcttgcaatgcaaggccgagatccgttctttgtaccttgcaccccgaaaggatgcatggagttgctacaccgacacggagttgaaattaaagggaagagagctgttgtgatcggacgaagcaatattgttggaacgcccgctgcattgttgttgcaaaaagcaaatgcaactgtcagcattgttcattcacaaaccaagaaccctgagcaaataacgagacaggcagatatagtcatcgcagctgttggagtcgccaacttggtcagaggggattggataaagcctggagctactattattgatgttggcatcaatccagttgatgacccagagagcccccgcgggtacaggctcgtcggggacgtctgctacgaggaagcctccaaggtcgccggagccatcacgccggtcccaggcggcgtcgggccgatgacgatcgcgatgcttctgtcgaacacgctcgagtcggctagacggatccacggattcaagtagccgcacccaccgtccgtccagcagagagaagcgaaggcggcgttggccctgccagccaagccagactagtgcaggggtcgtaggaaaaaaaaaataattgaataaattttgacgcagatgagatgggaaatcccagcttgacactttgttagggtattgtgcttgataaaaaatatggcaccaggtgaatctgaggtgccagtgatcttggatgaaaaaaaaaaaaaaaa

SEQ ID NO: 7490 - protein, 369 aa, Zea mays
  misc_feature: Ceres CLONE ID no. 1372921
  misc_feature: Ceres CDNA ID no. 25445957
  misc_feature (199)..(366): Pfam Name: THF_DHG_CYH_C PFAM Desc: Tetrahydrofolate dehydrogenase/cyclohydrolase
  misc_feature (79)..(196): Pfam Name: THF_DHG_CYH PFAM Desc: Tetrahydrofolate dehydrogenase/cyclohydrolase
  misc_feature: Homolog of GI Number: 21553669 NR Desc: 5
  misc_feature: Homolog of GI Number: 28416655 NR Desc: At3g12290
  misc_feature: Homolog of GI Number: 6002383 NR Desc: 5
  misc_feature: Homolog of GI Number: 50899522 NR Desc: methylenetetrahydrofolate dehydrogenase
  misc_feature: Homolog of GI Number: 3786006 NR Desc: methylenetetrahydrofolate dehydrogenase
  misc_feature: Homolog of GI Number: 30687594 NR Desc: tetrahydrofolate dehydrogenase/cyclohydrolase
  misc_feature: Homolog of GI Number: 50949131 NR Desc: similar to Pisum sativum methylenetetrahydrofolate dehydrogenase
  misc_feature: Homolog of GI Number: 7267399 NR Desc: putative tetrahydrofolate synthase
  misc_feature: Homolog of GI Number: 17988855 NR Desc: METHYLENETETRAHYDROFOLATE DEHYDROGENASE  / METHENYLTETRAHYDROFOLATE CYCLOHYDROLASE
  misc_feature: Homolog of GI Number: 45551871 NR Desc: CG4067
MASSILSDCSSARLLPLRRSLLPPRAPRLRSCPALATPRRLLVAARPQLLPRPRRMDSVPAATASSADSATVSADAPAKLIDGKLVAKQVREEIAVQVTRMKDVIGIVPGLAVILVGSRKDSQTYVRNKKKACEAVGIKSYEVNLPEDSSEEEVIKHIASFNSDPSVHGILVQLPLPRHMNDENILNAVSIEKDVDGFHPLNIGRLAMQGRDPFFVPCTPKGCMELLHRHGVEIKGKRAVVIGRSNIVGTPAALLLQKANATVSIVHSQTKNPEQITRQADIVIAAVGVANLVRGDWIKPGATIIDVGINPVDDPESPRGYRLVGDVCYEEASKVAGAITPVPGGVGPMTIAMLLSNTLESARRIHGFK

SEQ ID NO: 7491 - DNA, 495 bp, Zea mays
  misc_feature: Ceres CLONE ID no. 1373759
  misc_feature: Ceres CDNA ID no. 36706121
  CDS (86)..(322): REFERENCED BY SEQ ID NO: 7492
atagcttcgtctgtataccctatatctctatagccaacacacacacaaatactctccattccattccatctcaaaggatagaataatgggcggtctctccaccaagcttttcgtggtcctcctcctgctcgtttgttacaccgggacgcaaggcgggccggtgactatggtgtcggcgaggaagtgcgagtcgcagagcttccgcttcaagggaccttgctcgagggacgccaactgcgcaaacgtctgcctgaccgaaggtttcaccggcggcgtgtgcaagggcctacgccaccgctgcttctgcaccagggactgctagtactgcctcgtctcgcctcgcctcggctcgtgtcctgcgtgtgcatagccgcagcggatcagtaaaacatgcatgcatgcgttaccgaatatttggcagtaccagcaagttaatggattaaataatatgtaatggaacaaagcctgttttgaacgtggaaaaaaaaaaaaaaa

SEQ ID NO: 7492 - protein, 78 aa, Zea mays
  misc_feature: Ceres CLONE ID no. 1373759
  misc_feature: Ceres CDNA ID no. 36706121
  misc_feature (48)..(75): Pfam Name: Defensin_2 PFAM Desc: Arthropod defensin
  misc_feature: Homolog of GI Number: 7939581 NR Desc: thionin like protein
  misc_feature: Homolog of GI Number: 50948925 NR Desc: ESTs AU069800
  misc_feature: Homolog of GI Number: 17066707 NR Desc: defensin protein precursor
  misc_feature: Homolog of GI Number: 16225423 NR Desc: putative gamma
  misc_feature: Homolog of GI Number: 3915102 NR Desc: Gamma
  misc_feature: Homolog of GI Number: 4753797 NR Desc: gamma
  misc_feature: Homolog of GI Number: 61189792 NR Desc: defensin
  misc_feature: Homolog of GI Number: 32400845 NR Desc: proteinase inhibitor Rgpi9
  misc_feature: Homolog of GI Number: 45451621 NR Desc: Kunitz
  misc_feature: Homolog of GI Number: 8099184 NR Desc: defensin SD2
MGGLSTKLFVVLLLLVCYTGTQGGPVTMVSARKCESQSFRFKGPCSRDANCANVCLTEGFTGGVCKGLRHRCFCTRDC

SEQ ID NO: 7493 - DNA, 861 bp, Zea mays
  misc_feature: Ceres CLONE ID no. 1373853
  misc_feature: Ceres CDNA ID no. 36697918
  CDS (78)..(713): REFERENCED BY SEQ ID NO: 7494
atctataaataggacctagacgatcaatcgcaatcgcatatccactattctctaggaagcaagggaatcacatcgccatggcagccaagatgtttgcattgtttgcgctcctagctctttgtgcaaccgccactagtgctacccatatcccagggcacttgtcaccactactgatgccattggctaccatgaacccatggatgcagtactgcatgaagcaacagggggttgccaacttgctagcgtggccgaccctgatgctgcagcaactgttggcctcaccgcttcagccgtgccagatgccaatgatgatgccaggtatgatgccaccgatgacaatgatgccgatgccgaatatgatgccatcgatgatggtgccgactatgatgtcaccaataacgatagctagtatgatgccaccgatgatgatgccaaacatggtttcaccaatgatgatgccgagtatgatgccttcgacgatgacgccgagtatgatgccaccgataatgatgccaagtatgataccaccgatgatgatgccgagcatggtgtcatcaatgataatgccaaacatgatgacagtgccacaatgttactctgattccatctcgcacattatacaacaacaacaattaccattcatgttcagccccacagccgtggcgatctcacccatgtttttacagcagccctttgttggtgctgcattctagatataagcatttgtgttgtacccaataatgaagtcggcatgccatcgcatgcgactcattgtttaggaataaaacaagctaataatgacttttctctcaaaaaaaaaaaaaaaaaaaaaaaaaaaaaaaaagaaaaaaaaaaaaaaaa

SEQ ID NO: 7494 - protein, 211 aa, Zea mays; identical to SEQ ID NO: 6724
  misc_feature: Ceres CLONE ID no. 1373853
  misc_feature: Ceres CDNA ID no. 36697918
  misc_feature (1)..(25): Pfam Name: Zein PFAM Desc: Zein seed storage protein
  misc_feature: Homolog of GI Number: 16305117 NR Desc: 18kD delta zein
  misc_feature: Homolog of GI Number: 15983739 NR Desc: modified zein precursor
  misc_feature: Homolog of GI Number: 984525 NR Desc: DZS18
  misc_feature: Homolog of GI Number: 18087509 NR Desc: 11 kDa methionine
  misc_feature: Homolog of GI Number: 511870 NR Desc: zein protein
  misc_feature: Homolog of GI Number: 57021071 NR Desc: delta kafirin
  misc_feature: Homolog of GI Number: 1084475 NR Desc: 10k zein protein
  misc_feature: Homolog of GI Number: 14906664 NR Desc: seed storage protein delta kafirin
  misc_feature: Homolog of GI Number: 847834 NR Desc: 10 kDa zein
  misc_feature: Homolog of GI Number: 75762993 NR Desc: SpoVID

SEQ ID NO: 7495 - DNA, 762 bp, Zea mays
  misc_feature: Ceres CLONE ID no. 1373969
  misc_feature: Ceres CDNA ID no. 29191228
  CDS (26)..(667): REFERENCED BY SEQ ID NO: 7496
aaaagtcaaaacactctagtcagcaatgtggagcgtcaccggagctttgtgcgtggcggtgcctaccgccgccgcattccgtccaaaaccctttctcgtctcctctaaccttctccccaaccagacgaagaagctccatctctctcctcggcagcctccggctctatcatcacatttctcctcgtcttctttcaaaaccgccgctacttccgttcaacaacagtcagatgataaaaagggggagaagggcactaagtactacttccttgttgcaaacgctaagttcatgctcgacgaggaggagcactttcaggagcaactgtttgaacgtcttagatactacggagagcgtgacaaggaacaagacttctggctcgtcattgagcctaggttcctcgacaagttccccaacatcactcagagactccgtcgccctgctgttgctcttgtttccaccaatggcccctggatcacgtttatgaagttgagattggatcgagttctagctgaatcatttgaagcttcatctctggatgaagccttggcctctagtcctacaactctagagttcgaccagcctggaaactgggtggctccgtacccaaagtatgaacctggatggtgggacaccttcttgcccaaagcaaaacaagaatctctagcatagaactttgtccacctttgtcttagtgctttgtagtttgtattactgagcttcttgtgttatccaaatatgattgcaactcaaaaaaaaaaaaaaaa

SEQ ID NO: 7496 - protein, 213 aa, Zea mays
  misc_feature: Ceres CLONE ID no. 1373969
  misc_feature: Ceres CDNA ID no. 29191228
  misc_feature: Homolog of GI Number: 46359839 NR Desc: At5g58250
MWSVTGALCVAVPTAAAFRPKPFLVSSNLLPNQTKKLHLSPRQPPALSSHFSSSSFKTAATSVQQQSDDKKGEKGTKYYFLVANAKFMLDEEEHFQEQLFERLRYYGERDKEQDFWLVIEPRFLDKFPNITQRLRRPAVALVSTNGPWITFMKLRLDRVLAESFEASSLDEALASSPTTLEFDQPGNWVAPYPKYEPGWWDTFLPKAKQESLA

SEQ ID NO: 7497 - DNA, 737 bp, Zea mays
  misc_feature: Ceres CLONE ID no. 1374027
  misc_feature: Ceres CDNA ID no. 29191229
  CDS (35)..(514): REFERENCED BY SEQ ID NO: 7498
attcttccttcccccaaacctaaagtactgaaacatgtctgacgaagagcaccacttcgagtccagcgacgccggagcttccaaaacctaccctcagcaggctggtaacatccgcaagggtggtcacatcgtcatcaagggccgtccctgcaaggttgttgaggtttcgacttcgaagactgggaagcacggtcacgcaaagtgtcactttgttgctattgacatcttcactgctaagaagcttgaggatattgttccctcttcccacaattgtgatgttccccatgtgaaccgtattgattaccagttgattgatatctctgaggatggctttgttagccttttgaccgacagtggtggcactaaggatgacctcaagcttcccaccgatgacagtctcagcgctctgatgaagagtggattcgaggagggaaaggatgttgtggtgtctgtcatgtcttcaatgggagaggagcagatctgtgccgtcaaggaagttggtggtggcaagtaaaacccattctctgagagaggataatcttattaccagtggtcaatgttataagaacaagaacttgttttttttcctttttctaatttagatcatttgtgttgtgtttctttgttgcaagacaaccattatctattattggttttggattgtttaaaagtttcgtgttttaaaacagggaatgttttcctattagattcttaaaaaaacaaaaaaaaaaaaaaaa

SEQ ID NO: 7498 - protein, 159 aa, Zea mays
  misc_feature: Ceres CLONE ID no. 1374027
  misc_feature: Ceres CDNA ID no. 29191229
  misc_feature (26)..(62): Pfam Name: KOW PFAM Desc: KOW motif
  misc_feature (84)..(153): Pfam Name: eIF PFAM Desc: Eukaryotic initiation factor 5A hypusine
  misc_feature: Homolog of GI Number: 40805177 NR Desc: eukaryotic translation initiation factor
  misc_feature: Homolog of GI Number: 21537051 NR Desc: Initiation factor 5A
  misc_feature: Homolog of GI Number: 9295717 NR Desc: T24P13.1
  misc_feature: Homolog of GI Number: 21592652 NR Desc: initiation factor 5A
  misc_feature: Homolog of GI Number: 16974503 NR Desc: At1g69410/F10D13.8
  misc_feature: Homolog of GI Number: 19887 NR Desc: eukaryotic initiatin factor 5A
  misc_feature: Homolog of GI Number: 12407787 NR Desc: eukaryotic translation initiation factor 5A
  misc_feature: Homolog of GI Number: 12407793 NR Desc: eukaryotic translation initiation factor 5A
  misc_feature: Homolog of GI Number: 44894088 NR Desc: eukaryotic initiation factor 5A2
  misc_feature: Homolog of GI Number: 12407783 NR Desc: eukaryotic translation initiation factor 5A
  misc_feature: Useful for making plants that grow better in shade
  misc_feature: Useful for making plants with increased biomass and foliage
MSDEEHHFESSDAGASKTYPQQAGNIRKGGHIVIKGRPCKVVEVSTSKTGKHGHAKCHFVAIDIFTAKKLEDIVPSSHNCDVPHVNRIDYQLIDISEDGFVSLLTDSGGTKDDLKLPTDDSLSALMKSGFEEGKDVVVSVMSSMGEEQICAVKEVGGGK

SEQ ID NO: 7499 - DNA, 722 bp, Zea mays
  misc_feature: Ceres CLONE ID no. 1374278
  misc_feature: Ceres CDNA ID no. 29191353
  CDS (85)..(543): REFERENCED BY SEQ ID NO: 7500
ccgcaaagacctgacgcagacaaccagtctctcaagcttctctaacggtcttaggggttttatcctttttgctgagatctagtcatggcggatgtggaaccagaggttgctgcggctggagtcccgaagaagaggacattcaagaagtttgccttcaaaggagtcgatctcgatgctcttctcgatatgtctactgatgaccttgtcaagctcttcccttctcgtattcgcagaaggttctctagaggcttgaccaggaagccaatggctctcattaagaagctgcgtaaggcgaaaagggaggcaccacaaggtgagaagccagagccggtgagaacccacctgaggaacatgatcattgtcccagagatgatcggaagcatcattggagtgtacaatggaaagacctttaaccaggtcgagatcaagcccgagatgattggtcactacttggctgagttctccatctcatacaagccggttaagcacggtaggcctggtgttggtgctacccactcctcccatttcattcccctcaagtgaagagcttgttgttaaacttggggaatgtgttccaatctttatatggcctttctgttgttgttttatgatgaaactttagatactttatcaactctagctcatgcattttcatattatgtggccaggatcttaaaatcaaatgttattgagtttcgttatgtccaaaaaaaaaaaaaaaa

SEQ ID NO: 7500 - protein, 152 aa, Zea mays
  misc_feature: Ceres CLONE ID no. 1374278
  misc_feature: Ceres CDNA ID no. 29191353
  misc_feature (54)..(135): Pfam Name: Ribosomal_S19 PFAM Desc: Ribosomal protein S19
  misc_feature: Homolog of GI Number: 20147171 NR Desc: At1g04270/F19P19_29
  misc_feature: Homolog of GI Number: 20465567 NR Desc: putative ribosomal protein S15
  misc_feature: Homolog of GI Number: 1107485 NR Desc: 40S ribosomal protein S15
  misc_feature: Homolog of GI Number: 79316582 NR Desc: RPS15
  misc_feature: Homolog of GI Number: 33589676 NR Desc: At5g09500
  misc_feature: Homolog of GI Number: 50919151 NR Desc: putative 40S ribosomal protein S15
  misc_feature: Homolog of GI Number: 50934735 NR Desc: putative 40S ribosomal protein S15
  misc_feature: Homolog of GI Number: 16930761 NR Desc: ribosomal S15 protein
  misc_feature: Homolog of GI Number: 21592572 NR Desc: ribosomal protein S15
  misc_feature: Homolog of GI Number: 10178203 NR Desc: 40S ribosomal protein S15
MADVEPEVAAAGVPKKRTFKKFAFKGVDLDALLDMSTDDLVKLFPSRIRRRFSRGLTRKPMALIKKLRKAKREAPQGEKPEPVRTHLRNMIIVPEMIGSIIGVYNGKTFNQVEIKPEMIGHYLAEFSISYKPVKHGRPGVGATHSSHFIPLK

SEQ ID NO: 7501 - DNA, 826 bp, Zea mays
  misc_feature: Ceres CLONE ID no. 1374608
  misc_feature: Ceres CDNA ID no. 25401493
  CDS (55)..(663): REFERENCED BY SEQ ID NO: 7502
acgaaagttcatctctctctctctctctctctaaacttcgatacacaaatcaccatgactaccgaagagaaagagatcctcgccgccaaattggaagaacagaagatcgatcttgataagcctgaagttgaggacgctgatgacaacgatgaggaagactccgatgatgacgatgatgatgcggagggacaagatggagaggcaggaggcaagtcgaaacaaagcagaagtgagaagaagagtcgcaaagccatgctcaagctcgggatgaaacccatcactggtgtcagccgtgtcaccgtcaaaaagagcaagaacataatgttcgtcatatctaaacccgatgtcttcaagagcccagcatcagacacgtacgtcatctttggagaggccaagatagaggatttgagctcgcagatgcagtcgcaggccgcagagcagttcaaggctccggacctcagcaacgtgatcaagggtgagtcttcgtcgagcgctgccgcagtggtgcaggatgacgatgaggatgttgacgaggatggtgttgagccaaaagacattgagttggtgatgacccaagctggagtgactaggccaaaagctgtgaaggctctcaagtctgcggatggagatattgtcactgctatcatggagcttaccacctaaaccaaaatcttttcaacttagatgtggttttaacttggagtcatatgtcccctgagattttcaaaaggtttcgcaagtttttgtttcccatgtgttcttgaagtgttttcagtgttgtatcagtgattcaagtatacagtttggtctgaaaaaaaaaaaaaaa

SEQ ID NO: 7502 - protein, 202 aa, Zea mays
  misc_feature: Ceres CLONE ID no. 1374608
  misc_feature: Ceres CDNA ID no. 25401493
  misc_feature (163)..(200): Pfam Name: UBA PFAM Desc: UBA/TS
  misc_feature (59)..(117): Pfam Name: NAC PFAM Desc: NAC domain
  misc_feature: Homolog of GI Number: 48310641 NR Desc: At5g13850
  misc_feature: Homolog of GI Number: 34907258 NR Desc: putative nascent polypeptide associated complex alpha chain
  misc_feature: Homolog of GI Number: 6752882 NR Desc: nascent polypeptide associated complex alpha chain
  misc_feature: Homolog of GI Number: 50931251 NR Desc: putative nascent polypeptide associated complex alpha chain
  misc_feature: Homolog of GI Number: 20465565 NR Desc: putative alpha NAC protein
  misc_feature: Homolog of GI Number: 34902238 NR Desc: Putative nascent polypeptide associated complex alpha chain
  misc_feature: Homolog of GI Number: 18377570 NR Desc: alpha NAC
  misc_feature: Homolog of GI Number: 6561948 NR Desc: alpha NAC
  misc_feature: Homolog of GI Number: 56784713 NR Desc: alpha NAC
  misc_feature: Homolog of GI Number: 34911462 NR Desc: putative nascent polypeptide associated complex alpha chain
MTTEEKEILAAKLEEQKIDLDKPEVEDADDNDEEDSDDDDDDAEGQDGEAGGKSKQSRSEKKSRKAMLKLGMKPITGVSRVTVKKSKNIMFVISKPDVFKSPASDTYVIFGEAKIEDLSSQMQSQAAEQFKAPDLSNVIKGESSSSAAAVVQDDDEDVDEDGVEPKDIELVMTQAGVTRPKAVKALKSADGDIVTAIMELTT

SEQ ID NO: 7503 - DNA, 636 bp, Zea mays
  misc_feature: Ceres CLONE ID no. 1374775
  misc_feature: Ceres CDNA ID no. 25445693
  CDS (81)..(440): REFERENCED BY SEQ ID NO: 7504
atcaagattctcaattctacccgacgcttcttcagattctctttgtcatcggtttcaaaacaatcggagagatcaaatcaatggcttcgctcgattccgacgtcaccatggttcccgcaggagaatcctcaagcagcgtcgccccatcgtcgtcgtccaccaagaaggcgaagagattcgaagttaagaagtggagcgccgtggctctctgggcttgggatatcgttgttgataattgcgctatctgcagaaaccacatcatggatctgtgtattgaatgtcaggctaatcaggccagtgctacgagtgaggagtgcactgttgcttggggagtttgcaaccacgccttccactttcactgcatcagcagatggctaaagactcgtcaagtttgtccattggataacagtgagtgggagttccagaagtatggtcactaaaccaactaatcgtaccggcaaatcatttggttggcgcatatgagatgctgatattgctcgaagttctttgtttttttttttctggttgtcgcaaagttgtcaaaacagagattactctgttgatattactcttcactgaacctattatgttttgctttgagtgatatcttcaatttcaagaaaaaaaaaaaaaaaa

SEQ ID NO: 7504 - protein, 119 aa, Zea mays
  misc_feature: Ceres CLONE ID no. 1374775
  misc_feature: Ceres CDNA ID no. 25445693
  misc_feature (86)..(107): Pfam Name: zf PFAM Desc: Zinc finger
  misc_feature: Homolog of GI Number: 21592528 NR Desc: ring
  misc_feature: Homolog of GI Number: 83701143 NR Desc: RING
  misc_feature: Homolog of GI Number: 31747517 NR Desc: ring box protein
  misc_feature: Homolog of GI Number: 7543891 NR Desc: ring
  misc_feature: Homolog of GI Number: 55769719 NR Desc: putative ring
  misc_feature: Homolog of GI Number: 50911983 NR Desc: putative RING box protein 1
  misc_feature: Homolog of GI Number: 48095046 NR Desc: similar to ENSANGP00000010437
  misc_feature: Homolog of GI Number: 58385635 NR Desc: ENSANGP00000010437
  misc_feature: Homolog of GI Number: 18543187 NR Desc: CG16982
  misc_feature: Homolog of GI Number: 19067884 NR Desc: hyperosmotic protein 21
MASLDSDVTMVPAGESSSSVAPSSSSTKKAKRFEVKKWSAVALWAWDIVVDNCAICRNHIMDLCIECQANQASATSEECTVAWGVCNHAFHFHCISRWLKTRQVCPLDNSEWEFQKYGH

SEQ ID NO: 7505 - DNA, 1034 bp, Zea mays
  misc_feature: Ceres CLONE ID no. 1374962
  misc_feature: Ceres CDNA ID no. 25445958
  CDS (64)..(822): REFERENCED BY SEQ ID NO: 7506
atttagtggtgttcatctgacacacacacatctctctctatctctcatcacgccgccgcagcaatgaccgtgggagtattagctttacaaggctctttcaacgagcacatcgcggctctgcggcggctcggcgtccaaggaatcgagattaggaaggcggaacagctactcaccgtttcatctctcataatccctggcggcgagagcaccaccatggccaaactcgccgagtaccacaacctgtttccggctctacgtgagtttgtcaagacggggaaacctgtatgggggacatgcgctggtcttatcttcttggctgacagagccgttggtcagaaagagggaggtcaagaactagtaggtggccttgactgcaccgtgcataggaacttctttggcagccagattcaaagttttgaagctgatatctcagtaccactactaacatctaaagaaggtgggccggagacataccgaggagtcttcatacgtgctccagctgttctcgacgttggccctgatgtcgaagtcttagcgcattatcccgtcccatcaaacaaggtcttgtattcaagctccactgtccaaatccaagaggaagatgctcttccagagacgaacgtcattgttgctgtaaagcaaagaaacttgttagcaactgcgtttcatcccgagttaaccgcagacacgcgttggcacagttatttcatgaagatggcgaaagagatggaacaaggagcttcttcaagcagtagtggaactattgtttctgttggagaaaccagcgagcaagctaagcctgatattcctatatatcagtaactaaaattagagagaagacactcacttctcttgaaataaaaaaaaaactatagaaaagtgtcgggttcttttgatgttttggaaagaaaatgtcaatctagttttcatttatcacacaagaaaacttcacgagtccaatacttgttttcttgacacaactttgtataccgttgaatcaaaccggtttacttggtccaaaaaaaaaaaaaaaa

SEQ ID NO: 7506 - protein, 252 aa, Zea mays
  misc_feature: Ceres CLONE ID no. 1374962
  misc_feature: Ceres CDNA ID no. 25445958
  misc_feature (32)..(167): Pfam Name: GATase_3 PFAM Desc: CobB/CobQ
  misc_feature: Homolog of GI Number: 21593486 NR Desc: imidazoleglycerol
  misc_feature: Homolog of GI Number: 9757756 NR Desc: amidotransferase hisH
  misc_feature: Homolog of GI Number: 46399273 NR Desc: putative pyridoxine biosynthesis protein
  misc_feature: Homolog of GI Number: 50905013 NR Desc: putative amidotransferase
  misc_feature: Homolog of GI Number: 57234604 NR Desc: SNO glutamine amidotransferase family
  misc_feature: Homolog of GI Number: 9954418 NR Desc: pyridoxine synthesis protein PDX2
  misc_feature: Homolog of GI Number: 66852830 NR Desc: pyridoxine
  misc_feature: Homolog of GI Number: 56962232 NR Desc: glutamine amidotransferase
  misc_feature: Homolog of GI Number: 67987932 NR Desc: SNO glutamine amidotransferase:SNO glutamine amidotransferase
  misc_feature: Homolog of GI Number: 50954744 NR Desc: amidotransferase
MTVGVLALQGSFNEHIAALRRLGVQGIEIRKAEQLLTVSSLIIPGGESTTMAKLAEYHNLFPALREFVKTGKPVWGTCAGLIFLADRAVGQKEGGQELVGGLDCTVHRNFFGSQIQSFEADISVPLLTSKEGGPETYRGVFIRAPAVLDVGPDVEVLAHYPVPSNKVLYSSSTVQIQEEDALPETNVIVAVKQRNLLATAFHPELTADTRWHSYFMKMAKEMEQGASSSSSGTIVSVGETSEQAKPDIPIYQ

SEQ ID NO: 7507 - DNA, 1100 bp, Zea mays
  misc_feature: Ceres CLONE ID no. 1375081
  misc_feature: Ceres CDNA ID no. 25891847
  CDS (65)..(847): REFERENCED BY SEQ ID NO: 7508
acatttcattttcattcatcctctcgcttctgacctgacctgacctaaatcatcatcatcgaaaatggtttccgcgcgtgaggagttcgtgtacatggccaagctcgccgagcaagccgagcgctacgaggagatggtggagttcatggagaaagtgtccgcctccgtcgacggcgacgagctcaccgtcgaggagcgtaacctcctctccgtcgcctacaagaacgtgatcggcgcgcggcgcgcctcgtggcgcatcatatcgtcgatcgagcagaaggaggagagccgcggcaacgacgaccacgtggcggcgatccgcgattacagggggaagatcgagacggagctcacggggatctgcgaggggatactgaagctgctggactcgaggctggtccccgccgcagcgtcgggggactcgaaggtgttttatctgaagatgaagggggattaccataggtacttggctgagtttaagaccggtcaagagaggaaagacgccgctgagaatactctctccgcttacaaatctgctcaggatattgcgaatgcagagctcgctccaactcacccaatccgtctaggtctggcattgaacttctctgtgttctactacgagatcttaaactctcctgatcgtgcctgcagcctcgctaaacaggcctttgatgacgcgattgcggagttggacactctaggtgaagagtcgtacaaagacagcaccttgatcatgcagcttctccgtgacaacctcactctctggacatccgacatgcaggatgatgctgcggatgaggagatcaaggaagagtcggctccaaagccagctgaggaacagcagtaatcaaatctttttgactgaactgctgttttctaggggtttggaacttttattcattcatcgtaatccctagcaagttggaccatcagtcatcatcttttatctctttgcctgattttctccttttttatttgttgttgttctatctttttttttttgtcttctgggatatgtctatttcaatgtctgcaatcgaaccttgctttgtgtgtttctattcaatttgaaaggctctgtcctaaaaaaaaaaaaaaaa

SEQ ID NO: 7508 - protein, 260 aa, Zea mays
  misc_feature: Ceres CLONE ID no. 1375081
  misc_feature: Ceres CDNA ID no. 25891847
  misc_feature: Useful for making plants with modulated growth and phenotype characteristics
  misc_feature: null
  misc_feature: The sequence is a functional homolog of  SEQ ID NO 2350 in the  10/374,780 US patent application
  misc_feature: The sequence is a functional homolog of  SEQ ID NO 342 in the  10/412,699 US patent application
  misc_feature: The sequence is a functional homolog of  SEQ ID NO 344 in the  10/412,699 US patent application
  misc_feature: The sequence is a functional homolog of  SEQ ID NO 782 in the  11/479,226 US patent application
  misc_feature: The sequence is a functional homolog of  SEQ ID NO 786 in the  11/479,226 US patent application
  misc_feature: The sequence is a functional homolog of  SEQ ID NO 789 in the  11/479,226 US patent application
  misc_feature: The sequence is a functional homolog of  SEQ ID NO 790 in the  10/225,066 US patent application
  misc_feature: The sequence is a functional homolog of  SEQ ID NO 797 in the  11/479,226 US patent application
  misc_feature: The sequence is a functional homolog of  SEQ ID NO 801 in the  11/479,226 US patent application
  misc_feature: The sequence is a functional homolog of  SEQ ID NO 805 in the  11/479,226 US patent application
  misc_feature: Useful for making plants with modulated drought sensitivity
  misc_feature (5)..(242): Pfam Name: 14 PFAM Desc: 14
  misc_feature: Homolog of GI Number: 13447104 NR Desc: GF14 omega
  misc_feature: Homolog of GI Number: 21618266 NR Desc: 14
  misc_feature: Homolog of GI Number: 487791 NR Desc: GF14omega isoform
  misc_feature: Homolog of GI Number: 21536593 NR Desc: 14
  misc_feature: Homolog of GI Number: 47558857 NR Desc: 14
  misc_feature: Homolog of GI Number: 16974511 NR Desc: At1g35160/T32G9_30
  misc_feature: Homolog of GI Number: 20340229 NR Desc: 14
  misc_feature: Homolog of GI Number: 8099063 NR Desc: 14
  misc_feature: Homolog of GI Number: 21554273 NR Desc: 14
  misc_feature: Homolog of GI Number: 1361987 NR Desc: 14
MVSAREEFVYMAKLAEQAERYEEMVEFMEKVSASVDGDELTVEERNLLSVAYKNVIGARRASWRIISSIEQKEESRGNDDHVAAIRDYRGKIETELTGICEGILKLLDSRLVPAAASGDSKVFYLKMKGDYHRYLAEFKTGQERKDAAENTLSAYKSAQDIANAELAPTHPIRLGLALNFSVFYYEILNSPDRACSLAKQAFDDAIAELDTLGEESYKDSTLIMQLLRDNLTLWTSDMQDDAADEEIKEESAPKPAEEQQ

SEQ ID NO: 7509 - DNA, 892 bp, Zea mays
  misc_feature: Ceres CLONE ID no. 1375386
  misc_feature: Ceres CDNA ID no. 40351771
  CDS (85)..(699): REFERENCED BY SEQ ID NO: 7510
agactccagtctcctctagccgtctcgcgcgcttcaccttccccaccccgccgccgccatcgcacgcccgcagccgcatccgctatgggtgcgtacaagtacgtctcggagctatggcggaggaagcagtccgatgtgatgcggttcgtgcagcgcgtgcgctgctgggagtacaggcagcagccggccatcgtccgcctcacaaggcccactcgtcctgacaaggcgcgccgcctcggctacaaggccaagcagggttatgttgtttaccgtgtccgtgttaggcgtggtggcaggaagaggcctgtgcctaaaggtattgtctatggcaagccaaagcaccagggtatcacccagctcaagttccagaggaacaagaggtctgttgctgaggagagggctggacgaaagcttggtggactcagggttctcaactcctactgggtgaatgaggatagcacctacaagtactttgagatcattcttgttgatgtggcccacactaccatccgcaatgatccaaggatcaactggctatgcaatcctgtgcacaagcaccgggagctccgtggtctcacctccgcaggcaagaagttccgtggcctgcgtggcaagggccacactcaccacaagaataggccgtcgaggagggccacctggaagcgcaaccagaccctttccctccgccgctaccgttgagcacatacaacttgatgttctgctactgtggaacctacctcatgcatgctctgatagtatttggtatttttgttgcatcgttaaattttgctacccatgttacaagctccttgaactctgttatcagtgtaccatggagaaattgaagcgaactatgtttgtggttatcctgtgttgaaaaaaaaaaaaaaaa

SEQ ID NO: 7510 - protein, 204 aa, Zea mays
  misc_feature: Ceres CLONE ID no. 1375386
  misc_feature: Ceres CDNA ID no. 40351771
  misc_feature (2)..(193): Pfam Name: Ribosomal_L15e PFAM Desc: Ribosomal L15
MGAYKYVSELWRRKQSDVMRFVQRVRCWEYRQQPAIVRLTRPTRPDKARRLGYKAKQGYVVYRVRVRRGGRKRPVPKGIVYGKPKHQGITQLKFQRNKRSVAEERAGRKLGGLRVLNSYWVNEDSTYKYFEIILVDVAHTTIRNDPRINWLCNPVHKHRELRGLTSAGKKFRGLRGKGHTHHKNRPSRRATWKRNQTLSLRRYR

SEQ ID NO: 7511 - DNA, 969 bp, Zea mays
  misc_feature: Ceres CLONE ID no. 1375940
  misc_feature: Ceres CDNA ID no. 25446105
  CDS (3)..(968): REFERENCED BY SEQ ID NO: 7512
atcgttcatgtgagtgtgaccaccggcacgtcccctgctgtattttaaggccacctaccttaaccaccgtgctgcaccacctccactcccccgtcactccggcgagcgagcaggagcagaccgatggcgtctcccgctgccgtcaagaagatggtcaggtacgaaccagggtacgccttcgaggaactgaacccggttcagtggcggtgcagcggcacgcccagggtcctgataccagtggccaacggcagcgaggagatggaggtgctcgtgaccgtcgacgtgctgcgccgggccaaggcggacgtcgtggtcgcgtcggccgaggaggtcgtcgtcgcgcgccacggcaccaggatcgtcgccgacgcgctgctgcaggacgccgccggccagcagttcgacctcatcgtcgtaccgggtggcatgccgggcgcgaagacgacgctggcagacaaggtggagctcgtggcgctgctgaaggagcatgcggcggcgggcagggcgtacggcgccattggcgccgccacggcgcaggtgctggagccgcacggcctcatccggggcagcatgaaggcgacgacgtgcgcgtccagggcggaccggcccagcgagtgcgggagcagggtggtggtggacgggaacctggccacgagcgggagcaccgggacggccatggagttcgcgctggccgtcgtggagaagctgctcggccccgaggcggcgcgggaggtggcggaagcgctgctcttcgtctgaccgtcaccggaccaggcaccacgtacggaatggagctgctgggccctgtcgcgcgtgtcgtcgaccgtggtgtccttcctcgcttgataacgctgttgtttgttttggcttttcgcgccttctggccaccaaaagctgctgcggactgtcaaacactcagcttttcagccagcttctataaaattcgtttggataaaaaaaaaaaaaaaa

SEQ ID NO: 7512 - protein, 166 aa, Zea mays
  misc_feature: Ceres CLONE ID no. 1375940
  misc_feature: Ceres CDNA ID no. 25446105
  misc_feature (14)..(151): Pfam Name: DJ PFAM Desc: DJ
  misc_feature: Homolog of GI Number: 56201611 NR Desc: putative 4 biosynthesis enzyme
  misc_feature: Homolog of GI Number: 34904026 NR Desc: P0665D10.11
  misc_feature: Homolog of GI Number: 56201615 NR Desc: putative 4 biosynthesis enzyme       [Oryza sativa
  misc_feature: Homolog of GI Number: 53791962 NR Desc: putative 4 biosynthesis enzyme [Oryza sativa
  misc_feature: Homolog of GI Number: 34904020 NR Desc: P0665D10.8
  misc_feature: Homolog of GI Number: 21536528 NR Desc: 4 putative [Arabidopsis thaliana]
  misc_feature: Homolog of GI Number: 33149230 NR Desc: ThiJ
  misc_feature: Homolog of GI Number: 13194800 NR Desc: putative 4 protein  [Arabidopsis thaliana]
  misc_feature: Homolog of GI Number: 53769716 NR Desc: COG0454: Histone acetyltransferase HPA2 and related acetyltransferases
  misc_feature: Homolog of GI Number: 34911208 NR Desc: P0019E03.20
MEVLVTVDVLRRAKADVVVASAEEVVVARHGTRIVADALLQDAAGQQFDLIVVPGGMPGAKTTLADKVELVALLKEHAAAGRAYGAIGAATAQVLEPHGLIRGSMKATTCASRADRPSECGSRVVVDGNLATSGSTGTAMEFALAVVEKLLGPEAAREVAEALLFV

SEQ ID NO: 7513 - DNA, 996 bp, Zea mays
  misc_feature: Ceres CLONE ID no. 1376191
  misc_feature: Ceres CDNA ID no. 25891035
  CDS (61)..(843): REFERENCED BY SEQ ID NO: 7514
aagaaaagcatcagtctcgtctcttctacggcgtttcagagaatctaagagagatcatcgatgggtcttctctccaacagaatcgatagatcaagtttgaaacctggagatcacatctactcgtggaggactgcttacatctatgcccatcacggtatatatgttggagatgatagagtcatccatttcacaagacgaggccaagaagttggaaccgggaccgttctcgatctcatactcgtaagctcaggcccatcacgagcccacacgcactgtccaacctgcgttccgcccaacgaaggccacggcgtcgtttcctcgtgcctgaactgtttcctagccggtggcgtcctgtaccgcttcgagtactccgtcaacgccgctcacttcctcgccaaagcccgaggaggaacctgcacgctcgccgtctccgaccctaacgagataactgtccaccgtgccaaccacctccttcggaacgggttcgggtgctacgacgttttcaagaacaactgcgaggactttgcgatctattgcaagaccgggttgcttgttctcgaaggaagaatgacgatggggcagagcggtcaggctgtttcgattatcggtgggcccatcgctgcggttttgtccacaccgatgaggcttgtgacgacgaatatatatgggatggcggcgacggcggttagcgtgtactgtgcgagtaggtacgctactgatatcggtatgagagctgacgtggcgaaagttgaagtggaggatctcacgagaaggctctctgtagggctgttccaagtggttgagcctccagtggcagccgttgctttaccaaccacaagctgatagataaagcttaagagcttcatctacttcttgaatgtttcagtgattgtatcatgtgttgtttccagtttacgtttcgtatccaaaacattcgaataaccacactctgcttgtatacttatacgtttctctacactaaaaaaaaaaaaaaaa

SEQ ID NO: 7514 - protein, 260 aa, Zea mays
  misc_feature: Ceres CLONE ID no. 1376191
  misc_feature: Ceres CDNA ID no. 25891035
  misc_feature (110)..(167): Pfam Name: NC PFAM Desc: NC domain
  misc_feature: Homolog of GI Number: 15809734 NR Desc: AT5g06370/MHF15_11
  misc_feature: Homolog of GI Number: 18378812 NR Desc: NC domain
MGLLSNRIDRSSLKPGDHIYSWRTAYIYAHHGIYVGDDRVIHFTRRGQEVGTGTVLDLILVSSGPSRAHTHCPTCVPPNEGHGVVSSCLNCFLAGGVLYRFEYSVNAAHFLAKARGGTCTLAVSDPNEITVHRANHLLRNGFGCYDVFKNNCEDFAIYCKTGLLVLEGRMTMGQSGQAVSIIGGPIAAVLSTPMRLVTTNIYGMAATAVSVYCASRYATDIGMRADVAKVEVEDLTRRLSVGLFQVVEPPVAAVALPTTS

SEQ ID NO: 7515 - DNA, 931 bp, Zea mays
  misc_feature: Ceres CLONE ID no. 1376280
  misc_feature: Ceres CDNA ID no. 29191230
  CDS (15)..(689): REFERENCED BY SEQ ID NO: 7516
attttagtgaacatatggcgaatttgggagaagagaagaaggggaagctgaagctctactcttactggagaagctcctgcgctcatcgtgtccgtatcgccctctctcttaaagggcttgaatatgagtatatacctgtgaatctgctcaagggtgaacaatccgatccagatttcaagaagatcaatccaatgggcactgtacctgctcttgttgatggagatgttgtcatatccgattctcttgctatcataatgtatctggatgagaagtatcctgagccaccgctcttacctcctgacctccacaaacgtgctgtcaatttccaggcagcgagtattgtcttgtctggcatacagcctcatcaaaacctgggtgtcattaaattcattgaggaaaagataaattcggaggagaaaacggcttgggttactaatgctatcacaaaaggattcacagctctcgagaaactgttggtgagctgcgctggaaaacacgcaactggtgatgaagtttacttggctgatctctttctagcaccacagatctacggagctatcaacaggttccagattaacatggaaccgtacccgactcttgcaaagtgttacgagtcatacaaggatcttcctgcgtttcaaaacgcagccccagagaagcagccagatgctcctgcttccaccagctgatcctgtgaactggtagtaatctattttcagcttaataaaacttcacaggcaacagcagcaacaataatgataaagaattaactttgtcctcgtatatagatgtatcatatgaaccagtttacttgtaagttttactctacttgtattatacaataaagactaggtgactttcccgtgcgcatgcacggataaaaatatttaaaaataaatatattataaattaattaaaaaaaaaaaaaaaa

SEQ ID NO: 7516 - protein, 224 aa, Zea mays
  misc_feature: Ceres CLONE ID no. 1376280
  misc_feature: Ceres CDNA ID no. 29191230
  misc_feature: The plant produces a reduced number of seeds.
  misc_feature: Useful for biocontainment applications
  misc_feature (12)..(85): Pfam Name: GST_N PFAM Desc: Glutathione S
  misc_feature: Homolog of GI Number: 28932696 NR Desc: glutathione S
  misc_feature: Homolog of GI Number: 28932698 NR Desc: glutathione S
  misc_feature: Homolog of GI Number: 28932692 NR Desc: glutathione S
  misc_feature: Homolog of GI Number: 42570653 NR Desc: glutathione S
  misc_feature: Homolog of GI Number: 3894170 NR Desc: putative glutathione S
  misc_feature: Homolog of GI Number: 42570267 NR Desc: glutathione S
  misc_feature: Homolog of GI Number: 29420155 NR Desc: glutathione S
  misc_feature: Homolog of GI Number: 24061762 NR Desc: glutathione S
  misc_feature: Homolog of GI Number: 8099671 NR Desc: glutathione S
  misc_feature: Homolog of GI Number: 50909573 NR Desc: putative glutathione s
  misc_feature: Useful for delaying flowering time
  misc_feature: Useful for making ornamental plants with modified leaves
  misc_feature: Useful for making plants with increased biomass
  misc_feature: Useful for making plants with increased biomass and foliage
  misc_feature: Useful for sterility
MANLGEEKKGKLKLYSYWRSSCAHRVRIALSLKGLEYEYIPVNLLKGEQSDPDFKKINPMGTVPALVDGDVVISDSLAIIMYLDEKYPEPPLLPPDLHKRAVNFQAASIVLSGIQPHQNLGVIKFIEEKINSEEKTAWVTNAITKGFTALEKLLVSCAGKHATGDEVYLADLFLAPQIYGAINRFQINMEPYPTLAKCYESYKDLPAFQNAAPEKQPDAPASTS

SEQ ID NO: 7517 - DNA, 916 bp, Zea mays
  misc_feature: Ceres CLONE ID no. 1376614
  misc_feature: Ceres CDNA ID no. 36707059
  CDS (108)..(638): REFERENCED BY SEQ ID NO: 7518
atccccaatatatccccactcttcgcctcctttctggagcagctagggttccgtcctcgatccgatccgccgagtgcacaccacctttccccactccgatcgaatcgatggccgccgagggcgagaagaagatgataaccctcaaaagctccgatggcgaggagttcgaggtggaagaggcggtggcgatggagtcgcagaccatccgccacatgatcgaggatgactgcgccgacaacggcatccctcttcctaacgttaactccaagatcctatccaaggtaatcgagtactgcaacaagcacgtacatgccgccgccgccgccgccgccgcctcgaaggccggttccgacgacgtgggtgccgcctccgccaacagcaccgccgcctccggtgaggacctcaagaactgggatgcggacttcgtcaaggtcgaccaggccacgcttttcgacctcatcttggctgcaaactatctgaacatcaagggtctgctcgacctgacctgtcagactgttgctgacatgatcaagggcaagacaccagaagagattcgcaagaccttcaacatcaagaatgacttcacccctgaggaggaagaggagatccgcagggagaaccagtgggccttcgagtaaggaagtgctggatctattgatgcctaagtttcgtggtgtctactactatgtctactttatgttgtcctaatggttgtaagtattttgggagtcactttgcttgcgaatgcctcgcgtaagacttatgtggtcaatggtcggttattaacttattaccatgaaagcacttcgtctgctgccctaagaggtttagtcccatttgcattataaccaattcaatccttgtggatgatttgtgtgattccatcgtgaatctcatggtaaaaaaaaaaaaaaaa

SEQ ID NO: 7518 - protein, 176 aa, Zea mays
  misc_feature: Ceres CLONE ID no. 1376614
  misc_feature: Ceres CDNA ID no. 36707059
  misc_feature (8)..(68): Pfam Name: Skp1_POZ PFAM Desc: Skp1 family
  misc_feature (99)..(176): Pfam Name: Skp1 PFAM Desc: Skp1 family
  misc_feature: Homolog of GI Number: 47054182 NR Desc: skp1 protein
  misc_feature: Homolog of GI Number: 77550711 NR Desc: Skp1 family
  misc_feature: Homolog of GI Number: 7378764 NR Desc: putative kinetochore protein
  misc_feature: Homolog of GI Number: 40644754 NR Desc: putative SKP1 protein
  misc_feature: Homolog of GI Number: 32330695 NR Desc: SKP1/ASK1
  misc_feature: Homolog of GI Number: 28466911 NR Desc: At5g42190
  misc_feature: Homolog of GI Number: 3719211 NR Desc: UIP2
  misc_feature: Homolog of GI Number: 52076056 NR Desc: putative UIP2
  misc_feature: Homolog of GI Number: 4959710 NR Desc: Skp1
  misc_feature: Homolog of GI Number: 21281127 NR Desc: putative SKP1/ASK1 protein At1
MAAEGEKKMITLKSSDGEEFEVEEAVAMESQTIRHMIEDDCADNGIPLPNVNSKILSKVIEYCNKHVHAAAAAAAASKAGSDDVGAASANSTAASGEDLKNWDADFVKVDQATLFDLILAANYLNIKGLLDLTCQTVADMIKGKTPEEIRKTFNIKNDFTPEEEEEIRRENQWAFE

SEQ ID NO: 7519 - DNA, 932 bp, Zea mays
  misc_feature: Ceres CLONE ID no. 1376913
  misc_feature: Ceres CDNA ID no. 25891077
  CDS (57)..(806): REFERENCED BY SEQ ID NO: 7520
gattctagggttttcacactttcacagcaatcggcgagaacttcaacaaccacaaaatggcgacgcaaatcagcaagaagagaaagtttgtagctgacggtgtgttctacgctgagctgaacgaggtcttaaccagagagcttgcggaagatggttactctggtgtggaggttagggttactccaatgaggactgagatcatcatcagagccacacgtacccaaaatgttctcggtgagaagggaaggaggatcagagagttgacatctcttgtgcagaagagattcaggttccctcaagacagtgttgagctttacgctgagaaggttgccaacagaggtctctgcgccattgctcaggccgagtctctccgttacaagctcctcggtggtcttgctgtccgcagggcttgctatggtgtcttgagattcgtcatggagagtggtgctaagggttgtgaggtgattgtgagtggaaagctccgtgcagcacgtgccaagtccatgaaattcaaggacggttacatggtttcctctggtcaaccaaccaaggattacatcgactctgctgtcagacatgttcttcttagacagggtgtgcttggaatcaaggtgaaggtcatgcttgactgggaccctaagggaataaatggaccaaagacaccattgcctgatgttgtcatcatccatgctcccaaggaggaagacgtcaactctgcacctgctcaggtttctgctccggctgctcttgcaccagaagctcccctcactgccgtagactaccctgagatgatcccagtcgcctagaagaaactcttttttttactagtactctgtgatttcgcccttataacttttctgctttttgacagtttatagtttatcgttatctcatcttcgaatcagacaccgttctccaaaaaaaaaaaaaaa

SEQ ID NO: 7520 - protein, 249 aa, Zea mays
  misc_feature: Ceres CLONE ID no. 1376913
  misc_feature: Ceres CDNA ID no. 25891077
  misc_feature: There is no branching.
  misc_feature: Useful for making plants with modulated biomass
  misc_feature (104)..(188): Pfam Name: Ribosomal_S3_C PFAM Desc: Ribosomal protein S3
  misc_feature (45)..(102): Pfam Name: KH_2 PFAM Desc: KH domain
  misc_feature: Homolog of GI Number: 16323404 NR Desc: putative ribosomal protein S3a homolog
  misc_feature: Homolog of GI Number: 20258907 NR Desc: putative 40S ribosomal protein
  misc_feature: Homolog of GI Number: 20466075 NR Desc: AT5g35530/MOK9_14
  misc_feature: Homolog of GI Number: 38093738 NR Desc: putative ribosomal protein
  misc_feature: Homolog of GI Number: 50939157 NR Desc: putative 40S ribosomal protein
  misc_feature: Homolog of GI Number: 22204124 NR Desc: putative 40S ribosomal protein S3
  misc_feature: Homolog of GI Number: 83283961 NR Desc: 40S ribosomal protein
  misc_feature: Homolog of GI Number: 46811251 NR Desc: 40S ribosomal protein S3
  misc_feature: Homolog of GI Number: 38512247 NR Desc: Ribosomal protein S3
  misc_feature: Useful for delaying flowering time
  misc_feature: Useful for making lethal plants for genetic confinement systems
  misc_feature: Useful for making ornamental plants with modified flowers
  misc_feature: Useful for making ornamental plants with modified leaves
  misc_feature: Useful for making plants with altered leaf shape eg curled leaves
  misc_feature: Useful for making plants with altered leaf shape eg curled leaves
  misc_feature: Useful for making plants with increased biomass
  misc_feature: Useful for making plants with increased biomass and foliage
  misc_feature: Useful for making plants with modified flowers
  misc_feature: Useful for making shorter plants
MATQISKKRKFVADGVFYAELNEVLTRELAEDGYSGVEVRVTPMRTEIIIRATRTQNVLGEKGRRIRELTSLVQKRFRFPQDSVELYAEKVANRGLCAIAQAESLRYKLLGGLAVRRACYGVLRFVMESGAKGCEVIVSGKLRAARAKSMKFKDGYMVSSGQPTKDYIDSAVRHVLLRQGVLGIKVKVMLDWDPKGINGPKTPLPDVVIIHAPKEEDVNSAPAQVSAPAALAPEAPLTAVDYPEMIPVA

SEQ ID NO: 7521 - DNA, 1500 bp, Zea mays
  misc_feature: Ceres CLONE ID no. 1376939
  misc_feature: Ceres CDNA ID no. 36593334
  CDS (237)..(1400): REFERENCED BY SEQ ID NO: 7522
gttagtttggtagccgtgcccttcctcttgcttgttggttgccttcctcatcttctttcatgtgttggattggagtctcagctattcgtttctccctcttttcttgcagcgcgattccggcaggggagtagacggttccagcaaatttggtccaacaattctttgtttggccgcttgggctccggtctctcgattcttcgtagcttggtgggagggcgccggatccagcggccatcatggttgtcgacacggtcagcgcgagcacctccataatagccccccacctgttcgaccacaggtccaggggagccggcgcttcccaccaccacctccgccggacgttccatgtcgttgcctgccgacccctgcccaccgccttcgccggccgccgcctcgtggcccgggtcaccaggcagccgtcgtcgcgcctcgccgattggccggtcagggcgctggctatgggggtcacgaaggaggtcagggccagccctcgcagggagtatcgggggatccccggggatggtggcgacatgggggacgttggggtcaccagccccacgccgtcatggcctccgcggaacagggcagatgaccccaagctgcacaacccgctgctccgcctcgagcgcatgggctgcgggtggctcggcgtcatcttcgagtgggagggggtcatcgttgaggatgatgccgaattggaaaggcaggcgtggttgaccctggcacaggaggagggcaagtcgccgcctcccgcttttgtgttgcggagagtcgaagggatgaagaacgagcaggcgatttctgaggttctctgctggtctcgggatccctccgagcttaggagattggccctgaggaaggacgagatccacagcagccttcgtggtggctcctaccaccagatgaggaacggttccagggagttcatgagcaccctcgccaattacaagatccctatcgctgtggtcaccacacgcccacggaaggttattgaggaagccattgaagctgtaggcgtgcgcagcttcttcgatgcggttgtgacagcagaagacgtgtaccggggcaagcctgacccagaaatgttcctgtactctgctcagcttctcagtttcatcccggagaggtgcatcgtgtttgggaactccaattcggcggtggaagctgcacatgacgcacgtatgaagtgtgtcgcggtcgcaagcaagcacaagatctacgagcttagcgctgcagaccttgtggtgaagcaactagacgagctatccgtcattgacttgaagaaccttgctgatattgagtccccggagtttggcatggaacctgaaccagagatggaggaggaggaggaagtgcccccaccatcgacgtctgtgggtatagatgatctattctggtaagagaccagattgtacatttgattgattcctctccagaacacagatgtattgttgtcaaaaaaaaaaaaaaaaaaaaaaaaaaataaaaaaaaaaaaaaaa

SEQ ID NO: 7522 - protein, 387 aa, Zea mays
  misc_feature: Ceres CLONE ID no. 1376939
  misc_feature: Ceres CDNA ID no. 36593334
  misc_feature (136)..(324): Pfam Name: Hydrolase PFAM Desc: haloacid dehalogenase
  misc_feature: Homolog of GI Number: 52077176 NR Desc: putative genetic modifier
  misc_feature: Homolog of GI Number: 10444400 NR Desc: genetic modifier
  misc_feature: Homolog of GI Number: 18542168 NR Desc: putative genetic modifier
  misc_feature: Homolog of GI Number: 50927875 NR Desc: OSJNBb0012E24.15
  misc_feature: Homolog of GI Number: 18399067 NR Desc: haloacid dehalogenase
  misc_feature: Homolog of GI Number: 42572363 NR Desc: haloacid dehalogenase
  misc_feature: Homolog of GI Number: 22137294 NR Desc: AT3g10970/F9F8_21
  misc_feature: Homolog of GI Number: 57234800 NR Desc: glycoprotease family protein/hydrolase
  misc_feature: Homolog of GI Number: 73748237 NR Desc: glycoprotease family protein
MVVDTVSASTSIIAPHLFDHRSRGAGASHHHLRRTFHVVACRPLPTAFAGRRLVARVTRQPSSRLADWPVRALAMGVTKEVRASPRREYRGIPGDGGDMGDVGVTSPTPSWPPRNRADDPKLHNPLLRLERMGCGWLGVIFEWEGVIVEDDAELERQAWLTLAQEEGKSPPPAFVLRRVEGMKNEQAISEVLCWSRDPSELRRLALRKDEIHSSLRGGSYHQMRNGSREFMSTLANYKIPIAVVTTRPRKVIEEAIEAVGVRSFFDAVVTAEDVYRGKPDPEMFLYSAQLLSFIPERCIVFGNSNSAVEAAHDARMKCVAVASKHKIYELSAADLVVKQLDELSVIDLKNLADIESPEFGMEPEPEMEEEEEVPPPSTSVGIDDLFW

SEQ ID NO: 7523 - DNA, 807 bp, Zea mays
  misc_feature: Ceres CLONE ID no. 1377036
  misc_feature: Ceres CDNA ID no. 36707167
  CDS (21)..(557): REFERENCED BY SEQ ID NO: 7524
ttagctttctaccgacgaaaatgggcgctttcaggtttcaccagtaccaggttgtcggaagagctctcccgacagagaaagatgtgcagcctaagatctacaggatgaagctctgggccacgaacgaggttcgtgccaagtccaagttctggtacttcttgaggaagctgaagaaggttaagaagagcaacggtcagatgctcgccatcaacgagatctttgagaagaacccaacaaccatcaagaactttggaatctggttgaggtaccagagcaggactggataccacaacatgtacaaggagtaccgcgacaccaccttgaacggagccgtggagcagatgtacaccgagatggcgtcgcgacaccgcgtcaggttcccttgcatccagatcatcaagactgccactgtcccggccaagctctgcaagagggagagcaccaagcagttccacaacagcaaaatcaagttcccattggtgttccgcaaggtcagaccaccaaccaggaagctcaagaccacctacaaggcctccaagcccaacttgttcatgtgataagagtctctgattgactcttcatatcttttttgtttggggatataatcatgatgaagttgagccatctgctgttttgtctttttaatttcaaggatatttttgttcatcaacgttttagccttattcatggaactaaactcgactttgtctggattgtgttgttcttgattttgaaaaaaaaaacttttttttctcaaaaaaaaaaaaaaaaaaaaaaaaaaaaaaaaaaagaaaaaaaaaaaaaaaa

SEQ ID NO: 7524 - protein, 178 aa, Zea mays; identical to SEQ ID NO: 6004
  misc_feature: Ceres CLONE ID no. 1377036
  misc_feature: Ceres CDNA ID no. 36707167
  misc_feature (5)..(178): Pfam Name: Ribosomal_L18ae PFAM Desc: Ribosomal L18ae protein family
  misc_feature: Homolog of GI Number: 30102898 NR Desc: At2g34480
  misc_feature: Homolog of GI Number: 20453309 NR Desc: AT3g14600/MIE1_10
  misc_feature: Homolog of GI Number: 23197702 NR Desc: 60S ribosomal protein L18A
  misc_feature: Homolog of GI Number: 21593925 NR Desc: putative 60S ribosomal protein L18A
  misc_feature: Homolog of GI Number: 34909590 NR Desc: putative ribosomal protein L18a
  misc_feature: Homolog of GI Number: 50511482 NR Desc: putative 60S ribosomal protein L18a
  misc_feature: Homolog of GI Number: 13430184 NR Desc: ribosomal protein L18a

SEQ ID NO: 7525 - DNA, 846 bp, Zea mays
  misc_feature: Ceres CLONE ID no. 1377255
  misc_feature: Ceres CDNA ID no. 25445959
  CDS (90)..(701): REFERENCED BY SEQ ID NO: 7526
gtaaaacaaaagcgtcgagatcttttcccccaaattcaaataaaaccctaatcctctgtttcgggaattcgatctgaatcgatttcaacatgggcaacacagacaagctgatgaatcagatattcgatctcaagttcacgtcgaagtctctgcagaggcagtcaaggaagtgcgagaaggaagagaaggcggagaaactcaaggtgaagaaggcgatcgagaaggggaacatggatggtgctcggatctacgccgagaacgccattcgcaaacgcagcgagcagatgaactacctccgcctcgcttctcgcctcgacgccgttgttgcccgcttagacactcaggccaagatggccaccatcaccaaatccatgactaacatcgtcaagtccctcgagtcttccctcgccacaggcaatctacagaagatgtcagagacgatggattcatttgagaagcagtttgtgaacatggaggtccaagctgagttcatggagaacgccatggctggttctacatcgttgtccactcctgaaggcgacgtcaacaacctgatgcagcaggtagcagatgattacggtcttgaagtctctgttggactacctcaggctgctggccatgccattcctactgcaacagaggagaaagttgatgaggatgatttgtccaggaggcttgcagagctcaaggccagaggttgaaccatgcttggaccatctgccacttaggacagagatccttatcgaaatattacagctattatctgcgaacattgacgcatttgtgtatattgctcactttgagacatgctttgtttactaactttatataaaaaaaaaaaaaaaa

SEQ ID NO: 7526 - protein, 203 aa, Zea mays
  misc_feature: Ceres CLONE ID no. 1377255
  misc_feature: Ceres CDNA ID no. 25445959
  misc_feature (9)..(179): Pfam Name: SNF7 PFAM Desc: SNF7
  misc_feature: Homolog of GI Number: 20148689 NR Desc: similar to developmental protein DG1118
  misc_feature: Homolog of GI Number: 21537090 NR Desc: developmental protein
  misc_feature: Homolog of GI Number: 28916459 NR Desc: putative developmental protein
  misc_feature: Homolog of GI Number: 30270581 NR Desc: superal1
  misc_feature: Homolog of GI Number: 51535470 NR Desc: development protein
  misc_feature: Homolog of GI Number: 61868560 NR Desc:  similar to CHMP1.5 protein
  misc_feature: Homolog of GI Number: 3789911 NR Desc: developmental protein DG1118
  misc_feature: Homolog of GI Number: 72088641 NR Desc:  similar to chromatin modifying protein 1B
  misc_feature: Homolog of GI Number: 59858417 NR Desc: CHMP1.5 protein
  misc_feature: Homolog of GI Number: 57089803 NR Desc:  similar to CHMP1.5 protein
MGNTDKLMNQIFDLKFTSKSLQRQSRKCEKEEKAEKLKVKKAIEKGNMDGARIYAENAIRKRSEQMNYLRLASRLDAVVARLDTQAKMATITKSMTNIVKSLESSLATGNLQKMSETMDSFEKQFVNMEVQAEFMENAMAGSTSLSTPEGDVNNLMQQVADDYGLEVSVGLPQAAGHAIPTATEEKVDEDDLSRRLAELKARG

SEQ ID NO: 7527 - DNA, 636 bp, Zea mays
  misc_feature: Ceres CLONE ID no. 1377712
  misc_feature: Ceres CDNA ID no. 25447004
  CDS (71)..(457): REFERENCED BY SEQ ID NO: 7528
acgaatccaatcttcaaatcaaaatcgaagaaggagaagagaaacagagaaagagaaagtttgaatcaaaatggctgggagagcttcgatccctgctcgcaactctgccctcatcgctatgatcgccgacgaggacaccgtagttggatttttgatggctggagttggtaatgttgacatcaggaggaagacaaactacctcatcgtggattcaaagacaaccgtgaggcaaattgaggatgctttcaaggagttctcatcgagagatgacattgctatcatcctcatcagccaatacgttgccaatatgatccgtttcttggtggatagctacaacaagccagttcctgcgattctggagatcccttccaaggaccatccttatgatcctgcccatgactcggttctctcccgtgtcaagtacctcttctctgctgaatctgtgtcacagcgttaaacatatatacacattctgcaagttcgctgagccttataccatttgtttgtttttaacattttctccttctttcaaactcagaaactttcaataaatgtataactcttgaattttatttggaaatgaatgttatattatttggaaaaaaaaaaaaaaaaaaaagaaaaaaaaaaaaaaaa

SEQ ID NO: 7528 - protein, 128 aa, Zea mays
  misc_feature: Ceres CLONE ID no. 1377712
  misc_feature: Ceres CDNA ID no. 25447004
  misc_feature (15)..(115): Pfam Name: ATP PFAM Desc: ATP synthase
  misc_feature: Homolog of GI Number: 21436129 NR Desc: putative vacuolar ATPase
  misc_feature: Homolog of GI Number: 50916028 NR Desc: putative Vacuolar ATP synthase subunit F
  misc_feature: Homolog of GI Number: 16758754 NR Desc: ATPase
  misc_feature: Homolog of GI Number: 66529931 NR Desc:  similar to CG8210
  misc_feature: Homolog of GI Number: 20357547 NR Desc: ATPase
  misc_feature: Homolog of GI Number: 76615725 NR Desc:  similar to ATPase
  misc_feature: Homolog of GI Number: 57095928 NR Desc:  similar to ATPase
  misc_feature: Homolog of GI Number: 2493136 NR Desc: Vacuolar ATP synthase subunit F
  misc_feature: Homolog of GI Number: 56471413 NR Desc: V
  misc_feature: Homolog of GI Number: 77563715 NR Desc: vacuolar ATP
MAGRASIPARNSALIAMIADEDTVVGFLMAGVGNVDIRRKTNYLIVDSKTTVRQIEDAFKEFSSRDDIAIILISQYVANMIRFLVDSYNKPVPAILEIPSKDHPYDPAHDSVLSRVKYLFSAESVSQR

SEQ ID NO: 7529 - DNA, 872 bp, Zea mays
  misc_feature: Ceres CLONE ID no. 1377739
  misc_feature: Ceres CDNA ID no. 25445852
  CDS (1)..(486): REFERENCED BY SEQ ID NO: 7530
gtcttgtctcgctgtaccggccgatctccccattctcccctcttcgccggtcccaccaccgcgccgatcctgatggcctccgccgcctcatcggccgtcggcgctggcaaatcgctgttccaggggctccgcaggttcctcaagaagccgtgggagatcacaggcccctgcgcctctcccgagtaccgcagcgcgctgcctggcgcgctcgagtaccgcgtcaagtgcccggccaccgtgcgcgacgaccgcgacaaggccatcgtgcccacatccgatccggagacagtctacgatatcaagtacttcacccgcgaccgccgccggagccgcccgcccgtgcggcgcaccctactccgcaagcccgatctcgagagctacatggccaccaagcagttcgaccccaccattgacttccccgtaccatacgtcaacaccaccgtcgaggaggatgacaacactgtcggcggtggctaccagaagtgactcaggaagacctatgggcgcaggcacaagaaggaaacctccaccaataaggcaaccgagctggaagaataggaaaggaagcaagcaatcaggcagccgaattggaagcaatcaggaaagcttgctggttaatttggtaggtatcctttgattggacttcatcagaagcggcactattttcattccagctattaaatatccccttttcttttgttcctagtggaagttttttggatgtaaaagatgacggtggcaaataatatggcacctgtggagctcacaggatgcacatatcttgtaaattgtattctaaaactgtctacctgataccattgttactgtttaatgcaaaatttaaggtttctattccaaaaaaaaaaaaaaaa

SEQ ID NO: 7530 - protein, 137 aa, Zea mays
  misc_feature: Ceres CLONE ID no. 1377739
  misc_feature: Ceres CDNA ID no. 25445852
  misc_feature: Homolog of GI Number: 34909786 NR Desc: P0512C01.35
  misc_feature: Homolog of GI Number: 67987177 NR Desc: 4Fe
MASAASSAVGAGKSLFQGLRRFLKKPWEITGPCASPEYRSALPGALEYRVKCPATVRDDRDKAIVPTSDPETVYDIKYFTRDRRRSRPPVRRTLLRKPDLESYMATKQFDPTIDFPVPYVNTTVEEDDNTVGGGYQK

SEQ ID NO: 7531 - DNA, 616 bp, Zea mays
  misc_feature: Ceres CLONE ID no. 1377942
  misc_feature: Ceres CDNA ID no. 29191196
  CDS (62)..(430): REFERENCED BY SEQ ID NO: 7532
atcgccgccttcgtcgttgtcgtcgtcccgcaagtttctttcacttttgaattttgaaaacatggcgtatgctgcaatgaagcccacgaaggctggtttggaagagccactcgagcagattcacaagatcaggatcactctctcctccaagaacgtcaagaacctcgagaaagtgtgtgctgatttggttcgtggagcaaaagacaagagactcagaactaagggaccagtgagaatgcccaccaaggttcttaagatcactacccgtaaagctccttgtggtgaaggaaccaacacgtgggacagattcgaattgagggttcacaagcgagtgattgatctcttcagctctcctgatgtggtgaagcaaatcacttccatcaccattgaacctggtgttgaggtcgaggtcaccatcgccgactcttagatttccttttttttttctgcaaaagacaatctcttacacttcttgtctcttggggttgaattggtgttaaccaatgttttgttgtagtggaacttagctcctgtgttttcttagttaaaggagattttgttttatccagccttcattttcatctatcaaaggatttgaccaaaaaaaaaaaaaaaa

SEQ ID NO: 7532 - protein, 122 aa, Zea mays; identical to SEQ ID NO: 5748
  misc_feature: Ceres CLONE ID no. 1377942
  misc_feature: Ceres CDNA ID no. 29191196
  misc_feature: The plant flowers significantly late compared to wild-type.
  misc_feature: The plant is abnormally large.
  misc_feature: null
  misc_feature: Useful for making plants with modulated biomass
  misc_feature: Useful for making plants with modulated flowering time
  misc_feature: Useful for making plants with modulated phosphate use efficiency
  misc_feature (22)..(117): Pfam Name: Ribosomal_S10 PFAM Desc: Ribosomal protein S10p/S20e
  misc_feature: Homolog of GI Number: 21617905 NR Desc: 40S ribosomal protein S20
  misc_feature: Homolog of GI Number: 21281054 NR Desc: putative 40S ribsomomal protein
  misc_feature: Homolog of GI Number: 23198348 NR Desc: 40S ribosomal protein S20
  misc_feature: Homolog of GI Number: 31430421 NR Desc: putative ribosomal protein S10p/S20e
  misc_feature: Homolog of GI Number: 55775376 NR Desc: 40S subunit ribosomal protein
  misc_feature: Homolog of GI Number: 54208698 NR Desc: ribosomal protein S10p/S20e
  misc_feature: Homolog of GI Number: 50933555 NR Desc: 40S ribosomal protein S20
  misc_feature: Homolog of GI Number: 22203726 NR Desc: ribosomal protein S20
  misc_feature: Homolog of GI Number: 62651870 NR Desc:  similar to 40S ribosomal protein S20
  misc_feature: Homolog of GI Number: 20805825 NR Desc: ribosomal protein S20
  misc_feature: Useful for making shorter plants
  misc_feature: Useful for sterility
  misc_feature: Useful for sterility

SEQ ID NO: 7533 - DNA, 1333 bp, Zea mays
  misc_feature: Ceres CLONE ID no. 1377989
  misc_feature: Ceres CDNA ID no. 25891849
  CDS (43)..(1179): REFERENCED BY SEQ ID NO: 7534
aagacctgttcttcagtttgctgagagagtgaactaacaattatggcgaagatgatgatgatgcaacagagccagccttctttatctctccttacttcttctgtctctgactttaatggcgctaagctccacttacaagtccagtacaagaggaaggttcaacagccaaaaggagcactctatgtatcagcctccagcgaaaagaagattctcataatgggtggcactcgattcatcggtatcttcttatccaggctccttgtcaaagaaggacatcaggttacgttgttcacaagaggtaaatctcctattgccaaacaactccctggcgaatctgaccaagactttgctgatttttcctccaagattcttcacttgaaaggagacagaaaggactatgactttgtgaagtcaagtctttcagctgaaggctttgatgttgtttatgatatcaacgggagggaggctgaagaagttgagcccatattagatgcacttcctaaactagaacagtacatctactgttcttcagctggtgtttacttgaaatctgatgtcttgccacactgtgaggtggatgcagttgacccaaagagcaggcacaaggggaagctggagactgagagcttactgcaatcaaaaggtgtaaactggacttccatacgccctgtctacatctacggtccgttgaactacaaccccgttgaagaatggttcttccaccgtctcaaagctggccgccctatcccagttccaaactctggaatccagatctcacagctcggtcacgttaaggacttggcaacagcctttctggccgtgcttggtaacgagaaagccagcagagagatattcaacatctcgggagagaagtacgtcacctttgatggcttagcaagagcttgcgcaaaggctggtgggtttccagagccagagattgttcactacaaccctaaagagtttgactttggaaagaagaaggctttccctttccgtgaccagcatttctttgcctcggtggagaaagcaaagcatgtgcttggatggaaaccagagttcgatttggtggagggtctcactgactcatacaaccttgatttcggtcgtggaactttcagaaaagaggcggatttcaccactgacgacatgattctaagcaagaaacttgttcttcaatagaaacatattgatttgtatggttgtgtgatctcacactgaagaacattcgcaagtttattgtcgtctcaaatgtattttggtttcggattgtgttcgacttcttctaagaagaggcggtctggctcttgaagtttacttaaaaaaaaaaaaaaaa

SEQ ID NO: 7534 - protein, 378 aa, Zea mays
  misc_feature: Ceres CLONE ID no. 1377989
  misc_feature: Ceres CDNA ID no. 25891849
  misc_feature (56)..(89): Pfam Name: Epimerase PFAM Desc: NAD dependent epimerase/dehydratase family
  misc_feature: Homolog of GI Number: 77554826 NR Desc: RNA binding protein
  misc_feature: Homolog of GI Number: 17064988 NR Desc: g5bf protein
  misc_feature: Homolog of GI Number: 3850621 NR Desc: putative RNA binding protein
  misc_feature: Homolog of GI Number: 21593201 NR Desc: putative RNA
  misc_feature: Homolog of GI Number: 17979099 NR Desc: putative RNA
  misc_feature: Homolog of GI Number: 34398360 NR Desc: 38 kDa ribosome
  misc_feature: Homolog of GI Number: 75908322 NR Desc: 3
  misc_feature: Homolog of GI Number: 17232323 NR Desc: mRNA
  misc_feature: Homolog of GI Number: 48894809 NR Desc: COG0451: Nucleoside
  misc_feature: Homolog of GI Number: 71676068 NR Desc: similar to Nucleoside
MAKMMMMQQSQPSLSLLTSSVSDFNGAKLHLQVQYKRKVQQPKGALYVSASSEKKILIMGGTRFIGIFLSRLLVKEGHQVTLFTRGKSPIAKQLPGESDQDFADFSSKILHLKGDRKDYDFVKSSLSAEGFDVVYDINGREAEEVEPILDALPKLEQYIYCSSAGVYLKSDVLPHCEVDAVDPKSRHKGKLETESLLQSKGVNWTSIRPVYIYGPLNYNPVEEWFFHRLKAGRPIPVPNSGIQISQLGHVKDLATAFLAVLGNEKASREIFNISGEKYVTFDGLARACAKAGGFPEPEIVHYNPKEFDFGKKKAFPFRDQHFFASVEKAKHVLGWKPEFDLVEGLTDSYNLDFGRGTFRKEADFTTDDMILSKKLVLQ

SEQ ID NO: 7535 - DNA, 904 bp, Zea mays
  misc_feature: Ceres CLONE ID no. 1378726
  misc_feature: Ceres CDNA ID no. 29191308
  CDS (339)..(668): REFERENCED BY SEQ ID NO: 7536
gtcgatggcagtctggtgcgtcgctgcctccttcatgtcttcgattagcttcgtgctccttcatctccgtcggtttatctcacgggtaagttcagagcttctcttctctgtgagaaagtggtgtggaggaaaccactgagaacctctgtttaagattgtggggttagcttatcacggtggttatccgtggatgtgttgtttcttgttgctgcttgttggttctttggggcttcggggactggccctgtttcagacccttcgttgcggttactctacagcatcctcagtcgcttgccgtgtttgtttggagcttctgctcccgttcttcaagcctgggaatgaagctttgggtgggtgttgctgcctctttgacggttgaaatgcattatctcctccgaggaagtggccggagtcgggagataaacctccgcctacctcctcaagagcccttgttcttcatcgagtgtctttcatctgttagtttggactcacagcttctccttcgcaaagtctctggtttggctggatctggtctcattgttagtgtaatagccggggccggctcgtcaatccgcctccgcctgttgccgtcaaagtatccccgggattgctccgtttccatccatacccaagaccagtcttctcatttgcagtttacagtgaattagttgcttcttggtctacctatggccaatagttaatcttatgatctcctagtttagctttagtttgtttcttatgatttagactaaacctattttgtatcgaaggggcttttttatctttttttggggtctctttgatagaactttgcttaattgcagctttaggttcatgcttgcttgtacctctttgccatttcttattgaaatgaattcacattttgtcaaaaaaaaaaaaaaaa

SEQ ID NO: 7536 - protein, 109 aa, Zea mays
  misc_feature: Ceres CLONE ID no. 1378726
  misc_feature: Ceres CDNA ID no. 29191308
MKLWVGVAASLTVEMHYLLRGSGRSREINLRLPPQEPLFFIECLSSVSLDSQLLLRKVSGLAGSGLIVSVIAGAGSSIRLRLLPSKYPRDCSVSIHTQDQSSHLQFTVN

SEQ ID NO: 7537 - DNA, 569 bp, Zea mays
  misc_feature: Ceres CLONE ID no. 1379302
  misc_feature: Ceres CDNA ID no. 25446822
  CDS (106)..(306): REFERENCED BY SEQ ID NO: 7538
gtccccgtctcaccgcactgccttgccccctactctgcctcgcttagcttagccgccgctgctacgcactctcgccgtccttgttcccgcgtcgctctgctcgcgatggcgtcccgcgttgcagtgctgctcgtggccgtggcggccgtgctgttcgccgcggcgtcggcgcaggagatggacctgggcgtgccgcccgcgccggcgcccgacacgggcgcggcagcgggggccgcggcgtcggtcctggccgtggcttgctctgccgtcttcttcatcctcgtcgccggtggcctcgtgcagtaggcgctgccgtcgacgtggtggctagctgctggttcggggtcaggcggagccctgttcgatcgttttcgccttagttagtagtagaagtagcagtcatgggctgtgttgattgtgtccctgtctccccctggtgggcgttgtgatcttgtgctattgcttattctttttgtaccatactgcattgttcgacgtataccttgtgttgaggcgtgtgttgtatgaataaagacgatggatctcgttcgtcaaaaaaaaaaaaaaaa

SEQ ID NO: 7538 - protein, 66 aa, Zea mays
  misc_feature: Ceres CLONE ID no. 1379302
  misc_feature: Ceres CDNA ID no. 25446822
MASRVAVLLVAVAAVLFAAASAQEMDLGVPPAPAPDTGAAAGAAASVLAVACSAVFFILVAGGLVQ

SEQ ID NO: 7539 - DNA, 1068 bp, Zea mays
  misc_feature: Ceres CLONE ID no. 1379318
  misc_feature: Ceres CDNA ID no. 40351772
  CDS (54)..(899): REFERENCED BY SEQ ID NO: 7540
acacaattcagacaaaactccatagctgtctagagagaaagaactaaaaaaaaatgtcgaaagaagtgagcgaagagggacaaacccacagccatgggaaagactacgtcgaccctccaccagctcccctcctcgacatgggagagctcaagtcctggtctttctacagagccctcatcgccgagttcatcgccacactcctcttcctctacgtcaccgtcgccaccgtcatcggccacaagaagcaaaccggtccttgcgacggcgttggtttgctcggtatcgcttgggccttcggtggtatgatcttcgtcctcgtctactgcaccgccggcatctctggtggtcacattaacccagctgtgactttcggtctgttcttggcgcgtaaggtgtctttggtgagagctgttgggtacatgatagctcagtgtcttggagctatctgtggtgtggggttcgtgaaagctttcatgaagactccttacaacactctcggtgggggagctaacactgtagccgacggttacagcaccgggactgctcttggagctgagattattgggacgttcgttcttgtttacaccgtgttctctgctactgaccctaagagaagcgcccgtgactctcacatccccgttttggctccacttcctattggatttgctgtgttcatggtgcatttggcaaccatccccattactggaactggaattaacccagcgaggagctttggtgctgctgttatctacaacaacgagaaggcgtgggatgaccattggatcttctgggttggaccgttcgtgggagcactagcagcagcagcttaccatcagtacattttgagagctgcagcagttaaggccttggcctcattccgaagcagtgcaaccaactgatgaatgtgaagaaacagaaacagctttaagattcgttatgctttttatttttatttgttgctttatttgtgtgttaatgagagagagagagagcattttaatttggtggattgattattatgttaattatggaatgggtgcatggttttttccaaaaaaaaaaaaaaaa

SEQ ID NO: 7540 - protein, 281 aa, Zea mays
  misc_feature: Ceres CLONE ID no. 1379318
  misc_feature: Ceres CDNA ID no. 40351772
  misc_feature (31)..(260): Pfam Name: MIP PFAM Desc: Major intrinsic protein
MSKEVSEEGQTHSHGKDYVDPPPAPLLDMGELKSWSFYRALIAEFIATLLFLYVTVATVIGHKKQTGPCDGVGLLGIAWAFGGMIFVLVYCTAGISGGHINPAVTFGLFLARKVSLVRAVGYMIAQCLGAICGVGFVKAFMKTPYNTLGGGANTVADGYSTGTALGAEIIGTFVLVYTVFSATDPKRSARDSHIPVLAPLPIGFAVFMVHLATIPITGTGINPARSFGAAVIYNNEKAWDDHWIFWVGPFVGALAAAAYHQYILRAAAVKALASFRSSATN

SEQ ID NO: 7541 - DNA, 678 bp, Zea mays
  misc_feature: Ceres CLONE ID no. 1379418
  misc_feature: Ceres CDNA ID no. 35383388
  CDS (81)..(422): REFERENCED BY SEQ ID NO: 7542
agtctaaggtactttcgatgcttctccatttccatttgattactcctggaacctctcactgttagattaaagaaaaatcaatgtcgacggtcggagagcttgcttgcagctacgctgttatgatcctcgaggacgagggtatttctatcacggccgacaagatcgctacgttgatcaaatccgctggtgttagttgcgagtcatactggccaatgctattcgccaaaatggcggagaaacgtaacgttactgacctcatcatgaacgttggtgctggtggcggaggtggtgccccagtttcagctgctgccccagctgccggtggtggtgcttcagctgctgcacctgccgctgaggagaagaagaaggaagaagtggcagaagagagtgatggtgatctgggtttcggcttgttcgactaagcaagaagcaattgcttttgtttttttcttgttattgttttatccacgatcgagacgccatattttgtttagttgctacttcgtctcctcaagttttggttgttttctcgaatcaccctgtttgtgtatcgagcaaaaccatcggggagtttgacattttctttatatttccttctttaacagctaatattggtgtgagatttataaatcatgaatcacaagaaaagatcatcgaatcgcaaaaaaaaaaaaaaaa

SEQ ID NO: 7542 - protein, 113 aa, Zea mays
  misc_feature: Ceres CLONE ID no. 1379418
  misc_feature: Ceres CDNA ID no. 35383388
  misc_feature (22)..(112): Pfam Name: Ribosomal_60s PFAM Desc: 60s Acidic ribosomal protein
  misc_feature: Homolog of GI Number: 20465333 NR Desc: putative 60S acidic ribosomal protein P1
  misc_feature: Homolog of GI Number: 21553441 NR Desc: 60S acidic ribosomal protein P1
  misc_feature: Homolog of GI Number: 20258887 NR Desc: putative acidic ribosomal protein
  misc_feature: Homolog of GI Number: 21592477 NR Desc: acidic ribosomal protein
  misc_feature: Homolog of GI Number: 21554797 NR Desc: acidic ribosomal protein p1
  misc_feature: Homolog of GI Number: 7267420 NR Desc: acidic ribosomal protein p1
  misc_feature: Homolog of GI Number: 78191426 NR Desc: acidic ribosomal protein P1a
  misc_feature: Homolog of GI Number: 2431769 NR Desc: acidic ribosomal protein P1a
  misc_feature: Homolog of GI Number: 7440758 NR Desc: acidic ribosomal protein P1
  misc_feature: Homolog of GI Number: 50940517 NR Desc: putative acidic ribosomal protein P1a
MSTVGELACSYAVMILEDEGISITADKIATLIKSAGVSCESYWPMLFAKMAEKRNVTDLIMNVGAGGGGGAPVSAAAPAAGGGASAAAPAAEEKKKEEVAEESDGDLGFGLFD

SEQ ID NO: 7543 - DNA, 1291 bp, Zea mays
  misc_feature: Ceres CLONE ID no. 1379678
  misc_feature: Ceres CDNA ID no. 40351773
  CDS (78)..(1091): REFERENCED BY SEQ ID NO: 7544
atatccgcatccgctgcctccgcctctcgagtctcgtccacccgtcgtcctcctagctcctctactcgccagtcgccatgggcaagattaagatcggaatcaacggcttcggaaggatcggcaggctcgtggccagggtcgccctccagagcgaggatgtcgagctcgtcgccgtcaacgaccccttcatcaccacggactacatgacctacatgttcaagtacgacaccgtccacggccactggaagcacagcgacatcacactcaaggactccaagacccttctcttcggtgacaagccggtcaccgtctttggcatcaggaaccctgaggaaatcccgtggggtgaggctggcgctgagtatgtcgtggagtccaccggcgtcttcactgacaaggacaaggctgctgcacatctcaagggtggtgccaagaaggttgttatctctgccccaagcaaagatgcacccatgtttgttgttggtgtcaatgaggacaagtacacctcggatgttaacattgtttccaatgctagctgcaccacaaactgccttgctccccttgctaaggtcattcatgacaacttcggcattgttgagggtttgatgacaactgttcatgccatcactgccacccagaaaactgttgacggaccctcagccaaggactggagaggtggcagggctgccagctttaacatcattcctagcagcaccggtgctgccaaggctgttggtaaagttcttcctgatctgaatggcaagctcactggtatgtccttccgtgttcctactgtggatgtctcggttgttgacctcaccgtcagaatcgagaagggggcctcctatgaggatatcaagaaagctattaaggctgcttccgagggtccactcaagggtatcatgggttatgtggaagaggatctggtttctaccgacttccttggtgacagcaggtcgagcatcttcgacgccaaggccgggatcgctctgaacgaccacttcgtcaagctcgtctcgtggtacgacaacgagtggggctacagcaaccgcgtcgtcgacctgatccgccacatgttcaagacccagtaggggtttttcccccctgcttctcatggatggttgctgcttgtgtatgccgagaataaatgtggatggcgcgtgcctctgggtcgccaggttcatgctgagtctggacatgttttgcacttttgtttcccttcctgctaccatctgtgacagatccgctcgctaatatgggacctgagattagcttaaaaaaaaaaaaaaaa

SEQ ID NO: 7544 - protein, 337 aa, Zea mays
  misc_feature: Ceres CLONE ID no. 1379678
  misc_feature: Ceres CDNA ID no. 40351773
  misc_feature (159)..(316): Pfam Name: Gp_dh_C PFAM Desc: Glyceraldehyde 3
  misc_feature (4)..(36): Pfam Name: GFO_IDH_MocA PFAM Desc: Oxidoreductase family
MGKIKIGINGFGRIGRLVARVALQSEDVELVAVNDPFITTDYMTYMFKYDTVHGHWKHSDITLKDSKTLLFGDKPVTVFGIRNPEEIPWGEAGAEYVVESTGVFTDKDKAAAHLKGGAKKVVISAPSKDAPMFVVGVNEDKYTSDVNIVSNASCTTNCLAPLAKVIHDNFGIVEGLMTTVHAITATQKTVDGPSAKDWRGGRAASFNIIPSSTGAAKAVGKVLPDLNGKLTGMSFRVPTVDVSVVDLTVRIEKGASYEDIKKAIKAASEGPLKGIMGYVEEDLVSTDFLGDSRSSIFDAKAGIALNDHFVKLVSWYDNEWGYSNRVVDLIRHMFKTQ

SEQ ID NO: 7545 - DNA, 1119 bp, Zea mays
  misc_feature: Ceres CLONE ID no. 1379815
  misc_feature: Ceres CDNA ID no. 25891079
  CDS (78)..(986): REFERENCED BY SEQ ID NO: 7546
gcttcattctctcaatctcgctcgctctcctttggcagatctgagagttttggacaaagaataaaaacttgggaaacatgcctccgcagaagatcgagacaggtcacagcgacattgtccatgatgtcgtcatggattactacggaaagcgaatagcaactgcctcatcagacggcaccatcaagataaccggagtgagcaacagcggcggatctcagcagctagctaccttaaccggccaccgaggtcccgtctggcaagtcgcctgggcccacccgaagtacgattcgctcctcgcttcgtgctcctacgatgggcaaatcataatatggaaagaaggaaaccaaaacgagtggacgcagtctcacgtcttcacagaccacaaagtatcagtcaactccatcgcttgggctcctcacgagctcggtctctccttagcttgcggagcatccgacggaaacatctctgtcttctcggccagagccgatggcggttgggacacaacgaggatagaccaagctcacccggtcggagtcacttcggtgtcgtgggcaccagcgacggagccaggggcgctcgttagctccggtatgcacgagccggtttacaagttagcgtcgggagggtgtgatagtacggtgaaggtgtggaaattcgcaaacgggtcgtggaagatggactgtttcccggcgctacacaagcacaaggactgggtgagggacgtggcgtgggcaccgaacttgggtctgccgaagtcgacgatagcgagtgggtcggaggatgggagtgtgatcatatggacggtggggaaagaaggagagcagtgggaagggaaggtattgaaagatttcaagacgccggtgtggagggtgacgtggtcgatgacgggtaacttgctggcggtgtcggatgggaacaataacgtaacggtgtggaaagaggctgtggatggagagtgggaacaagtgactgtcgttgagccttagattgtgttgttcctgtttgtttgattgtgatttattttgttgtagtaagtatcaaatgtggttgctttatacatttttttgtttcttaccatcctctagatacttgctttctctgctaaaaaaaaaaaaaaaa

SEQ ID NO: 7546 - protein, 302 aa, Zea mays
  misc_feature: Ceres CLONE ID no. 1379815
  misc_feature: Ceres CDNA ID no. 25891079
  misc_feature (2)..(39): Pfam Name: WD40 PFAM Desc: WD domain
  misc_feature: Homolog of GI Number: 51963858 NR Desc: PREDICTED OSJNBa0081C13.10 gene product
  misc_feature: Homolog of GI Number: 83283979 NR Desc: protein transport SEC13
  misc_feature: Homolog of GI Number: 21593236 NR Desc: transport protein SEC13
  misc_feature: Homolog of GI Number: 50935451 NR Desc: putative Sec13p
  misc_feature: Homolog of GI Number: 50754630 NR Desc:  similar to Sec13l1 protein
  misc_feature: Homolog of GI Number: 47086987 NR Desc: zgc:63980
  misc_feature: Homolog of GI Number: 55619799 NR Desc:  similar to SEC13
  misc_feature: Homolog of GI Number: 57100900 NR Desc:  similar to Plasma membrane calcium
  misc_feature: Homolog of GI Number: 66508655 NR Desc:  similar to ENSANGP00000014751
  misc_feature: Homolog of GI Number: 46441998 NR Desc: likely COPII vesicle coat component
  misc_feature: Useful for making bigger plants
MPPQKIETGHSDIVHDVVMDYYGKRIATASSDGTIKITGVSNSGGSQQLATLTGHRGPVWQVAWAHPKYDSLLASCSYDGQIIIWKEGNQNEWTQSHVFTDHKVSVNSIAWAPHELGLSLACGASDGNISVFSARADGGWDTTRIDQAHPVGVTSVSWAPATEPGALVSSGMHEPVYKLASGGCDSTVKVWKFANGSWKMDCFPALHKHKDWVRDVAWAPNLGLPKSTIASGSEDGSVIIWTVGKEGEQWEGKVLKDFKTPVWRVTWSMTGNLLAVSDGNNNVTVWKEAVDGEWEQVTVVEP

SEQ ID NO: 7547 - DNA, 642 bp, Zea mays
  misc_feature: Ceres CLONE ID no. 1380059
  misc_feature: Ceres CDNA ID no. 25445498
  CDS (2)..(577): REFERENCED BY SEQ ID NO: 7548
acgcacgcccagacagacgagaccagatcggggaccctcgcggcgcccagttcccgagcgaacccaacccactacccacagccagaagcaaaagcccctcgccttttccgcgccttggttctcctcccgtccatccgcggcgagaacgaccgacgacgacagggcgagatgtgctgctgcccgagcaaggcgtgctgcatctgcacgctcatcgtgctggtgctggtggccgtcggcctcgtcttcggcttcggcgtctacacccgcggcttccacaagctcaccagcatgcacctgcaggacgatgcatacggccgcggtggcgccggcggctccttccgcgcctacggccacttggccccgccgccgtactagaaggaccgccgccccttctccgagatctagggcctggatgctgggcgattcgagccccgctccgctctcggtggagttggatgaactgccgccgccgccgccgcctgtaaaaaggaaatgtatcatgggattttcgttgcttgctgcattttggttttgtttgaaccaatcgattggattggctagtaattcgatttgttgaagactgagtgagattcgacaacatattatcattatcccgtccgctgctgaaaaaaaaaaaaaaaa

SEQ ID NO: 7548 - protein, 68 aa, Zea mays
  misc_feature: Ceres CLONE ID no. 1380059
  misc_feature: Ceres CDNA ID no. 25445498
MCCCPSKACCICTLIVLVLVAVGLVFGFGVYTRGFHKLTSMHLQDDAYGRGGAGGSFRAYGHLAPPPY

SEQ ID NO: 7549 - DNA, 845 bp, Zea mays
  misc_feature: Ceres CLONE ID no. 1380120
  misc_feature: Ceres CDNA ID no. 25445960
  CDS (34)..(549): REFERENCED BY SEQ ID NO: 7550
attccatcgaagcagagatcggaagcgaggcgaatggacgaggtgatgacagtggcggacgccggcggcgtaaatagggcgttgtacggatctccaccgtcgcataatctactccctcacaaccttcccatcttctccgcctttctcgcattggctcttgctcagttcctcaaagttttcactaattggtacaaagaaaagagatgggactctaaacgtatgctcagttctggtggtatgccttcctctcactccgctactgtcactgccttggctctttccattgcccttgaagaaggtgctggagcacccgcttttgccatcgctcttgtcttagcttgcgttgtaatgtatgatgcctctggggtcaggcttcatgctggtcgtcaagctgagctgctgaatcaaattgtttgcgagttccctccggagcatccattatctacagttaaacccttgcgtgaacttctcggccacactcctatccaggttgctgccggggccattttaggatgtgtggtagcgtatctgatgaggagtacaagctagtttctacacaacaatgagtccaacattcttttgaagattatagacccttaagaagctatatatagattcatcagcaattaagctgtggaaggaagtaaatggaaattgtgaaaatctgtgcaatatatatagatcactgttagagagacttacgtgaagtgaactgacttgtcgtcattgtttaagaaatagttctgtgtttcaaaattatctttaccattattgtagaacatactcacattctgcttttgcctttagtttctattgatttaaactctctaaaaaaaaaaaaaaaa

SEQ ID NO: 7550 - protein, 171 aa, Zea mays
  misc_feature: Ceres CLONE ID no. 1380120
  misc_feature: Ceres CDNA ID no. 25445960
  misc_feature (24)..(170): Pfam Name: DUF212 PFAM Desc: Divergent PAP2 family
  misc_feature: Homolog of GI Number: 50925313 NR Desc: OJ991113_30.3
  misc_feature: Homolog of GI Number: 33240578 NR Desc: Uncharacterized conserved membrane protein
  misc_feature: Useful for making bigger plants
  misc_feature: Useful for making plants with increased biomass and foliage
  misc_feature: Useful for making smaller plants
MDEVMTVADAGGVNRALYGSPPSHNLLPHNLPIFSAFLALALAQFLKVFTNWYKEKRWDSKRMLSSGGMPSSHSATVTALALSIALEEGAGAPAFAIALVLACVVMYDASGVRLHAGRQAELLNQIVCEFPPEHPLSTVKPLRELLGHTPIQVAAGAILGCVVAYLMRSTS

SEQ ID NO: 7551 - DNA, 900 bp, Zea mays
  misc_feature: Ceres CLONE ID no. 1380223
  misc_feature: Ceres CDNA ID no. 25445608
  CDS (66)..(791): REFERENCED BY SEQ ID NO: 7552
acccatattattgataccaactagcaacatacatagtgaagtacactagcaacatcttagcaccaatggcagccaagatttttgccatccttgccctccttgctctttcagcaagcgttgctaccgcgactattattccacaatgctcacaacaatacctctctccggtgacagccgcgagatttgaatacccaactatacaatcctacaggctacaagaggccatcgcagcaagcatcttacggtcgttagcattgaccgtccaacaaccatatgccctattgcaacaaccatccttaatgaatctatatctccaaagaatcgcagcacaacaactacaacaacagttgcttccaacaatcaatcaagtagttgcagcgaaccttgctgcttacctccagcaacaacaatttcttccattcaatcaactagctggggtgaaccctgctgcttacttgcaggcacaacagctactaccattcaaccaacttgtcaggagccctgctgccttcttactgcagcaacagttgcttccattccatctacaagttgtggcaaacattgctgctttcttgcaacaacaacaacaattgctgccattttacccacaggttgtgggaaacattaacgccttcttgcaacagcaacagttgctaccattctacccacaggatgtggcaaacaatgtcgccttcttacaacaacaacaattgctgccatttaaccaacttgctttgacgaatcctaccaccttattgcagcagcccaccattggtggtgccatcttctagatttttttatgctttatactgtaataataaagttctcatactgatatgtgcaacttctcagtaataaaagattagagatctatattttaagttaaaaaaaaaaaaaaaa

SEQ ID NO: 7552 - protein, 241 aa, Zea mays
  misc_feature: Ceres CLONE ID no. 1380223
  misc_feature: Ceres CDNA ID no. 25445608
  misc_feature (115)..(241): Pfam Name: Zein PFAM Desc: Zein seed storage protein
  misc_feature: Homolog of GI Number: 16305123 NR Desc: 19kD alpha zein D2
  misc_feature: Homolog of GI Number: 72309 NR Desc: 19K zein precursor
  misc_feature: Homolog of GI Number: 16305121 NR Desc: 19kD alpha zein D1
  misc_feature: Homolog of GI Number: 22446 NR Desc: 19 kDa zein
  misc_feature: Homolog of GI Number: 224508 NR Desc: zein A20
  misc_feature: Homolog of GI Number: 72310 NR Desc: 19K zein precursor
  misc_feature: Homolog of GI Number: 535021 NR Desc: zein Zd1
  misc_feature: Homolog of GI Number: 16305129 NR Desc: 19kD alpha zein B3
  misc_feature: Homolog of GI Number: 16073 NR Desc: zein protein
  misc_feature: Homolog of GI Number: 22208489 NR Desc: alpha kafirin
MAAKIFAILALLALSASVATATIIPQCSQQYLSPVTAARFEYPTIQSYRLQEAIAASILRSLALTVQQPYALLQQPSLMNLYLQRIAAQQLQQQLLPTINQVVAANLAAYLQQQQFLPFNQLAGVNPAAYLQAQQLLPFNQLVRSPAAFLLQQQLLPFHLQVVANIAAFLQQQQQLLPFYPQVVGNINAFLQQQQLLPFYPQDVANNVAFLQQQQLLPFNQLALTNPTTLLQQPTIGGAIF

SEQ ID NO: 7553 - DNA, 728 bp, Zea mays
  misc_feature: Ceres CLONE ID no. 1380462
  misc_feature: Ceres CDNA ID no. 25445609
  CDS (53)..(472): REFERENCED BY SEQ ID NO: 7554
aaaagacgcacaccagcttcttcttcgtctctgaaactaatctgattcatccatggctaatgcagcgtcaggcatggcagtccacgatgactgcaagctcaagtttcttgaactcaaggcgaagaggacataccgtttcatcgtgtacaagattgaggagcagcagaagcaagtggttgtggagaaactcggcgaacctggtcaatcccatgatgactttgcagcaagtcttcctgctgacgagtgccgctacgccatcttcgattttgatttcgtcactgctgagaactgccagaagagcaagattttcttcatcgcatggtctccggacacagcaagagtgagaagcaagatgatctatgcgagctctaaggacaggttcaagagagagctagacgggattcaagtagagcttcaagcaaccgatccaactgagatggatctcgacattttcaaaagccgagccaattgaggaacggttgtatcaaactttgtcgcttctgttatcagagtgatatgctttatcttaaagtttgctgtgacgccaccaaccaaaacagcttcatttgatcggtctttgtcttcagtgtcttttctttttctttttggttcttacagtgtcttgcttaaaacttaaagagatttggcctgtgctcttttataatcgtgtaagaaacccaaaccgtttatcaacagatgatcctattggaacaaaaaaaaaaaaaaaa

SEQ ID NO: 7554 - protein, 139 aa, Zea mays
  misc_feature: Ceres CLONE ID no. 1380462
  misc_feature: Ceres CDNA ID no. 25445609
  misc_feature: The plant senesces significantly late copared to wild-type.
  misc_feature: Useful for making plants with modulated time to senescence
  misc_feature (12)..(139): Pfam Name: Cofilin_ADF PFAM Desc: Cofilin/tropomyosin
  misc_feature: Homolog of GI Number: 17065584 NR Desc: putative actin depolymerizing factor 1
  misc_feature: Homolog of GI Number: 15810613 NR Desc: putative actin depolymerizing factor 3
  misc_feature: Homolog of GI Number: 21536985 NR Desc: actin depolymerizing factor 4
  misc_feature: Homolog of GI Number: 4185511 NR Desc: actin depolymerizing factor 4
  misc_feature: Homolog of GI Number: 14906219 NR Desc: actin
  misc_feature: Homolog of GI Number: 14906210 NR Desc: actin
  misc_feature: Homolog of GI Number: 23198338 NR Desc: actin depolymerizing factor 2
  misc_feature: Homolog of GI Number: 68166241 NR Desc: actin depolymerizing factor
  misc_feature: Homolog of GI Number: 19699262 NR Desc: At1g05180/YUP8H12_21
  misc_feature: Homolog of GI Number: 7339501 NR Desc: actin depolymerizing factor 2
MANAASGMAVHDDCKLKFLELKAKRTYRFIVYKIEEQQKQVVVEKLGEPGQSHDDFAASLPADECRYAIFDFDFVTAENCQKSKIFFIAWSPDTARVRSKMIYASSKDRFKRELDGIQVELQATDPTEMDLDIFKSRAN

SEQ ID NO: 7555 - DNA, 1281 bp, Zea mays
  misc_feature: Ceres CLONE ID no. 1380538
  misc_feature: Ceres CDNA ID no. 25446823
  CDS (75)..(1052): REFERENCED BY SEQ ID NO: 7556
gtcaaagcagagtctgcccctccccgcgccgttctttttggttccccagtccccgccgccgccgaaacccgcagatggaggtcgtcgtcgccgcgaagcagaaggcgaagaaacacatacacctcttctactgctcagaatgcgaggagctcgccctcaagatcgccgccagctccgacgccatcgagctccaatccatcaactggcggagcttcgacgacgggttcccgaacctgttcatcaacaaggcgcacgacatccgtgggcagcacgtggcgttcctggcctccttcagctcgccgtcggtcatattcgagcagatctccgtcatcttcgcgctgcccaagctattcatcgcctcattcacgctcgtgctgccattcttccccacgggctcattcgagcgcgttgaggaggagggcgatgtcgccaccgcgttcaccctcgcgcgcattctctcgatgatccccaagtcgcgcggcgggcctaccagcgtcgtcatctacgacatccacgcgctccaggagaggttttacttcggggacgatgtcctgccatgcttcgagacagggatcccgctcctgctgcagcgcctccgccagctcccggacgcagaaaatatcaccattgcctttccagatgacggtgcgtggaagcggttccacaagctgttacagcactttccaatgatagtctgtaacaaggttcgggaaggtgacaagagaatagttcgtataaaggaaggactacctgaaggccgtcatgttgttattgttgatgatttagtgcaatctggggggactcttagagaatgccagaaagttctagctttgcatggcgctgcaaaagtcagtgcttatgtgactcatgctgtgttccctaagcagtcatatgaacgtttcatggcgtctagttctgctgggccaggcgaccaatttgcttacttctggatcacggactcatgcccacacacagtaaaagctattgggcaaagacctccatttgaggttctgagcctcgctggctctattgcagatgctcttcagatatgagcgtacactggtagatgggcatgggcttgaattgttgatgtccaccagattgaaacttgtactatgagaggtggaatgctcccgcttttcctaaatgtaagagttggtttccagttcctggaaaagcaaataatgtgtagtaagttaaattaagtacctgaaggttccataaacagccctgtggtttgtaataaaaccaggcattggatacccaaaaaaaaaaaaaaaa

SEQ ID NO: 7556 - protein, 325 aa, Zea mays
  misc_feature: Ceres CLONE ID no. 1380538
  misc_feature: Ceres CDNA ID no. 25446823
  misc_feature (158)..(268): Pfam Name: Pribosyltran PFAM Desc: Phosphoribosyl transferase domain
  misc_feature: Homolog of GI Number: 4902879 NR Desc: phosphoribosyl pyrophosphate synthase isozyme 4
  misc_feature: Homolog of GI Number: 22671730 NR Desc: phosphoribosyl pyrophosphate synthetase
  misc_feature: Homolog of GI Number: 50912099 NR Desc: putative phosphoribosyl pyrophosphate synthetase
  misc_feature: Homolog of GI Number: 23197750 NR Desc: putative ribose phosphate pyrophosphokinase
  misc_feature: Homolog of GI Number: 34910736 NR Desc: putative phosphoribosyl pyrophosphate synthase
  misc_feature: Homolog of GI Number: 4902877 NR Desc: phosphoribosyl pyrophosphate synthase isozyme 3
  misc_feature: Homolog of GI Number: 19699210 NR Desc: At1g10700/F20B24.13
  misc_feature: Homolog of GI Number: 4902470 NR Desc: phosphoribosyl diphosphate synthase
  misc_feature: Homolog of GI Number: 6573738 NR Desc: F20B24.13
  misc_feature: Homolog of GI Number: 19746072 NR Desc: putative phosphoribosyl pyrophosphate synthetase
  misc_feature: Useful for making bigger plants
  misc_feature: Useful for making plants with increased biomass and foliage
  misc_feature: Useful for making shorter plants
  misc_feature: Useful for making shorter plants and plants with modified flowers
MEVVVAAKQKAKKHIHLFYCSECEELALKIAASSDAIELQSINWRSFDDGFPNLFINKAHDIRGQHVAFLASFSSPSVIFEQISVIFALPKLFIASFTLVLPFFPTGSFERVEEEGDVATAFTLARILSMIPKSRGGPTSVVIYDIHALQERFYFGDDVLPCFETGIPLLLQRLRQLPDAENITIAFPDDGAWKRFHKLLQHFPMIVCNKVREGDKRIVRIKEGLPEGRHVVIVDDLVQSGGTLRECQKVLALHGAAKVSAYVTHAVFPKQSYERFMASSSAGPGDQFAYFWITDSCPHTVKAIGQRPPFEVLSLAGSIADALQI

SEQ ID NO: 7557 - DNA, 751 bp, Zea mays
  misc_feature: Ceres CLONE ID no. 1380550
  misc_feature: Ceres CDNA ID no. 29191354
  CDS (100)..(558): REFERENCED BY SEQ ID NO: 7558
ctagtttttctaatcggtttgcgcgagagagtttagagtgtaaaacggcgagagcttctctcatcttctcactcaggcagcttctattccaaccgaacaatgtcgctggtagcaaacgaggagttccagcacattctgcgtgtgctcaacaccaacgtcgatggcaagcagaagattatgtttgctcttacctccatcaagggtattggaaggagactagccaacattgtctgcaagaaagccgatgtcgacatgaacaagagggccggtgagttgtctgcagctgagatcgacaacctcatgaccatcgtagcgaacccgaagcagtacaagattccagactggttcttgaacagacagaaggactacaaggatggaaagtactcccaggttgtttccaatgccctcgacatgaagctcagggatgatcttgaacgcctcaagaagatcaggaaccaccgtgggctgaggcactactggggtctccgtgtccgtggacaacacaccaagacaactggtcgcagaggaaagactgttggtgtctctaagaagcgttaagagaatgatgttatctgcagctggattggatctttgataaggcccgtttttttatgttttgttgtttcgtacaattttgcaagtctcaaaatctggattttaggtttttttttgtaagacatccttcacttgtttttttacatttcgttatattacttttgtcacggtattaaaaagaaaaaaaaaaaaaaaa

SEQ ID NO: 7558 - protein, 152 aa, Zea mays; identical to SEQ ID NO: 6138
  misc_feature: Ceres CLONE ID no. 1380550
  misc_feature: Ceres CDNA ID no. 29191354
  misc_feature (14)..(142): Pfam Name: Ribosomal_S13 PFAM Desc: Ribosomal protein S13/S18
  misc_feature: Homolog of GI Number: 56236126 NR Desc: At1g22780
  misc_feature: Homolog of GI Number: 17978783 NR Desc: S18.A ribosomal protein
  misc_feature: Homolog of GI Number: 40287492 NR Desc: putative ribosomal protein
  misc_feature: Homolog of GI Number: 22204120 NR Desc: putative ribosomal protein S18
  misc_feature: Homolog of GI Number: 50919149 NR Desc: putative ribosomal protein S18A
  misc_feature: Homolog of GI Number: 50934523 NR Desc: putative ribosomal protein S18
  misc_feature: Homolog of GI Number: 24266988 NR Desc: ribosomal protein S18
  misc_feature: Homolog of GI Number: 71040621 NR Desc: ribosomal protein S18
  misc_feature: Homolog of GI Number: 67083901 NR Desc: ribosomal protein S18

SEQ ID NO: 7559 - DNA, 683 bp, Zea mays
  misc_feature: Ceres CLONE ID no. 1380736
  misc_feature: Ceres CDNA ID no. 25401382
  CDS (52)..(492): REFERENCED BY SEQ ID NO: 7560
acccatccactcccaagtcccaacacccgtcggcgtcgagcagcggcggcgatgacgacgagcctgaagaagaaccggaagaagcgcgggcacgtgtcggcggggcacggccgcatcggcaagcaccggaagcacccgggaggccgcggcaacgccggcggcatgcaccaccaccgcatcctcttcgacaagtaccacccgggctacttcggcaaggtgggcatgcgctacttccacaggctccgcaacaagttccactgcccgtcggtcaacgtggagaggctctggtcgatggttcccgccggcaaggccgcggaggcggtcggcgcggaccaggccccgctcgtcgacgtgacgcagttcggctacttcaaggtgctcggcaaggggatgctgccgtccaggcccatcgtcgtcaaggccaagctcatctccaaggtcgccgagaagaagatcaaggctgccggaggcgccgtcctgctgaccgcttaggtccttttgcatcttgtttcaactatctgcgctaagaaatattctatcttttttgggtggatttatgaggccctggttttgagcacttggtaacgaatatgagttcgattatatcgatgctccacatctcttgctgcatgtattattcattctatgcagttcatgttttggcattaaaaaaaaaaaaaaaa

SEQ ID NO: 7560 - protein, 146 aa, Zea mays
  misc_feature: Ceres CLONE ID no. 1380736
  misc_feature: Ceres CDNA ID no. 25401382
  misc_feature (108)..(140): Pfam Name: L15 PFAM Desc: Ribosomal protein L15
  misc_feature: Homolog of GI Number: 50939233 NR Desc: putative 60S ribosomal protein L27a
  misc_feature: Homolog of GI Number: 50916422 NR Desc: putative ribosomal protein L27a
  misc_feature: Homolog of GI Number: 50251205 NR Desc: putative 60S ribosomal protein L27a
  misc_feature: Homolog of GI Number: 7959355 NR Desc: 60S ribosomal protein L27a
  misc_feature: Homolog of GI Number: 76160998 NR Desc: ribosomal protein L27a
  misc_feature: Homolog of GI Number: 3608481 NR Desc: ribosomal protein L27a
  misc_feature: Homolog of GI Number: 23308283 NR Desc: At1g23290/F26F24_23
  misc_feature: Homolog of GI Number: 20147177 NR Desc: At1g70600/F5A18_22
  misc_feature: Homolog of GI Number: 21553702 NR Desc: 60S ribosomal protein L27A
  misc_feature: Homolog of GI Number: 22758850 NR Desc: ribosomal protein L22
  misc_feature: Useful for making plants with altered leaf shape eg curled leaves
  misc_feature: Useful for making plants with increased biomass
MTTSLKKNRKKRGHVSAGHGRIGKHRKHPGGRGNAGGMHHHRILFDKYHPGYFGKVGMRYFHRLRNKFHCPSVNVERLWSMVPAGKAAEAVGADQAPLVDVTQFGYFKVLGKGMLPSRPIVVKAKLISKVAEKKIKAAGGAVLLTA

SEQ ID NO: 7561 - DNA, 649 bp, Zea mays
  misc_feature: Ceres CLONE ID no. 1381157
  misc_feature: Ceres CDNA ID no. 36706978
  CDS (65)..(475): REFERENCED BY SEQ ID NO: 7562
atcattcacattctcgcacaaagcaaatcacaaaagagtaagattcgttctctatcagcagcaaatggctcgtaccaagcaaaccgcgagaaaatccaccggaggaaaggctccgaggaagcagctggcgacgaaagcggcgaggaaatcggctccggccaccggaggagtgaagaagccgcacagattccgtcccggaacggtggcgttgagggagatcaggaagtaccagaagagcaccgagcttctgatccgcaagcttcctttccagcgccttgtccgtgagatcgctcaggatttcaagacggatctgaggttccagagcagcgccgtcgcggctcttcaggaagcggcggaggcttaccttgtcgggctgttcgaggacacgaatctgtgtgcgattcacgccaagagggtcaccatcatgcctaaggacatccagcttgcaagaagaatcaggggtgagagggcttaagaagagataaagaagaacagtggtttttaagtaatgctttggttgtttagttggttgtgtaaatctcttttaaaaatgttcgcttgtgttagtgttggtttcaagtcttttgatttgatgaatatgtctacttaatatcaatctagtgttatttctccaaaaaaaaaaaaaaaa

SEQ ID NO: 7562 - protein, 136 aa, Zea mays; identical to SEQ ID NO: 358
  misc_feature: Ceres CLONE ID no. 1381157
  misc_feature: Ceres CDNA ID no. 36706978
  misc_feature (58)..(134): Pfam Name: Histone PFAM Desc: Core histone H2A/H2B/H3/H4
  misc_feature: Homolog of GI Number: 59799581 NR Desc: Histone H3
  misc_feature: Homolog of GI Number: 50728592 NR Desc:  similar to histone protein Hist2h3c1
  misc_feature: Homolog of GI Number: 1362108 NR Desc: histone H3 homolog
  misc_feature: Homolog of GI Number: 55775689 NR Desc: histone 3
  misc_feature: Homolog of GI Number: 166384 NR Desc: histone H3
  misc_feature: Homolog of GI Number: 122083 NR Desc: Histone H3
  misc_feature: Homolog of GI Number: 73808028 NR Desc: histone H3
  misc_feature: Homolog of GI Number: 122070 NR Desc: Histone H3
  misc_feature: Homolog of GI Number: 68441481 NR Desc:  similar to CG31613
  misc_feature: Homolog of GI Number: 74003975 NR Desc:  similar to histone 1

SEQ ID NO: 7563 - DNA, 826 bp, Zea mays
  misc_feature: Ceres CLONE ID no. 1381318
  misc_feature: Ceres CDNA ID no. 29191309
  CDS (37)..(693): REFERENCED BY SEQ ID NO: 7564
aacatcaatcttcttccttctctcgaagccaaaaccatggcgctactactatggcaaactctaaaagaagcgatacatgcttacacaggtctctccccggtggtcttcttcaccgccctcgctctcgccttctccatttaccaagtcgtctcaggctggttcgcttcgcctttcgatgatgttcgccgacatcagagggctagatcctcggctgcagaggaagcaccaccgattcctcagcctgttcaggtcggcgagatcacagaggaggagcttaagcagtacgatggctccgatcctcaaaagccccttcttatggccatcaaacatcagatctatgacgtaactcaaagcaggatgttctatggaccaggagggccatatgctttgtttgcagggaaagacgcaagccgagcgcttgcaaagatgtcgtttgaggagaaagatctgacttgggatatctctggtcttggtccctttgagcttgaagctcttcaggactgggagtacaagttcaagagcaagtatgccactgttggcactgtcaaagtgaccgtttcagaagctgaaactgcatctgtgtctgaacccgcagagactgatgacggagacgctcatgtaatcaagcaagaaccgacagttgttgataagaatcttgagactcctgctgagagtgatgtgaagaacgagtagattctgtttccgtgatttactctgatgatgttgaagtttcaatgatataatctttgtttcattacctcaaaaaccgagtttgctggttaataaagtatttataaaatgctcgatcacaaaaaaaaaaaaaaaa

SEQ ID NO: 7564 - protein, 218 aa, Zea mays
  misc_feature: Ceres CLONE ID no. 1381318
  misc_feature: Ceres CDNA ID no. 29191309
  misc_feature (74)..(171): Pfam Name: Cyt PFAM Desc: Cytochrome b5
  misc_feature: Homolog of GI Number: 21555444 NR Desc: progesterone
  misc_feature: Homolog of GI Number: 24030304 NR Desc: putative progesterone
  misc_feature: Homolog of GI Number: 37535798 NR Desc: putative steroid membrane binding protein
  misc_feature: Homolog of GI Number: 19310509 NR Desc: AT3g48890/T21J18_160
  misc_feature: Homolog of GI Number: 4960154 NR Desc: putative progesterone
  misc_feature: Homolog of GI Number: 50911086 NR Desc: steroid membrane binding protein
  misc_feature: Homolog of GI Number: 37535794 NR Desc: putative steroid membrane binding protein
  misc_feature: Homolog of GI Number: 78708870 NR Desc: steroid membrane binding protein
  misc_feature: Homolog of GI Number: 50915542 NR Desc: cytochrome b5 domain
  misc_feature: Homolog of GI Number: 62903498 NR Desc: Putative steroid binding protein 3
  misc_feature: Useful for decreasing plant size
  misc_feature: Useful for sterility
  misc_feature: Useful for sterility
MALLLWQTLKEAIHAYTGLSPVVFFTALALAFSIYQVVSGWFASPFDDVRRHQRARSSAAEEAPPIPQPVQVGEITEEELKQYDGSDPQKPLLMAIKHQIYDVTQSRMFYGPGGPYALFAGKDASRALAKMSFEEKDLTWDISGLGPFELEALQDWEYKFKSKYATVGTVKVTVSEAETASVSEPAETDDGDAHVIKQEPTVVDKNLETPAESDVKNE

SEQ ID NO: 7565 - DNA, 681 bp, Zea mays
  misc_feature: Ceres CLONE ID no. 1381922
  misc_feature: Ceres CDNA ID no. 25446542
  CDS (66)..(521): REFERENCED BY SEQ ID NO: 7566
atcccaaaacctaaatcccctcttcgtttccgagaaaaccaaagaaaaagagagagagactcacgatggcaccaaaggcaggaaagaaaccagcagagaagaaacccgccgccgcagagaagccagtggaggaagagaaggtagcggagaaagcaccagctgagaagaagcccaaggccggaaagaagctacctaaggaagccatcggcgcgaccgacaagaagaagaagcgcagcaagaagaacatcgagacgtacaagatatacatcttcaaggttcttaagcaagtccacccagacatcggaatctcgagtaaggccatggggatcatgaacagcttcatcaacgacatcttcgagaagcttgctcaggaagcgtcgaaactcgcaaggtacaacaagaagccgaccattacttctcgcgagatccagacagctgttagacttgttcttcctggtgagcttgctaagcacgccgtgtctgaaggaaccaaggctgtgactaagtttactagctcttgaatgaaatcacttgttaggattctagatctgagcgcttttgggtttgtcttttggtttggattatgctcatcttagctttatgatttggtgactgtgtaagagcatatggaatgattaatcgtctctttctgtttaaaaaaaaaaaaaaaaaaaaaaaaaa

SEQ ID NO: 7566 - protein, 151 aa, Zea mays
  misc_feature: Ceres CLONE ID no. 1381922
  misc_feature: Ceres CDNA ID no. 25446542
  misc_feature: No seed is being produced by the plant
  misc_feature: The plant flowers significantly late compared to wild-type.
  misc_feature: Useful for biocontainment applications
  misc_feature: Useful for making plants with modulated flowering time
  misc_feature (58)..(130): Pfam Name: Histone PFAM Desc: Core histone H2A/H2B/H3/H4
  misc_feature: Homolog of GI Number: 21553526 NR Desc: putative histone H2B
  misc_feature: Homolog of GI Number: 21617908 NR Desc: histone H2B
  misc_feature: Homolog of GI Number: 21554180 NR Desc: histone H2B
  misc_feature: Homolog of GI Number: 12083300 NR Desc: putative histone H2B protein
  misc_feature: Homolog of GI Number: 30102580 NR Desc: At3g45980
  misc_feature: Homolog of GI Number: 2558962 NR Desc: histone H2B1
  misc_feature: Homolog of GI Number: 21536602 NR Desc: histone H2B
  misc_feature: Homolog of GI Number: 82400146 NR Desc: histone H2B
  misc_feature: Homolog of GI Number: 2746719 NR Desc: histone H2B
  misc_feature: Homolog of GI Number: 3021489 NR Desc: histone H2B
MAPKAGKKPAEKKPAAAEKPVEEEKVAEKAPAEKKPKAGKKLPKEAIGATDKKKKRSKKNIETYKIYIFKVLKQVHPDIGISSKAMGIMNSFINDIFEKLAQEASKLARYNKKPTITSREIQTAVRLVLPGELAKHAVSEGTKAVTKFTSS

SEQ ID NO: 7567 - DNA, 651 bp, Zea mays
  misc_feature: Ceres CLONE ID no. 1382087
  misc_feature: Ceres CDNA ID no. 29191895
  CDS (60)..(485): REFERENCED BY SEQ ID NO: 7568
aaaacaaacaacaagcaaacccaaagcaatttgacttactactccatctagaaaaatcaatggcgcccaaggcagcagagaagaagcccgcggagaagaagacggctgagaaagcaccggcggagaagaagccaaaggccggtaagaagctcccgaaggatccctccgccgtcgccggagacaagaagaagaagcggtccaagaagagcgtcgagacgtacaagatctacatcttcaaggtgctgaagcaggtccacccagacatcgggatctcgagcaaagccatggggatcatgaacagcttcatcaacgacatcttcgagaagctcgccggcgagtcttccaagctcgcgaggtacaacaagaagcccacgatcacttcccgggagattcagacggctgtgagactcgtcttgcctggtgagctggcgaaacacgctgtttccgaagggaccaaggcggtgactaagttcacgagctcctgaactgtttgagttagggtttttatctcttgcgtttttgcaatctcatgttttgtaaagtactgcgaattggtatgtttcgaatctaatgtcccatgtctttgtatctttaatgcgtcgatattgagatctataatgaagtttatattcgccaaaaaaaaaaaaaaaa

SEQ ID NO: 7568 - protein, 141 aa, Zea mays
  misc_feature: Ceres CLONE ID no. 1382087
  misc_feature: Ceres CDNA ID no. 29191895
  misc_feature: No seed is being produced by the plant
  misc_feature: The plant flowers significantly late compared to wild-type.
  misc_feature: Useful for biocontainment applications
  misc_feature: Useful for making plants with modulated flowering time
  misc_feature (48)..(120): Pfam Name: Histone PFAM Desc: Core histone H2A/H2B/H3/H4
  misc_feature: Homolog of GI Number: 2558962 NR Desc: histone H2B1
  misc_feature: Homolog of GI Number: 3021485 NR Desc: histone H2B
  misc_feature: Homolog of GI Number: 21536602 NR Desc: histone H2B
  misc_feature: Homolog of GI Number: 10177235 NR Desc: histone H2B like protein
  misc_feature: Homolog of GI Number: 82400146 NR Desc: histone H2B
  misc_feature: Homolog of GI Number: 1617013 NR Desc: histone H2B like protein
  misc_feature: Homolog of GI Number: 30102580 NR Desc: At3g45980
  misc_feature: Homolog of GI Number: 21617908 NR Desc: histone H2B
  misc_feature: Homolog of GI Number: 12083300 NR Desc: putative histone H2B protein
  misc_feature: Homolog of GI Number: 21592734 NR Desc: putative histone H2B
  misc_feature: Useful for delaying flowering time
  misc_feature: Useful for increasing chlorophyll and photosynthetic capacity
  misc_feature: Useful for making plants with altered leaf shape eg curled leaves
  misc_feature: Useful for making plants with altered leaf shape eg curled leaves
  misc_feature: Useful for making plants with increased biomass and foliage
  misc_feature: Useful for making plants with increased biomass and foliage
  misc_feature: Useful for sterility
  misc_feature: Useful for sterility
MAPKAAEKKPAEKKTAEKAPAEKKPKAGKKLPKDPSAVAGDKKKKRSKKSVETYKIYIFKVLKQVHPDIGISSKAMGIMNSFINDIFEKLAGESSKLARYNKKPTITSREIQTAVRLVLPGELAKHAVSEGTKAVTKFTSS

SEQ ID NO: 7569 - DNA, 1076 bp, Zea mays
  misc_feature: Ceres CLONE ID no. 1382151
  misc_feature: Ceres CDNA ID no. 25447005
  CDS (146)..(382): REFERENCED BY SEQ ID NO: 7570
atatttgctgcgcactcatctccctcagctagctcgaccgcctctctctggtctctagcgctgtggagctccttcctacgtgcgctagccgccaggtcgtcttcaacctccatccgtggagctcgctccctagccgagtttttccatggtgccctggatgccagcccctttactcgatgcccctgctaggttcctggcatgttcgcccagaccgatgcctagctcccatggccgccctggatctccatggttgagttttctccctgcaggatccccccaaatagcgcctggtctttttcccttggtcgaaaacacctctggtgctgcccctccctggaactcgcctcccgcctctgcttgtccatttcctgcagcaacctgatgatcccttttcctttcctcccatgttgaagcacttaaccccccctctgttgatggtcgacgtctcttcatccatggtacctaggtctccatccccatgcccctgcagcttgttctcaagccgccaaccatggagaaacttccggtgttggagggcgaagagctcgaagttctaaaggtaacgcccgccgggtgcttggtggaacgtctcaaccggaggttgttgtcgatctctcggattcgaggcgatttagttgtggtacgttaattgatcacgtgatgtggaagacaatagttggattaatctcaaagtgatgctgatgaataaaccagagaagtggatgatttgatcatgtaccaggatgggagatgctcaccaagtgatcgtcatctaacaacactgacttagtgttatcccaggttgtaatttttgttctgttgtggatggtgctaagtgccggtgggctcggccttcttatataagtatatcccttctatagtttctttaatgaggattgtcacttaagctagcatgtatttcaaatttacaaatattctataacattttaaagtgtaattcttttgaaacactttcttttgtaatcactccgatgaggtataataaaatcttgataaacttgtaatcattttgtaataaagagtttatttccaaaaaaagaaaaaaaaaaaaaaaa

SEQ ID NO: 7570 - protein, 56 aa, Zea mays
  misc_feature: Ceres CLONE ID no. 1382151
  misc_feature: Ceres CDNA ID no. 25447005
MPLQLVLKPPTMEKLPVLEGEELEVLKVTPAGCLVERLNRRLLSISRIRGDLVVVR

SEQ ID NO: 7571 - DNA, 707 bp, Zea mays
  misc_feature: Ceres CLONE ID no. 1382254
  misc_feature: Ceres CDNA ID no. 29191896
  CDS (42)..(488): REFERENCED BY SEQ ID NO: 7572
aggtatcgccgactagtaagtaacatcaaaaagaatcgacaatggagcaaactttcatcatgatcaagcccgacggcgtccaaaggggtctggtcggtcaaatcatctgcaggttcgagcagaagggtttcactttgaaaggtctaaagctgatcacagtggaccgtccttttgctgagaaacactaccaagacttgtcagccaagcccttcttcagtggtcttgttgattacataatctctggcccagtcgttgcaatgatctgggagggaaagaatgttgtgttgacaggaaggaagatcatcggagcaacgaaccctgcagcatctgagccaggaaccatccgtggggattttgcaattgacattgggaggaacattatccatgggagtgactcggtggagagtgctaacaaggagtgtgcgttgtggttccctgatggacctgtgaactggcagagcagccttcattcttggatctacgaatgattctctatcgttctgtgatcctttgtttcggttgttgtttatgagtcaaaacatgtttctctcctttgtttttgttgcaagctctgttgctttccgcctctttgcatcttttttttttgaagtttgaatctcagaacatgactcttttttttttttgtgtgagggtttctttgaaccgtcttatattatctttctacccgagcaaaaaaaaaaaaaaaa

SEQ ID NO: 7572 - protein, 148 aa, Zea mays; identical to SEQ ID NO: 5716
  misc_feature: Ceres CLONE ID no. 1382254
  misc_feature: Ceres CDNA ID no. 29191896
  misc_feature (2)..(136): Pfam Name: NDK PFAM Desc: Nucleoside diphosphate kinase
  misc_feature: Homolog of GI Number: 19744165 NR Desc: NDPK I
  misc_feature: Homolog of GI Number: 18413214 NR Desc: nucleoside diphosphate kinase 1
  misc_feature: Homolog of GI Number: 7267574 NR Desc: nucleoside
  misc_feature: Homolog of GI Number: 16396 NR Desc: nucleoside diphosphate kinase
  misc_feature: Homolog of GI Number: 1236951 NR Desc: nucleoside diphosphate kinase
  misc_feature: Homolog of GI Number: 71040669 NR Desc: nucleoside diphosphate kinase I
  misc_feature: Homolog of GI Number: 3309053 NR Desc: nucleoside diphosphate kinase I
  misc_feature: Homolog of GI Number: 1389640 NR Desc: PNDKN1
  misc_feature: Homolog of GI Number: 26245403 NR Desc: nucleoside diphosphate kinase
  misc_feature: Homolog of GI Number: 296174 NR Desc: nucleoside

SEQ ID NO: 7573 - DNA, 690 bp, Zea mays
  misc_feature: Ceres CLONE ID no. 1382303
  misc_feature: Ceres CDNA ID no. 40351774
  CDS (71)..(460): REFERENCED BY SEQ ID NO: 7574
attcctcggagagggagaagccgccgccgcagcaatcacagcagcccggagaaagcccaggtccgacaagatgcagatcttcgtgaagacgctgacagggaagaccatcaccctcgaggtcgagagcagcgacaccatcgacaatgtcaaggccaagatccaggacaaggaagggatcccgccggaccagcagcggctgatctttgccgggaagcagctggaggatggccgcacccttgcggactataacatccaaaaggagtctacgcttcacctcgtgcttaggctccgcggtggcatcattgagccctcgctgcaggcgctcgctcgcaagtacaaccaggacaagatgatctgccgcaaatgctatgcacgactgcaccctagggctgtcaactgccgcaagaagaagtgtggtcacagcaaccagctgagggccaagaagaagatcaagaactgaggtgctgctcctagtcagtttcatggacaatgttgggctgtattgctgtgtggttgttgaaccgtgtttgtttacccaacatttgggccttctgttatgttttaccttgttgtcgatgacacaatactatatgacaatagcaactctgttattgtagttttggtcactgttcacctgatatgtgccatatttcggtaagtatcgttagtgggcgaaaaaaaaaaaaaaaa

SEQ ID NO: 7574 - protein, 129 aa, Zea mays; identical to SEQ ID NO: 434
  misc_feature: Ceres CLONE ID no. 1382303
  misc_feature: Ceres CDNA ID no. 40351774
  misc_feature (1)..(74): Pfam Name: ubiquitin PFAM Desc: Ubiquitin family
  misc_feature (77)..(128): Pfam Name: Ribosomal_L40e PFAM Desc: Ribosomal L40e family

SEQ ID NO: 7575 - DNA, 818 bp, Zea mays
  misc_feature: Ceres CLONE ID no. 1382605
  misc_feature: Ceres CDNA ID no. 25401383
  CDS (26)..(577): REFERENCED BY SEQ ID NO: 7576
attgttgcattcaagcacttgagccatggcttcactttcagtctcttcctcctcgacgatcatcgactcaagagctcctcctccttcttctcgacaagcctcctcctcttctccttcttgtatttcccttccgacacttcctcctcagccggctcagtctcagacacgcgccgcgaaagccactgcttactgtcggaagattgtgaggaacgttttgacgagagctgcggatgttgaagttgctgccactactcaagttgaagctcctgccaccaataccgaagctgcgagtacagagttacctgatattgtcaaaaccgttcaagaagcttgggacaaagtggaggataagtatgcagttagttctctcgcagtttctggttttgtggctctttggggaactgctggtgtgatctcggcaatcgacaggcttccgttggttcctggtgttcttgaagttgttggtattggttacacagggtggtttgcatacaagaacctgatattcaagccagacagggagactctaattcagaaggtgaaggacacgtacagagacataatagggagcaactgaaccagaggatgaagaagaagaagaagaagagccttttagaggggccattcatgaattgaatgaatctaacacagcccacatccttcattcaatcttcccttctcgtaactaaataattatacatcctctttgtctcgggtatcgttttagctcaaaatatatcatacatccatctatgtcagtgttgtaaattcctcaagactatatatatgagagatgtttgttaaaaaaaaaaaaaaaa

SEQ ID NO: 7576 - protein, 183 aa, Zea mays
  misc_feature: Ceres CLONE ID no. 1382605
  misc_feature: Ceres CDNA ID no. 25401383
MASLSVSSSSTIIDSRAPPPSSRQASSSSPSCISLPTLPPQPAQSQTRAAKATAYCRKIVRNVLTRAADVEVAATTQVEAPATNTEAASTELPDIVKTVQEAWDKVEDKYAVSSLAVSGFVALWGTAGVISAIDRLPLVPGVLEVVGIGYTGWFAYKNLIFKPDRETLIQKVKDTYRDIIGSN

SEQ ID NO: 7577 - DNA, 1283 bp, Zea mays
  misc_feature: Ceres CLONE ID no. 1382608
  misc_feature: Ceres CDNA ID no. 25891080
  CDS (69)..(1139): REFERENCED BY SEQ ID NO: 7578
atctatttatgacttctctcaaccagcaataacgaaaacgtctctcctctctatctctctttaaaaaaatggacggcgtagcattcttcttcaccggagctctcgtagccggcggaatctactggttcctgtgcgtcctgggaccagcggagcgaaaaggaaaacgagcgttggatctatcgggggggtccatctcggccgagaaagttcaagacaagtacaaacagtactggtcgttcttccgccgtccgaaagagatcgaaaccgccgagaaagtcccggacttcgtcgacacgttctacaacctcgtcaccgacatctacgagtggggatggggacagtccttccacttctctccttccatccgaggcaaatcccaccgcgacgccacgcgcctccacgaagagatggccgtagatctgatccaagtgaaaccgggtcaaaagatcctcgatgtcggatgcggcgtcggaggtccgatgcgcgcgattgcatcccactcgcgagccaacgtggtggggatcacgatcaacgagtaccaggtgaagagagcgcgtgaccacaacagaaaagcaggactcgacgcgctctgcgaggtcgtgtgtggtaacttcctccagatacccttcgatgataacaccttcgacggcgcgtactctatcgaagcgacgtgtcacgcgccgaagctggaagaagtctacgccgagatctacagggtgttgaaacccggatctttgtacgtatcgtacgagtgggtcaccactgataagttcaacgccgaggatgaggaacacgtggaggtcatccaaggcatcgagaggggtgacgcgcttcctgggcttagggcttactcggatatagccgaggccgccaagaaagttggcttccaagttgtcaaggagaaggatctagcggctccaccggctgagccgtggtggactaggcttaagatgggtcggctcgcttattggaggaaccacattgtggttcagattctgtctgctgttggagttgcgcctaagggaaccgtcgatgttcacgagatgttgtttaagactgctgatttcttgtccagaggaggcgaaactgaaattttctctccgatgcatatgattctctgccggaaacctatgtcttaaacgataatcatttcccgatctcagtttgtttttaattttttttcttatggatttttgattttgcctggtcagtcaatgtactcctttagattttaattttaatttggtattactgttttttcttgcctaaaaaaaaaaaaaaaa

SEQ ID NO: 7578 - protein, 356 aa, Zea mays
  misc_feature: Ceres CLONE ID no. 1382608
  misc_feature: Ceres CDNA ID no. 25891080
  misc_feature (107)..(294): Pfam Name: Ubie_methyltran PFAM Desc: ubiE/COQ5 methyltransferase family
  misc_feature: Homolog of GI Number: 3560533 NR Desc: 24
  misc_feature: Homolog of GI Number: 68566013 NR Desc: 24
  misc_feature: Homolog of GI Number: 62900893 NR Desc: 24
  misc_feature: Homolog of GI Number: 22136020 NR Desc: 24
  misc_feature: Homolog of GI Number: 21360447 NR Desc: At1g76090/T23E18_40
  misc_feature: Homolog of GI Number: 2246454 NR Desc: S
  misc_feature: Homolog of GI Number: 2246456 NR Desc: S
  misc_feature: Homolog of GI Number: 2246452 NR Desc: S
  misc_feature: Homolog of GI Number: 23397216 NR Desc: putative sterol
  misc_feature: Homolog of GI Number: 21555010 NR Desc: sterol
  misc_feature: Useful for making ornamental plants with modified flowers
  misc_feature: Useful for sterility
MDGVAFFFTGALVAGGIYWFLCVLGPAERKGKRALDLSGGSISAEKVQDKYKQYWSFFRRPKEIETAEKVPDFVDTFYNLVTDIYEWGWGQSFHFSPSIRGKSHRDATRLHEEMAVDLIQVKPGQKILDVGCGVGGPMRAIASHSRANVVGITINEYQVKRARDHNRKAGLDALCEVVCGNFLQIPFDDNTFDGAYSIEATCHAPKLEEVYAEIYRVLKPGSLYVSYEWVTTDKFNAEDEEHVEVIQGIERGDALPGLRAYSDIAEAAKKVGFQVVKEKDLAAPPAEPWWTRLKMGRLAYWRNHIVVQILSAVGVAPKGTVDVHEMLFKTADFLSRGGETEIFSPMHMILCRKPMS

SEQ ID NO: 7579 - DNA, 968 bp, Zea mays
  misc_feature: Ceres CLONE ID no. 1383907
  misc_feature: Ceres CDNA ID no. 40351775
  CDS (133)..(756): REFERENCED BY SEQ ID NO: 7580
aagttctcttctccacacgacacttacagagtttaaggtattattcccttccatcttcctctgcattgtcggttctctcgtaggtccgtatcttgcgtgttctcagctaatcctctgttgatcttcccagccatggccgcagccgtagaaatcgacgctgagattcagcagcaacttaccaacgaggtcaagctcttcaaccgctggagcttcgatgatgtctcggtcacagacattagtcttgttgactacattggtgttcagcctgcgaaacacgcgacctttgttccccacaccgctggaagatactctgtcaagaggttcaggaaggctcaatgccctattgttgagaggctcacgaactctctcatgatgcacggaaggaacaacggtaagaagttgatggctgtgaggatcatcaagcacgccatggagattatccacctcttgactgacgccaaccctattcaagttatcattgacgccattgttaacagtggtccacgtgaagatgctaccaggattggatctgctggtgtggttaggaggcaggccgttgatatctctcctctaagacgtgtgaaccaagctatcttcctgcttacaactggtgcacgtgaagctgccttcagaaacatcaagaccatcgctgagtgccttgctgatgagctcattaatgctgccaagggatcttccaacagctatgccatcaagaagaaagatgagattgagagagttgctaaggccaaccgttaaagggatcttcctttgtcctatagtttgcattgtatctcaaagacctcttttgtgctgttttcattagcttttggatatgtttaaaaagtttcttctctatcttgaatgaagttttgacgctttaaaccacttttgttcttgatcaaaattgtttcatctttaagaatatttgatatttatataagcaggtatctctaaaaaaaaaaaaaaaa

SEQ ID NO: 7580 - protein, 207 aa, Zea mays
  misc_feature: Ceres CLONE ID no. 1383907
  misc_feature: Ceres CDNA ID no. 40351775
  misc_feature: The plant flowers significantly late compared to wild-type.
  misc_feature: The plant is abnormally small.
  misc_feature: Useful for making plants with modulated biomass
  misc_feature: Useful for making plants with modulated flowering time
  misc_feature (54)..(207): Pfam Name: Ribosomal_S7 PFAM Desc: Ribosomal protein S7p/S5e
MAAAVEIDAEIQQQLTNEVKLFNRWSFDDVSVTDISLVDYIGVQPAKHATFVPHTAGRYSVKRFRKAQCPIVERLTNSLMMHGRNNGKKLMAVRIIKHAMEIIHLLTDANPIQVIIDAIVNSGPREDATRIGSAGVVRRQAVDISPLRRVNQAIFLLTTGAREAAFRNIKTIAECLADELINAAKGSSNSYAIKKKDEIERVAKANR

SEQ ID NO: 7581 - DNA, 1166 bp, Zea mays
  misc_feature: Ceres CLONE ID no. 1383939
  misc_feature: Ceres CDNA ID no. 25892369
  CDS (163)..(978): REFERENCED BY SEQ ID NO: 7582
aaacgctttaactgagattagattccccgaatattcgctctgtggccaaccacaaaaaaaccgctaacattttttttatcgtgtctccttctagcagaatcacctagaaacacaaagcgttactattttcgtctcctcgcaacctcctccaatcatcgaaaaatggctgaaaatggttctctagatcagttcttggctgctgccgttgatgccgctcaaaaagctggacaggtcattcgtaaaggcttttacgagaccaaacatgtcgaacacaaaggccaggtggatctggtgacggagactgataaaggatgtgaagagctcgtgtttaaccatctcaaacagcttttccccaatcacaagttcattggagaagaaacaacagctgcgaatggtgtgactgaactaacagacgaaccaacttggatcgttgatcctcttgatgggactactaacttcgttcacgggttcccttttgtctgtgtttccattggacttaccattgggaaagtccctgtggttggcgtcgtctataatcctatcatggatgagatgttcaccggtgtccaagggaaaggagccttcttgaatggcaaaccaatcaaagtgtcaactcagagcgagcttgtaaccgctttgctcctagcagaggcgggcactaaaagagataaagctacattagacgatgctaccaacagaatcaacagtttgttaaccaaggtgaggtccctgaggatgggtggctcgtgcgcactggacctctgcggtgtcgcttgtggaaggggtgacatcttctatgaaattggttttggcggtccatgggacattgcagcaggaattgtgattgttagagaagctggtggacttatttttgatccatctggtaaagagttggacatcacatcgcagagaattgcggcttcaaacgcttcactcaaggagttgttcgtggaggcgttgcggcttacaaatgtgtgaagttacctattctttgctatggtcacaccttatgaaccatgtgaccaattaaagcatttatttttacaactatgtcacaaccaactgatttttcttttgaagttatatttctcctttatgctcattctaaaactctatatattcggtaccgaattcttttttttttttctccaaaaaaaaaaaaaaaa

SEQ ID NO: 7582 - protein, 271 aa, Zea mays
  misc_feature: Ceres CLONE ID no. 1383939
  misc_feature: Ceres CDNA ID no. 25892369
  misc_feature (6)..(271): Pfam Name: Inositol_P PFAM Desc: Inositol monophosphatase family
  misc_feature: Homolog of GI Number: 6728975 NR Desc: putative myo
  misc_feature: Homolog of GI Number: 21553679 NR Desc: putative myo
  misc_feature: Homolog of GI Number: 79312679 NR Desc: 3'
  misc_feature: Homolog of GI Number: 55275406 NR Desc: L
  misc_feature: Homolog of GI Number: 55275408 NR Desc: L
  misc_feature: Homolog of GI Number: 1709205 NR Desc: Inositol
  misc_feature: Homolog of GI Number: 1709203 NR Desc: Inositol
  misc_feature: Homolog of GI Number: 30143275 NR Desc: myo inositol monophosphatase isoform 1
  misc_feature: Homolog of GI Number: 3914097 NR Desc: Inositol
  misc_feature: Homolog of GI Number: 50399931 NR Desc: putative myo
MAENGSLDQFLAAAVDAAQKAGQVIRKGFYETKHVEHKGQVDLVTETDKGCEELVFNHLKQLFPNHKFIGEETTAANGVTELTDEPTWIVDPLDGTTNFVHGFPFVCVSIGLTIGKVPVVGVVYNPIMDEMFTGVQGKGAFLNGKPIKVSTQSELVTALLLAEAGTKRDKATLDDATNRINSLLTKVRSLRMGGSCALDLCGVACGRGDIFYEIGFGGPWDIAAGIVIVREAGGLIFDPSGKELDITSQRIAASNASLKELFVEALRLTNV

SEQ ID NO: 7583 - DNA, 1065 bp, Zea mays
  misc_feature: Ceres CLONE ID no. 1384349
  misc_feature: Ceres CDNA ID no. 29191195
  CDS (51)..(911): REFERENCED BY SEQ ID NO: 7584
attattacacactcatctagaaagagagagagagagaagaaactcaagagatggagggcaaggaagaagatgttagagtcggagccaacaaattccccgagagacaacccatcggaacatcggctcagagcgacaaagactacaaggagccgcctcctgcgccgttgttcgagcccggcgagcttgcgtcgtggtccttctggagagccggaatcgccgagttcatcgccacgtttctcttcctttacataactgtgttgaccgtcatgggtgtcaagaggtcaccgagcatgtgtgcttctgtcggaatccaagggatagcttgggctttcggtggtatgatcttcgctctcgtctactgtacggctggtatctccggtggacacatcaacccagcagtcacgtttggtctgtttctggctaggaagctttcgctcacacgagctgtgtactatatagtgatgcagtgcttaggagccatctgtggagctggtgtggtcaaggggttccaaccaaagcagtaccaagctctaggaggtggagctaacacggttgctcctggttacaccaaaggaagtggtctcggtgctgagattattggaacctttgtgctagtttacaccgtcttctccgctactgacgctaagagaaacgctcgtgattctcatgttcctattcttgcacctctcccaatcggattcgctgtgttcttggtccacttggcaaccatcccaatcactggaactggaatcaacccagcaagaagtcttggagctgcaatcatcttcaacaaggacaatgcttgggacgaccattgggtgttttgggttggaccattcatcggcgctgcacttgctgctctttaccacgtgatagtcatcagagccatcccattcaagtccagaagctgattgacttactcttcaaaaaaatatgtgcccttagtttgctttcttttgtgaattacttgtgtgaaacatcgtgtgtgtatgtgttgctgctctacattgcctgatgcaaactcttatacaatggaacgacattccccgaaaaaaaaaaaaaaaa

SEQ ID NO: 7584 - protein, 286 aa, Zea mays
  misc_feature: Ceres CLONE ID no. 1384349
  misc_feature: Ceres CDNA ID no. 29191195
  misc_feature (44)..(273): Pfam Name: MIP PFAM Desc: Major intrinsic protein
  misc_feature: Homolog of GI Number: 20453351 NR Desc: AT3g61430/F2A19_30
  misc_feature: Homolog of GI Number: 4467357 NR Desc: PIP1b protein
  misc_feature: Homolog of GI Number: 21536709 NR Desc: aquaporin
  misc_feature: Homolog of GI Number: 10799093 NR Desc: aquaporin PIP1b1
  misc_feature: Homolog of GI Number: 10799095 NR Desc: aquaporin PIP1b2
  misc_feature: Homolog of GI Number: 2199574 NR Desc: aquaporin
  misc_feature: Homolog of GI Number: 7209556 NR Desc: plasma membrane aquaporin 1b
  misc_feature: Homolog of GI Number: 20258955 NR Desc: putative aquaporin protein
  misc_feature: Homolog of GI Number: 1199804 NR Desc: transmembrane channel protein
  misc_feature: Homolog of GI Number: 1199503 NR Desc: transmembrane channel protein
  misc_feature: Useful for making smaller plants
MEGKEEDVRVGANKFPERQPIGTSAQSDKDYKEPPPAPLFEPGELASWSFWRAGIAEFIATFLFLYITVLTVMGVKRSPSMCASVGIQGIAWAFGGMIFALVYCTAGISGGHINPAVTFGLFLARKLSLTRAVYYIVMQCLGAICGAGVVKGFQPKQYQALGGGANTVAPGYTKGSGLGAEIIGTFVLVYTVFSATDAKRNARDSHVPILAPLPIGFAVFLVHLATIPITGTGINPARSLGAAIIFNKDNAWDDHWVFWVGPFIGAALAALYHVIVIRAIPFKSRS

SEQ ID NO: 7585 - DNA, 999 bp, Zea mays
  misc_feature: Ceres CLONE ID no. 1384524
  misc_feature: Ceres CDNA ID no. 25445961
  CDS (38)..(826): REFERENCED BY SEQ ID NO: 7586
ctgtttgctttcgtcgtcgagctaattatcctcagccatggccgtcgggaagaacaagagaatctctaaaggaagaaagggagggaagaagaagattgttgatcctttctccaagaaggattggtatgacatcaaggctccctctaacttcaataacagaaatgtcggaaagacacttgtttctagaactcagggtaccaagattgcatcagagggtttgaaacacagagttttcgaggtttctcttgctgatctccaaggggatgaggatcacgcttacaggaagatccgtctcagagctgaagatgtccagggcaggaatgtgttgacccagttctggggtatggacttcacaaccgacaagctcaggtccttggttaaaaagtggcagactttgatcgagtctcatgtcgatgtcaaaaccaccgataactacacactgaggcttttctgcatcgccttcaccaagagacgtgctaaccaagtcaagagaacttgctatgctcaatccagccaaatccgtcagattcgcagcaagatgagggagatcatgatcaaggaagcttcgtcttgtgacctcaaggagcttgttgccaagtttattcccgaagctattgggaaggatattgagaaggcgactcagggcatctaccctcttcagaatgttttcatccgtaaagtcaagatcctcaaggctcccaagttcgacctcggaaagctcatggaggttcacggagactacacagcagaggatgttggtgtcaaggttgacaggccggccgatgagactgctgccgaggaacctactgagatcattggagcttaagaggtgttttcgaagaagggatgaatttgagagatcgttttttcttctaaactttagtttctttaatgctttgtgtcttttcacactcttttggaccctcagcttcttaattttggtgtattaattacttttctcagtataaactcgagttttggataaaaaaaaaaaaaaaa

SEQ ID NO: 7586 - protein, 262 aa, Zea mays
  misc_feature: Ceres CLONE ID no. 1384524
  misc_feature: Ceres CDNA ID no. 25445961
  misc_feature (11)..(222): Pfam Name: Ribosomal_S3Ae PFAM Desc: Ribosomal S3Ae family
  misc_feature: Homolog of GI Number: 7270417 NR Desc: Putative S
  misc_feature: Homolog of GI Number: 21553921 NR Desc: putative 40S ribosomal protein S3A
  misc_feature: Homolog of GI Number: 7441118 NR Desc: ribosomal protein S3a
  misc_feature: Homolog of GI Number: 24817254 NR Desc: ribosomal protein S3a
  misc_feature: Homolog of GI Number: 1350983 NR Desc: 40S ribosomal protein S3a
  misc_feature: Homolog of GI Number: 6714564 NR Desc: cyc07
  misc_feature: Homolog of GI Number: 82400124 NR Desc: 40S ribosomal protein S3a
  misc_feature: Homolog of GI Number: 81074465 NR Desc: cyc07
  misc_feature: Homolog of GI Number: 483431 NR Desc: cyc07
  misc_feature: Homolog of GI Number: 82623437 NR Desc: 40S ribosomal protein S3a
  misc_feature: Useful for making shorter plants
  misc_feature: Useful for modifying plant structure
  misc_feature: Useful for sterility
MAVGKNKRISKGRKGGKKKIVDPFSKKDWYDIKAPSNFNNRNVGKTLVSRTQGTKIASEGLKHRVFEVSLADLQGDEDHAYRKIRLRAEDVQGRNVLTQFWGMDFTTDKLRSLVKKWQTLIESHVDVKTTDNYTLRLFCIAFTKRRANQVKRTCYAQSSQIRQIRSKMREIMIKEASSCDLKELVAKFIPEAIGKDIEKATQGIYPLQNVFIRKVKILKAPKFDLGKLMEVHGDYTAEDVGVKVDRPADETAAEEPTEIIGA

SEQ ID NO: 7587 - DNA, 626 bp, Zea mays
  misc_feature: Ceres CLONE ID no. 1384577
  misc_feature: Ceres CDNA ID no. 35383389
  CDS (85)..(459): REFERENCED BY SEQ ID NO: 7588
gtctcctcagctaaaagacgccgctcgtctcttcagacaagttccaccttctacgatttgttaaagagagaagagggttgaaagatgagtcgtggaagcgcagccgttgccaagggaaagaagaagggagtctccttctccattgactgctccaagcctgtcgatgacaagatcatggagattgcttccctcgagaagttccttcaggagaggatcaaagtcggtggcaaagccggtgcactcggtgactctgtcacgatcacacgtgacaagaacaagatcactgtcacttctgatggtcagttctccaaaaggtatctcaagtacttgacgaagaagtatttgaagaagcacaacgtgagggattggctcagagtgattgcagccaacaaggaccgtaacctctacgagttgaggtacttcaacatcgctgagaacgagggagaggaagaagactagaagatctttatactcttcttgtattggtttctgctcgttcgttgttgctcaatacaatttatatttcttgtttcacagatcttatctagttttggttgaagttaaaacttttgttttcagcacaattatttgagaaaaaaaatatcgtatgaaaaaaaaaaaaaaaa

SEQ ID NO: 7588 - protein, 124 aa, Zea mays
  misc_feature: Ceres CLONE ID no. 1384577
  misc_feature: Ceres CDNA ID no. 35383389
  misc_feature (9)..(124): Pfam Name: Ribosomal_L22e PFAM Desc: Ribosomal L22e protein family
  misc_feature: Homolog of GI Number: 6714454 NR Desc: putative 60S ribosomal protein  L22
  misc_feature: Homolog of GI Number: 12642842 NR Desc: putative 60S ribosomal protein L22
  misc_feature: Homolog of GI Number: 50939919 NR Desc: putative 60S ribosomal protein L22
  misc_feature: Homolog of GI Number: 42733478 NR Desc: BRI1
  misc_feature: Homolog of GI Number: 6056419 NR Desc: 60S ribosomal protein  L22
  misc_feature: Homolog of GI Number: 73956651 NR Desc:  similar to 60S ribosomal protein L22
  misc_feature: Homolog of GI Number: 33150766 NR Desc: heparin
  misc_feature: Homolog of GI Number: 13592059 NR Desc: ribosomal protein L22
  misc_feature: Homolog of GI Number: 6677775 NR Desc: ribosomal protein L22
  misc_feature: Homolog of GI Number: 55590474 NR Desc:  similar to ribosomal protein L22
MSRGSAAVAKGKKKGVSFSIDCSKPVDDKIMEIASLEKFLQERIKVGGKAGALGDSVTITRDKNKITVTSDGQFSKRYLKYLTKKYLKKHNVRDWLRVIAANKDRNLYELRYFNIAENEGEEED

SEQ ID NO: 7589 - DNA, 891 bp, Zea mays
  misc_feature: Ceres CLONE ID no. 1384583
  misc_feature: Ceres CDNA ID no. 40351776
  CDS (80)..(661): REFERENCED BY SEQ ID NO: 7590
gaagctaattaagaatctgaagatctctctctcttctctgtggcgatcgtggaggatcgagtagtagcgagtaatcatcatgttcatgatagattggttctacggtgttctcgcttcgctagggttatggcagaaagaggctaagatcttgttcctcggcctcgataacgccggcaaaaccaccttgcttcacatgctcaaggacgagagattggtgcagcaccagccgacgcagcatccgacgtctgaagagcttagcattggtaaaatcaagttcaaggcttttgatttgggcgggcatcagattgctcgcagggtctggaaggactactacgctaaggtggatgctgtggtgtacctagtggatgcttacgacaaggagagattcgcagaatcaaaaaaggaactggacgcacttctctcagacgaatctctagccaccgtccccttccttatccttggaaacaagatagacataccgtacgccgcatcagaggacgagctccgttaccatctcggcctctccaacttcaccacgggaaagggcaaagtgaacctagtggattccaacgtaagaccactggaagttttcatgtgcagcatcgtcaggaagatgggttatggcgaaggcttcaaatggctctctcagtacatcaagtaaccaagccccaccaagactcctctccaacacatggcgttattattgttaaaacatcaagtaagtttctataaatcctgttttgtattttgtcttgcgttttcttttctttttgcatgtgttgtaagaaatgtcgtgaaacttagcttctcgtgtgtctctctgcctttgtttcttgtagtgactttaaatttttaattcatattattttaaacttaaaaaaaaaaaaaaaa

SEQ ID NO: 7590 - protein, 193 aa, Zea mays
  misc_feature: Ceres CLONE ID no. 1384583
  misc_feature: Ceres CDNA ID no. 40351776
  misc_feature (5)..(192): Pfam Name: Arf PFAM Desc: ADP
MFMIDWFYGVLASLGLWQKEAKILFLGLDNAGKTTLLHMLKDERLVQHQPTQHPTSEELSIGKIKFKAFDLGGHQIARRVWKDYYAKVDAVVYLVDAYDKERFAESKKELDALLSDESLATVPFLILGNKIDIPYAASEDELRYHLGLSNFTTGKGKVNLVDSNVRPLEVFMCSIVRKMGYGEGFKWLSQYIK

SEQ ID NO: 7591 - DNA, 1233 bp, Zea mays
  misc_feature: Ceres CLONE ID no. 1385806
  misc_feature: Ceres CDNA ID no. 25447054
  CDS (149)..(1015): REFERENCED BY SEQ ID NO: 7592
aggccgcaaacccaggaaggcgccaggtgccctgtcgcagcagttcgcactccgcagggcaccaccgtccacctccaccgccaccgatcggtagcaacgcgcaccaccgcgtcgtcgtacggcagcacacggaaagagagagagaggaatgggcgaccacgagggtcacggggtcgatttcgagaagaaggccgatcagaagctctccggctggggcctcttcggcaataagtacgaggaagccgccgacctcctcgacagggctggcagcttcttcaaactcgcgaagaactggagcagagcggctgcggtatacaaaaagattgcagattgtcatttgcagggggataacaagcacgatgctgcctctgcttatgttgaggcagcaaactgctacaagaagttctccccgcaagatgctgcacaagcacttgacagtgccgttaatcttttcctggaaatcagtagactgaacatggctgcaagatacagcaaggatatcggtgaaatctatctgcaagaacaagatttagagaatgctgcagtctacctgaatcgagctgctgatctttttgatagtgagggacaatcctctcaggcaaacagcatgacacagaaaatcgctgaaatatatgctcagctggaaaagtaccagaaagcaaccgagctctttgaagaaattgctcgtaaatcaataaacaataaccttctcaagtacggtgtcagaggcactcttcttaatgcgggcatttgccaactttgtagaggtgatgctgttgctataaataattcattggagcgctatcaggacattgacccaaccttctcagggacacgcgaatacaagcttttggcagaccttgcagcctctacggatgaaggagacgttggcaagtttactgatgcagtaaaggagtttgacagcatgacacgcctggatccttggaaaacaactctccttctgaaggcaaagaacgagttgaagaaaaaggaggatgaggatgatctaacctaggctctgttccacaaaaggtttcatgatttcgttgaggatgccgtgaaatcattacacaagattgtttgatataagtatggatatacaaaacctcctggataccgcatctggaatccagtagctgccatttatatatatgtcatcctatatgttgcatttgtggattattgttcatggttatatatgctacccatattactccaaaaaaaaaaaaaaaa

SEQ ID NO: 7592 - protein, 288 aa, Zea mays
  misc_feature: Ceres CLONE ID no. 1385806
  misc_feature: Ceres CDNA ID no. 25447054
  misc_feature (158)..(185): Pfam Name: TPR_2 PFAM Desc: Tetratricopeptide repeat
  misc_feature (72)..(83): Pfam Name: NSF PFAM Desc: Aromatic
  misc_feature: Homolog of GI Number: 50943481 NR Desc: putative alpha
  misc_feature: Homolog of GI Number: 38564727 NR Desc: putative alpha
  misc_feature: Homolog of GI Number: 11358953 NR Desc: soluble NSF attachment protein
  misc_feature: Homolog of GI Number: 26451770 NR Desc: putative alpha
  misc_feature: Homolog of GI Number: 7572917 NR Desc: alpha
  misc_feature: Homolog of GI Number: 79315306 NR Desc: ALPHA
  misc_feature: Homolog of GI Number: 66519254 NR Desc:  similar to ENSANGP00000014748
  misc_feature: Homolog of GI Number: 58383926 NR Desc: ENSANGP00000014748
  misc_feature: Homolog of GI Number: 52078351 NR Desc: Napb
MGDHEGHGVDFEKKADQKLSGWGLFGNKYEEAADLLDRAGSFFKLAKNWSRAAAVYKKIADCHLQGDNKHDAASAYVEAANCYKKFSPQDAAQALDSAVNLFLEISRLNMAARYSKDIGEIYLQEQDLENAAVYLNRAADLFDSEGQSSQANSMTQKIAEIYAQLEKYQKATELFEEIARKSINNNLLKYGVRGTLLNAGICQLCRGDAVAINNSLERYQDIDPTFSGTREYKLLADLAASTDEGDVGKFTDAVKEFDSMTRLDPWKTTLLLKAKNELKKKEDEDDLT

SEQ ID NO: 7593 - DNA, 1060 bp, Zea mays
  misc_feature: Ceres CLONE ID no. 1386078
  misc_feature: Ceres CDNA ID no. 40351777
  CDS (77)..(829): REFERENCED BY SEQ ID NO: 7594
ctaaaaattaaagtactcgtgttcacctcgtgcccatccagattcttatcttctctcgaaaaaggttttagcgaagatgacgaagaactacccagctgttagcgaagagtaccagaaggctattgagaagtgcaagaggaagctgagaggcttgatcgctgagaagaactgtgcaccaatcatggttcgcctcgcatggcactctgctggaacatttgattgcgcctcgaggactggtggtccgtttggaacaatgaggtttgacgatgagctagctcatggagccaacaatggtctccacattgctcttaggttgttggagcctatcagggagcagttccctaccatctcccatgctgatttccatcagcttgctggtgttgtggctgttgaagtcaccggtggacctgaaattcctttccaccctggaagagaggacaagccccagccacctccagagggtcgtctccctgatgccacaaagggctgtgaccacttgaggcaggtcttcttaaagcagatgggtttaactgaccaggacattgtcgctttgtctggtgcccacactctgggaagatgccacaaggataggtctggcttcgaaggtgcctggacttcaaaccctcttattttcgacaactcttacttcaaggaacttttgagcggtgagaaggaaggtcttcttcagctcccctctgacaaggctctgttggacgatcccgtcttccgtcctcttgttgagaaatacgctgctgacgaggaagcatttttcgctgattacgctgaggcccacttgaagctttctgagctcgggtttgctgatgcttgagctgtgtcattccttgtgtgatcccccgacactcatagctgcttttgggttggcggagggttttacattccgtttgaacttttgtcgttttatttgcttaatgtactcggaaggatctgcgtagcttgttttttgggtggtattatgagtttgtcgcagttctgtttctcttttgctatgatgctctcagacattctaataaaacaattattctcaaaaaaaaaaaaaaaa

SEQ ID NO: 7594 - protein, 250 aa, Zea mays; identical to SEQ ID NO: 6024
  misc_feature: Ceres CLONE ID no. 1386078
  misc_feature: Ceres CDNA ID no. 40351777
  misc_feature (19)..(227): Pfam Name: peroxidase PFAM Desc: Peroxidase

SEQ ID NO: 7595 - DNA, 616 bp, Zea mays; identical to SEQ ID NO: 7531
  misc_feature: Ceres CLONE ID no. 1386315
  misc_feature: Ceres CDNA ID no. 29191196
  CDS (62)..(430): REFERENCED BY SEQ ID NO: 7596

SEQ ID NO: 7596 - protein, 122 aa, Zea mays; identical to SEQ ID NO: 5748
  misc_feature: Ceres CLONE ID no. 1386315
  misc_feature: Ceres CDNA ID no. 29191196
  misc_feature: The plant flowers significantly late compared to wild-type.
  misc_feature: The plant is abnormally large.
  misc_feature: null
  misc_feature: Useful for making plants with modulated biomass
  misc_feature: Useful for making plants with modulated flowering time
  misc_feature: Useful for making plants with modulated phosphate use efficiency
  misc_feature (22)..(117): Pfam Name: Ribosomal_S10 PFAM Desc: Ribosomal protein S10p/S20e
  misc_feature: Homolog of GI Number: 21617905 NR Desc: 40S ribosomal protein S20
  misc_feature: Homolog of GI Number: 21281054 NR Desc: putative 40S ribsomomal protein
  misc_feature: Homolog of GI Number: 23198348 NR Desc: 40S ribosomal protein S20
  misc_feature: Homolog of GI Number: 31430421 NR Desc: putative ribosomal protein S10p/S20e
  misc_feature: Homolog of GI Number: 55775376 NR Desc: 40S subunit ribosomal protein
  misc_feature: Homolog of GI Number: 54208698 NR Desc: ribosomal protein S10p/S20e
  misc_feature: Homolog of GI Number: 50933555 NR Desc: 40S ribosomal protein S20
  misc_feature: Homolog of GI Number: 22203726 NR Desc: ribosomal protein S20
  misc_feature: Homolog of GI Number: 62651870 NR Desc:  similar to 40S ribosomal protein S20
  misc_feature: Homolog of GI Number: 20805825 NR Desc: ribosomal protein S20
  misc_feature: Useful for making shorter plants
  misc_feature: Useful for sterility
  misc_feature: Useful for sterility

SEQ ID NO: 7597 - DNA, 1093 bp, Zea mays
  misc_feature: Ceres CLONE ID no. 1386367
  misc_feature: Ceres CDNA ID no. 29191197
  CDS (82)..(900): REFERENCED BY SEQ ID NO: 7598
agaccaatcactacacaaataaaccataactctctctctctcaaaacattttaacttcaaaccaattaattctcaccgatcatgccgatcagaaacatcgccatcggcggagtccaaggagaagtgactcaccccagcgcacttagggcggcactcgctgagtttatctccactttgatctttgtcttcgccggctcaggatccggaatcgctttcaacaagctcactgacaatggtgcgaccactccttcaggcctcgtcgccgctgctttagctcatgctttcggtctcttcgtcgctgtttccgtcggtgctaacatctctggtggtcacgttaacccagccgttaccttcggtgctttcgtcggtggaaacatcactctcctccgtggtatcctctattggattgctcagcttcttggctcagtcgtcgcttgtctcctccttaaattcgccaccggtggcttggcagttccagcttttggtctctctgctggagttgaatccttaaacggtttcgtcttcgagatcgtgatgaccttcgggctcgtctacaccgtctacgccacagccgttgaccccaagaacggtagtctcggaacaatcgcaccaatcgccataggtttcatcgttggagctaacatcctcgccggtggagctttcagcggagcctccatgaacccagccgtggcttttggaccagccgtcgtgagctggacgtggaccaaccactggatctactgggctggtcctcttgtcggtggtggactcgctggactcatctacgagtttgtcttcatcaaccaaaacggccacgagcaattgcccaccactgattactgtctactgaagactgccaaaactcaatatgatttgatttgtttttatttcgcatcgtaatggggtcgttggatcttttttagatgaatcgttgtatgttgattttattgtgtatttgggtttgtcgttggagttttagttccctggaatgcttttgtgcaattgtattgtacggtacggtacggtactgatgactatgaatgataaaaccagggaatgtgaattacccaagcttccaaaaaaaaaaaaaaaa

SEQ ID NO: 7598 - protein, 272 aa, Zea mays
  misc_feature: Ceres CLONE ID no. 1386367
  misc_feature: Ceres CDNA ID no. 29191197
  misc_feature (14)..(235): Pfam Name: MIP PFAM Desc: Major intrinsic protein
  misc_feature: Homolog of GI Number: 1514977 NR Desc: VM23
  misc_feature: Homolog of GI Number: 5081419 NR Desc: tonoplast intrinsic protein
  misc_feature: Homolog of GI Number: 9293929 NR Desc: salt
  misc_feature: Homolog of GI Number: 3688799 NR Desc: gamma tonoplast intrinsic protein 2
  misc_feature: Homolog of GI Number: 21593151 NR Desc: putative aquaporin
  misc_feature: Homolog of GI Number: 475048 NR Desc: tonoplast intrinsic protein gamma
  misc_feature: Homolog of GI Number: 16323492 NR Desc: putative aquaporin
  misc_feature: Homolog of GI Number: 22858917 NR Desc: tonoplast intrinsic protein bobTIP26
  misc_feature: Homolog of GI Number: 21284370 NR Desc: tonoplast intrinsic protein bobTIP26
  misc_feature: Homolog of GI Number: 16492 NR Desc: possible membrane channel protein
  misc_feature: Useful for making plants with increased biomass and foliage
  misc_feature: Useful for making plants with increased biomass and foliage
MPIRNIAIGGVQGEVTHPSALRAALAEFISTLIFVFAGSGSGIAFNKLTDNGATTPSGLVAAALAHAFGLFVAVSVGANISGGHVNPAVTFGAFVGGNITLLRGILYWIAQLLGSVVACLLLKFATGGLAVPAFGLSAGVESLNGFVFEIVMTFGLVYTVYATAVDPKNGSLGTIAPIAIGFIVGANILAGGAFSGASMNPAVAFGPAVVSWTWTNHWIYWAGPLVGGGLAGLIYEFVFINQNGHEQLPTTDYCLLKTAKTQYDLICFYFAS

SEQ ID NO: 7599 - DNA, 1138 bp, Zea mays
  misc_feature: Ceres CLONE ID no. 1387086
  misc_feature: Ceres CDNA ID no. 25446680
  CDS (74)..(895): REFERENCED BY SEQ ID NO: 7600
aaaccttcacacacgtctttctccataactctcgtctcagcagaggtcacacagattcttctccgagaatccaatgtcgttcgagggggaagaagaggaggagaccttcgagcacacgctcctcgtggtgcgcgaggtctccgtctacaagatcccgccgcgaaccacctccggcgggtacaagtgcggcgaatggctccagtccgacaagatctggtccggcaggctccgcgtcgtctcctgcaaggaccgatgcgagatccgcctcgaggactcgagctccggcgacctgttcgcggcgtgtttcgtggatcccgcgaggagagagaactccgtggagccgtcgctggattcgtcgaggtatttcgtgctgaggatcgacgacgggcgtgggaagtacgcgttcatcgggctggggttcgcggagaggaacgaggcgtttgatttcaacgtggcgttgtcggatcatgagaagtatgtgaggagggagaaggagaaggaggctggggagacgagtgagagtgatgatcatattgatattcatcccgctgttaatcatagattgaaggaaggtgaaaccataagaatcaacgtgaagcccaaaccaacgacaagtggcactgggatgctctcagctgctctttcagggaacgggaagcctaaacctctagcacttgctccaccaccaagtgcttctacaaaaaccaggtctcctttaccgcctccaccaaatgatcctatcgcttcaaggatcgcatctggtggttctaaggaaccaacggataacacaaggcgcaggaacgatccactgtctgatctatctcagctcaagaagaatcttccttcaacaaagggttcaggatcgacaggagctgcaggatgggcagctttctgatcacaaaggagtgtgaaatatctaaggtcttggacccgtcctgcttcatcttcttgtgacttgagagcaagagacattagaggcaagacactagacaccaagacacacagcaacctgagttttccttaatatattgtatgtttactggtaaactgatgtgcgttttctctgtaatcccaacacttcctgttgtattatttttttccttttcaaatcatctttattacaaaaaaaaaaaaaaaa

SEQ ID NO: 7600 - protein, 273 aa, Zea mays
  misc_feature: Ceres CLONE ID no. 1387086
  misc_feature: Ceres CDNA ID no. 25446680
  misc_feature: Homolog of GI Number: 73950822 NR Desc:  similar to Adaptin ear
  misc_feature: Homolog of GI Number: 62286980 NR Desc: Adaptin ear
  misc_feature: Homolog of GI Number: 34858413 NR Desc: similar to RIKEN cDNA 1200016B17
  misc_feature: Homolog of GI Number: 60359884 NR Desc: mFLJ00061 protein
  misc_feature: Homolog of GI Number: 57107029 NR Desc:  similar to RIKEN cDNA 1200016B17
  misc_feature: Homolog of GI Number: 48105917 NR Desc: similar to CG9132
  misc_feature: Homolog of GI Number: 55637809 NR Desc:  similar to DKFZP566B183 protein
  misc_feature: Homolog of GI Number: 72177930 NR Desc:  similar to adaptin
MSFEGEEEEETFEHTLLVVREVSVYKIPPRTTSGGYKCGEWLQSDKIWSGRLRVVSCKDRCEIRLEDSSSGDLFAACFVDPARRENSVEPSLDSSRYFVLRIDDGRGKYAFIGLGFAERNEAFDFNVALSDHEKYVRREKEKEAGETSESDDHIDIHPAVNHRLKEGETIRINVKPKPTTSGTGMLSAALSGNGKPKPLALAPPPSASTKTRSPLPPPPNDPIASRIASGGSKEPTDNTRRRNDPLSDLSQLKKNLPSTKGSGSTGAAGWAAF

SEQ ID NO: 7601 - DNA, 661 bp, Zea mays
  misc_feature: Ceres CLONE ID no. 1387540
  misc_feature: Ceres CDNA ID no. 40351778
  CDS (44)..(532): REFERENCED BY SEQ ID NO: 7602
agcagcttgagaaggagggagaagaggagcaggagcagcaaccatggttctcaagacggagctttgtcgtttcagtggccacaagatttacccaggaaggggtatcagattcatccgatctgactctcaggtgttcttgttcatcaactctaaatgtaagcattacttccataacaaattgaagccttccaagctcgcatggactaccatgtacaggaagcagcacaagaaggacgcagctcaagaagctgttaagaagaggagacgtgctaccaagaagccctactcaaggtctattgttggtgctaccttggaggtgattcagaagaagagagctgagaagcccgaagttcgtgacgccgctagagaagctgctcttcgtgatatcaaggagagaatcaagaagaccaaggatgagaagaaggcaaagaaagctgaatttgcctcaaagcaacagaagattcaggctaagatccccaaggctgctgcaaagggtggtcctaagttgggaggtggtggtggcaaacgttgaagagcccaaaaccatttcttcttgctctctgttctctgctagtggggggctacttttgttagttaatgttgaactcggaatatttttcagaacgtaaaacttttgttattgccaaaaaaaaaaaaaaaa

SEQ ID NO: 7602 - protein, 162 aa, Zea mays
  misc_feature: Ceres CLONE ID no. 1387540
  misc_feature: Ceres CDNA ID no. 40351778
  misc_feature (3)..(73): Pfam Name: Ribosomal_L24e PFAM Desc: Ribosomal protein L24e
MVLKTELCRFSGHKIYPGRGIRFIRSDSQVFLFINSKCKHYFHNKLKPSKLAWTTMYRKQHKKDAAQEAVKKRRRATKKPYSRSIVGATLEVIQKKRAEKPEVRDAAREAALRDIKERIKKTKDEKKAKKAEFASKQQKIQAKIPKAAAKGGPKLGGGGGKR

SEQ ID NO: 7603 - DNA, 1003 bp, Zea mays
  misc_feature: Ceres CLONE ID no. 1387617
  misc_feature: Ceres CDNA ID no. 36695208
  CDS (172)..(558): REFERENCED BY SEQ ID NO: 7604
acgatcacacaccactccacagcagtagcaagagggatagagcaaggccacacacacacacacaccactagtaggctagcctagccttttagtcgtcgaggaggagcaagaagggcgcgcacgcaagcaggcaagcaagaagagagccgatcgaccgagagctagcacgcgatggcgaggtcttccaagatgatggtggcggcagctctgctggccttggccctggccgtgtcgaccgccgaggcgaggaacatcaagaccacgacgacggagaagaaggacgacgcggtggtgcagccgcagaccttcccgcccttcgaccgcctcggcggcggcgcgtccccggcgttcggcggcctccccggcggcagcattcctggcagcagcattcccgggttcagcatgcccggcagcggcagcagcctacccgggttcagcttgcccggcagcggcagcatgcccctcttcggcggcggctccccgggcttcagcggcttcggcggcatgcccgggtcgcccaccgccggctccgtccccgagcacgccaacaagccctgaacgccaacaagcgtggtagtagagtggtgctactgttactgtagtacgtcgtcgtcttcatgcatgcatggttcgtggtttcccctagctccatacgagcagtagttgggccttgcacgtaccgtacgtctagctagctatatatatagcttgtgttctactgctttttagtttaattacctgcctgcattggagagttggatctgtttcatttggtggtgtttgctttactattaggtcagtatctgtttgtggagacttggtgtttaatttatttagccgtttgtgactggttgtagctagcggtggtgcggtggtgatgttcttgaggcatgaataatgctacatgcatgtgatgtatccatgttttgtgtgtggtaaacctgttgtttgtataagctgtatgcatgggtctttaatttgtttttgaaaaaaaaaaaaaaaa

SEQ ID NO: 7604 - protein, 128 aa, Zea mays
  misc_feature: Ceres CLONE ID no. 1387617
  misc_feature: Ceres CDNA ID no. 36695208
  misc_feature: Homolog of GI Number: 22647 NR Desc: MFS18
  misc_feature: Homolog of GI Number: 520943 NR Desc: structural protein
  misc_feature: Homolog of GI Number: 29832565 NR Desc: putative dihydrolipoamide S
MARSSKMMVAAALLALALAVSTAEARNIKTTTTEKKDDAVVQPQTFPPFDRLGGGASPAFGGLPGGSIPGSSIPGFSMPGSGSSLPGFSLPGSGSMPLFGGGSPGFSGFGGMPGSPTAGSVPEHANKP

SEQ ID NO: 7605 - DNA, 885 bp, Zea mays
  misc_feature: Ceres CLONE ID no. 1388043
  misc_feature: Ceres CDNA ID no. 25446543
  CDS (135)..(485): REFERENCED BY SEQ ID NO: 7606
acaaaacacatccatcctcgctagctcgctctctcttgcaactccagtgcttctcactgccactgccagcaggtcgagctgctccgcaagtctgctttgctgctgcacctgcaagtctgcaaccgcgcacagagatgtcgacgactgtgagccgtgcgtccctcgaccagaaactcgccctcgccaagcgctgctcccgagaggcgaccctcgccggagccaaggcggcagccgtggcgactatcgcctccgcgatccccaccctggccagcgtgcggatgctgccatgggccaaggccaacatcaaccccaccggccaggcgctcatcgtctccacggtggctgggatggcctacttcatcgccgccgataagaagatcctgtcgctggcgaggcgccactcgttcgaccaagcccctgagcacctcaagaacacctccttccagggcaccggccgtccccacccggctttcttcaggccgtgagacgagacctccgtcgagctagctagctacctgcctctttcagttcgtcagtgcaaattaagcaccaaatgtcgaccgatgcctctgaataaatttaactgcgaggctagctagctgctgtacatcgatctgctagtattactacggcgaggctgctgaacagcgctgtagagtagtattggtgctcagttcggaatgtatgtgtaatctgaacgccaagtttaattttatgttacttctaccgattaaccaaccttgtctgttattctcctgtaaagagagagagagcaacaataagggcctgtttggaatcaaagtctttcaaaatcatggtttccaaatattgtggtttataattgtcgtgacataaatactacgatttttaaaaaaaaaaaaaaaa

SEQ ID NO: 7606 - protein, 116 aa, Zea mays; identical to SEQ ID NO: 4754
  misc_feature: Ceres CLONE ID no. 1388043
  misc_feature: Ceres CDNA ID no. 25446543
  misc_feature (12)..(90): Pfam Name: ENOD93 PFAM Desc: Early nodulin 93 ENOD93 protein
  misc_feature: Homolog of GI Number: 50948753 NR Desc: putative early nodulin
  misc_feature: Homolog of GI Number: 50948737 NR Desc: putative early nodulin
  misc_feature: Homolog of GI Number: 50948739 NR Desc: putative early nodulin
  misc_feature: Homolog of GI Number: 50948751 NR Desc: putative early nodulin
  misc_feature: Homolog of GI Number: 50948749 NR Desc: putative early nodulin
  misc_feature: Homolog of GI Number: 50948755 NR Desc: putative early nodulin
  misc_feature: Homolog of GI Number: 4809191 NR Desc: early nodulin
  misc_feature: Homolog of GI Number: 218262 NR Desc: early nodulin
  misc_feature: Homolog of GI Number: 4731119 NR Desc: root
  misc_feature: Homolog of GI Number: 50948733 NR Desc: Similar to OsENOD93a gene for early nodulin

SEQ ID NO: 7607 - DNA, 820 bp, Zea mays
  misc_feature: Ceres CLONE ID no. 1388196
  misc_feature: Ceres CDNA ID no. 40351779
  CDS (120)..(566): REFERENCED BY SEQ ID NO: 7608
ctctcgagcttttcttgtgcgcagccgcagccgctgcttttcgttcgtcttcatcctacgcgagggcgaaacccacaaaccctctccctcctgtactccggccgacacatccaggggcgatgacgctgggtagctccggcgccggatcgagcgtcgtcgttcctcgaaacttcaggctattagaggagctcgagcgtggagagaagggcattggtgatgggacagtgagctatggaatggatgatgctgatgacatctacatgcggtcatggactggtaccatcattggccctcacaatactgtacatgagggtcgcatctaccagctgaagttgttttgtgacaaagactatccggagaagccaccatctgtcagattccactcaagaatcaacatgacatgcgttaatcacgagacaggaatggttgatccaaggaagtttggtttgctagcgaactggcagcgggactacacgatggagaacatcctaacccagctcaagaaagagatggctgcctcgcagaatcgaaagttagtgcagcctccagaagggacattcttctaacgaagtgttcacttggcccgtcatgggatccaacagtaattgaaacttttatgggctaaaaaacagcgtctacatctggtgcccctgcctgtctttgtgattttttatgacttttatgttcttgtatcgtgaaccgcagtgaacaacggttgttgcaagttccagggatatctttggaagtggtaaacaaatgcgtcttatttctatgtaatattagaccccgtgcgtgtgtggtttcaaaaaaaaaaaaaaaa

SEQ ID NO: 7608 - protein, 148 aa, Zea mays; identical to SEQ ID NO: 12
  misc_feature: Ceres CLONE ID no. 1388196
  misc_feature: Ceres CDNA ID no. 40351779
  misc_feature (19)..(147): Pfam Name: UQ_con PFAM Desc: Ubiquitin

SEQ ID NO: 7609 - DNA, 868 bp, Zea mays
  misc_feature: Ceres CLONE ID no. 1388242
  misc_feature: Ceres CDNA ID no. 36593161
  CDS (86)..(631): REFERENCED BY SEQ ID NO: 7610
aaaaaagaatcatcgggaaacgttggaagggtcatcggagctgagatctctcgtgcggcgttgtttcttgggtttggaagaaaacatgggggtgtcattcgggaagctgttcagcaagctgtttgcgaagaaagagatgagaattctgatggtgggactggatgcagctggtaagacgaccatcctctacaagctcaaacttggtgagatcgtcaccactatccctaccattggtttcaatgttgaaactgtggaatacaagaacattagctttaccgtctgggatgtcgggggtcaggacaagatccgtccattgtggaggcactacttccagaacacacagggacttatctttgttgtggacagcaacgatcgtgaccgtgttgttgaagcgagagacgagcttcacaggatgttgaacgaggatgagttgagggatgcagttctgcttgtctttgcaaacaagcaagatcttcccaacgcaatgaacgctgctgagattactgacaagcttggccttcactctctccgccaacgacactggtacattcagagcacatgtgccacctctggagaaggactctacgagggacttgactggctctccaacaacatcgcaaacaaggcatagaaaggaggtagcaagatccctcttcacttgttttgtttataaatcaaggaaagaagggttctgtttcgctagtactatcttcatacattcttcttcttcttcttcttcttcgactcagtctcaaactcaaaaccataatcatactttgtactttcctttaataacgatgttttttttgttttatttttttcttccgtaattgagtaaaatcacttttgtttaaaaaaaaaaaaaaaa

SEQ ID NO: 7610 - protein, 181 aa, Zea mays
  misc_feature: Ceres CLONE ID no. 1388242
  misc_feature: Ceres CDNA ID no. 36593161
  misc_feature: null
  misc_feature: Useful for making plants with altered Lignin content
  misc_feature: Useful for making plants with altered alkaloid content
  misc_feature (4)..(177): Pfam Name: Arf PFAM Desc: ADP
  misc_feature: Homolog of GI Number: 21553518 NR Desc: ADP
  misc_feature: Homolog of GI Number: 37791223 NR Desc: ARF
  misc_feature: Homolog of GI Number: 76160984 NR Desc: ARF
  misc_feature: Homolog of GI Number: 21592942 NR Desc: ADP
  misc_feature: Homolog of GI Number: 77812440 NR Desc: ADP ribosylation factor 002
  misc_feature: Homolog of GI Number: 29028258 NR Desc: ADP
  misc_feature: Homolog of GI Number: 50198855 NR Desc: At1g10630
  misc_feature: Homolog of GI Number: 21280953 NR Desc: putative ADP
  misc_feature: Homolog of GI Number: 50511366 NR Desc: ADP
  misc_feature: Homolog of GI Number: 6573751 NR Desc: F20B24.7
MGVSFGKLFSKLFAKKEMRILMVGLDAAGKTTILYKLKLGEIVTTIPTIGFNVETVEYKNISFTVWDVGGQDKIRPLWRHYFQNTQGLIFVVDSNDRDRVVEARDELHRMLNEDELRDAVLLVFANKQDLPNAMNAAEITDKLGLHSLRQRHWYIQSTCATSGEGLYEGLDWLSNNIANKA

SEQ ID NO: 7611 - DNA, 1162 bp, Zea mays
  misc_feature: Ceres CLONE ID no. 1388329
  misc_feature: Ceres CDNA ID no. 40041404
  CDS (61)..(1020): REFERENCED BY SEQ ID NO: 7612
atcccaattacaaaatcacaaattgctcaaaatcaaaagcacgtacgaagaagagaaaagatgtcgctgtctttttcacaaacgaagttactggtaatccttgtggcctttgcatgcgtcttctcaacaggctcagaggcatggagctggagttggagctccggttcaggctcaggctcgggttgggaatcccacggctcagacggatcagcctcaggttcgggtacaaaccctgatggttcgcactggagttggaagtggaacacacggtcaggctggagatggaggtcagactcaaaccatacgaagccaggctcatcgaaccataacgttacgaagcctgaaggctcatcaaatcataacgttacgaagccaggctcatcgaaccataacgttacgaagcctgaaggctcatcaaatcataacgttactaagccaggctcatcgaaccataacgttacgaagcctgaaggctcatcaaatcataacgttactaagccaggctcatcgaaccataacgttacgaagccaggctcatcgaaccacaaccataacgttacaatgccaggctcatcgcaccataaccataatgaaacgaagccaggctcatcaaaacataacgattcgaggtcaggctcagacgataacgattcaagcaacccggtctttgcaacaccaagagaggtcgtagtgggaggatcacgtggatggaactacggggtggatcttgaagaatgggcttccaagactactttccatgtcggcgatgttcttgttttcgagtacaacaatatgacaaaccaaagacatgacgtgtacttgcaaacaaatctgtggagttacaggacctgcaacttcgaaagtagaaataagattacttcatcggaggagaatggatctaaagagagcttcaaatttacgctagcaatgtcacagccttactcttttgcatgcggagagaataatggctattattgccgtacctataacatgaagttcagcgttctcccagtcgcctgagtcctctcgtctatccgactcaacccttttgcctcttttgctttttcttttcttaatgcaatattattagagtttctattttttattagttacggttttcttattacataaagattttgaagagttaaaaaaaaaaaaaaaa

SEQ ID NO: 7612 - protein, 319 aa, Zea mays
  misc_feature: Ceres CLONE ID no. 1388329
  misc_feature: Ceres CDNA ID no. 40041404
  misc_feature (217)..(304): Pfam Name: Cu_bind_like PFAM Desc: Plastocyanin
  misc_feature: Homolog of GI Number: 2497729 NR Desc: Variant surface antigen E precursor
MSLSFSQTKLLVILVAFACVFSTGSEAWSWSWSSGSGSGSGWESHGSDGSASGSGTNPDGSHWSWKWNTRSGWRWRSDSNHTKPGSSNHNVTKPEGSSNHNVTKPGSSNHNVTKPEGSSNHNVTKPGSSNHNVTKPEGSSNHNVTKPGSSNHNVTKPGSSNHNHNVTMPGSSHHNHNETKPGSSKHNDSRSGSDDNDSSNPVFATPREVVVGGSRGWNYGVDLEEWASKTTFHVGDVLVFEYNNMTNQRHDVYLQTNLWSYRTCNFESRNKITSSEENGSKESFKFTLAMSQPYSFACGENNGYYCRTYNMKFSVLPVA

SEQ ID NO: 7613 - DNA, 723 bp, Zea mays
  misc_feature: Ceres CLONE ID no. 1388350
  misc_feature: Ceres CDNA ID no. 40351780
  CDS (51)..(578): REFERENCED BY SEQ ID NO: 7614
aaaaagtctcgaatcgcttctgcagccgtttccttccgtcagccgcagccatggtgaagtactcgcaagagcctgacaatcagaccaagtcttgcaaggctagaggatccgatcttagggttcacttcaagaacactcgggaaacagcgcacgctatcaggaagctaccattgctcaaggccaagaggtaccttgaggatgtgatagctcacaagcaggctattcccttcacccgtttctgcagaggtgttggaaggactgctcaagccaagaacaggcactccaatggtcagggacgttggcctgctaagtctgctcagtttgttcttgatttgctcaagaatgctgagagcaatgctgaggtgaaaggtttggatgttgatgcgctctttatttcgcacattcaagtgaaccaggctgcaaagcagaggagaaggacttaccgtgctcatggaagaatcaacccttacatgtccaacccatgtcacattgagctgattttgtctgagaaggaagagtctgtcaagaaagagccggagactcagttggcagccaagtcgaagaaatcatctgcctaagctttctttgttttttagtttctactttttgtgttcttgaaagagattttgatcccttgtctctcctgtctttgcaagacaatggatagattttcttggattattcaatgttatgaaactatttgtcttaaaaaaaaaaaaaaaa

SEQ ID NO: 7614 - protein, 175 aa, Zea mays
  misc_feature: Ceres CLONE ID no. 1388350
  misc_feature: Ceres CDNA ID no. 40351780
  misc_feature (17)..(153): Pfam Name: Ribosomal_L22 PFAM Desc: Ribosomal protein L22p/L17e
MVKYSQEPDNQTKSCKARGSDLRVHFKNTRETAHAIRKLPLLKAKRYLEDVIAHKQAIPFTRFCRGVGRTAQAKNRHSNGQGRWPAKSAQFVLDLLKNAESNAEVKGLDVDALFISHIQVNQAAKQRRRTYRAHGRINPYMSNPCHIELILSEKEESVKKEPETQLAAKSKKSSA

SEQ ID NO: 7615 - DNA, 957 bp, Zea mays
  misc_feature: Ceres CLONE ID no. 1388370
  misc_feature: Ceres CDNA ID no. 29191198
  CDS (25)..(765): REFERENCED BY SEQ ID NO: 7616
ccaatcacaaagcgcagagatccaatggacaacaacaaacagcaaccaccaccaccacccacctccgtctaccctcccgcctccgccgcaaccgcaatccctcctcctcctcctccttccggatctacaccgataatccccggaggaggagcctcgtaccaccacctcctccagcaacagcttcaacagctacaaatgttctggagctaccagcgcaaagagatcgaacaggtgaacgatttcaagaaccaccagctccctctcgctcgcatcaagaagatcatgaaagccgacgaggacgtccgcatgatctccgcggaagcgccgatcctcttcgccaaggcctgcgagcttttcatcctcgagctcaccatcagatcttggctccacgccgaggagaacaagcgccgtacgcttcagaagaacgacatcgccgccgcgattaccagaaccgatatcttcgatttcctcgttgacatcgtcccgagggaagagatcaaggaggaggaagaggcggctctcgggagtatggtggcggctccggccgtgagcggcgttccttattactacccgccgatgggtcatccggctgttcctggtggtatgatgatcggaaggccggcgatggatcctagtggtgtttatgctcagcctccttctcaggcctggcagagcgtgtggcagaattcagccgccggcgatgacgtgtcttacggaagcggagggagtagcggcggccatgggaatctcgataaccaaggttgagaagcttggaaggatttttcagatgctgccttgtctgaaaaccagaagctgagcttaatcatcaaccctgcttttatttttgcatgtgtctgattcttacttatgtatgtttgtgatttaatggcttacttgtaagaagagagacaacaacaacaacaagaacactcttttcattcaaaaaaaaaaaaaaaa

SEQ ID NO: 7616 - protein, 246 aa, Zea mays
  misc_feature: Ceres CLONE ID no. 1388370
  misc_feature: Ceres CDNA ID no. 29191198
  misc_feature: Useful for making plants with modulated growth and phenotype characteristics
  misc_feature: null
  misc_feature: The sequence is a functional homolog of  SEQ ID NO 150 in the  10/374,780 US patent application
  misc_feature: The sequence is a functional homolog of  SEQ ID NO 1908 in the  11/479,226 US patent application
  misc_feature: The sequence is a functional homolog of  SEQ ID NO 2126 in the  10/374,780 US patent application
  misc_feature: The sequence is a functional homolog of  SEQ ID NO 314 in the  10/374,780 US patent application
  misc_feature: The sequence is a functional homolog of  SEQ ID NO 712 in the  11/479,226 US patent application
  misc_feature: The sequence is a functional homolog of  SEQ ID NO 846 in the  10/225,066 US patent application
  misc_feature: The sequence is a functional homolog of  SEQ ID NO 926 in the  10/225,066 US patent application
  misc_feature: Useful for making plants with altered Lignin content
  misc_feature: Useful for making plants with altered alkaloid content
  misc_feature (70)..(145): Pfam Name: Histone PFAM Desc: Core histone H2A/H2B/H3/H4
  misc_feature: Homolog of GI Number: 23198020 NR Desc: transcription factor Hap5a
  misc_feature: Homolog of GI Number: 21554251 NR Desc: transcription factor Hap5a
  misc_feature: Homolog of GI Number: 45544867 NR Desc: CONSTANS interacting protein 2a
  misc_feature: Homolog of GI Number: 2398531 NR Desc: Transcription factor
  misc_feature: Homolog of GI Number: 50905597 NR Desc: putative heme activated protein
  misc_feature: Homolog of GI Number: 45544869 NR Desc: CONSTANS interacting protein 2b
  misc_feature: Homolog of GI Number: 46250701 NR Desc: CCAAT
  misc_feature: Homolog of GI Number: 23505813 NR Desc: At1g08970/F7G19_16
  misc_feature: Homolog of GI Number: 6289057 NR Desc: heme activated protein
  misc_feature: Useful for making ornamental plants with modified leaves
  misc_feature: Useful for making shorter plants
  misc_feature: Useful for making stronger plants
  misc_feature: Useful for sterility
  misc_feature: Useful for sterility
MDNNKQQPPPPPTSVYPPASAATAIPPPPPPSGSTPIIPGGGASYHHLLQQQLQQLQMFWSYQRKEIEQVNDFKNHQLPLARIKKIMKADEDVRMISAEAPILFAKACELFILELTIRSWLHAEENKRRTLQKNDIAAAITRTDIFDFLVDIVPREEIKEEEEAALGSMVAAPAVSGVPYYYPPMGHPAVPGGMMIGRPAMDPSGVYAQPPSQAWQSVWQNSAAGDDVSYGSGGSSGGHGNLDNQG

SEQ ID NO: 7617 - DNA, 870 bp, Zea mays
  misc_feature: Ceres CLONE ID no. 1388459
  misc_feature: Ceres CDNA ID no. 40351781
  CDS (266)..(706): REFERENCED BY SEQ ID NO: 7618
gtcaccgattgttctggctcctgcgcgccgccagccccgcttgttctggctcctgcgcgccgccagccgtcagcccgtcaccgattggagatccttggacacctgcgcgccgccagcccgtcaccgcttggagacccgcgcagccgcgcttccctgcgcgccgccagccgtcgccgatccgtggccgcgtccgccgccgccagccctaaggtcgcgccgtcagccagcccgtctgccgtcgtgaggaatttttctggtaatcagcatggcactgtcatcaatgtttaagagaataaatgtgaaagatttgacctccaaggtttcagtctataccagtgctacagagttatctggtggactaaacataatatttaggcgctgggccacgaaaaggactgctggatcaacaaaaaatggtcgcgattccaatccaaagtatttgggggtaaagaagtttggtggagagaaagtactaccagggaacatcattgtccgccaaagagggacccgcttccatcctggaaactatgttggcatgggcaaggatcatacacttttctgcctgaaagaaggcaatgtacgctttgagcgcaacaaactctcaggcaggaaatgggttcatgttgatccagttgctggtcatgatcttcaccccatttacgcagatggttttgctactacatccgacactgagccaatgcaataaatgtgcttggggatttgggctgtcattttgttccaactcattcagctgccattttacagtttcatgtgtaaactttagcaggcttgaacgtagctggatcttttctttgtaatcataactactttgaataatataagttatacactgtaaaaaaaaaaaaaaaa

SEQ ID NO: 7618 - protein, 146 aa, Zea mays
  misc_feature: Ceres CLONE ID no. 1388459
  misc_feature: Ceres CDNA ID no. 40351781
  misc_feature (40)..(121): Pfam Name: Ribosomal_L27 PFAM Desc: Ribosomal L27 protein
MALSSMFKRINVKDLTSKVSVYTSATELSGGLNIIFRRWATKRTAGSTKNGRDSNPKYLGVKKFGGEKVLPGNIIVRQRGTRFHPGNYVGMGKDHTLFCLKEGNVRFERNKLSGRKWVHVDPVAGHDLHPIYADGFATTSDTEPMQ

SEQ ID NO: 7619 - DNA, 1641 bp, Zea mays
  misc_feature: Ceres CLONE ID no. 1388537
  misc_feature: Ceres CDNA ID no. 25445621
  CDS (77)..(1420): REFERENCED BY SEQ ID NO: 7620
ctccccaactcgccgtctgccttctgcgcctccatttcggcctctgtcccttgcaagttcaatctcacctccaaccatgggtaaagagaagtcccacatcaacattgtggttattggccatgtcgactctggcaagtcgaccaccacaggacaccttatctacaagcttggaggcattgacaagcgtgtgatcgagaggtttgagaaggaggctgctgaaatgaataagcggtccttcaagtacgcgtgggtgctcgacaagctcaaggctgagcgtgagagaggtatcaccattgatattgctctgtggaagtttgagaccaccaagtactactgcacggtcattgatgcccctggacaccgtgacttcatcaagaacatgatcactggtacctcccaggctgactgtgctgtccttatcattgactccaccactggtggttttgaggctggtatctccaaggatggccagacccgtgaacatgctctccttgcgttcacccttggagtgaagcagatgatttgctgctgcaacaagatggatgcaaccactcccaaatactccaaggcacgttatgaagagattgtgaaggaagtctcatcctacctcaagaaagttgggtacaaccctgataagattgcctttgttcccatttctggttttgagggtgacaacatgattgagaggtccaccaaccttgactggtacaaaggcccaaccctgcttgaggctcttgaccagatcaccgagcccaagaggccttcagacaagcccctgcgtctgcccctccaggatgtgtacaagattggtggtattggaactgtaccggttggtcgtgtggagactggtgtcatcaagcctggtatggttgtcacctttggtccaactggcctgactaccgaggtgaagtctgttgagatgcaccacgaggcgcttcaggaggctcttccgggtgacaatgttggcttcaacgtgaagaacgttgctgtcaaggatctcaagcgtgggtttgtggcctccaactccaaggatgaccctgccaaggaggctgccagcttcacctcccaggtcatcatcatgaaccaccctgggcagattggcaacggctatgccccagtgctggactgccacacctcccacattgctgtcaagtttgctgagctcattactaagatcgacaggcggtctggcaaggagcttgagaaggagccaaagttcctgaagaacggtgatgctggtatggtgaagatgataccgaccaagcccatggtggtggagacgttctcagcgtatcctccccttggtaggtttgctgtccgtgacatgaggcagacggttgctgttggagttatcaagagtgtggagaagaaggacccgaccggcgccaaggtgaccaaggcggctgccaagaagaaatgatgcgatcctgcgcctgctttagcaatacctagttttcatcatcacaagttttgtttgtgatcgttgctgttatcgtgtgaactgttgagatctgttagcatgtgcacttttatctatttatttggtaccatcttgctatttcaccttttccaatacaagaatgctctaagacctatatgttaaccttaaaaaaaaaaaaaaaaaaaaaaaaaaaaaaaaaa

SEQ ID NO: 7620 - protein, 447 aa, Zea mays
  misc_feature: Ceres CLONE ID no. 1388537
  misc_feature: Ceres CDNA ID no. 25445621
  misc_feature (248)..(315): Pfam Name: GTP_EFTU_D2 PFAM Desc: Elongation factor Tu domain 2
  misc_feature (322)..(430): Pfam Name: GTP_EFTU_D3 PFAM Desc: Elongation factor Tu C
  misc_feature: Homolog of GI Number: 2662343 NR Desc: EF
  misc_feature: Homolog of GI Number: 2662347 NR Desc: EF
  misc_feature: Homolog of GI Number: 57043083 NR Desc:  similar to elongation factor 1 alpha
  misc_feature: Homolog of GI Number: 57044192 NR Desc:  similar to elongation factor 1
  misc_feature: Homolog of GI Number: 8778823 NR Desc: T6D22.2
  misc_feature: Homolog of GI Number: 1321656 NR Desc: alpha subunit of tlanslation elongation factor 1
  misc_feature: Homolog of GI Number: 61741088 NR Desc: elongation factor 1 alpha
  misc_feature: Homolog of GI Number: 7230385 NR Desc: elongation factor 1 alpha
  misc_feature: Homolog of GI Number: 7230387 NR Desc: elongation factor 1 alpha
  misc_feature: Homolog of GI Number: 7230391 NR Desc: elongation factor 1 alpha
MGKEKSHINIVVIGHVDSGKSTTTGHLIYKLGGIDKRVIERFEKEAAEMNKRSFKYAWVLDKLKAERERGITIDIALWKFETTKYYCTVIDAPGHRDFIKNMITGTSQADCAVLIIDSTTGGFEAGISKDGQTREHALLAFTLGVKQMICCCNKMDATTPKYSKARYEEIVKEVSSYLKKVGYNPDKIAFVPISGFEGDNMIERSTNLDWYKGPTLLEALDQITEPKRPSDKPLRLPLQDVYKIGGIGTVPVGRVETGVIKPGMVVTFGPTGLTTEVKSVEMHHEALQEALPGDNVGFNVKNVAVKDLKRGFVASNSKDDPAKEAASFTSQVIIMNHPGQIGNGYAPVLDCHTSHIAVKFAELITKIDRRSGKELEKEPKFLKNGDAGMVKMIPTKPMVVETFSAYPPLGRFAVRDMRQTVAVGVIKSVEKKDPTGAKVTKAAAKKK

SEQ ID NO: 7621 - DNA, 1104 bp, Zea mays
  misc_feature: Ceres CLONE ID no. 1388866
  misc_feature: Ceres CDNA ID no. 29191199
  CDS (103)..(894): REFERENCED BY SEQ ID NO: 7622
aaggcttttaatatcgattcccgcgaacccatttcaccatcaaataatctcctccttcagaaagctccagaaccctaaaaccacaatccttcttcgaacaagatgttggaacttcgtttggttcaaggctctctcttgaagaaggttctagaatcggtcaaggatctggtgaacgatgccaacttcgactgctccagcactggcttctccctccaggccatggactccagccacgtagcgctggtgtctcttctcctgagatccgaaggcttcgagcactacaggtgcgacaggaacctctccatggggatgaatctcggcaacatgtccaagatgctcaaatgcgccggaaatgatgacatcatcaccatcaaagccgatgacggcggcgacaccgtcaccttcatgttcgagagccctacacaagacaagattgcggactttgagatgaagctgatggatatcgacagtgagcatttaggaatccctgacgccgagtaccactctattgtgaggatgccttctggtgaattttccaggatatgcaaagatctcagtagcattggtgacacagttgtcatctctgtgacaaaggaaggtgtgaagttttcaacagctggtgatatcgggacagccaacattgttctcaggcagaacacaactgtggacaaacctgaagatgccattgtgatagagatgaacgagcctgtatcgctttcattcgcgttgaggtacatgaactccttcacaaaggcgactcctttgtctgataccgtgacaatcagtttgtcctcggagttgcctgtcgtggtggagtataaagtggctgagatgggttacattcggtactatttggctcccaagattgaagaagaagaagatactaatgcctaacacgtctctggcttctagatgcagaacctttggaactcgaatgaatgtttttttttctttactaaagtcctttgttaagatgtctgtctgtttggattcagttgttttctagattttctatgttactgcaccgctagattagaaaaacaagttcggctggttttgcaatttgaaaaaaaaaaacatgttttaccaaaaaaaaaaaaaaaa

SEQ ID NO: 7622 - protein, 263 aa, Zea mays
  misc_feature: Ceres CLONE ID no. 1388866
  misc_feature: Ceres CDNA ID no. 29191199
  misc_feature (1)..(125): Pfam Name: PCNA_N PFAM Desc: Proliferating cell nuclear antigen
  misc_feature (127)..(254): Pfam Name: PCNA_C PFAM Desc: Proliferating cell nuclear antigen
  misc_feature: Homolog of GI Number: 21555621 NR Desc: Proliferating cellular nuclear antigen 1
  misc_feature: Homolog of GI Number: 7207994 NR Desc: proliferating cellular nuclear antigen
  misc_feature: Homolog of GI Number: 3980379 NR Desc: putative proliferating cell nuclear antigen
  misc_feature: Homolog of GI Number: 408232 NR Desc: PCNA
  misc_feature: Homolog of GI Number: 129692 NR Desc: PROLIFERATING CELL NUCLEAR ANTIGEN
  misc_feature: Homolog of GI Number: 3366661 NR Desc: proliferating cell nuclear antigen
  misc_feature: Homolog of GI Number: 10946427 NR Desc: proliferating cell nuclear antigen
  misc_feature: Homolog of GI Number: 100160 NR Desc: proliferating cell nuclear antigen
  misc_feature: Homolog of GI Number: 3947727 NR Desc: proliferating cell nuclear antigen
  misc_feature: Homolog of GI Number: 25005275 NR Desc: proliferating cell nuclear antigen
MLELRLVQGSLLKKVLESVKDLVNDANFDCSSTGFSLQAMDSSHVALVSLLLRSEGFEHYRCDRNLSMGMNLGNMSKMLKCAGNDDIITIKADDGGDTVTFMFESPTQDKIADFEMKLMDIDSEHLGIPDAEYHSIVRMPSGEFSRICKDLSSIGDTVVISVTKEGVKFSTAGDIGTANIVLRQNTTVDKPEDAIVIEMNEPVSLSFALRYMNSFTKATPLSDTVTISLSSELPVVVEYKVAEMGYIRYYLAPKIEEEEDTNA

SEQ ID NO: 7623 - DNA, 765 bp, Zea mays
  misc_feature: Ceres CLONE ID no. 1389083
  misc_feature: Ceres CDNA ID no. 29191200
  CDS (74)..(562): REFERENCED BY SEQ ID NO: 7624
agacagcgtttcattatcgcttccgacaaaactctttatacctttctgcacttcctttccgccgacctcctccatggctccgattgctgtcggcgatgttgtacctgaaggatctatctccttcttcgacgagaacgatcagctccagactgtctccgttcactccctcgccgctggtaagaaggtcatcctcttcggtgtccctggtgctttcacccccacctgcagcatgaagcatgtgcctggattcatcgagaaagcagaggagctgaagtcaaagggcgttgacgagatcatttgctttagtgtgaatgatccgtttgtgatgaaggcatgggggaagacgtacccggagaacaagcatgtgaagtttgtggctgacggttcaggagaatacacgaagcttcttggactcgagctcgacctcaaggacaagggtcttggtgttaggtcaaggagatttgctctgttgctcgataacctcaaggtcactgttgccaacgttgaatctggcggcgagttcacagtttctagcgccgatgatatcctcaaggctctctaagaaactcttatcgtttgtgtgtatgaagaaccgctgcatgtgatagtagtgaagagtgtatctctggcctgatttctgacgataaattaggcataataataaagcggtttaagttgcttatttaatatttaaactgttggctcttcttgttgtcattgttcgtataatttatgaaaaaaatttgagcaaaaaaaaaaaaaaaa

SEQ ID NO: 7624 - protein, 162 aa, Zea mays
  misc_feature: Ceres CLONE ID no. 1389083
  misc_feature: Ceres CDNA ID no. 29191200
  misc_feature (6)..(160): Pfam Name: AhpC PFAM Desc: AhpC/TSA family
  misc_feature: Homolog of GI Number: 4928472 NR Desc: type 2 peroxiredoxin
  misc_feature: Homolog of GI Number: 12083336 NR Desc: putative type 2 peroxiredoxin protein
  misc_feature: Homolog of GI Number: 21593881 NR Desc: type 2 peroxiredoxin
  misc_feature: Homolog of GI Number: 12083334 NR Desc: putative type 2 peroxiredoxin protein
  misc_feature: Homolog of GI Number: 4704732 NR Desc: peroxiredoxin TPx2
  misc_feature: Homolog of GI Number: 21553913 NR Desc: peroxiredoxin
  misc_feature: Homolog of GI Number: 52851172 NR Desc: thioredoxin
  misc_feature: Homolog of GI Number: 30841938 NR Desc: thioredoxin peroxidase 1
  misc_feature: Homolog of GI Number: 18654477 NR Desc: thioredoxin peroxidase
  misc_feature: Homolog of GI Number: 6227024 NR Desc: Contains similarity to gbAF121355 peroxiredoxin TPx1
MAPIAVGDVVPEGSISFFDENDQLQTVSVHSLAAGKKVILFGVPGAFTPTCSMKHVPGFIEKAEELKSKGVDEIICFSVNDPFVMKAWGKTYPENKHVKFVADGSGEYTKLLGLELDLKDKGLGVRSRRFALLLDNLKVTVANVESGGEFTVSSADDILKAL

SEQ ID NO: 7625 - DNA, 2150 bp, Zea mays
  misc_feature: Ceres CLONE ID no. 1389497
  misc_feature: Ceres CDNA ID no. 25446544
  CDS (449)..(2005): REFERENCED BY SEQ ID NO: 7626
aatttttttttgaggctggtctgtttcgtgacgtcccgcgagaagagaacccccgtggcccctggccgcgacggagcggtcagaagcagcggcggccagcgcggtttcggtttcctggttggcccgagaattccgattcctctcctgatttgtgtacatatagttgcctggaggccccgtcgctgtccccgcgctctctgtctcctcacgcttggctgttcgccgcggcgccaccttctgaggcagctgctaatcgcgcgtccggtggccgcgttgcagcggcggagcgtctcttgttgtgcagtgctgcagcggattgtcgcggcctgcccgcggtgaggccggcatccctcttcggaaggcgtgctcgggcggggccagcccaaccgccgttcgtgcgctagagttcctcgctcagaaagtggagaaataagatacatagtggaagatgagatcagttgttcggtcacttcgccagctccgccgatttatccagcactatgcagaggggaactcacaagcaaccagattgttcgggctgcagaatgctttaatcatgtgcggatcgacaccccgttcactgagcatgttacgtcgtaatggtgaaattagcagatttgcaagccctggcatggagttgatgaggtccatgttctctaatgtagcggctggttctatcaaagatattggaagaggtggcccgatggtggaatatgagaggagaatagcatcaggagacctagtagatggcgatagctttcaggttgatacaattcaacaattacaagggctctatgaggagttgattgagaatggagaagactgccagctggatagatataagtcatctgagaaatcaggacggagtcgatggctatggtcccgcctcattactcagccttctagctttgctccagttaagggcctttacctctatggtggtgttggtacagggaagacgatgcttatggacttgttctatgaacagctgccatctaattggagaaaaaaacgtattcactttcatgatttcatgttgaacgtacatagtcgtcttcagatgcataaaggtgtttcagatccccttgatgttgtagcagctgagatttcagatgaggccatcatattatgtcttgatgagtttatggtaactgatgttgctgatgctatgattctgaaccggctgttcagacaattgttcagcaaaggcattattcttgtttcaacttctaaccgtgctccagataagctttatgaaggtggcttacaacgggaccttttcttgccatttattgacaccttgaaagaaaggtgcatcgtgcaccccattggatctgcggtggactatcgtcaactgggttctgctgaacaaggtttctattttgtcggaaagcattacagtacgcttctgaaacagaagctccagtctttaattggagatgaggaacccagcccacaaactgttgaagtaattatgggaaggaaattacaggtttctctgggagcaaatggctgtgcatattttccttttgaagatctctgtgatagacctttaggtgcagcagattactttggactcttcaaaaaatttcacaccctggcacttgatggtgttccaaagtttgggtctagtaacagaacagcagcttatcggttcgtcacactgattgatgttatgtacgagaacaaagcaaggctgttatgtacagccgaggctggaccagtagaactgtttgagaatatcatgactcttgctgaagcacagaaggtttcaccaagatcttcgcgctcacagaaaagtgacgaccctgacctatgtgtggacaatgagcttggatttgccaaggatcgtacgattagcaggttgacagagatcaacagcagagaatatttggaggacttcgaaatgagattagggcaacagcagctgctgcccttgcaagctctagataatggtggtgatgttactagcataataagtagaaggcttctgggcctcatttgaaattcttgtattcgcgcccacctggcttacataggcaactgagaagctatgcttttccaaccgtggtgcatgtaaatgtgcaataaagctatgaaagagtattttttgctaataggtgggtgatctatgaaaaaaaaaaaaaaaa

SEQ ID NO: 7626 - protein, 518 aa, Zea mays
  misc_feature: Ceres CLONE ID no. 1389497
  misc_feature: Ceres CDNA ID no. 25446544
  misc_feature (468)..(489): Pfam Name: AFG1_ATPase PFAM Desc: AFG1
  misc_feature: Homolog of GI Number: 42567204 NR Desc: AFG1
  misc_feature: Homolog of GI Number: 56790192 NR Desc: At4g28070
  misc_feature: Homolog of GI Number: 66517496 NR Desc:  similar to ENSANGP00000014807
  misc_feature: Homolog of GI Number: 21919411 NR Desc: lactation elevated 1
  misc_feature: Homolog of GI Number: 17986420 NR Desc: PUTATIVE ATPASE N2B
  misc_feature: Homolog of GI Number: 59808703 NR Desc: Lactation elevated 1
  misc_feature: Homolog of GI Number: 21918872 NR Desc: lactation elevated 1
  misc_feature: Homolog of GI Number: 66844222 NR Desc: mitochondrial ATPase
  misc_feature: Homolog of GI Number: 50744610 NR Desc:  similar to lactation elevated 1
  misc_feature: Homolog of GI Number: 525318 NR Desc: putative ATPase
MRSVVRSLRQLRRFIQHYAEGNSQATRLFGLQNALIMCGSTPRSLSMLRRNGEISRFASPGMELMRSMFSNVAAGSIKDIGRGGPMVEYERRIASGDLVDGDSFQVDTIQQLQGLYEELIENGEDCQLDRYKSSEKSGRSRWLWSRLITQPSSFAPVKGLYLYGGVGTGKTMLMDLFYEQLPSNWRKKRIHFHDFMLNVHSRLQMHKGVSDPLDVVAAEISDEAIILCLDEFMVTDVADAMILNRLFRQLFSKGIILVSTSNRAPDKLYEGGLQRDLFLPFIDTLKERCIVHPIGSAVDYRQLGSAEQGFYFVGKHYSTLLKQKLQSLIGDEEPSPQTVEVIMGRKLQVSLGANGCAYFPFEDLCDRPLGAADYFGLFKKFHTLALDGVPKFGSSNRTAAYRFVTLIDVMYENKARLLCTAEAGPVELFENIMTLAEAQKVSPRSSRSQKSDDPDLCVDNELGFAKDRTISRLTEINSREYLEDFEMRLGQQQLLPLQALDNGGDVTSIISRRLLGLI

SEQ ID NO: 7627 - DNA, 797 bp, Zea mays
  misc_feature: Ceres CLONE ID no. 1389554
  misc_feature: Ceres CDNA ID no. 40351782
  CDS (78)..(497): REFERENCED BY SEQ ID NO: 7628
gcacaccgaagaaagactactcccatcatctcctccagcttcttcttcttcgtctctgaaactagtttgattcagccatggctaatgcggcgtcaggtatggcagtccatgatgactgcaagctcaagtttctcgaactcaaggctaaaaggactttccgtttcatcgtttacaagatcgaggagcagcagaaacaagtggttgttgagaagctcggcgagcctggtcaatcccatgatgactttgcagcttctcttcctgctgatgaatgccgttacgccgttttcgatttcgatttcgtcactgctgagagttgccagaagagcaagatcttcttcgtcgcatggtctccggacacagcaagagtgagaagcaagatgatctacgcgagctctaaggacaggttcaagagagagcttgacggaattcaagtagagcttcaagctaccgatccaactgagatggatctcgatgttttcaaaagccgagccaactgaggaatacatcctccataaatgaattggttgaatccaaatttctcctactattactgaattgatatatgcttgttctttaagtttgctgtgaaggcaccaccaaaaccaaaacagcttcatttcattggtctctgtcttccctatgtcttttatattttttttttttggtccttgcagtgttttgcttaaaacttaagagatttggcttgtgctcttttaccatttgtgtaagaaacccccaaacactttaccaaaagatgaatcttattggcacattgtgtcgtaaaaaaaaaaaaaaaa

SEQ ID NO: 7628 - protein, 139 aa, Zea mays; identical to SEQ ID NO: 6236
  misc_feature: Ceres CLONE ID no. 1389554
  misc_feature: Ceres CDNA ID no. 40351782
  misc_feature: The plant senesces significantly late copared to wild-type.
  misc_feature: Useful for making plants with modulated time to senescence
  misc_feature (12)..(139): Pfam Name: Cofilin_ADF PFAM Desc: Cofilin/tropomyosin

SEQ ID NO: 7629 - DNA, 512 bp, Zea mays
  misc_feature: Ceres CLONE ID no. 1390054
  misc_feature: Ceres CDNA ID no. 25446545
  CDS (71)..(352): REFERENCED BY SEQ ID NO: 7630
gctacaaacaagaaacaacaagcgaaagttttctctcgagagaggaggagaagaccaacaccgggaggagatggcagcagcagcagcgacgaaggcgtcgtcgtggatggtggccatgagcgtgggcgccgtggaagcgctcaaggaccagggaggcctctgccgctggaactacgcgctgcggtccgtctaccggaccgccaaggccaacgtgcgcagcggcagcagaagcttcgccgcgcagcgggacaaggacctggccccggcggcggagaaggggcggcaggacaaggccgccgcggaggagggcttgaggaccgtcatgtacctcagctgctggggacccaattaactagcctttcgtatcttagctggtctttggccttcttcagcgaccgcgagctcgcgagctgattattgtaaatatacgacgatgatcggatgatgatgatgatgaaaagttctgccacttccgttcgggcgttttggactgtgcaaaaaaaaaaaaaaaa

SEQ ID NO: 7630 - protein, 93 aa, Zea mays
  misc_feature: Ceres CLONE ID no. 1390054
  misc_feature: Ceres CDNA ID no. 25446545
  misc_feature: Homolog of GI Number: 50928991 NR Desc: OSJNBa0043L09.19
  misc_feature: Homolog of GI Number: 50928999 NR Desc: OSJNBa0043L09.23
  misc_feature: Homolog of GI Number: 50929001 NR Desc: OSJNBa0043L09.24
  misc_feature: Homolog of GI Number: 50929003 NR Desc: OSJNBa0043L09.25
  misc_feature: Homolog of GI Number: 21553934 NR Desc: probable wound
  misc_feature: Homolog of GI Number: 50928989 NR Desc: OSJNBa0043L09.18
  misc_feature: Homolog of GI Number: 19320 NR Desc: wound induced protein
  misc_feature: Homolog of GI Number: 6688818 NR Desc: putative wound
MAAAAATKASSWMVAMSVGAVEALKDQGGLCRWNYALRSVYRTAKANVRSGSRSFAAQRDKDLAPAAEKGRQDKAAAEEGLRTVMYLSCWGPN

SEQ ID NO: 7631 - DNA, 674 bp, Zea mays
  misc_feature: Ceres CLONE ID no. 1390199
  misc_feature: Ceres CDNA ID no. 29191898
  CDS (85)..(513): REFERENCED BY SEQ ID NO: 7632
acacaacatcttctttcctctgtactcaagacttcaccaaccttttagattcgatatctgcgaaattttcttcttcaatcgacgatgagcaccggcgcaggaagcggcacgaccaaaggcggtagaggaaagccaaaggccaccaagtccgtctctcgatcctcgaaggccggtcttcagttccccgtcgggagaatcgccagattcctcaaggcagggaaatacgccgagcgtgtcggcgccggagctccggtctatctctccgccgttctcgagtacctcgccgctgaggtgttggagcttgctggaaacgcggcgagggataacaagaagacgcgtatcgtgccgaggcacattcagctcgcggtgaggaacgataaggagctgagtaagcttctgggagctgtgacgattgcgaacggtggcgttttgcccaacattcattcgaaccttttgccttccaaggttgggaagaacaagggagacattggatctgcttctcaagagttctgagtttcacctttccttttggtctctttgttgtcgggttcccttgtaaaatatcaactttgttttgaagctaatggggcttttgtaacaaatgtttcgatgatataatatttcgtaatggatcttaggtttgattcattttttttccaaaaaaaaaaaaaaaa

SEQ ID NO: 7632 - protein, 142 aa, Zea mays
  misc_feature: Ceres CLONE ID no. 1390199
  misc_feature: Ceres CDNA ID no. 29191898
  misc_feature (31)..(95): Pfam Name: CBFD_NFYB_HMF PFAM Desc: Histone
  misc_feature: Homolog of GI Number: 20334750 NR Desc: At1g08880/F7G19_24
  misc_feature: Homolog of GI Number: 21553797 NR Desc: histone H2A
  misc_feature: Homolog of GI Number: 21593507 NR Desc: putative histone H2A
  misc_feature: Homolog of GI Number: 3204129 NR Desc: histone H2A
  misc_feature: Homolog of GI Number: 297871 NR Desc: histone H2A
  misc_feature: Homolog of GI Number: 77555982 NR Desc: histone h2a.
  misc_feature: Homolog of GI Number: 21593834 NR Desc: histone H2A
  misc_feature: Homolog of GI Number: 685035 NR Desc: histone H2A homolog
  misc_feature: Homolog of GI Number: 2317760 NR Desc: H2A homolog
  misc_feature: Homolog of GI Number: 29824201 NR Desc: putative histone H2A
MSTGAGSGTTKGGRGKPKATKSVSRSSKAGLQFPVGRIARFLKAGKYAERVGAGAPVYLSAVLEYLAAEVLELAGNAARDNKKTRIVPRHIQLAVRNDKELSKLLGAVTIANGGVLPNIHSNLLPSKVGKNKGDIGSASQEF

SEQ ID NO: 7633 - DNA, 900 bp, Zea mays
  misc_feature: Ceres CLONE ID no. 1390262
  misc_feature: Ceres CDNA ID no. 35383390
  CDS (53)..(709): REFERENCED BY SEQ ID NO: 7634
acatattattgagaccaactagcaacatagaaagcacaatagtgtaccaacaatggcagccaaaatattttgcctccttatgctccttggtctttctgcaagtgctgctacggcgaccattttcccgcaatgctcacaagctcctatagcttcccttcttcccccgtacctctcaccagtggtgtcttcggtatgtcaaaacccaattcttgaaccctacaggatccaacaggcaatcgcagctggcatcttacctttatcacccttgttcctccaacaatcatcagccctattacagcagttacctttggtgcatttattggcacaaaacatcagggcacaacaactacaacaacttgtgctagcaaaccttgctgcctactctcagcaacagcagtttcttccattcaaccaactagctgcattgaactctgcttcttatttgcaacaacaacaactaccattcagccagctacctgctgcctacccccagcaatttcttccattcaaccaactggcagcattgaactctcctgcttatttacagcagcaacaactactaccacagttgttgccgttctaccagcacgctgcgcctaacgctggcaccctcttacaactgcaacaattgctgccattcaaccaacttgctttgacaaacccagcagcgttctaccaacaacccatcattggtggtgccctcttttagatttcttatgagttatagttcaataataaagttttttgtctgatgtttgtggcttccgagaaataagaaagtacatttctagattcttatgtgcttctagtctccaaatgtggttgatagttattttgctctaagatcggcagtaatgaagtataaatcatcgttgtggtgtgctaaaaaaaaaaaaaaaa

SEQ ID NO: 7634 - protein, 218 aa, Zea mays
  misc_feature: Ceres CLONE ID no. 1390262
  misc_feature: Ceres CDNA ID no. 35383390
  misc_feature (1)..(218): Pfam Name: Zein PFAM Desc: Zein seed storage protein
  misc_feature: Homolog of GI Number: 16305125 NR Desc: 19kD alpha zein B1
  misc_feature: Homolog of GI Number: 224509 NR Desc: zein E19
  misc_feature: Homolog of GI Number: 72315 NR Desc: 19K zein precursor
  misc_feature: Homolog of GI Number: 535020 NR Desc: zein Zd1
  misc_feature: Homolog of GI Number: 535021 NR Desc: zein Zd1
  misc_feature: Homolog of GI Number: 72316 NR Desc: 19K zein precursor
  misc_feature: Homolog of GI Number: 22448 NR Desc: 19 kDa zein
  misc_feature: Homolog of GI Number: 16073 NR Desc: zein protein
MAAKIFCLLMLLGLSASAATATIFPQCSQAPIASLLPPYLSPVVSSVCQNPILEPYRIQQAIAAGILPLSPLFLQQSSALLQQLPLVHLLAQNIRAQQLQQLVLANLAAYSQQQQFLPFNQLAALNSASYLQQQQLPFSQLPAAYPQQFLPFNQLAALNSPAYLQQQQLLPQLLPFYQHAAPNAGTLLQLQQLLPFNQLALTNPAAFYQQPIIGGALF

SEQ ID NO: 7635 - DNA, 2164 bp, Zea mays
  misc_feature: Ceres CLONE ID no. 1390655
  misc_feature: Ceres CDNA ID no. 36592983
  CDS (218)..(1978): REFERENCED BY SEQ ID NO: 7636
attttattaattaacaaagagaagacttcttccttcctcgtcgtctccagcccattccaattcttgattccatcgccccaccatccacaactcccctaatccttccaacctcctcgtcgtccagtccaccacctccacgcgcaatggccagcggctaggcggcaccaaccagatcacaaggattcgtttcatccggcagcgcagctctagagcctccatgggcagctacgcgtacaagtactgtatgtgcttcacgcgcaagttccgatccccggacgcccagccgccgccggacgtccgcgccgcccacctctccttcgcctctgacgcccatgccctccgccgcttcgtcgccggcggccagggcgagtcccccgccgacgtcgaccgcatcctcgccatgctctccgggggccacagccatggaatcgcccgcctcgtcacaaggtcgccggcggcatccacgcccacgctcgaagacttcttcgccttcctcttctcccccgacctcaacccacccatcgcgcaccaggttcaccaggacatgtcagcgccgttctctcactatttcgtgttcaccgggcataattcctacctcactgggaaccagctcaatagtgactccagtgacgtcccaattgtaaaggcgttgcagagaggtgttagagtcattgaactcgatatgtggcccaatccttcaaaggacaatgtcgatattcttcatggagggacattgactgccccagtggaaatgatcaaatgtttgaagtccatcaaagaatacgccttctgtgcctcaaattatcctcttgttattactcttgaggatcacctcacatcagatctccaagctaaagttgctacgatgctcactgaaacatttggagatcttcttttcgtccctaatccagacccgatgaaagagtttccttctccagcatctctaatgaagagaataatcatatcaaccaaacctccacaagaatataaggagtttctcaaagccgagaataatcgcagtggcagcggaaacatagctgagttgccagaccaaggaagcctgagaagaatagattcaaatgccgatgaatctgatgggaaggatgaactggatgagcaagacgaggaagactccgacgaggacgatcccaaatttcagcaggatacagcctgtgagtataggaaactcatcaccatccaagctggcaaaccaaaaggccatttgcgggatgcgctaaaagtggatccagacaaagtcaggcggctttctttgagcgagacacagttagctaaagcgacaatctctcatggtgctgaagtcataaggttcacacagaagaatatactccgtgtgtatccaaagggcacgagggttaattcttcaaactacgatccaatgaacgcctggacccatggtgcgcagatggttgcgttcaacatgcagggccatgataaagcgctccggttgatgcaagggtttttcagagccaatgggggctgtggttatgttaaaaagcctgacttcttgctaagaacaggtccaaatggggaagtatttgaccccaaggctagtttgccagtgaagaaaaccctcaaggtgaaagtttatatgggagacgggtggcgcatggacttcagtaaaactcatttcgatgccttttcgcctccagatttctatactagggtagggatcgcaggtgtgaaggcagacagtgtgatgaagaagacaagggtgattgaggaccagtgggtgccgatgtgggatgaggagttcacgttccttctgacggttccggagctggccctcctgagggtagaggtccaggagtacgacatgtcggagaagcacgacttcggggggcagacagtcttgccggtatgggagctgaagcagggcatccgtgctgtgcccctgcacgatcgcaagggtgtcaggtacaagtccgtcaggctcctcatgcgatttgattttgtgtagccgagccgagccgccattcagattcagcttctgtttttttccttcttgtgtgaattgaatgtattactcccttccttccatcttcaacgtatatgtgtatgtatgtacttatttttgtcggaataaaagttgtatggaatggaatggaaggaaggagtagaactgtcttcaaaaaaaaaaaaaaaa

SEQ ID NO: 7636 - protein, 586 aa, Zea mays
  misc_feature: Ceres CLONE ID no. 1390655
  misc_feature: Ceres CDNA ID no. 36592983
  misc_feature (109)..(253): Pfam Name: PI PFAM Desc: Phosphatidylinositol
  misc_feature (351)..(438): Pfam Name: PI PFAM Desc: Phosphatidylinositol
  misc_feature (459)..(551): Pfam Name: C2 PFAM Desc: C2 domain
  misc_feature: Homolog of GI Number: 2765140 NR Desc: 1
  misc_feature: Homolog of GI Number: 945039 NR Desc: phosphatidylinositol
  misc_feature: Homolog of GI Number: 10880265 NR Desc: phosphoinositide
  misc_feature: Homolog of GI Number: 16508160 NR Desc: phosphoinositide
  misc_feature: Homolog of GI Number: 1771381 NR Desc: phosphoinositide
  misc_feature: Homolog of GI Number: 12698878 NR Desc: phosphoinositide
  misc_feature: Homolog of GI Number: 2853039 NR Desc: phosphoinositide
  misc_feature: Homolog of GI Number: 8843789 NR Desc: phosphoinositide
  misc_feature: Homolog of GI Number: 21955869 NR Desc: phospholipase C
  misc_feature: Homolog of GI Number: 37654366 NR Desc: phospholipase C
MGSYAYKYCMCFTRKFRSPDAQPPPDVRAAHLSFASDAHALRRFVAGGQGESPADVDRILAMLSGGHSHGIARLVTRSPAASTPTLEDFFAFLFSPDLNPPIAHQVHQDMSAPFSHYFVFTGHNSYLTGNQLNSDSSDVPIVKALQRGVRVIELDMWPNPSKDNVDILHGGTLTAPVEMIKCLKSIKEYAFCASNYPLVITLEDHLTSDLQAKVATMLTETFGDLLFVPNPDPMKEFPSPASLMKRIIISTKPPQEYKEFLKAENNRSGSGNIAELPDQGSLRRIDSNADESDGKDELDEQDEEDSDEDDPKFQQDTACEYRKLITIQAGKPKGHLRDALKVDPDKVRRLSLSETQLAKATISHGAEVIRFTQKNILRVYPKGTRVNSSNYDPMNAWTHGAQMVAFNMQGHDKALRLMQGFFRANGGCGYVKKPDFLLRTGPNGEVFDPKASLPVKKTLKVKVYMGDGWRMDFSKTHFDAFSPPDFYTRVGIAGVKADSVMKKTRVIEDQWVPMWDEEFTFLLTVPELALLRVEVQEYDMSEKHDFGGQTVLPVWELKQGIRAVPLHDRKGVRYKSVRLLMRFDFV

SEQ ID NO: 7637 - DNA, 1202 bp, Zea mays
  misc_feature: Ceres CLONE ID no. 1390684
  misc_feature: Ceres CDNA ID no. 36593011
  CDS (117)..(974): REFERENCED BY SEQ ID NO: 7638
acaaatcaagagctaactctatataaagaaccatttgctctagcttattctcacaaccggaagcaaaagtaaaacagttcctaagaagaaacatccattacatataataatactacatggctaaagacgtggaaggagcagaggggttcgcggcgagggactacgaagatccgccgccaacaccgttcttcgatgcggaggagctgaccaagtggtctttgtacagagccgtcatagccgagttcgtagccactctcctcttcttgtatgtcactgttttgactgtcatcggctacaagatttcgtccgacactaaggccggaggcgacgagtgcggaggcgtcggaatccttggcatctcatgggccttcggcggcatgatcttcatccttgtctactgcaccgccggtatctcaggtggtcacataaaccctgcggtgacgttcggcttgttcttggcaaggaaggtatcgttggttagagcggtgctatacatggtggctcagtgtttgggtgcgatttgtggagttggtttcgtcaaagccttccaaagctcttactacgtccgttacggtggaggagcaaactctctagccgatggatacagcacagggactggactcgctgcagagatcattggaacattcgtcctggtctacactgttttctccgccactgaccccaaaagaaacgcacgagactcccacgttcccgtgttggcgccactcccaattggatttgccgtgttcatggtacacttggccactattccaatcaccggaaccggtattaacccggccaggagtttcggagctgcggtgatctacaacgagtccaagccgtgggatgaccactggatattctgggtgggaccattcatcggagctgccatagctgcattttatcaccaattcgttctaagggcctctggttccaaatccctcggatccttcagaagtgcagccaacgtttgagtttagccacacaaaacaaaacaaaaaaagtggttactgttatgtataaattgggcacgtgattttaaaatgtgtcctcttatgtcttttcttttcatctgcttctatttgtgtgaattccaattattgaagttttagtgttttgcgtgttttcatcatggcaatgtcagtgagtttgtttattgagaaaaagccgaccacattgtttcgcgaaaaaaaaaaaaaaaa

SEQ ID NO: 7638 - protein, 285 aa, Zea mays
  misc_feature: Ceres CLONE ID no. 1390684
  misc_feature: Ceres CDNA ID no. 36593011
  misc_feature (29)..(264): Pfam Name: MIP PFAM Desc: Major intrinsic protein
  misc_feature: Homolog of GI Number: 3551133 NR Desc: Plasma membrane aquaporin
  misc_feature: Homolog of GI Number: 7209560 NR Desc: Plasma membrane aquaporin 2b
  misc_feature: Homolog of GI Number: 7209562 NR Desc: Plasma membrane aquaporin 2c
  misc_feature: Homolog of GI Number: 21554356 NR Desc: aquaporin
  misc_feature: Homolog of GI Number: 4371284 NR Desc: aquaporin
  misc_feature: Homolog of GI Number: 21537097 NR Desc: aquaporin
  misc_feature: Homolog of GI Number: 5081421 NR Desc: plasma membrane intrinsic protein 1
  misc_feature: Homolog of GI Number: 5081423 NR Desc: plasma membrane intrinsic protein 2
  misc_feature: Homolog of GI Number: 472879 NR Desc: plasma membrane intrinsic protein 2b
  misc_feature: Homolog of GI Number: 20465733 NR Desc: putative aquaporin protein
MAKDVEGAEGFAARDYEDPPPTPFFDAEELTKWSLYRAVIAEFVATLLFLYVTVLTVIGYKISSDTKAGGDECGGVGILGISWAFGGMIFILVYCTAGISGGHINPAVTFGLFLARKVSLVRAVLYMVAQCLGAICGVGFVKAFQSSYYVRYGGGANSLADGYSTGTGLAAEIIGTFVLVYTVFSATDPKRNARDSHVPVLAPLPIGFAVFMVHLATIPITGTGINPARSFGAAVIYNESKPWDDHWIFWVGPFIGAAIAAFYHQFVLRASGSKSLGSFRSAANV

SEQ ID NO: 7639 - DNA, 639 bp, Zea mays
  misc_feature: Ceres CLONE ID no. 1390976
  misc_feature: Ceres CDNA ID no. 40351783
  CDS (142)..(420): REFERENCED BY SEQ ID NO: 7640
agaatctaccgtcgaccagaagagccctagaaaaccctagtagcatccacaattccacataacctcgcccgcgccgcctcccccacgagacgccttcttgctctcgcttccggtgacgcccgccacttcctccccgacgagatgacgaaacgcaccaagaaggcaggaatcgttggcaaatatggtaccaggtatggtgccagtttacgtaaacagatcaagaagatggaggtctcgcagcactccaaatacttctgtgagttctgtggcaagtttgccgtgaagaggaaagcagttggtatctggggatgcaaggactgtgggaaggttaaggccggtggcgcctacacaatgaacactgctagtgcggtcactgtgagaagcacaatccggcgcctgcgggagcagaccgaagcatgattgcgggcagcttgaaaaggagtacctggatttttgtagttcagccaagagccgtgaaccattttgcctttttagctaaatgaacaagaaatgtttatctatctgtagtgaccactttgtactcatggtttgtcatgctaaattgatggtatgcactatgcaatgcaaatacttgcgtaatcgtatgttttcttgtgctgccgaaaaaaaaaaaaaaaa

SEQ ID NO: 7640 - protein, 92 aa, Zea mays; identical to SEQ ID NO: 294
  misc_feature: Ceres CLONE ID no. 1390976
  misc_feature: Ceres CDNA ID no. 40351783
  misc_feature: null
  misc_feature: Useful for making plants with modulated cold sensitivity
  misc_feature (2)..(91): Pfam Name: Ribosomal_L37ae PFAM Desc: Ribosomal L37ae protein family

SEQ ID NO: 7641 - DNA, 633 bp, Zea mays
  misc_feature: Ceres CLONE ID no. 1391264
  misc_feature: Ceres CDNA ID no. 13666162
  CDS (81)..(393): REFERENCED BY SEQ ID NO: 7642
atccaatccatcagtacccaaccttcccctacaccagaaaaatccccagttctttggtccgcgtcagagaggcggcggcgatgtctgggcgcggcaagggcggcaagggtctgggcaagggcggcgcgaagcgccaccggaaggtgctccgcgacaacatccagggcatcaccaagccggcgatccggaggctggctaggaggggtggcgtgaagcgcatctcggggctcatctacgaggagacccgcggcgtgctcaagatctttctcgagaacgtcatccgcgacgccgtcacctacaccgagcacgcgcgccgcaagaccgtgaccgccatggacgtcgtctacgcgctcaagcgccagggccgcaccctctacggcttcggaggctaggctaggcgcctcttcgtagtcggggactggttaggggacatgtctctgtgtgatgctttctgaggtagtattgctgcaatagctgtgtaatccatcgcttctgcaatgaagcgctttgaagcatgctacgtatgttgtgtctgtgggtgattgtatttctggtagtaacagtgattcttcctgaattttggataatacaagctcattcgcagtagtttctgatgcaaaaaaaaaaaaaaaa

SEQ ID NO: 7642 - protein, 103 aa, Zea mays; identical to SEQ ID NO: 8
  misc_feature: Ceres CLONE ID no. 1391264
  misc_feature: Ceres CDNA ID no. 13666162
  misc_feature (66)..(92): Pfam Name: TAF PFAM Desc: TATA box binding protein associated factor

SEQ ID NO: 7643 - DNA, 1869 bp, Zea mays
  misc_feature: Ceres CLONE ID no. 1391717
  misc_feature: Ceres CDNA ID no. 25446824
  CDS (190)..(1656): REFERENCED BY SEQ ID NO: 7644
ttccctttcttcttcggcttggcatctccacccttccttccttcctcgcctggcgttcccaccccctgccacctcgcccgctcccggctcctcccccctcggccgtcctgctctggtcgcggcggagccgccagatctgggccacgggtgccagcccagccggcgggcggcgggacggagggctgcgggatgaagtcgtcgctgaggagccggcaggagccgcggcgggtcagcaacggcgtcatcatcggcgccatgctgctatccctctgcgtcctcagcatcgtcaaggccagatactgcgccacccccttcggcaaggccgaggaccagctccaggagcagatgaactccagcatccggatggagccggaggagtcgtcgccggccaggacgcccggagaggaggaggaggaggacgacggagagaatggggcgtcggccaccaccaccacggcgcccgcggtgacgaaaacgccggcggccgtcgcggccggcggcaacaggggcaagggcaagcccacgtcctacatgacgagcaagcgctcggagcggtgcgacgcgtccggtgacatccgtgtggacgggaaccgctccaccatctacgtcagcgggatagaccgggagtggaagaccaagccgtacgcgcgctaccacgacccggtcgccatggcccacgtccgcgagtacaccctcaagccgctcccggaggcggcgccggcgccggcgtgcacccggaaccactccgtcccgggcttcctcttctccaacggcggcttctccggcaacctgtaccacgactacacggacgtgctggtgccgctgttcatcagcacgcaccagttccggggccgggtgcagttcctgctgagcgggatgaagccgtggtgggtggccaagttcacgcccttcttccggcagctgacccggtacgacgtcatcgacgtggacaacgaccaggaggtgcactgcttcccccggatcgtggtcggcgccaccttccacaaggacatgggcgtggacccgcggcggtcgccgggccacgtctccgtggtggacttcaagcgcgcgctgcgccgcgccttcggccttccgcgcgaggccgcctcccgcggcggcgccacggggcgcggcaagccccggctgctgatcatctcgcgccgcggctcccggcggttcctgaacgagcgggagatggcgcgcgccgcggcgggcgccgggttcgaggtgcgcgtggcggagcccgaccagcacacggacacggccgcgttcgcggcgctggtgaactcggcggacgtgatggtgggcgtgcacggcgccgggctgaccaacatggtgttcctgccccgcggcgccgtgctcgtccaggttgtgccgttcggcgggctggagtggctcacgggcgtcactttcaaggaccccgccgcggacatggaggtgagccacatgggctacgacgtgacgctggaggagagctcgctgatcgaccagtacccgaggaaccaccaggtgctcacggacccctacgccgtgcacaagcagggctgggacgcgctcaaggcggcgtacctggataagcagaacatccggatggatctcgacaggttcagggccacgctgagggaggccatgagccggttgccgccggctccgtgaccggccgccgtgccccggcccggaggtagataggttggtgtatctatcgtccccgttgtcatgctctcaacaagttgacttaatcttcttcttcttcgtccccctttttatttttattttgtcactagcaagattcttttggtccattgttttgttgtgttgtttactgctgctacataaggaatcaatctcatggcaaaaaaaaaaaaaaaa

SEQ ID NO: 7644 - protein, 488 aa, Zea mays
  misc_feature: Ceres CLONE ID no. 1391717
  misc_feature: Ceres CDNA ID no. 25446824
  misc_feature: Homolog of GI Number: 50905107 NR Desc: putative HGA1
  misc_feature: Homolog of GI Number: 50905109 NR Desc: putative HGA1
  misc_feature: Homolog of GI Number: 53792589 NR Desc: putative HGA1
  misc_feature: Homolog of GI Number: 50907691 NR Desc: putative HGA1
  misc_feature: Homolog of GI Number: 51964030 NR Desc: PREDICTED OJ1116_E03.25
  misc_feature: Homolog of GI Number: 56409860 NR Desc: glycosyltransferase
  misc_feature: Homolog of GI Number: 56409864 NR Desc: glycosyltransferase
  misc_feature: Homolog of GI Number: 56409862 NR Desc: glycosyltransferase
  misc_feature: Homolog of GI Number: 56409866 NR Desc: glycosyltransferase
  misc_feature: Homolog of GI Number: 34895350 NR Desc: P0494A10.29
MKSSLRSRQEPRRVSNGVIIGAMLLSLCVLSIVKARYCATPFGKAEDQLQEQMNSSIRMEPEESSPARTPGEEEEEDDGENGASATTTTAPAVTKTPAAVAAGGNRGKGKPTSYMTSKRSERCDASGDIRVDGNRSTIYVSGIDREWKTKPYARYHDPVAMAHVREYTLKPLPEAAPAPACTRNHSVPGFLFSNGGFSGNLYHDYTDVLVPLFISTHQFRGRVQFLLSGMKPWWVAKFTPFFRQLTRYDVIDVDNDQEVHCFPRIVVGATFHKDMGVDPRRSPGHVSVVDFKRALRRAFGLPREAASRGGATGRGKPRLLIISRRGSRRFLNEREMARAAAGAGFEVRVAEPDQHTDTAAFAALVNSADVMVGVHGAGLTNMVFLPRGAVLVQVVPFGGLEWLTGVTFKDPAADMEVSHMGYDVTLEESSLIDQYPRNHQVLTDPYAVHKQGWDALKAAYLDKQNIRMDLDRFRATLREAMSRLPPAP

SEQ ID NO: 7645 - DNA, 585 bp, Zea mays
  misc_feature: Ceres CLONE ID no. 1392026
  misc_feature: Ceres CDNA ID no. 13631489
  CDS (112)..(349): REFERENCED BY SEQ ID NO: 7646
tccaccaccatcctctgccttgtcgatcatccatcgaccgcctcctgctcggcttcccaccccgcctgcctgcgttgcacaccagggaggagctcctccgaccgaccggccatgagctaccaggctcctcctccgggcacctcagcctacccgccgccgggcacggcctaccctccgccaggccagccgcaggcgtacccgccgccggcatacggcgcgccgccacccatggccgccggcgggtaccctcccccgccgcagcaggactctaagggcggcaacgacggcttcctgaaaggatgcttggccgctctctgctgctgctgcatgctcgacatgtgcttctgagttcgtcgtcaggggctcagggcacggggatggcgcgcctagagtccagaccgatctccatcatgcagtcaggcgaaaaacaatgcatggagctgttctttttttttccttcctttctgaatcatgacgatgatacatctttgtttccgtttccatcctgtatatgctttcccgtgctatgcatggaaacttcactagctaccccagcagggattatgttcaaaaaaaaaaaaaaaa

SEQ ID NO: 7646 - protein, 78 aa, Zea mays
  misc_feature: Ceres CLONE ID no. 1392026
  misc_feature: Ceres CDNA ID no. 13631489
MSYQAPPPGTSAYPPPGTAYPPPGQPQAYPPPAYGAPPPMAAGGYPPPPQQDSKGGNDGFLKGCLAALCCCCMLDMCF

SEQ ID NO: 7647 - DNA, 845 bp, Zea mays
  misc_feature: Ceres CLONE ID no. 1392155
  misc_feature: Ceres CDNA ID no. 40351786
  CDS (168)..(626): REFERENCED BY SEQ ID NO: 7648
gaaagcttctagaagatcactacagcgtgcgttatacgaagctccacatcattttctcaaccacacggtgaaaattcgaagatcaccgatcggagactctccacacttcaccggtggttatcctcgtcgcttaaagttccgatcttttaccctttttagctcaacggatgtcgacaccagcgaggaagagattgatgagggacttcaagaggttgcagcaagacccacccgctggtatcagcggtgctcctcaagacaacaacatcatgctctggaatgctgttattttcgggcctgatgataccccatgggatggaggtactttcaaactctcactgcagttttcagaagattatccgaacaaaccacctactgttcggtttgtttcacggatgttccatcctaacatttatgctgatgggagtatatgcttggacattctccaaaaccagtggagtcctatatatgacgttgctgctatacttacctccatccagtcattgctctgtgatcctaatccgaattctcctgcaaactcggaagctgcacgaatgttcagcgaaagcaaacgcgagtacaacagaagagtccgcgaggttgtggaacaaagctggactgctgactaagtagtaataatctttcttgtagcatttgtcttgagaaacattgaacctcctctctctcgtgtttgattcaaccaatacttccctctctttttctttcctgtctttttgtttgttttcaaactatttgatttgtttccttttaatgtttccatgtattatcctcttcataatggcatatgtatttgagttcgatcattctctacaaaaaaaaaaaaaaaa

SEQ ID NO: 7648 - protein, 152 aa, Zea mays
  misc_feature: Ceres CLONE ID no. 1392155
  misc_feature: Ceres CDNA ID no. 40351786
  misc_feature (8)..(145): Pfam Name: UQ_con PFAM Desc: Ubiquitin
MSTPARKRLMRDFKRLQQDPPAGISGAPQDNNIMLWNAVIFGPDDTPWDGGTFKLSLQFSEDYPNKPPTVRFVSRMFHPNIYADGSICLDILQNQWSPIYDVAAILTSIQSLLCDPNPNSPANSEAARMFSESKREYNRRVREVVEQSWTAD

SEQ ID NO: 7649 - DNA, 711 bp, Zea mays
  misc_feature: Ceres CLONE ID no. 1392537
  misc_feature: Ceres CDNA ID no. 15173977
  CDS (121)..(397): REFERENCED BY SEQ ID NO: 7650
atcaacgacagccccagacaacactcaccgatagcaagtagcgccgccgacgtttcgagagcagagtatccaagctagccaagcgcgcacctcggtgacctagctagttcaggcgacgatatggcgtcaggtcaggaaagcaggaaggagctggaccgcaaggcccgcgagggcgagaccgtcgtccccggcgggaccggcggcaagagcgtcgaggcccaggagcacctcgccgaagggcgcagccgcggaggccagactcgcagggagcagctggggcagcaggggtacagcgagatggggaagaagggcggtctgagcaccacggacgagtccggcggcgagcgcgccgccagggagggcgtcagcatcgacgagtccaagttcaccaagtagtcctatcgcgtgcgtgcgtacgcagcgttcgtagctgtctgcgtagtgtaccttggccgtagctagtgctactctctactttggagtagctgaatgataataatgtagctagcagcatgcatgtaggcgatcatacatacgtacgtacatgcaggtacttgtgtgtgatcatgtatgcttccagaagggtatcctagcttaattagtcatgtcgtcagtcgtcaaaatggcaggttcgcgtcagagctttgtagtttggtagcctgtttcacgactcctcaataatcagtagtgtaatgaaaaaaaaaaaaaaaa

SEQ ID NO: 7650 - protein, 91 aa, Zea mays; identical to SEQ ID NO: 4824
  misc_feature: Ceres CLONE ID no. 1392537
  misc_feature: Ceres CDNA ID no. 15173977
  misc_feature (1)..(91): Pfam Name: LEA_5 PFAM Desc: Small hydrophilic plant seed protein

SEQ ID NO: 7651 - DNA, 871 bp, Zea mays
  misc_feature: Ceres CLONE ID no. 1392897
  misc_feature: Ceres CDNA ID no. 40351788
  CDS (107)..(487): REFERENCED BY SEQ ID NO: 7652
gctccatatcccatccatcacagctagctagcgtacagacgaataatctcttcttcacctcactagctaacaccagctagcagctcgatcgctctgtcctgcaataatggccgctcgctcctcctcccagcagctggtcgcggcggcggtcctggcagcggcgctgctgctgctggcggcgggggccgggacggcgtcggcggcggtgagctgcggcgaggtgacgtcgtcggtggcgccgtgcctcgggtacgcgatgggcagcgcggcgtcgccctccgcggcgtgctgcagcggggtgcgctcgctcaacagccgcgcgtcgtcggcggcggaccggcaggccacctgcaactgcctcaagagcatgacgggccggctcggcggcggcgtcagcatggccaacgccgccaacatccccggcaagtgcggcgtctccgtcggcgtgcccatcagccccaccgtcgactgcaccaagatcaactgatcgatggaaccatagtggaggtagctcgctcgttggatggcagcgtacgtggccatcagcagcatgcagtcgtcgtcgtagcagagatgtcctagctacgtgtgtgtcatgcatcagactggcacataataaagaagtagatcatgcacccactagtgatcacttcgtctagtgtccctccgttcgctgttgtcgtcgtcgtcgtcgtggtgtacctcgtacgtgacatgccgtagcacgtacgctagcagagcagcacctcaatgtccttgggtttgctttgctggctctctgttttcgtctcgtgttgcttttaatctggcacaggtttctaaattataataatgaatacttttttgtcctaaaaaaaaaaaaaaaaaaaaa

SEQ ID NO: 7652 - protein, 126 aa, Zea mays
  misc_feature: Ceres CLONE ID no. 1392897
  misc_feature: Ceres CDNA ID no. 40351788
  misc_feature (36)..(122): Pfam Name: Tryp_alpha_amyl PFAM Desc: Protease inhibitor/seed storage/LTP family
MAARSSSQQLVAAAVLAAALLLLAAGAGTASAAVSCGEVTSSVAPCLGYAMGSAASPSAACCSGVRSLNSRASSAADRQATCNCLKSMTGRLGGGVSMANAANIPGKCGVSVGVPISPTVDCTKIN

SEQ ID NO: 7653 - DNA, 1101 bp, Zea mays
  misc_feature: Ceres CLONE ID no. 1394037
  misc_feature: Ceres CDNA ID no. 36707060
  CDS (101)..(898): REFERENCED BY SEQ ID NO: 7654
ctctcgttgtcttggcggctgcggcggagcacggaggcgaaggaggagcagcagcagcaggcggcgccgaggagcggcatcccactcagtgcttgcaaccatggctaggggattgaagaagcacttgaagaggctcaatgcgcccaagcattggatgctcgacaagcttggcggagcttttgctcccaagccatcttctggacctcacaagtccagggagtgccttcctctgatcctcatcatcaggaacaggctcaagtatgctctgaactaccgtgaggtcatttctatcctgatgcaacgccatgtacttgttgatggcaaggtcaggactgacaagacctaccctgctgggttcatggatgtcatttccatccccaagacaatggagaactacaggctgctttatgacaccaagggccgcttccgtcttcacccaatcagggatgaggatgccaagttcaagctctgcaaggtgaggtctgttcagtttggccagaagggcatcccctacctgaacacctacgacggccgcaccatccgctaccccgacccgctcatcaaggccaacgacaccatcaagatcgatctggagaccaacaagatcatggacttcatcaagtttgacgtcggcaacgtggtcatggtgaccggcgggaggaacaccgggcgtgtaggtgtgatcaagaacagggagaagcacaagggcggcttcgataccatccacgtcgaggactccatgggccaccagttcgccacccgcatgggcaacgtgttcaccatcggcaagggcaacaagccgtgggtgagcctgcccaagggcaagggtatcaagctcagcatcatcgaggagcagaggaggcgcgactttgctgcccaggctgctgccaaggcataagttctctgaatgtgctgcttggagctttttgctatgtctagtttaatttttatctgcaaggatatagagctaccttcccaagactttatcatcatgttttgttgcttttggttcttgaacagcgtttgcagcttagctgtaatgctttaattcgactttctatatattgttgaaccgtgttgtcgacaaaaaaaaaaaaaaaa

SEQ ID NO: 7654 - protein, 265 aa, Zea mays; identical to SEQ ID NO: 1114
  misc_feature: Ceres CLONE ID no. 1394037
  misc_feature: Ceres CDNA ID no. 36707060
  misc_feature (175)..(211): Pfam Name: KOW PFAM Desc: KOW motif
  misc_feature (3)..(40): Pfam Name: RS4NT PFAM Desc: RS4NT
  misc_feature (42)..(90): Pfam Name: S4 PFAM Desc: S4 domain
  misc_feature (94)..(170): Pfam Name: Ribosomal_S4e PFAM Desc: Ribosomal family S4e
  misc_feature: Homolog of GI Number: 53791616 NR Desc: putative 40S ribosomal protein S4
  misc_feature: Homolog of GI Number: 50252099 NR Desc: putative ribosomal protein S4
  misc_feature: Homolog of GI Number: 44894458 NR Desc: ribosomal protein S4
  misc_feature: Homolog of GI Number: 2331301 NR Desc: ribosomal protein S4 type I
  misc_feature: Homolog of GI Number: 2345154 NR Desc: ribsomal protein S4
  misc_feature: Homolog of GI Number: 48596901 NR Desc: ribosomal protein
  misc_feature: Homolog of GI Number: 22138108 NR Desc: 40S ribosomal S4 protein
  misc_feature: Homolog of GI Number: 73759787 NR Desc: ribosomal protein S4
  misc_feature: Homolog of GI Number: 457803 NR Desc: ribosomal protein S4
  misc_feature: Homolog of GI Number: 82400118 NR Desc: 40S ribosomal protein S4

SEQ ID NO: 7655 - DNA, 1175 bp, Zea mays
  misc_feature: Ceres CLONE ID no. 1394529
  misc_feature: Ceres CDNA ID no. 29191215
  CDS (117)..(938): REFERENCED BY SEQ ID NO: 7656
attatttgttcttggcttcgaagcagctctttcctctcgacttgtatctgttctccccaaaccccttccgattcgatcaaccctcgtcgtcttccagacttttcgattttggaagaatgagtcaggcaggagtagatgttccagcgaagggtgggttcagcttcgatctgtgtaagaggaatgatatgcttatccaaaagggtcttaaagctccctcctttttgaagaccggtactaccatcgtcggtttgatcttcaaggatggtgtgatactaggcgctgatacacgagcaacggagggacctatcgttgctgataagaactgtgagaagattcactacatggcacctaacatttattgctgtggtgctggtaccgctgctgacactgaagctgtaactgatatggtcagctcgcagttgaggttgcatcgttaccagactggccgagactctcgggttatcactgctttgacccttctcaaaaaacatcttttcagctatcaaggtcatgtctctgctgctcttgtccttggtggagtcgatatcaccgggcctcatctgcataccatatacccacacggttcaactgacacactaccatttgctacaatgggttctggttctcttgctgctatgtccgtctttgaggcaaagtacaaagaaggtctaactagggatgaaggaatcaagctggtcgctgaagccatatgctcgggaatattcaacgacctgggtagtggtagcaacgtggacatctgcgtgatcacaaaggggcacaaggaatatctcaggaactacatggaaccaaacccaagaacctatgtcagcagcaaaggttattcattcaccaagaaaaccgaggttcttcgcacgaaaatcaccccattgatggagcgagttgagattacagaagtgggtgaagctatggaagaatgaatgaatctctctcaagtctctttgcttttgtattcatctttaccaagatcttataacattgtgtgcgttagacatattagtcttgtctttctttaccaatgttgttgaaggattatccaaaatcttttcttaccaatcttaaggatttcaatgctattagacttcgaaatttctttgttcggaatcttatgaaacgaattttctaaaagttattctctcctaaaaaaaaaaaaaaaa

SEQ ID NO: 7656 - protein, 273 aa, Zea mays
  misc_feature: Ceres CLONE ID no. 1394529
  misc_feature: Ceres CDNA ID no. 29191215
  misc_feature (36)..(217): Pfam Name: Proteasome PFAM Desc: Proteasome A
  misc_feature: Homolog of GI Number: 21593337 NR Desc: 20S proteasome beta subunit PBB2
  misc_feature: Homolog of GI Number: 21387013 NR Desc: 20S proteasome beta subunit PBB2
  misc_feature: Homolog of GI Number: 9758084 NR Desc: 20S proteasome beta subunit PBB2
  misc_feature: Homolog of GI Number: 30023762 NR Desc: At3g27430
  misc_feature: Homolog of GI Number: 2511578 NR Desc: multicatalytic endopeptidase
  misc_feature: Homolog of GI Number: 30688785 NR Desc: 20S proteasome beta subunit B
  misc_feature: Homolog of GI Number: 50933089 NR Desc: 20S proteasome beta subunit
  misc_feature: Homolog of GI Number: 2511576 NR Desc: multicatalytic endopeptidase
  misc_feature: Homolog of GI Number: 24664391 NR Desc: CG3329
  misc_feature: Homolog of GI Number: 28317309 NR Desc: AT12292p
MSQAGVDVPAKGGFSFDLCKRNDMLIQKGLKAPSFLKTGTTIVGLIFKDGVILGADTRATEGPIVADKNCEKIHYMAPNIYCCGAGTAADTEAVTDMVSSQLRLHRYQTGRDSRVITALTLLKKHLFSYQGHVSAALVLGGVDITGPHLHTIYPHGSTDTLPFATMGSGSLAAMSVFEAKYKEGLTRDEGIKLVAEAICSGIFNDLGSGSNVDICVITKGHKEYLRNYMEPNPRTYVSSKGYSFTKKTEVLRTKITPLMERVEITEVGEAMEE

SEQ ID NO: 7657 - DNA, 896 bp, Zea mays
  misc_feature: Ceres CLONE ID no. 1394572
  misc_feature: Ceres CDNA ID no. 25446825
  CDS (80)..(727): REFERENCED BY SEQ ID NO: 7658
ataccatccctcgaccggccacctcttcccaattgcatcgcatccccaggacttgccggccggtccagagacggcgataatgggggcttctgaggtgtggtcaccggtgccggcctggctggcgatcgccgtcggcttggcggccgtggtttcctcgtcggaggctcacgtcttctacgccggtggccgcgacggctgggtccttgaccccaccgagagctacaaccattgggccgggcgcagccggttccaagtgaacgacaccatcgtgttcacgcacgaggagggcgtcgactctgtgctgctggtgacggagcaggacttcgacacgtgcaacacgcgcaacccggtccggcggctccaggccgtcggcagcagcggcagttcggagcgttcggtgttcaagctcgaccggtccggcccgttcttcttcatcagcagcgacgaggaacggtgccaaaagggccagaagctgtacataatcgtgatggcggttcgccggtcgacgacgccggcggcaccggcacccgacgcggcgttcccgccggcggcttcaccggtacccgattcggcgttcccgccggcgccttcaccggtgtgggcctcggcgcccgacaacgcgcacgctccaccaccgacggcgggtgcgtcacgtttggacgacggagcgatcatcggctctgtgcttggggttataggagctttggtgctctgtaccgtgtactagatcagaaatcaagactccaaggggcgttccgtctgtgtggttttcaccgtctcttttgctaatcatgtttcttaaaatcatgattttacaatacaatagtataatacagtagtttaaaaaaaaaaaaaaaaaaaataaaaaaaaaaaaaaaaaaaaaaaaaaaaaaaaa

SEQ ID NO: 7658 - protein, 215 aa, Zea mays
  misc_feature: Ceres CLONE ID no. 1394572
  misc_feature: Ceres CDNA ID no. 25446825
  misc_feature (40)..(130): Pfam Name: Cu_bind_like PFAM Desc: Plastocyanin
  misc_feature: Homolog of GI Number: 57899505 NR Desc: phytocyanin protein
  misc_feature: Homolog of GI Number: 34909494 NR Desc: P0481E12.17
  misc_feature: Homolog of GI Number: 28393899 NR Desc: putative nodulin
  misc_feature: Homolog of GI Number: 34903678 NR Desc: B1015E06.24
  misc_feature: Homolog of GI Number: 51968674 NR Desc: predicted GPI
  misc_feature: Homolog of GI Number: 28396618 NR Desc: phytocyanin protein
  misc_feature: Homolog of GI Number: 52076874 NR Desc: putative phytocyanin protein
  misc_feature: Homolog of GI Number: 56202119 NR Desc: phytocyanin protein
MGASEVWSPVPAWLAIAVGLAAVVSSSEAHVFYAGGRDGWVLDPTESYNHWAGRSRFQVNDTIVFTHEEGVDSVLLVTEQDFDTCNTRNPVRRLQAVGSSGSSERSVFKLDRSGPFFFISSDEERCQKGQKLYIIVMAVRRSTTPAAPAPDAAFPPAASPVPDSAFPPAPSPVWASAPDNAHAPPPTAGASRLDDGAIIGSVLGVIGALVLCTVY

SEQ ID NO: 7659 - DNA, 874 bp, Zea mays
  misc_feature: Ceres CLONE ID no. 1394804
  misc_feature: Ceres CDNA ID no. 13632774
  CDS (65)..(725): REFERENCED BY SEQ ID NO: 7660
atttttcgaccgccgccgcccccagtccccgatccgaagctgtgcctcgtaccatttcgatccaatggcgccgacgtcgaagctgtcgacgggcatcaagcgcgcttcgcggtcgcacacgtaccatcgccgtgggctgtgggccatcaaggccaagaacggcggcgccttccccaaggccgacaaggccgccgccgccgtggaacccaagttctaccctgccgacgacgtcaagccccgcgttcccagcacccgcaagcctaagcctaccaagctcaggtcgagcatcacgcctgggacggtgctgatcctcctcgcagggcgcttcatggggaagagagtggtgtttctcaagcagctcaagtctggcctgctccttatctctgggcctttcaagatcaatggagtaccgatccgccgtgtgaaccagacctatgtcattgctacatcaaccaaagttgacatctctggtgttgatgtcgccaagtttgatgacaagtactttgccagggagaagaagcagaaggtgaagaagaccgagggcgagctttttgagacagaaaaggaggcatccaagtcactgcctgacttcaagaaggatgaccagaaggctgtggattctgctctgatcaaggctatcgaggctgtcctggagctgaaaacctatcttggcgcccggttctctctcagggatggtgacaagccccatgagatggtattctaagtttctagttttggagttcgtaggaagctgttttgtctgtgttcttgtacttctgagttttgtaccagtagcgaacgtttcattgtgattgaagtcttcctgccaaatattataagatctaagaaagttctaccaaaaaaaaaaaaaaaa

SEQ ID NO: 7660 - protein, 219 aa, Zea mays; identical to SEQ ID NO: 4
  misc_feature: Ceres CLONE ID no. 1394804
  misc_feature: Ceres CDNA ID no. 13632774
  misc_feature: null
  misc_feature: Useful for making plants with modulated nitrogen use efficiency
  misc_feature (1)..(49): Pfam Name: Ribosomal_L6e_N PFAM Desc: Ribosomal protein L6
  misc_feature (112)..(219): Pfam Name: Ribosomal_L6e PFAM Desc: Ribosomal protein L6e

SEQ ID NO: 7661 - DNA, 2029 bp, Zea mays
  misc_feature: Ceres CLONE ID no. 1395259
  misc_feature: Ceres CDNA ID no. 40041405
  CDS (82)..(1701): REFERENCED BY SEQ ID NO: 7662
atgctaccggcggcggcccaagcttcatcgatcgccgatcatcttctagctagcagctagcttgttattagctcatcggcgatggactacgtggtcgcccggatgcaattgcaacaagcagcagtgccgccgcctgttcactccatcgccgaccaccgtcctccgcctgtgtcgcagaggacgcggggcagcgcgacgatgcaacgacagcggcgtgaggcactcgaacaggaggtggcagagctgaagcagcagctatccaacgagcagacggtgcaccagatcctggagcgcgccctgcagcccagcagctccatggccctcgccaacatccccgccttcatccccaccaaggccaaggagctgctcgcggagctgctgctggtggaggaagagatcgccaggctggaggaccagataaaaaggatgaagaagtccgccgccacgcagcagcagcagcagacggagcactgcaagtccatgttcttcatcagccaggccatggacggcgaggcgtacctcagcacggtggtgaacaacaagaggcattccctggcgtcgtcgtcagatgggcatgcggtgttggagaagaagatcgcccagcacgagctgcccatcaccaagaagagccccacggtgatagcaaagaggagggcgagagaccagcagcagccgcccaacaagctgtcggagaggatcctcaagtgcctggtgtgcatcttcatgcggctgctccggtcgtcccgggcgtccgagtccgccgcgggcaacctcggcggcttcaggatggacatggggctcgtcaacttggctgcagctgcggcggccaaggagaaggagaggggccagcaggatcactacggcatcttcggcatccaggactccatggtgagggacatcgggccctacaagaacctcgtcaggttcaccacctcggctggctccggctccggctccggctccctggacctccacctcctcagcagagggttctcggcgtcgcccctggtaagcaaactgagggagatgctggaggcgctgcagcaggtggatgtgcgctccttgaatcaccaccagaggctggcgttctggctcaacatctacaacacatgcatcatgcacggcattctgcagcatggtttgccctcaaactcggacaagttactcgcactcaagaacaaggcaacaatcaacgtgtcagggcaaactttcaatgcgttggtgattgagaattttatcttgaggcagccgtcaagtgtgaaacaggagttgtggcaatgcgacgtggatgtggaagaagaacaggcggtgagggaggtttatgggctcaagacttcagaacccaacattctctttgcactctgctgcggcatcagatcatcgccagcacttcgcatctacaaagcagatcgtgttcttgtggatctggacaaggcaaagcttgagtacctgcaggcatcgctggtggtgacatccaccaggaggctcatgatcccaagcctcctccactccaacatgcatgactttgcaaaggacacggagtcgctgcttcgatggatctgcgagcagctgcccacgtcctggtccctcaggaaatccatggtggattgcctcgccgccattaccaacaacaagctggaggaggtggtcgtggatgtcattcccttggactacgacttccaatacctgctgcccatgtgatcaactcatcatgcatcataaatattattaattgcccattccattaattccatgcatggattattattctgtaagttaagtgatacagatggagtacgttattgtgtagtcttgtctgtctcattagctactaggatggactccaacaaggaaactattcaaatgttgcttgctggtgatcattatattgtaaatttctagtgattacaaagtttcataactcttcagtacctacaactttcaaaaaaaaaaaaaaaaaaaaaaaaaaaaaaaaaaaaaaaaaaaaaaaaaaaaaaaaaaaaaaaaaaaaataaaaaaaaaaaaaaaa

SEQ ID NO: 7662 - protein, 539 aa, Zea mays
  misc_feature: Ceres CLONE ID no. 1395259
  misc_feature: Ceres CDNA ID no. 40041405
  misc_feature: Homolog of GI Number: 27363288 NR Desc: At5g60720/mup24_130
  misc_feature: Homolog of GI Number: 50900726 NR Desc: P0416D03.31
  misc_feature: Homolog of GI Number: 50725195 NR Desc: ternary complex factor MIP1
  misc_feature: Homolog of GI Number: 51535341 NR Desc: ternary complex factor MIP1
  misc_feature: Homolog of GI Number: 53793306 NR Desc: ternary complex factor MIP1
MDYVVARMQLQQAAVPPPVHSIADHRPPPVSQRTRGSATMQRQRREALEQEVAELKQQLSNEQTVHQILERALQPSSSMALANIPAFIPTKAKELLAELLLVEEEIARLEDQIKRMKKSAATQQQQQTEHCKSMFFISQAMDGEAYLSTVVNNKRHSLASSSDGHAVLEKKIAQHELPITKKSPTVIAKRRARDQQQPPNKLSERILKCLVCIFMRLLRSSRASESAAGNLGGFRMDMGLVNLAAAAAAKEKERGQQDHYGIFGIQDSMVRDIGPYKNLVRFTTSAGSGSGSGSLDLHLLSRGFSASPLVSKLREMLEALQQVDVRSLNHHQRLAFWLNIYNTCIMHGILQHGLPSNSDKLLALKNKATINVSGQTFNALVIENFILRQPSSVKQELWQCDVDVEEEQAVREVYGLKTSEPNILFALCCGIRSSPALRIYKADRVLVDLDKAKLEYLQASLVVTSTRRLMIPSLLHSNMHDFAKDTESLLRWICEQLPTSWSLRKSMVDCLAAITNNKLEEVVVDVIPLDYDFQYLLPM

SEQ ID NO: 7663 - DNA, 1681 bp, Zea mays
  misc_feature: Ceres CLONE ID no. 1396455
  misc_feature: Ceres CDNA ID no. 25446617
  CDS (525)..(1448): REFERENCED BY SEQ ID NO: 7664
attccttccctctttcccgatctcactggcaggcactgcctccatcatcctcccagagagagactgagagagagagagcgcagccgaggcagttcgcccgcatgtatcccgctgctgcagagatcacgcccagcttctgcgcctgcagctccagcagtagcagcaccaggggctgcagtggaaacggccgctgctagttcccgttctccccatgatctctgccctttcccctactttttcttgttcttgcttgccccttttccttctgcgctagctgccgcttcttcgccttcctggagcttcccgcatccacacatacctctaaagaaccagacaaataaacgacacagaaccgtcggagtcgtcttctactactgtctccagtatatgggtttgttgtgcacaggtgcgcgtagataggtagaaccgtagaaggcagattatcgctcgaggcagcagcttggttgctggggcacgcgatcgagctccaggcaagaagattattgcaggaaggcgcggcaggcatggaggatctgtacagcatccacccggggatctcacgcgccgggggcgccgccacggcggccagcgaggtgtccggggtcgccggcggaccaggctcgccccctcccccgccgtcgcagccccctccgccgccgccggcggatctgacggagctggtcaaggcgcagatcgccgggcacccgcgctacccttccctcctctccgcctacatcgagtgccgcaaggtgggcgcgccgccggaggtggccacgctgctggaggagatcggccgggagaggtgcgccgccgcctctgccggcggggaggtcggcctagaccccgagctcgacgagttcatggaggcgtactgccgggtgctggagcggtataaggaggagctgtcgcggccattcgacgaggcagcgtccttcctcagcagcgtccggacgcagctcagctccctctgcggcgccgccgcctcgctctcagatgaaatggtagggtcgtcggaggaggacgaagcatgctcgggaggagacacggaggcgacggagccggggcagcaggagcacagctcccgcctggcggaccgtgagctgaaggagatgctgctgaagaagtacagcgggtgcctgagccggctgcggtccgagttcctgaagaagaggaagaaagggaagctgcccaaggacgcgcggtcggcgctcatggactggtggaacacgcactaccgctggccgtaccctacggaggaggacaaggtgaggctggcggcggcgactgggctggaccctaagcaaatcaacaactggttcatcaaccagcggaagcggcactggaagccgtccgaggacatgcggttcgcgctcatggagggcgtcaccggcggcgggccctcgtccggaacaacgctctacttcgacacgggcaccatcggaccgtgaccaccacactaccagcttgggcaacgcaaagtgcatacgtttttctttgtgtatatgggccacaacgtgtcggtaggtacactcagcatactggagatgctgtccagttcagtccagtgcatatggcctcgtaaaggactctgtaccatgatgatgtaatgctaactccaaccccctctcacaaatttctctttttcgtattttatatttcatatttaaaaaaaaaaaaaaaa

SEQ ID NO: 7664 - protein, 307 aa, Zea mays
  misc_feature: Ceres CLONE ID no. 1396455
  misc_feature: Ceres CDNA ID no. 25446617
  misc_feature (192)..(213): Pfam Name: ELK PFAM Desc: ELK domain
  misc_feature (215)..(274): Pfam Name: Homeobox PFAM Desc: Homeobox domain
  misc_feature (51)..(95): Pfam Name: KNOX1 PFAM Desc: KNOX1 domain
  misc_feature (99)..(150): Pfam Name: KNOX2 PFAM Desc: KNOX2 domain
  misc_feature: Homolog of GI Number: 30348863 NR Desc: knotted1
  misc_feature: Homolog of GI Number: 30348865 NR Desc: knotted1
  misc_feature: Homolog of GI Number: 51854371 NR Desc: KNOX class homeodomain protein
  misc_feature: Homolog of GI Number: 50900828 NR Desc: putative knotted1
  misc_feature: Homolog of GI Number: 5103725 NR Desc: knotted1
  misc_feature: Homolog of GI Number: 4240539 NR Desc: knotted class 1 homeodomain protein liguleless3
  misc_feature: Homolog of GI Number: 55416167 NR Desc: homeobox protein
  misc_feature: Homolog of GI Number: 4589449 NR Desc: KN1
  misc_feature: Homolog of GI Number: 33333544 NR Desc: knotted 1
  misc_feature: Homolog of GI Number: 3327275 NR Desc: PKn3
  misc_feature: Useful for decreasing plant size
  misc_feature: Useful for delaying flowering time
  misc_feature: Useful for increasing chlorophyll and photosynthetic capacity
  misc_feature: Useful for making bigger plants
  misc_feature: Useful for making ornamental plants with modified flowers
  misc_feature: Useful for making ornamental plants with modified flowers
  misc_feature: Useful for making ornamental plants with modified flowers
  misc_feature: Useful for making ornamental plants with modified flowers
  misc_feature: Useful for making ornamental plants with modified leaves
  misc_feature: Useful for making plants with altered leaf shape eg curled leaves
MEDLYSIHPGISRAGGAATAASEVSGVAGGPGSPPPPPSQPPPPPPADLTELVKAQIAGHPRYPSLLSAYIECRKVGAPPEVATLLEEIGRERCAAASAGGEVGLDPELDEFMEAYCRVLERYKEELSRPFDEAASFLSSVRTQLSSLCGAAASLSDEMVGSSEEDEACSGGDTEATEPGQQEHSSRLADRELKEMLLKKYSGCLSRLRSEFLKKRKKGKLPKDARSALMDWWNTHYRWPYPTEEDKVRLAAATGLDPKQINNWFINQRKRHWKPSEDMRFALMEGVTGGGPSSGTTLYFDTGTIGP

SEQ ID NO: 7665 - DNA, 624 bp, Zea mays
  misc_feature: Ceres CLONE ID no. 1396926
  misc_feature: Ceres CDNA ID no. 40351790
  CDS (43)..(369): REFERENCED BY SEQ ID NO: 7666
acacccttcactactaataaacaaaagaaaaagaaaaacaagatgtgggatgaaactgtagctggacctaagccggagcatggccttggccgcctccgcaacaagatcaacgcccaacccattgacatcaaaggtgtaggagaagggagcagcagcaaggctatgcctgcggtggccgggagtcctggaactccaacgacgccaggatctgcacgtaaagagaacgtgtggaggagtgtgtttcatccaggaagtaacatcgccaccagaggaatgggtactaacctcttcgacaagccctctcacccaaacgctcccaccgtctacgactggttgtacagcgacgatactaggagccagcaccgttgagccgagatcgagaggaaggagtgacatgccggtgatgtagtatatcatgtttccattagccacgtgtttattttcagtttatggcagtgttcgcaagctatttttctttgtttgttgttgctagtgaccgtttgatttccaccatctgggttgttttttaacggtggtaatgcgtcctctcgtctcgtgttatgtttctactgtttggtaatggatatatttaacttttagcttcgaataaaaaaaaaaaaaaaa

SEQ ID NO: 7666 - protein, 108 aa, Zea mays
  misc_feature: Ceres CLONE ID no. 1396926
  misc_feature: Ceres CDNA ID no. 40351790
  misc_feature (1)..(108): Pfam Name: Auxin_repressed PFAM Desc: Dormancy/auxin associated protein
MWDETVAGPKPEHGLGRLRNKINAQPIDIKGVGEGSSSKAMPAVAGSPGTPTTPGSARKENVWRSVFHPGSNIATRGMGTNLFDKPSHPNAPTVYDWLYSDDTRSQHR

SEQ ID NO: 7667 - DNA, 637 bp, Zea mays
  misc_feature: Ceres CLONE ID no. 1397054
  misc_feature: Ceres CDNA ID no. 36707428
  CDS (76)..(522): REFERENCED BY SEQ ID NO: 7668
cttcctctcctcttccctttctgctcttaaatccctaatttcgaagaacctaagctcgaccgaaaggttttggagatggcatcgaaacgaattttgaaggaattgaaggatcttcagaaggatcctcctacttcttgcagcgcaggacccgccgctgaagacgtgtttcattggcaagctacgataatgggtccatccgacagcccttactctggtggtgtttttcttgtaaccattcatttccctccagattacccctttaaacctcctaaggtggcttttaggaccaaagtgttccatccaaacattaacagcaacgggagtatctgcctcgacatcttgaaggagcagtggagtcctgccctcactatctccaaggtgctgctatctatctgttcgttgttaacggatccaaacccggatgatcccttggttccggagatagctcacatgtacaagacagacaagaacaagtacgagtccactgcaaggacctggacccaaaagtacgccatgggctgaccactatgttatttttactgtccgaaaggatgaataattaatctctttcttatttatgtgtaatgaactcgtctctcttataaaaatttgtgaagacagaaaaaaaaaaaaaaaa

SEQ ID NO: 7668 - protein, 148 aa, Zea mays
  misc_feature: Ceres CLONE ID no. 1397054
  misc_feature: Ceres CDNA ID no. 36707428
  misc_feature: The plant produces a reduced number of seeds.
  misc_feature: Useful for biocontainment applications
  misc_feature (5)..(142): Pfam Name: UQ_con PFAM Desc: Ubiquitin
  misc_feature: Homolog of GI Number: 18417097 NR Desc: ubiquitin
  misc_feature: Homolog of GI Number: 11762186 NR Desc: AT4g27960
  misc_feature: Homolog of GI Number: 23297139 NR Desc: E2 ubiquitin
  misc_feature: Homolog of GI Number: 19347859 NR Desc: putative E2
  misc_feature: Homolog of GI Number: 21280893 NR Desc: putative E2
  misc_feature: Homolog of GI Number: 21554343 NR Desc: E2
  misc_feature: Homolog of GI Number: 66354464 NR Desc: ubiquitinating enzyme
  misc_feature: Homolog of GI Number: 40287554 NR Desc: ubiquitin
  misc_feature: Homolog of GI Number: 5762457 NR Desc: ubiquitin
  misc_feature: Homolog of GI Number: 77416935 NR Desc: ubiquitin
MASKRILKELKDLQKDPPTSCSAGPAAEDVFHWQATIMGPSDSPYSGGVFLVTIHFPPDYPFKPPKVAFRTKVFHPNINSNGSICLDILKEQWSPALTISKVLLSICSLLTDPNPDDPLVPEIAHMYKTDKNKYESTARTWTQKYAMG

SEQ ID NO: 7669 - DNA, 855 bp, Zea mays
  misc_feature: Ceres CLONE ID no. 1397124
  misc_feature: Ceres CDNA ID no. 40351791
  CDS (110)..(622): REFERENCED BY SEQ ID NO: 7670
accaccagttccttgttcggtcggaacgcagcgcagcggcggcggcgatagggagagagtctgcaggatccagcaggccgagggaggagtcagcggcgggccggagaatatgagcggcaacggcgcgaagaaggtggtcgatgcggcggtgaaggccggcaggacgatcatcgactgggacggcatggccaagttgctcgtcaccgacgaggcgcgcaaggagttcgccgccctccgccgcgctttcgatgacgtcaaccaccagctccagaccaagttctcccaggaaccccagccgattgattgggagtactacagaaaaggaattggatcaaaagtggtggatatgtacaaagaggcttttgaaagcatcgagatcccgaagtacgtcgacacagttactccccagtacaagccaaagtttgatgctgtgattgctgaattaaaggaggctgagaaagagcatcagaaggagtcagaaaggatagagaaggaacttgctgaaatggaggaaatgaggaaaaagatcagtacaatgacagcagatgattactttgagaagtaccctgaactcaggaagaagtttgacgatgaaatccgtaacgataactggggatattgaagagattggagagaactcttatgatgccatttccatgtccgtgaagaaccaataattttcctgtgccctgaattgggtggtttccatagcatgtgcacggggtttgggtggaatgcctacagaatcgactgtgtcaagctttcttgattccgtagaaacatgttttgtttgacctcatcatagaggatctccgcttttatcgtacaaagattgtgataaaaaaaaaaaaaaaa

SEQ ID NO: 7670 - protein, 170 aa, Zea mays; identical to SEQ ID NO: 164
  misc_feature: Ceres CLONE ID no. 1397124
  misc_feature: Ceres CDNA ID no. 40351791
  misc_feature (12)..(165): Pfam Name: Mt_ATP PFAM Desc: ATP synthase D chain

SEQ ID NO: 7671 - DNA, 1608 bp, Zea mays
  misc_feature: Ceres CLONE ID no. 1397145
  misc_feature: Ceres CDNA ID no. 25403028
  CDS (91)..(1284): REFERENCED BY SEQ ID NO: 7672
aacgcccccatccgtttcttcctccttgccaggacaggagtctcaactctcaagtctcaaccacgtggagagtggagtagtggaccgaccatggccaccgccgccgacatccgcgtctccatcggctaccagacccgcttcgggctccgcctcgccgccgcgctctcctccccacccccatcccccgccagcaactccgccttctccccgctctccctccacgtcgcgctcagcctcctcgccgccggcgcgggtggcgccacgcgcgaccagctcgccgccgccctcggaggcgacgcgcccgccggggccgacggcctgcacgcgctcgccgagcaggtcgtgcagctcgtgctcgccgacggctccggcgccggcggcccgcgcgtcgccttcgccgacggcgtcttcgtcgactcctcgctgaagctcaagccggccttcgaggaggtcgccgtgggaaagtacagggccgacacccagtccgtcgacttccagaaaaaggctgctgaagctgctggtcaagtgaactcatgggtagaaaaaattacttctggtctcatcaaagagatcctgcccccaggttctgttgaccacaccaccaggcttgttcttggtaatgcgctctattttaaaggggcttggactgagaagtttgatgcatctaaaacaaaagatagcgagttccaccttcttgatgggagctcagtccaagcacctttcatgtccagtacagacaagcaatatattgtggcttacaacaacttgaaggtgcttaagcttccataccagcaaggtgcggacaagaggcagttctccatgtacattcttcttccagatgcaaaagatggcatctggagcttggctgaaaagctgaactctgaaccagagttcctggagaaccatgtcccaatgcacaaggttccagtcgggcagttcaaagtccccaagttcaagatatcctttggatttgaggcatctgagttgctcaaaggtctcgggctccagcttccgttcagtgctgaagcggacctgtcggggttagttgattcactagagggacggaacttgtctgtttcgtccgtattccacaagtcatttgtcgaagtgaacgaggaaggaacggaggccgctgccgcatctgctgcaacagttgtgctccggtcgttcacgatgcctcaggatttcgtcgcagatcaccctttcatgttcctgatccgcgaagacttgactggtgtggtgctgtttgtcggccacgtggtgaatcccctccttgctccatagtgtgttgttcagaagtgtggccttggtgcggttccatcccctcacagatgtgtggctttgacagctgatcaagctttatgtgtaatctgccatgttttgtttttgaataaatagatgcttgatcgatgtatgtaaggctgcgagatgatagttcagaattggtatgtgtggtcatggactcatggtacttactgtttccttcttcctctctgatgtttctggttctagtgacctttttccagtgacatctgtaagactgataacatatagattctgttgtgaagcacgtatcggttactgatgattataaaaaaaaaaaaaaaa

SEQ ID NO: 7672 - protein, 397 aa, Zea mays
  misc_feature: Ceres CLONE ID no. 1397145
  misc_feature: Ceres CDNA ID no. 25403028
  misc_feature (31)..(393): Pfam Name: Serpin PFAM Desc: Serpin
  misc_feature: Homolog of GI Number: 19068 NR Desc: protein Z
  misc_feature: Homolog of GI Number: 1310677 NR Desc: protein z
  misc_feature: Homolog of GI Number: 19071 NR Desc: protein zx
  misc_feature: Homolog of GI Number: 50901446 NR Desc: putative serine protease inhibitor
  misc_feature: Homolog of GI Number: 37700305 NR Desc: putative serpin
  misc_feature: Homolog of GI Number: 5734504 NR Desc: serpin
  misc_feature: Homolog of GI Number: 5734506 NR Desc: serpin
  misc_feature: Homolog of GI Number: 871551 NR Desc: serpin
  misc_feature: Homolog of GI Number: 1885350 NR Desc: serpin
  misc_feature: Homolog of GI Number: 1885346 NR Desc: serpin
MATAADIRVSIGYQTRFGLRLAAALSSPPPSPASNSAFSPLSLHVALSLLAAGAGGATRDQLAAALGGDAPAGADGLHALAEQVVQLVLADGSGAGGPRVAFADGVFVDSSLKLKPAFEEVAVGKYRADTQSVDFQKKAAEAAGQVNSWVEKITSGLIKEILPPGSVDHTTRLVLGNALYFKGAWTEKFDASKTKDSEFHLLDGSSVQAPFMSSTDKQYIVAYNNLKVLKLPYQQGADKRQFSMYILLPDAKDGIWSLAEKLNSEPEFLENHVPMHKVPVGQFKVPKFKISFGFEASELLKGLGLQLPFSAEADLSGLVDSLEGRNLSVSSVFHKSFVEVNEEGTEAAAASAATVVLRSFTMPQDFVADHPFMFLIREDLTGVVLFVGHVVNPLLAP

SEQ ID NO: 7673 - DNA, 568 bp, Zea mays
  misc_feature: Ceres CLONE ID no. 1397188
  misc_feature: Ceres CDNA ID no. 13634356
  CDS (55)..(466): REFERENCED BY SEQ ID NO: 7674
actcacaaaccagatctcaatcttctacctcttttctcgataaatcaaatcgcaatggctcgcaccaagcagacggcaaggaaatcaaccggaggcaaggccccaaggaagcagctagcaacaaaagcagcgaggaaatcagctccagccaccggaggagtgaagaagccgcacagattcaggccaggaacagtggctctaagagagatcaggaagtaccagaagagcaccgagctcctgatccgcaagctcccgttccagaggctagtgagagagatcgctcaggatttcaagacggatctccgtttccagagcagcgccgtcgccgctctccaggaagctgccgaggcttacctcgtcggactgtttgaggatactaatctgtgtgcgatccacgccaagagggtgacgatcatgcctaaggacatacagctcgccagaagaatcagaggtgaaagggcttaggatcttcctcgatggttgatgcatctgtttgaacgaatgtgtgatgaattgtaataacttcaagtttattataagaacatttgatccaaaaaaaaaaaaaaaa

SEQ ID NO: 7674 - protein, 136 aa, Zea mays; identical to SEQ ID NO: 358
  misc_feature: Ceres CLONE ID no. 1397188
  misc_feature: Ceres CDNA ID no. 13634356
  misc_feature (58)..(134): Pfam Name: Histone PFAM Desc: Core histone H2A/H2B/H3/H4

SEQ ID NO: 7675 - DNA, 1030 bp, Zea mays
  misc_feature: Ceres CLONE ID no. 1397293
  misc_feature: Ceres CDNA ID no. 25446546
  CDS (69)..(860): REFERENCED BY SEQ ID NO: 7676
atctcccataatattttcagcattcaaaaacacaccaagcgaagcgcactagcaacgacctaacaccaatggctaccaagatattagccctccttgcgcttcttgcccttttagtgagcgcaacaaatgcgttcattattccacagtgctcacttgctcctagtgccagtattccacagttcctcccaccagttacttcaatgggcttcgaacatccagccgtgcaagcctacaggctacaactagcgcttgcggcgagcgccttacaacaaccaattgcccaattgcaacaacaatccttggcacatctaaccctacaaaccattgcaacgcaacaacaacaacaacagtttctgccatcactgagccacctagccgtggtgaaccctgtcacctacttgcaacagcagctgcttgcatccaacccacttgctctggcgaacgtagctgcataccagcaacaacaacagctgcaacagtttatgccagtgctcagtcaactagccatggtgaaccctgccgtctacctacaactactttcatctagcccgctcgcggtgggcaatgcacctacgtacctacaacaacagttgctgcaacaaattgtaccagctctgactcagctagctgtggcaaaccctgctgcctacttacaacagttgcttccattcaaccaactggctgtgtcaaactctgctgcgtacctacaacagcgacaacagttacttaatccattggcagtggctaacccattggtcgctaccttcctgcagcagcaacaacaattgctgccatacaaccagttctctttgatgaaccctgccttgcagcaacccatcgttggaggtgccatcttttagattacatatgagatgtactcgacaatggtgccctcataccgacatgtgtttcctagaaataatcaatatattgattgagatttatctcgataaaaaaaaaaaaaacaaataaaaaaaaataaaaaaaaaaaaaaaaaaaaaaaaaaaaaaaaataaaaaaaaaaaaaaaa

SEQ ID NO: 7676 - protein, 263 aa, Zea mays
  misc_feature: Ceres CLONE ID no. 1397293
  misc_feature: Ceres CDNA ID no. 25446546
  misc_feature (1)..(263): Pfam Name: Zein PFAM Desc: Zein seed storage protein
  misc_feature: Homolog of GI Number: 4185308 NR Desc: 22
  misc_feature: Homolog of GI Number: 72305 NR Desc: 22K zein precursor maizei|141613|sp|P04700|ZEAX_MAIZE Zein (22 kDa) (ClonesZ22.1 and 22A1)
  misc_feature: Homolog of GI Number: 7442064 NR Desc: zein floury2
  misc_feature: Homolog of GI Number: 55724857 NR Desc: zein
  misc_feature: Homolog of GI Number: 141615 NR Desc: Zein
  misc_feature: Homolog of GI Number: 7442062 NR Desc: 22K zein protein
  misc_feature: Homolog of GI Number: 13606089 NR Desc: azs22
  misc_feature: Homolog of GI Number: 2832246 NR Desc: 22
  misc_feature: Homolog of GI Number: 100939 NR Desc: zein precursor
  misc_feature: Homolog of GI Number: 16305125 NR Desc: 19kD alpha zein B1
MATKILALLALLALLVSATNAFIIPQCSLAPSASIPQFLPPVTSMGFEHPAVQAYRLQLALAASALQQPIAQLQQQSLAHLTLQTIATQQQQQQFLPSLSHLAVVNPVTYLQQQLLASNPLALANVAAYQQQQQLQQFMPVLSQLAMVNPAVYLQLLSSSPLAVGNAPTYLQQQLLQQIVPALTQLAVANPAAYLQQLLPFNQLAVSNSAAYLQQRQQLLNPLAVANPLVATFLQQQQQLLPYNQFSLMNPALQQPIVGGAIF

SEQ ID NO: 7677 - DNA, 816 bp, Zea mays
  misc_feature: Ceres CLONE ID no. 1397308
  misc_feature: Ceres CDNA ID no. 36699465
  CDS (66)..(617): REFERENCED BY SEQ ID NO: 7678
accaccaccactggacgtcagcctagcaattagctcatcgactccagattggagaactcgacaccatgaaggtgctgatcgttgcccttgctctcctggcgctcgctgcgagcgccgcctccagtacaagcggcggctgtggctgccagacaccaccgtttcatctaccgcctccgttctatatgccgcctccgttctatctgccgccgcagcagcagccgcagccatggcaataccccactcaaccaccgcagctaagcccgtgccagcagttcggatcctgcggcgtcggcagcgtcggcagcccgttcctgggccagtgcgtcgagttcctgaggcaccagtgcagcccggcggcgacgccctacggctcgccacagtgccaggcgctgcagcagcagtgctgccaccagatcaggcaggtggagccgctgcaccggtaccaggcgacatacggtgtggtcctgcagtccttcctgcagcagcagccgcagggcgagctcgcggcgctgatggcggcccaggtagcgcagcagctgacggcgatgtgcggtctgcagctgcagcagccaggtccctgcccttgcaacgcagctgccggcggtgtctactactgaggaaactatgtactgtagtaataatgtaatggagccgctgactagctacctataactagttcactcgtttagcggcgatgagtaacggagtgtcacccatcaccatgggtggcagtgtgagcaatgacctgaatgaaccattgaaatggaaaggaataatatatagggaaaaaggatgtttggaaaaaaaaaaaaaaaa

SEQ ID NO: 7678 - protein, 183 aa, Zea mays
  misc_feature: Ceres CLONE ID no. 1397308
  misc_feature: Ceres CDNA ID no. 36699465
  misc_feature (86)..(172): Pfam Name: Tryp_alpha_amyl PFAM Desc: Protease inhibitor/seed storage/LTP family
  misc_feature: Homolog of GI Number: 18054 NR Desc: gamma
  misc_feature: Homolog of GI Number: 170156 NR Desc:
  misc_feature: Homolog of GI Number: 168695 NR Desc: gamma zein
  misc_feature: Homolog of GI Number: 2119755 NR Desc: gamma
  misc_feature: Homolog of GI Number: 671656 NR Desc: gamma
  misc_feature: Homolog of GI Number: 45645342 NR Desc: gamma kafirin protein
  misc_feature: Homolog of GI Number: 45645344 NR Desc: gamma kafirin protein
  misc_feature: Homolog of GI Number: 22550 NR Desc: 27kDa storage protein
  misc_feature: Homolog of GI Number: 52352777 NR Desc: low molecular weight glutenin subunit
  misc_feature: Homolog of GI Number: 16305113 NR Desc: 50kD gamma zein
MKVLIVALALLALAASAASSTSGGCGCQTPPFHLPPPFYMPPPFYLPPQQQPQPWQYPTQPPQLSPCQQFGSCGVGSVGSPFLGQCVEFLRHQCSPAATPYGSPQCQALQQQCCHQIRQVEPLHRYQATYGVVLQSFLQQQPQGELAALMAAQVAQQLTAMCGLQLQQPGPCPCNAAAGGVYY

SEQ ID NO: 7679 - DNA, 917 bp, Zea mays
  misc_feature: Ceres CLONE ID no. 1397386
  misc_feature: Ceres CDNA ID no. 25446681
  CDS (147)..(743): REFERENCED BY SEQ ID NO: 7680
acaagagtgcgggttcgcgttcagtccaagctgaacataaacgcaggcccctcgacgcagattccgcgctcaggactcaggagcattcgagaagccgaagaaaattcgaagacgaggagcagctacactgcggacggacttcgggcatggagggccagttccaggttggcaaggaggaggtcatccaagcatggtacatggatgacagtgaagaggaccagaggcttcctcatcatcgcgagcccaaagaattcattcctctcgacaaactttccgaactaggaatattaagctggcgcctaaatgctgatgattgggagaatgatgagaacctcaagaaaattcgtgaagccaggggttactcttacatggacatttgtgatgtgtgcccagagaagttgccaaattacgaggctaagataaagaatttctttgaagaacacttgcatactgatgaagagatacgctattgccttgagggcagcggctactttgatgtgagggaccaagatgatcagtggatccgtgtagcggtaaagaaagggggcatgatcgttttgcctgcaggaatgtatcatcgctttacgttggatagtgacaactacatcaaggcaatgcgtctatttgtgggtgagcctgtctggacaccatacaatcgtccgcatgaccatctcccggctaggaaggagtacgtcgagaaaatcatcaaccgaggtggaaaccaagccgtcgaagctcgttgagcgtgtccactctacatgtcctcctgccgtctcagcctcttgtgttttacaccctacaactcctagtaccgccgaataagatttgctatctgcaatgtgctcatgccaccgctgtgtgtgccagttaacagtttgcacgaaaccctagatattttgttaaaaaaaaaaaaaaaa

SEQ ID NO: 7680 - protein, 198 aa, Zea mays
  misc_feature: Ceres CLONE ID no. 1397386
  misc_feature: Ceres CDNA ID no. 25446681
  misc_feature (14)..(168): Pfam Name: ARD PFAM Desc: ARD/ARD' family
  misc_feature: Homolog of GI Number: 3201969 NR Desc: submergence induced protein 2A
  misc_feature: Homolog of GI Number: 61807497 NR Desc: aci
  misc_feature: Homolog of GI Number: 14522834 NR Desc: iron
  misc_feature: Homolog of GI Number: 22773257 NR Desc: Putative probable submergence induced
  misc_feature: Homolog of GI Number: 7489558 NR Desc: probable submergence induced protein 2
  misc_feature: Homolog of GI Number: 78708652 NR Desc: submergence induced protein 2
  misc_feature: Homolog of GI Number: 31432123 NR Desc: putative zinc finger protein ID1
  misc_feature: Homolog of GI Number: 21555216 NR Desc: submergence induced protein 2A
  misc_feature: Homolog of GI Number: 79325111 NR Desc: metal ion binding
  misc_feature: Homolog of GI Number: 37791221 NR Desc: ARD
  misc_feature: Useful for making plants with altered leaf shape eg curled leaves
  misc_feature: Useful for making plants with increased biomass and foliage
MEGQFQVGKEEVIQAWYMDDSEEDQRLPHHREPKEFIPLDKLSELGILSWRLNADDWENDENLKKIREARGYSYMDICDVCPEKLPNYEAKIKNFFEEHLHTDEEIRYCLEGSGYFDVRDQDDQWIRVAVKKGGMIVLPAGMYHRFTLDSDNYIKAMRLFVGEPVWTPYNRPHDHLPARKEYVEKIINRGGNQAVEAR

SEQ ID NO: 7681 - DNA, 680 bp, Zea mays
  misc_feature: Ceres CLONE ID no. 1398062
  misc_feature: Ceres CDNA ID no. 40351793
  CDS (54)..(464): REFERENCED BY SEQ ID NO: 7682
atcaatcacatcctctcactaagcaaaaaagagcaaaccttttcgaatctcaaatggctcgtaccaagcaaaccgcgagaaaatccaccggaggcaaagccccgaggaagcagctcgcaaccaaggcggcgaggaagtcggctccggccaccggaggagtgaagaagccgcacaggttccgtcccggaaccgtggcgctgagggagatcaggaagtaccagaagagcaccgagcttctgatccgcaagctccccttccagcgtcttgtccgcgagatcgctcaggacttcaaaaccgatctgaggttccagagcagcgccgtcgcggctctgcaagaggcggcggaggcgtaccttgtgggtttgttcgaggatacgaatctttgcgcgattcacgctaagagggtaacgatcatgcccaaggatattcagctcgcgaggaggatccgcggtgaaagagcttgaagactcttcgttgatgggcaaatctgtttctgggattttagtttgtctttagtttatgtgttcctttgttgtagagcttggctcgtgttttgttttttttatttgtttaggattagtctctgttaacatagtcgtgaaggtgttcgtcgaaatgtcccaacgagaatctctcttgtttaatataaaaaaactatttgcccaaaaaaaaaaaaaaaa

SEQ ID NO: 7682 - protein, 136 aa, Zea mays; identical to SEQ ID NO: 358
  misc_feature: Ceres CLONE ID no. 1398062
  misc_feature: Ceres CDNA ID no. 40351793
  misc_feature (58)..(134): Pfam Name: Histone PFAM Desc: Core histone H2A/H2B/H3/H4

SEQ ID NO: 7683 - DNA, 2558 bp, Zea mays
  misc_feature: Ceres CLONE ID no. 1398383
  misc_feature: Ceres CDNA ID no. 25891461
  CDS (63)..(2354): REFERENCED BY SEQ ID NO: 7684
acgttgacggccaccccgcccacagccgcgacaaactcttcctcagacccacgccacgtacgatgcctctctccccttcccctccgcccaacgccgccgccgccgccgccctacccctcctcctgctgctcgtctgcgccagcagcattgccgcgcagccgctggcgtcgtcgcaggccaaggcgctcctccgggtgcgccgcctgctgttctacccgccggcgctcgagccgctgcgcggggcgccggacccctgcgcgctgccgcccgcgccggccctcgcagtcgcctgcgagggcggccaggtcacggcgctctccgtcctgggagaccgcgacccggacgcggcctggcgcgccgcgctgccggccagcttctcctccgaggcgctgttcaccacgctcaccaggctcccggcgctcgcgcgcctctcgctcgtcggcctcggcgcctggggcccgctcccgggcgccaaactccgccggctccaggcgctgcagcagctcaacctcagctccaactacttctacggcgccgtccccgatggcctcgcccggctctactcgctgcagagcctcgtgctgtcctggaactggctcaacggcaccgtgccgtccctgtccgggctccagttcctggaggagctcgacctgtcgcacaaccggctcggcccggcgttcccggacgtggggaggtcggtcgcgcggctggtcctggacgacaacaacttcaccgggggtatcccggcgggggtgagctcgctgggcctgctccagtacttcgacgtgtccgggaaccagctgcagggttggatcccctcctccgtcttcgcgctcccggcgctgcggtacatcaacctctcccgcaaccggctggcgggccagcttcccgccaccacggcttgcgcggaggcgctggcgttcgtggacgtctcggcgaacctgctcactggggcgcgcccgccgtgcatgcggggcaactcctcggcgcgcacggtcctcgtcgcgggcaactgcttcgccgacgccaagcagcagcgggccagctcgtactgcaaccccggcgcgctggccgccgtgctgccgccgccgcagggcaacggaggaggaggagggcaggggacggggaagggccgcgagatcgggatggttcttgcgattgccggcagcgtcgttggtgccgcattgctgattgcgctggccatggtggtggtcctgaggagggcgaggaggcagcgtccggaggcgaccatcctgccgaagtcgcccgcggcgacaccgaccaacaaggcggatggatggaaggctccggctaaggcaacccagaagattattactcctgctgataagagacatgcatcacaagctgcaagggtgaatacactggaagtaccagcctaccgagtgtgtacactggaggagctccaagaagcaaccgacaatttcagttcctccaacctaatcaagactagtcctcttgcacaggattataatggtcagcttcaagatggttcacgagtactggttagatgtttgaggctgaagccgaagtactcctcccagagccttgtccaatacatggagattatttctaaacttcggcaccgtcatttggtcagcatcattggtcattgcattgtcagtgatgaggagaatcctaataatgcgagctcagtctaccttgtttctgaatgcgtgacaaatggatctttaagaagtcaccttactgagtggaggaagcgtgaaatgctcaagtggccccaacgggtttgcgctgccattggcattgcgagaggggttcagtttctgcataatctgactgctcctgggttcgtacagaacaatctcaacatagaacatattctgctggacaagaccctcacgtctaagatcagcaacttcagtcttccaatgatatcaactagcaagaacggcaagattctctcagagaccccatttgctgtccatgaagacaatgatatcggcagtgctcagaacgcggcacaaggtgacaaggaagacatctaccagattggcctaattctcctggaggtgatcacaggcaaaccaacagagtcccaaagccaactggagtccctgaaagctcagctaagtaaggcgctgactgaagacccagacaggctgaaagacatggcagacccggcgatacacggtacttttgcagtggactcactgagcacagtcgccgagatagccctcaagtgcacggctggcgacccaagcgaccgaccttccatcgacgacgtgctctggaacctgcagtactccatgcaggtgcaggatgggtgggcgagcagcgagagcttaggcttgagcgtcaaatctcaggtttagataaaggcgcagtgattcggttcctatgcaaatgatgattatgaagctctatgcgccatcactctgcctctagttttctggggttttttttttgggaggagaggtcgttggtatagtctctactgtatatacgtggaccttacctttttcagaactgttgtttatggtacctgtaaaactcaggttctaaaaaaaaaaaaaaaa

SEQ ID NO: 7684 - protein, 763 aa, Zea mays
  misc_feature: Ceres CLONE ID no. 1398383
  misc_feature: Ceres CDNA ID no. 25891461
  misc_feature (168)..(190): Pfam Name: LRR_1 PFAM Desc: Leucine Rich Repeat
  misc_feature (507)..(584): Pfam Name: Pkinase PFAM Desc: Protein kinase domain
  misc_feature (714)..(739): Pfam Name: Pkinase_Tyr PFAM Desc: Protein tyrosine kinase
  misc_feature: Homolog of GI Number: 7262681 NR Desc: Contains similarity to a Receptor
  misc_feature: Homolog of GI Number: 15223744 NR Desc: leucine
  misc_feature: Homolog of GI Number: 50725434 NR Desc: putative receptor
  misc_feature: Homolog of GI Number: 2947063 NR Desc: putative receptor
  misc_feature: Homolog of GI Number: 30678025 NR Desc: leucine
  misc_feature: Homolog of GI Number: 33242911 NR Desc: transmembrane protein kinase
  misc_feature: Homolog of GI Number: 34900026 NR Desc: putative brassinosteroid LRR receptor kinase prrotein
  misc_feature: Homolog of GI Number: 50919095 NR Desc: putative receptor
  misc_feature: Homolog of GI Number: 4522003 NR Desc: putative receptor
MPLSPSPPPNAAAAAALPLLLLLVCASSIAAQPLASSQAKALLRVRRLLFYPPALEPLRGAPDPCALPPAPALAVACEGGQVTALSVLGDRDPDAAWRAALPASFSSEALFTTLTRLPALARLSLVGLGAWGPLPGAKLRRLQALQQLNLSSNYFYGAVPDGLARLYSLQSLVLSWNWLNGTVPSLSGLQFLEELDLSHNRLGPAFPDVGRSVARLVLDDNNFTGGIPAGVSSLGLLQYFDVSGNQLQGWIPSSVFALPALRYINLSRNRLAGQLPATTACAEALAFVDVSANLLTGARPPCMRGNSSARTVLVAGNCFADAKQQRASSYCNPGALAAVLPPPQGNGGGGGQGTGKGREIGMVLAIAGSVVGAALLIALAMVVVLRRARRQRPEATILPKSPAATPTNKADGWKAPAKATQKIITPADKRHASQAARVNTLEVPAYRVCTLEELQEATDNFSSSNLIKTSPLAQDYNGQLQDGSRVLVRCLRLKPKYSSQSLVQYMEIISKLRHRHLVSIIGHCIVSDEENPNNASSVYLVSECVTNGSLRSHLTEWRKREMLKWPQRVCAAIGIARGVQFLHNLTAPGFVQNNLNIEHILLDKTLTSKISNFSLPMISTSKNGKILSETPFAVHEDNDIGSAQNAAQGDKEDIYQIGLILLEVITGKPTESQSQLESLKAQLSKALTEDPDRLKDMADPAIHGTFAVDSLSTVAEIALKCTAGDPSDRPSIDDVLWNLQYSMQVQDGWASSESLGLSVKSQV

SEQ ID NO: 7685 - DNA, 2159 bp, Zea mays
  misc_feature: Ceres CLONE ID no. 1398500
  misc_feature: Ceres CDNA ID no. 35385346
  CDS (451)..(1833): REFERENCED BY SEQ ID NO: 7686
agctagcagtcgtcttgcattgtagctagtccattgctctcatcttctcttcttcctccagtcctcccccctttcccctcttcggcctctctcgctcagctcgctcttcattaagctcacgtcgttcctcccttcttcctcttcttcttcttatccgttgttcaattcgttcagctagccggccagagatcgagcatcatctccatcatcgatcgatccatctcatctctttctcttcttctattctatgtcgtcgtcgtcccagattagatcgaagctgctagcagtctatccagtctctagctagctagatcaagcccgcagactatataatataatacaagctagctacgtgcttattgctttattagtctagaagaataatctagatatatacgatcgaacatatatctcgatctccgatccaccgatacacacccggccctatccatgcttgaggtgtcgacgctgcgcggccctactagcagcggcagcaaggcggagcagcactgcggcggcggcggcggcttcgtcggcgaccaccatgtggtgttcccgacgtccggcgactgcttcgccatggtggacgacaacctcctggactacatcgacttcagctgcgacgtgcccttcttcgacgctgacggggacatcctccccgacctggaggtagacaccacggagctcctcgccgagttctcgtccacccctcctccggacgacctgctggcagtggcagtattcggcgccgacgaccagccggcggcggcagtagcacaagagaagccgtcgtcgtcgttggagcaaacatgtggtgacgacaaaggtgtagcagtagccgccgccagaagaaagctgcagacgacgacgacgacgacgacggaggaggaggattcttctcctgccgggtccggggccaacaagtcgtcggcgtcggcagagggccacagcagcaagaagaagtcggcgggcaagaactccaacggcggcaagcgcaaggtaaaggtggactggacgccggagctgcaccggcggttcgtgcaggcggtggagcagctgggcatcgacaaggccgtgccgtccaggatcctggagatcatgggcacggactgcctcacaaggcacaacattgccagccacctccagaagtaccggtcgcacagaaagcacctgatggcgcgggaggcggaggccgccacctgggcgcagaagcgccatatgtacgcgccgccagctccaaggacgacgacgacgacggacgccgccaggccgccgtgggtggtgccgacgaccatcgggttcccgccgccgcgcttctgccgcccgctgcacgtgtggggccacccgccgccgcacgccgccgcggctgaagcagcagcggcgactcccatgctgcccgtgtggccgcgtcacctggcgccgccccggcacctggcgccgtgggcgcacccgacgccggtggacccggcgttctggcaccagcagtacagcgctgccagtaaatggggcccacaggcagccgccgtgacgcaagggacgccatgcgtgccgctgccgaggtttccggtgcctcaccccatctacagcagaccggcgatggtacctccgccgccaagcaccaccaagctagcccaactgcatctggagctccaagcgcacccgtccaaggagagcatcgacgcagccatcggagatgttttagtgaagccatggctgccgcttccactggggctcaagccgccgtcgctcgacagcgtcatgtcggagctgcacaagcaaggcgtaccaaaaatcccaccggcggctgccaccaccaccggcgccaccggatgacatactatctcgtcgacaatacatgcatgtacaatagacggatgtctagtagtatagtagattgctgctagctagctagccgctagagtgtagtagcatatgcatgcctttttttcttcttctttttttttgcccttattattaagctggctatactagcgattgagatggagcttgacgacacagatctgctagctagctactatttgagggtttctcttgtatgctacctattgctgctgctgctgagacaagtaatgtacgtacgcctgtgcaaacgacacatcggattgtattgtattactaagaaaaaaaaaaaaaaaaaa

SEQ ID NO: 7686 - protein, 460 aa, Zea mays
  misc_feature: Ceres CLONE ID no. 1398500
  misc_feature: Ceres CDNA ID no. 35385346
  misc_feature (185)..(235): Pfam Name: Myb_DNA PFAM Desc: Myb
  misc_feature: Homolog of GI Number: 11177540 NR Desc: putative transcription factor Golden2
  misc_feature: Homolog of GI Number: 13940498 NR Desc: putative transcription factor OsGLK1
  misc_feature: Homolog of GI Number: 54291302 NR Desc: putative golden2
  misc_feature: Homolog of GI Number: 13940496 NR Desc: putative transcription factor ZmGLK1
  misc_feature: Homolog of GI Number: 62632221 NR Desc: golden2
  misc_feature: Homolog of GI Number: 54291303 NR Desc: putative golden2
  misc_feature: Homolog of GI Number: 56784113 NR Desc: putative transcription factor OsGLK2
  misc_feature: Homolog of GI Number: 34904478 NR Desc: OSJNBa0086P08.18
  misc_feature: Homolog of GI Number: 13940500 NR Desc: putative transcription factor OsGLK2
  misc_feature: Homolog of GI Number: 55669165 NR Desc: golden 2
MLEVSTLRGPTSSGSKAEQHCGGGGGFVGDHHVVFPTSGDCFAMVDDNLLDYIDFSCDVPFFDADGDILPDLEVDTTELLAEFSSTPPPDDLLAVAVFGADDQPAAAVAQEKPSSSLEQTCGDDKGVAVAAARRKLQTTTTTTTEEEDSSPAGSGANKSSASAEGHSSKKKSAGKNSNGGKRKVKVDWTPELHRRFVQAVEQLGIDKAVPSRILEIMGTDCLTRHNIASHLQKYRSHRKHLMAREAEAATWAQKRHMYAPPAPRTTTTTDAARPPWVVPTTIGFPPPRFCRPLHVWGHPPPHAAAAEAAAATPMLPVWPRHLAPPRHLAPWAHPTPVDPAFWHQQYSAASKWGPQAAAVTQGTPCVPLPRFPVPHPIYSRPAMVPPPPSTTKLAQLHLELQAHPSKESIDAAIGDVLVKPWLPLPLGLKPPSLDSVMSELHKQGVPKIPPAAATTTGATG

SEQ ID NO: 7687 - DNA, 1357 bp, Zea mays
  misc_feature: Ceres CLONE ID no. 1398901
  misc_feature: Ceres CDNA ID no. 25446106
  CDS (187)..(906): REFERENCED BY SEQ ID NO: 7688
acaacccttgtggcattattgcccccctcttccgttcccaacccattacatttgcaagcccttttacattgcagagcctcgctcgctctcggaacagagctaggcagctaacagacgaagaagaagcaagccaagcagcaagcgaagcgagagagaggcgaggacgtggcgacgacggcagccgcgatggcgacaacgacagacctggggttcgaggcgacggagctccgcctgggcctgcccggcggcagcggcgggggagggggaggggagctggcgctgggcggcgaggggaggagctcgtcctccgcctccggcaagaggggcttcgccgagaccatcgacctgaagctgaagctggagccagcggccgtcgtggaggcggaggaggaggaggaggaccacggcgttgctgttgcccttgagaaggaggaggaggccgggaagatgaagcggtccccgagccagagcagcgtcgccgccgccgccgtgctggctgaccccgccgagaagccgcgcgccgccaaggctcaggtggtgggatggccaccggtccggtcgttccggaagaacatcatgtccgtgcagtccgacaagggcgccggcaaagacgccgccgccgccaacggcgacaagtcctcggcggcggcaggcggcggtgccgcgttcgtgaaggtgagcttggacggcgcgccctacctgcgcaaagtggacctcaagatgtacaggagctaccagcagctgtccaaggcgctcgagaacatgttcagctccttcaccatcggaagctgtactcccgcacggtgtacctgcagtcggagctggactcgctggtcgacccggccggctggctcgagtggaacggcagctttgcgctcgacacgctctactacggcgagtacatgaacacggggcccggcgccggcacgtccgggcgggtcaagtggaaggggtaccgcgtcatcaccagcgccgccgaggccagcgccttcaccgttggcaacttcatcgacggcgacctctggctcgccggcacgtccatccccttcaccaccggcttgtgagcgcgcgcgggggtatgtatacgaggggtttcacggcaagggatggcaataaaccaaattggcggcggaagttcgtcgttcgtacgttcgttcatttcaatcagagctaaaaaaaagcaccgtatcgatccggtcgtgttactgtagttgattattttgtgtttggggacgcaggccaatatatttatttaatttaaccgtcccatatatatgtacacgtgcttgttatgattcggtgtattatttatatgtattgatacggtatcaatatataatcaaaaaaaaaaaaaaaa

SEQ ID NO: 7688 - protein, 239 aa, Zea mays
  misc_feature: Ceres CLONE ID no. 1398901
  misc_feature: Ceres CDNA ID no. 25446106
  misc_feature (7)..(230): Pfam Name: AUX_IAA PFAM Desc: AUX/IAA family
  misc_feature: Homolog of GI Number: 77556997 NR Desc: aux/IAA protein
  misc_feature: Homolog of GI Number: 50917147 NR Desc: putative auxin
  misc_feature: Homolog of GI Number: 34894536 NR Desc: putative pectinesterase 2.1 precursor
  misc_feature: Homolog of GI Number: 52076557 NR Desc: putative pectinesterase
  misc_feature: Homolog of GI Number: 26892110 NR Desc: methyl pectinesterase
  misc_feature: Homolog of GI Number: 20385508 NR Desc: auxin
  misc_feature: Homolog of GI Number: 55416169 NR Desc: auxin
  misc_feature: Homolog of GI Number: 6175173 NR Desc: auxin
  misc_feature: Homolog of GI Number: 4887020 NR Desc: Nt
  misc_feature: Homolog of GI Number: 20269061 NR Desc: aux/IAA protein
MATTTDLGFEATELRLGLPGGSGGGGGGELALGGEGRSSSSASGKRGFAETIDLKLKLEPAAVVEAEEEEEDHGVAVALEKEEEAGKMKRSPSQSSVAAAAVLADPAEKPRAAKAQVVGWPPVRSFRKNIMSVQSDKGAGKDAAAANGDKSSAAAGGGAAFVKVSLDGAPYLRKVDLKMYRSYQQLSKALENMFSSFTIGSCTPARCTCSRSWTRWSTRPAGSSGTAALRSTRSTTAST

SEQ ID NO: 7689 - DNA, 1022 bp, Zea mays
  misc_feature: Ceres CLONE ID no. 1399641
  misc_feature: Ceres CDNA ID no. 36593196
  CDS (56)..(499): REFERENCED BY SEQ ID NO: 7690
accggcttcctcctcctcctcctctcccctcccgattccttctctctcccgctaaatggatggacacgctactgcgccggatttctccccagccggttccttcggccacgcgaccgcgcgctcggaaaactccatggacagcgaaggaggcgaaccaagggcgacgtattcgccgccggagaaggtaagtgtcgatccgccgtgtcccgcgattcgtttgtcttgctccgagcggcgaacagcagtgggggtcgtcctcgcggatccgtcttcaagctttcgcggatccgccttcaagcttcgcggatcccacacgaaacctccgagttctctcgccaattcgatccgcctcaccgccgccgcccgtccgccggtcggccttgactgctccgtcgcacgtggcggttcgcagcacggaatctaccttgtgttgacagatccggggaaacccttgttcccggtcgttccggctcgaatcttctgcggactggcaatgtaagcgttctccattggagggcgacgatctacggggcggttgttggcagggttgcgggaatggagcacgtgttcggagggaagtttaagcttgggaagaagatcgggagcggatctttcggcgagctctatctcggttagcgtctcgccgggttcttcattgattctgtcacgcgtctctgcagattcctacgcgtcgttgtttttggctgcaggcgtcaacatacacagcggcgaggaggtggctatcaagttgttattagataatctgatactgttcgtgcaccatttttctctgtcgtggagttatatgcctggcattcggcatgagtttgttccatatgcaaacatatcatggtcaaccattgctagcaacggtttcgtgaagaatttgtgtgtagattatgggatgacagaaaatggatgatgttctgcatgtaattgctttaaaaaagactggcatggtcccgagctatatttttacatgagtaataacaagattttcaaacctaaaaaaaaaaaaaaaa

SEQ ID NO: 7690 - protein, 147 aa, Zea mays
  misc_feature: Ceres CLONE ID no. 1399641
  misc_feature: Ceres CDNA ID no. 36593196
MDGHATAPDFSPAGSFGHATARSENSMDSEGGEPRATYSPPEKVSVDPPCPAIRLSCSERRTAVGVVLADPSSSFRGSAFKLRGSHTKPPSSLANSIRLTAAARPPVGLDCSVARGGSQHGIYLVLTDPGKPLFPVVPARIFCGLAM

SEQ ID NO: 7691 - DNA, 633 bp, Zea mays
  misc_feature: Ceres CLONE ID no. 1400080
  misc_feature: Ceres CDNA ID no. 13636830
  CDS (27)..(450): REFERENCED BY SEQ ID NO: 7692
gattgggtccaacaccagccgccgccatgtcgaagcgaggcaggggaggttcggcggggaacaagttccgcatgtcgctgggtctgccggttgccgcgacggtgaactgcgcggacaacacgggcgccaagaacctctacatcatctccgtcaagggcatcaagggccgcctcaaccgcctcccgtccgcctgcgttggcgacatggtcatggccaccgtcaagaaggggaagcccgacctcaggaagaaggtgatgcccgccgtcatcgtccgccagcgcaagccgtggcgccgcaaggacggtgtctacatgtacttcgaagataatgctggagtgattgtgaatcccaagggtgagatgaaaggttccgctatcactggacctatcggcaaggagtgtgctgatctttggcctaggattgctagcgcagcaaacgccattgtttgagagcttgttggaatatgttcagacttatatgatcatcttattatcagttgctaagaatgctattgggcttaataggccctttatgtttgttcactcaattttgtagtaaacagaatttggtataccaaggggatctatataacaatgtatgccataaattttctgactaaaaaaaaaaaaaaaa

SEQ ID NO: 7692 - protein, 140 aa, Zea mays; identical to SEQ ID NO: 288
  misc_feature: Ceres CLONE ID no. 1400080
  misc_feature: Ceres CDNA ID no. 13636830
  misc_feature: The plant is abnormally small.
  misc_feature: Useful for making plants with modulated biomass
  misc_feature (19)..(140): Pfam Name: Ribosomal_L14 PFAM Desc: Ribosomal protein L14p/L23e

SEQ ID NO: 7693 - DNA, 551 bp, Zea mays
  misc_feature: Ceres CLONE ID no. 1400375
  misc_feature: Ceres CDNA ID no. 40351795
  CDS (112)..(309): REFERENCED BY SEQ ID NO: 7694
aggcctagggtttccttcctcctccagtgctgtcatcgccgccgccgccgccccggtttccttcgtaagcccgccgtcctccgtccgcgactctgcgcgagaagcgagagtatggacacccaagtgaagcttgctgttgtggtgaaggtgatgggaaggaccggctccaggggtcaggttacccaggtcagagtgaagttcttggatgaccagaaccgtctcatcatgaggaacgtcaagggacctgttcgcgagggagacatcctcacactgctcgagtctgagagggaggctaggaggctgcgttgaggcgggatactgtcttggtagttttcgtatggagttggatgtcatctaattgtgctatgtttgtcaaactttggtatgacctttaaaacacctgccttgtatgattatttgtgagcctggtggtaagattgcagtttggtttttatgatccggttgagggtatgtttggcaacaatatttatcaaaatcatgtttttacaatactatactttgtaattgtcatcacaaaaaaaaaaaaaaaa

SEQ ID NO: 7694 - protein, 65 aa, Zea mays; identical to SEQ ID NO: 54
  misc_feature: Ceres CLONE ID no. 1400375
  misc_feature: Ceres CDNA ID no. 40351795
  misc_feature (1)..(65): Pfam Name: Ribosomal_S28e PFAM Desc: Ribosomal protein S28e

SEQ ID NO: 7695 - DNA, 1605 bp, Zea mays
  misc_feature: Ceres CLONE ID no. 1400641
  misc_feature: Ceres CDNA ID no. 25446826
  CDS (216)..(1244): REFERENCED BY SEQ ID NO: 7696
atatctccctcgttttggtttgcgcccaagcaagcgcgtcacgcgagcaccgccgctgccgccgttcactatccccctgaacaccgcccgccgccgccgccgtctcctccgcatgcacgcacgctgcctctgcacgagcggcgagcggcaagcggtgatccggcgatcctcgtcgatccccgccctaacgtgctgcggtggtccgtgcagacaagatgaagttcggcgccacatatgaggagtatctccgggcagagcgggacaaattcctagggcaatgctcccatgtagaatacaaacgcctcaaaaaggtattgaagaaatgtagagttggtcgctcactgcaagcagatggcacaaatggtgatgagcagcaggaggggagagacgaatcttcaaacatttgtgaatgcaactcatgcacattgtgtgatgagatgttctttacagaactcaacaaggaagcatcagaaatagcaggttgtttcagatctagagtacaacgtctcctccatcttcatgttccttcaggactacaacgctgtatatggcgttttaggcagtgtttcatagatgatcagcaaataatggttcaagaaggcagaatgcttctcaattatgtgaccatgaatgctattgctattcgcaaaattctcaagaaatatgacaagatacatggttctgtgagtggcagagatttcaagagcaagatgcaaactgagcatattgaactgttgcagtcaccttggctgatagagcttgctgctttccatcttaactgcgatgattcagatgctgatgaacctagagctggagagttcttcaagaatggattcttcaagaatttttcctgtgacctgagtggagcacagccactactaacaatgaccatttctgaaactctgaagtatgagtacagcctaacttgtccaatttgcttggacactttgttcaacccttatgcgcttagctgtgggcatctgttctgcaaagcctgtgcatgtggtgctgcttctgtctacatcttccagggtgtcaagtcggcacctccggaggccaagtgccctgtctgccgagcggttggtgtgtttgatcgtgctgtgcgtatgactgaactagaattgctcctcaagagaagggacaaagattactttctgcagagactgcgcgaagagcgaagtgtgatggtgaagcaggccaaagaatactgggactcacaggcaatgctatcgatggggatttgaaagctacaatgttcttaccagttcaattgttgtggctaattacatctgaaggttctctggctaattacatattttagttcctggcaagcgtcaatcaattaagttaactgcgctcacataacagaaattgacatagcagaagctgagcccatcgaagaagcaaacaaaatcagttgcattctatcattctccgcctgattgaagaatcgaacggatttaactaatttctttgttccttccgttctactacaagcttgaaatgacgaaactcatattgtatttacatatctactgattattgggttatttaccctatttactgattgttggtgtgttattttcctgaaaaaaaaaaaaaaaa

SEQ ID NO: 7696 - protein, 342 aa, Zea mays
  misc_feature: Ceres CLONE ID no. 1400641
  misc_feature: Ceres CDNA ID no. 25446826
  misc_feature (1)..(167): Pfam Name: SPX PFAM Desc: SPX domain
  misc_feature (238)..(261): Pfam Name: zf PFAM Desc: Zinc finger
MKFGATYEEYLRAERDKFLGQCSHVEYKRLKKVLKKCRVGRSLQADGTNGDEQQEGRDESSNICECNSCTLCDEMFFTELNKEASEIAGCFRSRVQRLLHLHVPSGLQRCIWRFRQCFIDDQQIMVQEGRMLLNYVTMNAIAIRKILKKYDKIHGSVSGRDFKSKMQTEHIELLQSPWLIELAAFHLNCDDSDADEPRAGEFFKNGFFKNFSCDLSGAQPLLTMTISETLKYEYSLTCPICLDTLFNPYALSCGHLFCKACACGAASVYIFQGVKSAPPEAKCPVCRAVGVFDRAVRMTELELLLKRRDKDYFLQRLREERSVMVKQAKEYWDSQAMLSMGI

SEQ ID NO: 7697 - DNA, 487 bp, Zea mays
  misc_feature: Ceres CLONE ID no. 1401157
  misc_feature: Ceres CDNA ID no. 25446107
  CDS (71)..(253): REFERENCED BY SEQ ID NO: 7698
aacactcatcacgccgccactgatctgctctgttgctggtgactaggagcagtagcgagagggattctggatggccaagtcgaagaaccacacggcgcataaccaatcgttcaaggcgcacaagaacggcatcaagaagcccaagcgccaccgccagacctccaccaaggggatggacccgaagtttctgaggaacttgaggtactcaaggaagggcaacaagaagagtggcgaggctgagtccgaggagtaagatgatggtgattgagtttgtggcgacaaatgcatctcttgtatcgctaagagtcttagctgtgaacttagttctcacttctgtgtgactgtgatcaaaggagatccatcagttggtaccgaagtgtattttatgtcttgttggttacctggaatttaattaaaaccatcagttgtatccttttgagaattgggcaattgatgtgtcgttttctgttcaaaaaaaaaaaaaaaa

SEQ ID NO: 7698 - protein, 60 aa, Zea mays
  misc_feature: Ceres CLONE ID no. 1401157
  misc_feature: Ceres CDNA ID no. 25446107
  misc_feature (4)..(42): Pfam Name: Ribosomal_L29e PFAM Desc: Ribosomal L29e protein family
  misc_feature: Homolog of GI Number: 34905656 NR Desc: P0475H04.11
  misc_feature: Homolog of GI Number: 7959366 NR Desc: ribosomal protein L29
  misc_feature: Homolog of GI Number: 7549643 NR Desc: ribosomal protein L29
  misc_feature: Homolog of GI Number: 30679956 NR Desc: 60S ribosomal protein L29
  misc_feature: Homolog of GI Number: 7549645 NR Desc: ribosomal protein L29
  misc_feature: Homolog of GI Number: 27764982 NR Desc: At3g06680
  misc_feature: Homolog of GI Number: 12231298 NR Desc: ripening regulated protein DDTFR19
  misc_feature: Homolog of GI Number: 72051829 NR Desc:  similar to 60S ribosomal protein L29
  misc_feature: Homolog of GI Number: 61654674 NR Desc: L29
  misc_feature: Homolog of GI Number: 58388930 NR Desc: ENSANGP00000011508
MAKSKNHTAHNQSFKAHKNGIKKPKRHRQTSTKGMDPKFLRNLRYSRKGNKKSGEAESEE

SEQ ID NO: 7699 - DNA, 783 bp, Zea mays
  misc_feature: Ceres CLONE ID no. 1401364
  misc_feature: Ceres CDNA ID no. 13628146
  CDS (82)..(535): REFERENCED BY SEQ ID NO: 7700
ccaactacggtaactcgtctgctcgcatttcctcccaatccatcccgcctccaaacccgaactccaagtcgccccgcatcgatggcgcccaaggccgagaagaagcccgcggcgaagaagccggcggaggaggagcccgctgccgagaaggcgccggccgggaagaagcccaaggcggagaagcgtgtcccagcaggcaagtccgccggcaaggagggcggcgagggaaagaggggccggaagaagggcaagaagagcgtggagacctacaagatctacatcttcaaggtgctgaagcaggtgcacccggacatcggcatctcctctaaggccatgtccatcatgaactccttcatcaacgacatcttcgagaagctcgccgccgaggccgccaagctcgcgcggtacaacaagaagcccaccatcacctcccgtgagatccagacctccgtgcgcctcgtcctccccggggagctcgccaagcacgccgtctccgagggcaccaaggccgtcaccaagttcacctcgtcctaggctgcgtggcctccgcttgcaggcttccctcgtatgttcgcgtgtcttgctgtagttaggtgctgctgtgtctggtctcctccggtagcaactgttatctgatggaacagtaacaatgcttattgaatccagctagttgcttatttgtggatcctctctctttgttgttggccacctttatctcgtgatgtttgtgtgcatgtgaatactctgaatgtgcatttcgaagtttgaaaaaaaaaaaaaaaa

SEQ ID NO: 7700 - protein, 150 aa, Zea mays
  misc_feature: Ceres CLONE ID no. 1401364
  misc_feature: Ceres CDNA ID no. 13628146
  misc_feature: No seed is being produced by the plant
  misc_feature: The plant flowers significantly late compared to wild-type.
  misc_feature: Useful for biocontainment applications
  misc_feature: Useful for making plants with modulated flowering time
  misc_feature (57)..(129): Pfam Name: Histone PFAM Desc: Core histone H2A/H2B/H3/H4
MAPKAEKKPAAKKPAEEEPAAEKAPAGKKPKAEKRVPAGKSAGKEGGEGKRGRKKGKKSVETYKIYIFKVLKQVHPDIGISSKAMSIMNSFINDIFEKLAAEAAKLARYNKKPTITSREIQTSVRLVLPGELAKHAVSEGTKAVTKFTSS

SEQ ID NO: 7701 - DNA, 498 bp, Zea mays
  misc_feature: Ceres CLONE ID no. 1401651
  misc_feature: Ceres CDNA ID no. 36706882
  CDS (74)..(322): REFERENCED BY SEQ ID NO: 7702
attgattgatcggacggacgcgcgtctccggtcccgtccgtaataacactgatccgatccacgccggccggcgatggagctcatcaagtccagggcgaccgtgtgcgcgctcctcctggcgctgctcctgctctcacactacgacggcgggacgacgacgacgatggtggcggaggcccgggtgtgcatgggcaagagccagcaccactcgttcccctgcatctccgaccgcctctgcagcaacgagtgcgtcaaggaggacggcgggtggaccgccggctactgccacctccgctactgcaggtgccagaaggcgtgctaagcaaagctcttcaaacacccttggcttgccagaactgaactctagtagtactaagtaacacccttggctagctgtgcacaacctacgtaccgtgcatgcatgtaatgtggtgtcatgtaacgtgacagcaataaatagtattaataataaaaaaaaaaataaaaaaaaaaaaaaaa

SEQ ID NO: 7702 - protein, 82 aa, Zea mays; identical to SEQ ID NO: 4784
  misc_feature: Ceres CLONE ID no. 1401651
  misc_feature: Ceres CDNA ID no. 36706882
  misc_feature (36)..(82): Pfam Name: Gamma PFAM Desc: Gamma
  misc_feature: Homolog of GI Number: 2130034 NR Desc: gamma
  misc_feature: Homolog of GI Number: 2501197 NR Desc: Gamma
  misc_feature: Homolog of GI Number: 1173436 NR Desc: Small protein inhibitor of insect alpha
  misc_feature: Homolog of GI Number: 7451437 NR Desc: gamma
  misc_feature: Homolog of GI Number: 7451438 NR Desc: omega
  misc_feature: Homolog of GI Number: 533692 NR Desc: protease inhibitor

SEQ ID NO: 7703 - DNA, 479 bp, Zea mays
  misc_feature: Ceres CLONE ID no. 1401710
  misc_feature: Ceres CDNA ID no. 36590954
  CDS (46)..(255): REFERENCED BY SEQ ID NO: 7704
aatcttcgggttcgcgtcgcagtgtcttccgcccgggctaccaccatgccgaagcagatccacgagatcaaggacttcctgctgactgcgcggcggaaggacgcacggtcggtgcggatcaagcgggccaaggacgccgtcaagttcaaggtgcgctgctccaggtacctctacaccctctgcgtccacgacgccgacaaggccaacaagctcaagcagtcgctcccgccaggtctgactgtccaggagatttaaggtatcaagccacaaactgtgctttttttgcggtgtcagggacgtttgctccagtgttactttagtttgtaggtgggctccattgctgtgtttgaatgaattatgaagtttgagtttgggatgcgaatgatgtgtcgaacctatgagcctgtgttgtaatggttaccccagaccgcaaaggatggcaatctatcataagttaaactgcaaaaaaaaaaaaaaaa

SEQ ID NO: 7704 - protein, 69 aa, Zea mays; identical to SEQ ID NO: 6926
  misc_feature: Ceres CLONE ID no. 1401710
  misc_feature: Ceres CDNA ID no. 36590954
  misc_feature (2)..(69): Pfam Name: Ribosomal_L38e PFAM Desc: Ribosomal L38e protein family
  misc_feature: Homolog of GI Number: 50931949 NR Desc: putative 60S ribosomal protein L38
  misc_feature: Homolog of GI Number: 50938225 NR Desc: putative 60S ribosomal protein L38
  misc_feature: Homolog of GI Number: 23507773 NR Desc: At3g59540/T16L24_90
  misc_feature: Homolog of GI Number: 313027 NR Desc: ribosomal protein L38
  misc_feature: Homolog of GI Number: 15825507 NR Desc: ribosomal protein L38
  misc_feature: Homolog of GI Number: 27497793 NR Desc: 60S ribosomal protein L38
  misc_feature: Homolog of GI Number: 55645917 NR Desc:  similar to ribosomal protein L38
  misc_feature: Homolog of GI Number: 4506645 NR Desc: ribosomal protein L38
  misc_feature: Homolog of GI Number: 61372160 NR Desc: ribosomal protein L38
  misc_feature: Homolog of GI Number: 82895480 NR Desc:  similar to ribosomal protein L38

SEQ ID NO: 7705 - DNA, 656 bp, Zea mays
  misc_feature: Ceres CLONE ID no. 1401749
  misc_feature: Ceres CDNA ID no. 36707061
  CDS (32)..(454): REFERENCED BY SEQ ID NO: 7706
agtacgcgtcactctgctcaagccgtcaacaatgtcgaagcgaggacgtggaggaacgtctggtaacaagttcagaatgtcccttggtctccccgtggcggcgacggtgaactgcgccgacaacaccggtgccaagaacctttacatcatttcagtgaaaggaatcaaaggtcgtcttaaccgattaccttctgcttgcgtcggcgacatggtgatggccaccgtcaagaagggaaagcctgatctccgtaagaaggttctgccagctgtcatcgttaggcagaggaagccgtggcgccgaaaggatggtgtcttcatgtacttcgaagataatgctggagtcatcgtcaaccccaagggagaaatgaagggttctgcgatcactggtcctattggtaaagagtgcgctgatctctggccgaggattgctagtgctgccaatgccattgtctaatgatcagagcaagaagtcttttgctggcgtttgattatcattctgaatcttgtttgagttataattatatcaaaaacaaatttgaggattttggtagaacgtgttttgacattatggcgtaatgttcgacatttaaatatttttggttatttagacatttggaatcttgtttaaaaaaaaaaaaaaaaaaaaaaaaaaaaaa

SEQ ID NO: 7706 - protein, 140 aa, Zea mays [sequence omitted]

SEQ ID NO: 7707 - DNA, 1325 bp, Zea mays
  misc_feature: Ceres CLONE ID no. 1402076
  misc_feature: Ceres CDNA ID no. 36592814
  CDS (300)..(1076): REFERENCED BY SEQ ID NO: 7708
aaaaacatgtgtcactcaccagcgctttccgtcccgtactcccgtgtaccctgtcccgtcctcctagctcgcattccgatttccgagttccagccagcgagcgagccaaccaactgaaccaaccaaccaccgctccttcttccttccttccttccttccccagttcccctcgtctcaccagtcaccaaggttccgagagcagagaaagataaaaaaaaggtaatccgacgcaaacgacaagggcgcggcgagggcggggacagggtcggggaggccctgggcgcgggggcgccaagcgcatggcatcgtcgagggtgatgccgtcgtcctcgccgtcgcacacggcctctgatctcgcgcgcctagcgcaggccgccagcaggcccggcggcgggggcagcgggctgggctccatgaacgtggaggagctcctccgcggcatctacagcgacatgcccaccccggcgccgcccgcgtcggagcccgaacgcccgaggtcgccggccccggcgccggaggtcgccacgcggaggacggcggaggaggtgtggaaggagatcaccggcggaggtggcagtggggaacccgcgccccccgtggcggctcaggctgccgtccccgctggtggcgccggcggcccggagatgacgctggaggacttcctggccagggaggagggcgcggtgaaggaggatggggttagggtttcgggcccctctgcgccggccatggggttcctgggcggagcggagggcgtgggtgtgcctggcggcggaggcgggaggggaaggaagcggcacctcatggatccagtggatcgcgccgcgatgcagcgacagaaacgaatgatcaaaaaccgcgagtctgctgcccggtcacgggagaggaagcaggcttatatcgccgagctagaatcgctggtaacgcacctcgaggaggagaatgccgagttgttgagagaacaggaagagcggcaccagaagcggcttaaagagctcttggaacgggtgacgccagtcattctgaggaaaaaaccatcaggagatcttagaagaacgaactcaatgcagtggtagattggagccaagctcagtcgccgtctctttacagttataacatagaatttgcccctgtatgtcatttttctatttatatatgcgccaactaagttgtagtatcttagctgaaatagcatgggcaattagccgacacaaaggttaaacgaaatcatattatgtaggagtgctcatgaccaagaaaggttgctgttcctgcctgttcgtgtgttcattctgcctggtttatttttaaaaaaaaaaaaaaaa

SEQ ID NO: 7708 - protein, 258 aa, Zea mays
  misc_feature: Ceres CLONE ID no. 1402076
  misc_feature: Ceres CDNA ID no. 36592814
  misc_feature (174)..(232): Pfam Name: bZIP_1 PFAM Desc: bZIP transcription factor
  misc_feature: Homolog of GI Number: 34908608 NR Desc: putative DNA binding protein
  misc_feature: Homolog of GI Number: 7489466 NR Desc: DNA binding protein
  misc_feature: Homolog of GI Number: 7638404 NR Desc: OSE2
  misc_feature: Homolog of GI Number: 29367541 NR Desc: OSE2
  misc_feature: Homolog of GI Number: 21593196 NR Desc: G
  misc_feature: Homolog of GI Number: 4510349 NR Desc: abscisic acid insensitive 5
  misc_feature: Homolog of GI Number: 25408456 NR Desc: probable bZIP transcription factor
  misc_feature: Homolog of GI Number: 7406677 NR Desc: putative ripening
  misc_feature: Homolog of GI Number: 50913109 NR Desc: putative bZIP transcription factor ABI5
MASSRVMPSSSPSHTASDLARLAQAASRPGGGGSGLGSMNVEELLRGIYSDMPTPAPPASEPERPRSPAPAPEVATRRTAEEVWKEITGGGGSGEPAPPVAAQAAVPAGGAGGPEMTLEDFLAREEGAVKEDGVRVSGPSAPAMGFLGGAEGVGVPGGGGGRGRKRHLMDPVDRAAMQRQKRMIKNRESAARSRERKQAYIAELESLVTHLEEENAELLREQEERHQKRLKELLERVTPVILRKKPSGDLRRTNSMQW

SEQ ID NO: 7709 - DNA, 1065 bp, Zea mays
  misc_feature: Ceres CLONE ID no. 1402781
  misc_feature: Ceres CDNA ID no. 25445778
  CDS (3)..(692): REFERENCED BY SEQ ID NO: 7710
ccgttgcagtgcagctgcaggttctcgccgactccccttctccttcgacctccgccgctcgccgccgtttcccgtccgcggcggcgcctcctcccctcccactcttcctcgttgtcgatctcgtatcgggtaccatggcaagatcactctccaccgccctcgtgaggggacttatgagatcgtcccgtgcatcgacatcagctgctgtgtcacgaccagctatccagcagtttatgaactattcatcaggtcttagttgcactcctaatgcaaatggggactcagtgacaacacgagtagctgctgatcacgacacccatcaagattttcagccaacaagtaaaagttcagatatgtctttcagtgacattgttgctcaggatgtgaaggagcaccctgttgtcatctatatgaaaggttatcctgacgctcctaggtgtggtttcagtgcattagcagtgaaggtcctccagcaatatggtgtccccatcagtgctagagatattctttcagatctaaagctcaaagagagtgttaaagcatacagtaactggcctacgtttccacaaatatttatcaaaggagagttcgttgggggatctgatatcatactcaccatgcaccagaagggtgaactgaaggagctgcttggcgatattgcacaaaaagccgaacaaagtggttcttcatgaaacaagcatcagcatttgtggtgcaaacttcccggactggatgttccttctcagaagattttaggtgatcttgcattgttgccctgtggcttcggatttgaatacgttctctgttttgttctgttctgttcttgccagttgtgatggaagatccactcaaggccgaattgcaggagtaaccaaagttcttgttctcgataaataaatgccaatgctcgacactattcttctatgcatctagctgcctgcctttgcttaagcttgggtgctttaagttgcttttaaactgaacggtgctgttgaaacatgtaattagtatgtgacatgcttataagctctatgttttgttcttttttgaaaaaaaaaaaaaaaa

SEQ ID NO: 7710 - protein, 185 aa, Zea mays
  misc_feature: Ceres CLONE ID no. 1402781
  misc_feature: Ceres CDNA ID no. 25445778
  misc_feature (88)..(172): Pfam Name: Glutaredoxin PFAM Desc: Glutaredoxin
  misc_feature: Homolog of GI Number: 57899752 NR Desc: Glutaredoxin
  misc_feature: Homolog of GI Number: 55770621 NR Desc: glutaredoxin
  misc_feature: Homolog of GI Number: 34910272 NR Desc: OSJNBa0089K24.23
  misc_feature: Homolog of GI Number: 34913446 NR Desc: P0702H08.11
  misc_feature: Homolog of GI Number: 82411817 NR Desc: Glutaredoxin
  misc_feature: Homolog of GI Number: 16126744 NR Desc: glutaredoxin
  misc_feature: Homolog of GI Number: 71550942 NR Desc: Glutaredoxin
  misc_feature: Homolog of GI Number: 78708863 NR Desc: PKCq
  misc_feature: Homolog of GI Number: 23013993 NR Desc: COG0278: Glutaredoxin
MARSLSTALVRGLMRSSRASTSAAVSRPAIQQFMNYSSGLSCTPNANGDSVTTRVAADHDTHQDFQPTSKSSDMSFSDIVAQDVKEHPVVIYMKGYPDAPRCGFSALAVKVLQQYGVPISARDILSDLKLKESVKAYSNWPTFPQIFIKGEFVGGSDIILTMHQKGELKELLGDIAQKAEQSGSS

SEQ ID NO: 7711 - DNA, 1056 bp, Zea mays
  misc_feature: Ceres CLONE ID no. 1403018
  misc_feature: Ceres CDNA ID no. 25445615
  CDS (129)..(947): REFERENCED BY SEQ ID NO: 7712
aagagaggattttgctaggtttttgcccccaaccgcccaactgcgcgtgctcctgccgacctcccacccctccactcccctgcggttggcggctgtctcgccgaagcgacccagccggcgcagccgatatggcgaagggcgacgacgcgctggcgcggaagcgcaaccgtgtgcgccgcaagcgcctccgtagcagcgagaacgctgtttccgcgcgtgtcgcggcgatcatcgcctccaagcaccgccgcaagtcggggaagcgccgcgcctgcgagggcatgtgcttctcgctccccacgcccgacgacccgttcaacgagcgccatggcaggaagcacaagctcgatgacgagccggccgacgacacagccgccgacgccgctgaggacagcggcaaccccaagaagaagggcgcgaacaccaaaaagcagcagccggtggcaaagtatggcgccgaggcgaagtcgaaggcggttcgcgagagggagacgggtgcggaggtggtccgcggggacttcgaccggccgtccaagttcctggtggtctgtctcaacgctatccgggatgcggtggcgcccgaggaaggcggtggcagcatccacggcgccggcgactggggcgtggagctctggcggtgctgctccgcccaggcgccgtccgacgtgctcgacgctagcggcgcgtgcgccacggtggcgcagaccgcgtggctcgtctccaccgcctgcgacatcgtcgctaggaaagagaggcatgggatggtcgtgtcttgccccttcctgctgtacctcgtctcgtcgcaggataaggccgcgcaggtgcgatcgatatgcaaacccctgaagcctcttgggattcattcagtgagcttgcatcctggcgcatccattgaacaccagatctctgggtatgttttgtccactattcgtgtcatccgttgttgactgtaaatgtgctagtgtagtcgtgtattgtatatagtaaatactaaatgacaaccgttatattagtgttaattcattttgtttggactgcccaaaaaaaaaaaaaaaa

SEQ ID NO: 7712 - protein, 272 aa, Zea mays
  misc_feature: Ceres CLONE ID no. 1403018
  misc_feature: Ceres CDNA ID no. 25445615
  misc_feature: Homolog of GI Number: 77552995 NR Desc: ATP
  misc_feature: Homolog of GI Number: 29824179 NR Desc: putative ATP
  misc_feature: Homolog of GI Number: 20259502 NR Desc: putative ATP
  misc_feature: Homolog of GI Number: 72547041 NR Desc: proteophosphoglycan ppg1
  misc_feature: Homolog of GI Number: 2078483 NR Desc: antifreeze glycopeptide AFGP polyprotein precursor
  misc_feature: Homolog of GI Number: 72547023 NR Desc: proteophosphoglycan ppg4
  misc_feature: Homolog of GI Number: 66776813 NR Desc: Phosphoribosylaminoimidazole
  misc_feature: Homolog of GI Number: 56283929 NR Desc: CG3047
MAKGDDALARKRNRVRRKRLRSSENAVSARVAAIIASKHRRKSGKRRACEGMCFSLPTPDDPFNERHGRKHKLDDEPADDTAADAAEDSGNPKKKGANTKKQQPVAKYGAEAKSKAVRERETGAEVVRGDFDRPSKFLVVCLNAIRDAVAPEEGGGSIHGAGDWGVELWRCCSAQAPSDVLDASGACATVAQTAWLVSTACDIVARKERHGMVVSCPFLLYLVSSQDKAAQVRSICKPLKPLGIHSVSLHPGASIEHQISGYVLSTIRVIRC

SEQ ID NO: 7713 - DNA, 993 bp, Zea mays
  misc_feature: Ceres CLONE ID no. 1403244
  misc_feature: Ceres CDNA ID no. 36593039
  CDS (185)..(847): REFERENCED BY SEQ ID NO: 7714
gcccctcctagtcttccactcttcctccccttctctccggctcccccgaggcccccgacagcgaactcgggactcgccaaccgagaaggaagaactagtcgcgaggtgaagaggagaacctgaggtggtcccgaatcagagacggaagaaggtgggttcaggagcaagccagcctgccgccgccatgaggcgcacctcgaagaaatcgtcgtcgtctacggcgaccgccagcgctggccctactaaagcagtttccaaggaagtagaacggattgatcaatttttctatacttacgctgataactcatctggcatgattgacccagaaggcattgaaacactctgttctcaccttgaagttccccacactgatgttaggattctaatgttagcatggaaaatgggctgtgataagcaaggttattttaccttggatgaatggagaactggcttgaaagctcttcgagctgacagtattagtaaactgaagaaagcatttccagaactggtccaagaggttacaaggccatccaatttccaggatttctacatatatgcatttcgttattgcctcacagaggataagaagaaatgtatagaaataccagttgcttgtgagttgctgaatctagtattaggcttgcagttccgccctcaggttgacaagcttaataattacctcatgtaccaaaatgactacaaggtgataacaatggaccagtggatgggatttattcgtttctgtaatgagataaacttcccatcgcttgacaattatgattcagaccttgcctggcctttgattctagacaattttgttgagtggctacgagaaaataaaagctagatattctattcctgtggtgaagttgtcatccaaaatgtaattttcaagaatgtaggtgactatatcattgtttgcgtttgtaagacatcaattttggaccacccacatgtatatacttcggcagtagtgcaaaaaaaaaaaaaaaa

SEQ ID NO: 7714 - protein, 220 aa, Zea mays
  misc_feature: Ceres CLONE ID no. 1403244
  misc_feature: Ceres CDNA ID no. 36593039
  misc_feature: Homolog of GI Number: 32815875 NR Desc: At1g15860
  misc_feature: Homolog of GI Number: 25518040 NR Desc: F7H2.19 protein
  misc_feature: Homolog of GI Number: 78099237 NR Desc: DCN1
  misc_feature: Homolog of GI Number: 76663321 NR Desc:  similar to CG6597
  misc_feature: Homolog of GI Number: 73975268 NR Desc:  similar to CG6597
  misc_feature: Homolog of GI Number: 50747005 NR Desc:  similar to expressed sequence AI836376
  misc_feature: Homolog of GI Number: 66521752 NR Desc:  similar to ENSANGP00000024291
  misc_feature: Homolog of GI Number: 62660393 NR Desc:  similar to expressed sequence AI836376
  misc_feature: Homolog of GI Number: 55622780 NR Desc:  similar to expressed sequence AI836376
  misc_feature: Homolog of GI Number: 73958716 NR Desc:  similar to CG13322
MRRTSKKSSSSTATASAGPTKAVSKEVERIDQFFYTYADNSSGMIDPEGIETLCSHLEVPHTDVRILMLAWKMGCDKQGYFTLDEWRTGLKALRADSISKLKKAFPELVQEVTRPSNFQDFYIYAFRYCLTEDKKKCIEIPVACELLNLVLGLQFRPQVDKLNNYLMYQNDYKVITMDQWMGFIRFCNEINFPSLDNYDSDLAWPLILDNFVEWLRENKS

SEQ ID NO: 7715 - DNA, 599 bp, Zea mays
  misc_feature: Ceres CLONE ID no. 1403970
  misc_feature: Ceres CDNA ID no. 36699361
  CDS (129)..(413): REFERENCED BY SEQ ID NO: 7716
cagccagtctctcctcgcctctctctcgcgcaaggcagagtagagtaaccaaccataccaccggcccgtgtcgatctctggcctctctcgtgcaaggaattaagcaggcaagaagccgaccttccaccatggccaaggcgagcagcaggctgctcttctcgctctcgctcgtcgtcctgctgctcctcgtggagaccactacttctccccatggacaggctgaagccatcgactgcggcgcgagctgctcgtaccggtgcagcaagtcggggcggcccaagatgtgcctgagggcgtgcggcacctgctgccagcgctgcggctgcgtcccgccgggcacctccggcaacgaggacgtctgcccctgctacgccaacatgaagacccacgacggccagcacaagtgcccgtgatccatccaccgtggttcccagcatcagcagctttgccaaaaagacatgacacctacatatataggagtactacctagcttctgctgctgctgctgctctactacctgttggttcattatattgtgcgcgtgcatgcatgaataaataaatgaacatattatataaaaaagaaaaaaaaaaaaaaaa

SEQ ID NO: 7716 - protein, 94 aa, Zea mays
  misc_feature: Ceres CLONE ID no. 1403970
  misc_feature: Ceres CDNA ID no. 36699361
  misc_feature (5)..(94): Pfam Name: GASA PFAM Desc: Gibberellin regulated protein
  misc_feature: Homolog of GI Number: 887939 NR Desc: GAST1 protein homolog
  misc_feature: Homolog of GI Number: 18087524 NR Desc: At1g75750/F10A5_16
  misc_feature: Homolog of GI Number: 25313155 NR Desc: protein F10A5.6
  misc_feature: Homolog of GI Number: 2792297 NR Desc: GAST
  misc_feature: Homolog of GI Number: 21618022 NR Desc: GAST1
  misc_feature: Homolog of GI Number: 5102600 NR Desc: GEG protein
  misc_feature: Homolog of GI Number: 14625945 NR Desc: snakin2
  misc_feature: Homolog of GI Number: 2253442 NR Desc: LTCOR11
  misc_feature: Homolog of GI Number: 44889867 NR Desc: GASA
MAKASSRLLFSLSLVVLLLLVETTTSPHGQAEAIDCGASCSYRCSKSGRPKMCLRACGTCCQRCGCVPPGTSGNEDVCPCYANMKTHDGQHKCP

SEQ ID NO: 7717 - DNA, 641 bp, Zea mays
  misc_feature: Ceres CLONE ID no. 1404123
  misc_feature: Ceres CDNA ID no. 15178863
  CDS (47)..(458): REFERENCED BY SEQ ID NO: 7718
aaaaactaatcacaaaagagtaaacttcgttctttatcaatctcaaatggctcgtaccaagcaaacagcaaggaagtccaccggaggaaaggctccgaggaagcagctggcaaccaaagcggcgaggaaatcggctccggcgaccggaggagtgaagaagccgcacagattccgtcccggaacggtggcgttgagggagatcaggaagtaccagaagagcaccgagcttctgatccggaagctccctttccagcgccttgtccgtgagatagctcaggatttcaagacggatctgaggttccagagcagcgccgtcgcggctcttcaggaagctgcggaggcttacctcgttggtttgttcgaagacacgaatctctgtgcgattcacgcgaagagggttacgattatgcctaaggacatccagcttgcaagaagaatcaggggtgagagggcttaagaagagatgaagaagaacagtggtttttaagtaatgcgttaacgactttggttgtttaatcagtttgtgtaaatctcttttaaaaatattctcgtgttcaagttttggtttcaagtcttttgatttgatgaatatgtctacttaatatcaatctagtgttatttctctaaaaaaaaaaaaaaaa

SEQ ID NO: 7718 - protein, 136 aa, Zea mays; identical to SEQ ID NO: 358
  misc_feature: Ceres CLONE ID no. 1404123
  misc_feature: Ceres CDNA ID no. 15178863
  misc_feature (58)..(134): Pfam Name: Histone PFAM Desc: Core histone H2A/H2B/H3/H4

SEQ ID NO: 7719 - DNA, 560 bp, Zea mays
  misc_feature: Ceres CLONE ID no. 1404302
  misc_feature: Ceres CDNA ID no. 36707062
  CDS (77)..(388): REFERENCED BY SEQ ID NO: 7720
atccaactcacacacaggctcaccccaccaacagcaagcgaaaatctcccgatcccctctggtctccgcggcgaagatgtcggggcgcggcaagggcgggaagggcctgggcaagggcggcgcgaagcgccaccggaaggtgctccgcgataacatccaggggatcacgaagccggcgatccggcggctggcgcgcaggggcggcgtgaagcgcatctccgggctcatctacgaggagagccgcggcgtcctcaagatcttcctggagaacgtgatccgcgacgccgtcacttacaccgagcacgcgcgccgcaagaccgtcacagccatggacgtcgtctacgcgctcaagcgccagggccgcaccctctatggcttcggcggctaggctaggccggccgcgcctcgctgtcgtcgctgcggttctattgtttttgcaattcgcaagtagtggctcggtggcgaaaatgctggttactgtggcactagatcaagcatgttgtgcgtgtctgaagaaatgccaattgtgacttgctgtttgtccaaaaaaaaaaaaaaaa

SEQ ID NO: 7720 - protein, 103 aa, Zea mays
  misc_feature: Ceres CLONE ID no. 1404302
  misc_feature: Ceres CDNA ID no. 36707062
  misc_feature (66)..(92): Pfam Name: TAF PFAM Desc: TATA box binding protein associated factor
  misc_feature: Homolog of GI Number: 57106967 NR Desc:  similar to germinal histone H4 gene
  misc_feature: Homolog of GI Number: 50728590 NR Desc:  similar to germinal histone H4 gene
  misc_feature: Homolog of GI Number: 62648434 NR Desc:  similar to germinal histone H4 gene
  misc_feature: Homolog of GI Number: 76651053 NR Desc:  similar to germinal histone H4 gene
  misc_feature: Homolog of GI Number: 62663604 NR Desc:  similar to Histone H2B 291B
  misc_feature: Homolog of GI Number: 74004178 NR Desc:  similar to germinal histone H4 gene
  misc_feature: Homolog of GI Number: 76657391 NR Desc:  similar to germinal histone H4 gene
  misc_feature: Homolog of GI Number: 55667113 NR Desc:  similar to germinal histone H4 gene
  misc_feature: Homolog of GI Number: 74004256 NR Desc:  similar to germinal histone H4 gene
  misc_feature: Homolog of GI Number: 50911547 NR Desc: histone H4
MSGRGKGGKGLGKGGAKRHRKVLRDNIQGITKPAIRRLARRGGVKRISGLIYEESRGVLKIFLENVIRDAVTYTEHARRKTVTAMDVVYALKRQGRTLYGFGG

SEQ ID NO: 7721 - DNA, 627 bp, Zea mays
  misc_feature: Ceres CLONE ID no. 1404952
  misc_feature: Ceres CDNA ID no. 13637013
  CDS (81)..(393): REFERENCED BY SEQ ID NO: 7722
actcgtctcatctcttccatacgaccataccctacctccaaattcccaattctcaacctctcctccgagttcgagtgaccatgtcggggcgcggaaagggcgggaaggggctgggcaagggcggcgcgaagcgtcaccgcaaggtcctccgcgacaacatccagggcattacgaagccggcgatccggaggctggcgagaaggggtggcgtgaagcgcatctcggggctcatctacgaggagacccgcggcgtgctcaagatcttcctcgagaacgtcattcgcgacgctgtcacctacacggagcacgcccgccgcaagaccgtcaccgccatggacgtcgtctacgcgctcaagcggcagggccgcaccctctacggatttggcggctgaggggtcaggggtgtcccccagctgctgctggtcgttgcagaagtcttgggtcgcggtcacgaaatggagtgaggcgagagtattcttgcccatgtgcttagtttcgtaggcttatcactctagactctagtgccttggtccagtagtagcatacgacttgtactgcatttccttgttctgaacctctaaatatgatgagatgtggattcacttgatctcaaaaaaaaaaaaaaaa

SEQ ID NO: 7722 - protein, 103 aa, Zea mays; identical to SEQ ID NO: 8
  misc_feature: Ceres CLONE ID no. 1404952
  misc_feature: Ceres CDNA ID no. 13637013
  misc_feature (66)..(92): Pfam Name: TAF PFAM Desc: TATA box binding protein associated factor

SEQ ID NO: 7723 - DNA, 790 bp, Zea mays
  misc_feature: Ceres CLONE ID no. 1405202
  misc_feature: Ceres CDNA ID no. 13635603
  CDS (107)..(521): REFERENCED BY SEQ ID NO: 7724
aggcgaaaaaaaaactctgtttgttagcgtgacgtgaggagtctggagtcggacggaaccgagaaggcgaaaactcagtgtctcgagtttcctcggagctgaggcgatggctgggaagggagggaaaggcttgctcgccgcgaagactacggcggccaagtccgccgagaaggacaaggggaagaaggccccaatttcacgctcttcccgcgccggcctccagttcccttttggacgtatccaccgtcagctgaagcaaaggactcaggcaaatggacgtgttggtgccaccgcagccgtctactccgctgccatcctggagtacttgactgccgaggttctggagctggctgggaatgctagcaaggatctgaaggtgaagcgtatcacccctcgccatttgcagctagccattcgtggagacgaggagctggacaccctcatcaagggcaccatcgcaggcggaggtgtcatcccgcacattcacaagtccctgatcaacaagtcctccaaggagtgaagactaggggatgtgcatctttagtttaaactagacttctgtgcgctcctcggcgagtccttgtcatcctgtaggttttagttgagctgtcaggttggagctcctctgtgtaacgcttgcctggtactgcttcatcagttatttggttattgtgtttgtgttgagttgttaacttcaggggtgcaaacctggatgcttatttagttatgtgactactgctattcggtttatgttgtggtttgttttttattttcaaaaaaaaaaaaaaaa

SEQ ID NO: 7724 - protein, 137 aa, Zea mays
  misc_feature: Ceres CLONE ID no. 1405202
  misc_feature: Ceres CDNA ID no. 13635603
  misc_feature (32)..(108): Pfam Name: Histone PFAM Desc: Core histone H2A/H2B/H3/H4
MAGKGGKGLLAAKTTAAKSAEKDKGKKAPISRSSRAGLQFPFGRIHRQLKQRTQANGRVGATAAVYSAAILEYLTAEVLELAGNASKDLKVKRITPRHLQLAIRGDEELDTLIKGTIAGGGVIPHIHKSLINKSSKE

SEQ ID NO: 7725 - DNA, 692 bp, Zea mays
  misc_feature: Ceres CLONE ID no. 1405448
  misc_feature: Ceres CDNA ID no. 25445539
  CDS (94)..(453): REFERENCED BY SEQ ID NO: 7726
atcacacactaatcaacaagcaggaccagctagctagctcctctcactgctatcacccgcccagccatctcgctgaaagagaaaagcgcagccatgaagactactagctcgggcattgcagtcgtcctactggtggccatgctggcagtccattccgcgttggccgacatctcgtgctccgacgtgctcaacgacctgtcgccgtgcctgcccttcctgcagggcaaggcagccaaacccagcgagagcaacaaccagtgctgcgacggcgtgagggccctgtacgcggcggcggacaccaggcccgacaggcaggccacgtgccggtgcctcaaggcggcctacgttcaggtccacgctgtgctctccgcggcgcaggagctgcccggcgactgcggcctctcgctgtcctacaacatcacccccgacatcgactgcgacaagatcgaatgaagggatactgttcccttaccagaatccatacgacgggatggtgatgttcagtgccctgctagcagtaggctgcatctgcactgagtgactagaataaaggatttggtgatgtttgtgctgattagtgtgttcgcctgtaatcgtgtgatgccgtcgttggcttcttatatccgtgtctaatctcgcaagtgctcgtgtttgcaactataccatttataatgtcaaaaaaaaaaaaaaaa

SEQ ID NO: 7726 - protein, 119 aa, Zea mays; identical to SEQ ID NO: 120
  misc_feature: Ceres CLONE ID no. 1405448
  misc_feature: Ceres CDNA ID no. 25445539
  misc_feature (28)..(115): Pfam Name: Tryp_alpha_amyl PFAM Desc: Protease inhibitor/seed storage/LTP family
  misc_feature: Homolog of GI Number: 31324341 NR Desc: putative lipid transfer protein
  misc_feature: Homolog of GI Number: 16903206 NR Desc: lipid transfer protein precursor
  misc_feature: Homolog of GI Number: 11095210 NR Desc: lipid transfer protein 3 precursor
  misc_feature: Homolog of GI Number: 66271045 NR Desc: FSLTP2
  misc_feature: Homolog of GI Number: 66271047 NR Desc: FSLTP3
  misc_feature: Homolog of GI Number: 7012722 NR Desc: lipid transfer protein precursor
  misc_feature: Homolog of GI Number: 37625029 NR Desc: lipid transfer protein
  misc_feature: Homolog of GI Number: 12659322 NR Desc: lipid transfer protein
  misc_feature: Homolog of GI Number: 1050918 NR Desc: lipid transfer protein
  misc_feature: Homolog of GI Number: 62529290 NR Desc: non

SEQ ID NO: 7727 - DNA, 803 bp, Zea mays
  misc_feature: Ceres CLONE ID no. 1405728
  misc_feature: Ceres CDNA ID no. 40351800
  CDS (97)..(543): REFERENCED BY SEQ ID NO: 7728
cttcgttcttcttcacctaaaactgcgagaaggaaaaaaggcgaaaagctcgccgatcgggagtccgcgaaaccaaagagatcgtaggttttggatatggcgtcgaagcggatcttgaaggagctgaaggatctgcagaaggatccacccacctcatgtagcgcaggacctgttgctgaagacatgtttcattggcaggcaacgataatgggtcctaccgacagtccttatgctggaggtgttttccttgttaccattcacttccctccagattaccctttcaagcctcctaaggttgcctttaggacgaaggtgttccatcccaacattaacagcaacggaagcatttgcctcgacatcttgaaggagcaatggagtcctgcactcaccatttccaaggtgctgttatcgatatgttctttgttaaccgatccaaacccagatgatcctttggtgcctgagatagctcatatgtacaagactgacaagaacaagtatgagtccactgcacggagctggactcagaagtatgccatgggctgaaaggaaggatcctaaactatctctttttatggaaaaaatctgccgtaatttctatgtatgattcagtagacatctgtttctgtcgtccttttaaaatttctgaagacaggaccaaatgaagtgggtcttgtttgtttgaaacaaaaaaaaaaacaaaacatctttgtgaaactagaaactggaaatctttctggttttgtttggtcttgtcttgcaattatgatttggtgttttactgtgtgataaaaaaaaaaaaaaaa

SEQ ID NO: 7728 - protein, 148 aa, Zea mays
  misc_feature: Ceres CLONE ID no. 1405728
  misc_feature: Ceres CDNA ID no. 40351800
  misc_feature: The plant produces a reduced number of seeds.
  misc_feature: Useful for biocontainment applications
  misc_feature (5)..(142): Pfam Name: UQ_con PFAM Desc: Ubiquitin
MASKRILKELKDLQKDPPTSCSAGPVAEDMFHWQATIMGPTDSPYAGGVFLVTIHFPPDYPFKPPKVAFRTKVFHPNINSNGSICLDILKEQWSPALTISKVLLSICSLLTDPNPDDPLVPEIAHMYKTDKNKYESTARSWTQKYAMG

SEQ ID NO: 7729 - DNA, 1094 bp, Zea mays
  misc_feature: Ceres CLONE ID no. 1406437
  misc_feature: Ceres CDNA ID no. 35383391
  CDS (85)..(870): REFERENCED BY SEQ ID NO: 7730
ttttcgcgtctcgtgctgccacttccacaaaccctaattccaaaaatccccctcggatctctaacaagactgtgatacgaaacgatgtcgtctactcgggaagagaatgtgtacttggctaagttagccgaacaagccgaacgttacgaggagatggttgagttcatggagaaagtcgccaagactgttgactccgaggagcttactgtggaagagaggaacctcttgtccgttgcttacaagaacgtgattggtgcaaggagagcttcgtggaggatcatttcttccattgaacagaaggaagaaagcagagggaacgatgatcacgttgctcttatcaaggactacagagtgaagattgaaaccgagctcgggaagatctgtgatgggattttgaaccttttggattctcaccttgttcccgctgcctctttggctgagtccaaagtgttttacctgaagatgaagggagattatcataggtaccttgctgagttcaagactggtgctgagaggaaggatgctgctgagagcactctcttggcttacaagtcagctcaggatattgcacttgctgatttacctccaactcatccgattagattgggacttgctcttaacttctctgtcttctactatgagattctcaactctcctgatcgcgcttgcagtctcgccaagcaggcatttgatgaagctatctctgagctggacacattaggagaagaatcatacaaagacagcacgctgataatgcaacttctccgtgacaatctgactctctggacttctgacctcaatgatgaggtgggtggtgacgagatcaaggaggcgtcaaaagacgagcctgaagaagggaaacaagcgtagacgttgaagtgatcagaggaagggagcgagcaagagatttctaagtatgtatggtattggatttggctttagtttctttaaacagtatgatttgaggtttgtagaagcaaagagaagaccatgatttggttttcttctttggaaactctaaactctgtttttttttaatggggttttcaagctgttgagtctttcgttggttttacttaaaaaaaaaaaaaaaa

SEQ ID NO: 7730 - protein, 261 aa, Zea mays
  misc_feature: Ceres CLONE ID no. 1406437
  misc_feature: Ceres CDNA ID no. 35383391
  misc_feature: Useful for making plants with modulated growth and phenotype characteristics
  misc_feature: null
  misc_feature: The sequence is a functional homolog of  SEQ ID NO 1777 in the  11/479,226 US patent application
  misc_feature: The sequence is a functional homolog of  SEQ ID NO 2350 in the  10/374,780 US patent application
  misc_feature: The sequence is a functional homolog of  SEQ ID NO 342 in the  10/412,699 US patent application
  misc_feature: The sequence is a functional homolog of  SEQ ID NO 344 in the  10/412,699 US patent application
  misc_feature: The sequence is a functional homolog of  SEQ ID NO 782 in the  11/479,226 US patent application
  misc_feature: The sequence is a functional homolog of  SEQ ID NO 786 in the  11/479,226 US patent application
  misc_feature: The sequence is a functional homolog of  SEQ ID NO 789 in the  11/479,226 US patent application
  misc_feature: The sequence is a functional homolog of  SEQ ID NO 790 in the  10/225,066 US patent application
  misc_feature: The sequence is a functional homolog of  SEQ ID NO 797 in the  11/479,226 US patent application
  misc_feature: The sequence is a functional homolog of  SEQ ID NO 801 in the  11/479,226 US patent application
  misc_feature: The sequence is a functional homolog of  SEQ ID NO 805 in the  11/479,226 US patent application
  misc_feature: Useful for making plants with modulated drought sensitivity
  misc_feature (5)..(242): Pfam Name: 14 PFAM Desc: 14
  misc_feature: Homolog of GI Number: 6957715 NR Desc: putative 14
  misc_feature: Homolog of GI Number: 16323454 NR Desc: putative 14
  misc_feature: Homolog of GI Number: 55375985 NR Desc: 14
  misc_feature: Homolog of GI Number: 2129595 NR Desc: 14
  misc_feature: Homolog of GI Number: 2921512 NR Desc: GF14 protein
  misc_feature: Homolog of GI Number: 8515888 NR Desc: 14
  misc_feature: Homolog of GI Number: 44917151 NR Desc: 14
  misc_feature: Homolog of GI Number: 6179981 NR Desc: 14
  misc_feature: Homolog of GI Number: 44917153 NR Desc: 14
  misc_feature: Homolog of GI Number: 1575725 NR Desc: SGF14A
MSSTREENVYLAKLAEQAERYEEMVEFMEKVAKTVDSEELTVEERNLLSVAYKNVIGARRASWRIISSIEQKEESRGNDDHVALIKDYRVKIETELGKICDGILNLLDSHLVPAASLAESKVFYLKMKGDYHRYLAEFKTGAERKDAAESTLLAYKSAQDIALADLPPTHPIRLGLALNFSVFYYEILNSPDRACSLAKQAFDEAISELDTLGEESYKDSTLIMQLLRDNLTLWTSDLNDEVGGDEIKEASKDEPEEGKQA

SEQ ID NO: 7731 - DNA, 928 bp, Zea mays
  misc_feature: Ceres CLONE ID no. 1406654
  misc_feature: Ceres CDNA ID no. 29191216
  CDS (65)..(766): REFERENCED BY SEQ ID NO: 7732
aatctgagatttttactctccttaacattcttttcgtctcacagaagtttcgaattatacagcgatggaactcaatctcgatgcgccgcactcaatgggaacgaccatcatcggcgtcacttacaatggaggcgtcgttctcggagctgactcacgtaccagcaccgggatgtacgtggctaatcgggcttcagacaagatcacgcaactaacagacaatgtctacgtctgccgttctggttcggctgctgattctcaggttgtatctgactatgtccgctacttccttcaccagcatacaatccagctcggacagcctgccactgtaaaggtctctgccaaccttatcaggatgctcgcatataataacaagaacatgctgcaaactggcctcatagttggtggctgggataagtatgaaggcggaaagatctacgggattcctctcggtggaactgtagttgagcaaccgtttgcaattggaggctctggctctagttacctttatgggttctttgatcaggcgtggaaagaaaacatgaccaaagaagaagccgagcaacttgttgtgaaggcggtttcactcgccatagcccgtgatggagccagtggaggtgttgtacggactgtcataataaactcagagggagtgacaagaaacttctaccctggggataagttgcagctttggcacgaggagttggagccccaaaactccttgttagacatcctgaacgctgctggtcctgaaccaatggccatgtgatgcaaacaactatcgctctattactctgttcaacaaaccttttaaatgtttcgttacatttaccagtgtcctactctaaacgatgtttacttatggttttaattcctctgtgctcaaactcggttagtagaaattttccatctttcaaaaaaaaaaaaaaaa

SEQ ID NO: 7732 - protein, 233 aa, Zea mays
  misc_feature: Ceres CLONE ID no. 1406654
  misc_feature: Ceres CDNA ID no. 29191216
  misc_feature (9)..(191): Pfam Name: Proteasome PFAM Desc: Proteasome A
  misc_feature: Homolog of GI Number: 7270032 NR Desc: multicatalytic endopeptidase complex
  misc_feature: Homolog of GI Number: 79325892 NR Desc: PBA1
  misc_feature: Homolog of GI Number: 21592365 NR Desc: multicatalytic endopeptidase complex
  misc_feature: Homolog of GI Number: 1743356 NR Desc: proteasome delta subunit
  misc_feature: Homolog of GI Number: 51979378 NR Desc: PREDICTED OJ1079_F11.26 gene product
  misc_feature: Homolog of GI Number: 55296478 NR Desc: putative beta 1 subunit of 20S proteasome
  misc_feature: Homolog of GI Number: 66271075 NR Desc: beta1 proteasome
  misc_feature: Homolog of GI Number: 66271071 NR Desc: beta1 proteasome
  misc_feature: Homolog of GI Number: 41352683 NR Desc: putative proteasome 20S beta1 subunit
  misc_feature: Homolog of GI Number: 41352685 NR Desc: putative proteasome 20S beta1.1 subunit
MELNLDAPHSMGTTIIGVTYNGGVVLGADSRTSTGMYVANRASDKITQLTDNVYVCRSGSAADSQVVSDYVRYFLHQHTIQLGQPATVKVSANLIRMLAYNNKNMLQTGLIVGGWDKYEGGKIYGIPLGGTVVEQPFAIGGSGSSYLYGFFDQAWKENMTKEEAEQLVVKAVSLAIARDGASGGVVRTVIINSEGVTRNFYPGDKLQLWHEELEPQNSLLDILNAAGPEPMAM

SEQ ID NO: 7733 - DNA, 595 bp, Zea mays
  misc_feature: Ceres CLONE ID no. 1408069
  misc_feature: Ceres CDNA ID no. 40351801
  CDS (50)..(436): REFERENCED BY SEQ ID NO: 7734
agttctctggaagaggagtgaagcagcagagggaggagcggcattaaaaatgcagatcttcgtgaaaaccctaacggggaagaccataaccctcgaggtcgaaagcagcgacaccattgacaatgtcaaggctaagattcaagacaaggaaggcatccctccggatcagcagcgtttgattttcgccggaaagcaacttgaagatggaaggaccttggccgattacaacatccagaaggaatcaacccttcaccttgtcctcaggcttcgtggtggcatcatcgagccttccctcatggctttggctcgcaaatacaaccaggacaagatgatttgccgcaaatgctatgctcgtctgcaccctagggctgtgaactgccgtaagaagaagtgcggtcatagtaaccagttgaggcctaagaagaagatcaagtaaattctgggtgggatattgttggtctctactttcgttttgtttgtcttagaacagtgacttgtttggtatttatcgtttctggttttgattaatgttaattgttttgagacaatagttttgaactagtcaattatatttttatcaaaaaaaaaaaaaaaa

SEQ ID NO: 7734 - protein, 128 aa, Zea mays; identical to SEQ ID NO: 3956
  misc_feature: Ceres CLONE ID no. 1408069
  misc_feature: Ceres CDNA ID no. 40351801
  misc_feature (1)..(74): Pfam Name: ubiquitin PFAM Desc: Ubiquitin family
  misc_feature (77)..(128): Pfam Name: Ribosomal_L40e PFAM Desc: Ribosomal L40e family

SEQ ID NO: 7735 - DNA, 763 bp, Zea mays
  misc_feature: Ceres CLONE ID no. 1409079
  misc_feature: Ceres CDNA ID no. 40351802
  CDS (56)..(496): REFERENCED BY SEQ ID NO: 7736
ttcctcagctaggcacccctgcccatcttcagtccacctagccatgcctacgacgatggcggcggcggcggcagcgtctgctccaagctcgctccgcgtttcgcgccaggggacgatcgggggaggccatgtcctctacagcaggtctcagagggctgccactgtctccgccagagcttccatgaacataacgtgctgcgcgaaccagacgcagacggcgcagcgcaagtcgtattcggggacgacctctccgccgtcaggttcagtgaaagagaaggtgaagccgaggctcgacgacgggggcgtcgggttcccgccgttccggttcgggggaggcggaggaggaggaggcggcggcggcagcagctcgtccggcgggttcatcctcttcgtggtcgtcctgctcctggattacctcaaggagttcgagaggaacctgcagaacgggccacggaggagcggcggtggctacgacgacgggctggcgccacagtagattcctctctctctcacactctcggtgtgtggtttggaagagaacgtgtactacgtctctacacgagcatgtgttgcagagatgcttcggtgttcgttggcgtgatctctctttttgctacaaaagacagtttttctcgagggctcatggtgaggactagaaattttagccagtcgaacgaatgtcttgagatcacacaatgaaactcattggtgcttcgaaagtttgaataaatttcaaagaatctcctcaaaaaaaaaaaaaaaa

SEQ ID NO: 7736 - protein, 150 aa, Zea mays
  misc_feature: Ceres CLONE ID no. 1409079
  misc_feature: Ceres CDNA ID no. 40351802
MPTTMAAAAAASAPSSLRVSRQGTIGGGHVLYSRSQRAATVSARASMNITCCANQTQTAQRKSYSGTTSPPSGSVKEKVKPRLDDGGVGFPPFRFGGGGGGGGGGGSSSSGGFILFVVVLLLDYLKEFERNLQNGPRRSGGGYDDGLAPQ

SEQ ID NO: 7737 - DNA, 700 bp, Zea mays
  misc_feature: Ceres CLONE ID no. 1409302
  misc_feature: Ceres CDNA ID no. 13636537
  CDS (77)..(500): REFERENCED BY SEQ ID NO: 7738
acgcggaaaccctagcagctcaacaccctcgaggtacctccattcgcagtcggccgtgtcctcggagccgcgggagatggcggatcaggagaccgtagctgtggttgaggcaccaaccccggttcttggggaaccgatggacctgatgactgccctgcagctcgtcatgaagaagtcaggtgctcacgatggccttgtgaagggtcttcgtgaggctgccaaagccatcgagaagcatgccgctcagctctgcgtgcttgccgaggactgcgaccagcctgattatgtcaagctggtgaaggctctctgcgctgagcacaatgtccacctggttactgtgcctagcgccaaaactcttggagagtgggctgggctttgcaagatcgactctgagggcaaggcgaggaaggttgtaggctgctcttgtgttgttgtcaaggactacggcgaagaatctgaaggccttaacatagtgcaggagtacgtcaaatcgcactagatacagtgtgtcagtatctggaagttgtgttcaacactacattttgcacctgagttaaaatatgtgcttggttcttgggctttgctaggagattagaacagttttcaagtgagcctaggatccatgtgaacgatttgaatatctcgcctcttgtcttgcaagtgttctcatctgctgttaatacgaaaaaaaaaaaaaaaa

SEQ ID NO: 7738 - protein, 140 aa, Zea mays; identical to SEQ ID NO: 4198
  misc_feature: Ceres CLONE ID no. 1409302
  misc_feature: Ceres CDNA ID no. 13636537
  misc_feature (25)..(120): Pfam Name: Ribosomal_L7Ae PFAM Desc: Ribosomal protein L7Ae/L30e/S12e/Gadd45 family

SEQ ID NO: 7739 - DNA, 904 bp, Zea mays
  misc_feature: Ceres CLONE ID no. 1409855
  misc_feature: Ceres CDNA ID no. 13632943
  CDS (102)..(648): REFERENCED BY SEQ ID NO: 7740
acggcgtcgcgcatttagcgttgttttgaagccctctctccttcgctttcaacctccgttcgtcgtctcgctcgttgttacgcgatctctagtgaagaaggatgggtttgtctttcgccaagttgtttagcaggctttttgccaagaaggagatgaggattctcatggttggtcttgatgctgctggtaagaccaccattttgtacaagctcaagctcggtgagattgtcaccaccattcccactattgggttcaatgtggaaactgtggagtacaagaacatcagtttcacagtgtgggatgtcggcggtcaagacaagatccgtcccttgtggaggcactacttccagaacactcaaggtctcatctttgtggtcgacagcaatgacagagaccgtgttgttgaggccagagatgaactgcacaggatgcttaatgaggatgagctgcgtgatgctgttctgctcgtgtttgctaacaaacaggatcttccaaatgccatgaacgcagctgaaatcactgataagcttggtcttcactctctccgtcagcgtcactggtacatccagagcacatgtgccacttcaggcgaggggctttacgaaggtcttgactggttgtccaacaacattgccggcaaggcgtagaggaaaggttcgtggttgagttgattttgctgagcaaatctggatgcaggggcaaacattatctgaacttttttcctttccggttttcttattattctgtgtttttttttgggtatgtggatttgattttgtgatcgttgttcttatttgtgtaaggagaggtctcttgtacgtagaacatagaaattaccttttactatagcttgtaatactgaaagttatctagtgctttcgttgtcttaaaaaaaaaaaaaaaa

SEQ ID NO: 7740 - protein, 181 aa, Zea mays
  misc_feature: Ceres CLONE ID no. 1409855
  misc_feature: Ceres CDNA ID no. 13632943
  misc_feature: null
  misc_feature: Useful for making plants with altered Lignin content
  misc_feature: Useful for making plants with altered alkaloid content
  misc_feature (19)..(179): Pfam Name: Ras PFAM Desc: Ras family
MGLSFAKLFSRLFAKKEMRILMVGLDAAGKTTILYKLKLGEIVTTIPTIGFNVETVEYKNISFTVWDVGGQDKIRPLWRHYFQNTQGLIFVVDSNDRDRVVEARDELHRMLNEDELRDAVLLVFANKQDLPNAMNAAEITDKLGLHSLRQRHWYIQSTCATSGEGLYEGLDWLSNNIAGKA

SEQ ID NO: 7741 - DNA, 1519 bp, Zea mays
  misc_feature: Ceres CLONE ID no. 1410159
  misc_feature: Ceres CDNA ID no. 40351805
  CDS (232)..(1074): REFERENCED BY SEQ ID NO: 7742
ctgctctagcgaaggcacagccgccgctgtttcttcatcttcctcgcagcgccggcgctccatcttactctccctcccttactagcgcttgacacgcaggtgacggcggcagcgacggcgctcaggctcgggctcttagtgacggcatcagcggcttcccctcccgcctcttgccagtcccatcgcgccctcgcctcgggtcctctgcacaccgtccagtgaccttgcgtgatggactggataaagttttgcagcgattttactgcaagtgatgggaaacagcatgcattgcttgataatcttaatcaggaattgtcccagaagtctgtactattgggtgatggttttaaactgtcagctgctgataatgatgtgtttgcaactgttcatccttttgtgatccgtgttagtgacagcgagttgcagaaatatccacatgtactgcggtggatggactacattcagaacactgttggtgctggtacaactttgcaaaagataaatgtggccaagtctgactttgatccaccttctcatccaaggaaagctgataaaaaagatgctgaatcaagttcaaagaaagccatttccggacagaagactgctgacaagtcaaatggaagtgctgactcaaagaaacccacaagagagcctcctgaaaataaggagaatcctactgctgcggggaacagcaaatcctctggggagaaaaagaaagtgcaagagaagtcagcaggaaaaacaacagagaaagctccagagaaaattgcagacaaggaatcagagtgcgatatcagtatcctgaatatacaggttggccttatccgtaaagcatggaagcatccatctgctgacagccttttagttgaggagatagatttgggagatggtaatgtgcgtcaagttgttagtggtcttgcaaagtattgcagcccagatgatcttactaatcggcatgttgtcttgatcacgaatgtgaagcctgggaagctgcgagatgtaatgtctgctggattggtcctttgtgcttcaactgaagatcatgctgctgtggagcctttgagtcgagtttaactaggcgaggacgttatggtgggcggactcgaggtaggaaacctcggaaaactgtagtaactgtaattgtagaagaggaggtcgaggttagcccaccgccgaaacctgttggcactggcgacctcgaagccgatggtaggggtatggttggatggggcagaacaacaaggcggtgtcgcagagcgagatgtccgtcaggtaacaacttggctgctgcgtcttgagaaagggtattgtcagcaagcattggacctgattaggtacttggtggttcacaattgttatagactccgatggatggactggtataaggtgatcacagtcatgagtgtacatactctgtcggcctattggcctcaccccaactttcatgcttttgggttgaaacatggtttacgttcttataataagttccgtaaattagctgataaaaaaaaaaaaaaaa

SEQ ID NO: 7742 - protein, 280 aa, Zea mays
  misc_feature: Ceres CLONE ID no. 1410159
  misc_feature: Ceres CDNA ID no. 40351805
  misc_feature (193)..(279): Pfam Name: tRNA_bind PFAM Desc: Putative tRNA binding domain
MDWIKFCSDFTASDGKQHALLDNLNQELSQKSVLLGDGFKLSAADNDVFATVHPFVIRVSDSELQKYPHVLRWMDYIQNTVGAGTTLQKINVAKSDFDPPSHPRKADKKDAESSSKKAISGQKTADKSNGSADSKKPTREPPENKENPTAAGNSKSSGEKKKVQEKSAGKTTEKAPEKIADKESECDISILNIQVGLIRKAWKHPSADSLLVEEIDLGDGNVRQVVSGLAKYCSPDDLTNRHVVLITNVKPGKLRDVMSAGLVLCASTEDHAAVEPLSRV

SEQ ID NO: 7743 - DNA, 618 bp, Zea mays
  misc_feature: Ceres CLONE ID no. 1411335
  misc_feature: Ceres CDNA ID no. 40351806
  CDS (42)..(452): REFERENCED BY SEQ ID NO: 7744
acaatcaaatctcacattcacattaaccatctgatttcgttatggctcgtaccaagcaaaccgccaggaaatcaaccggaggcaaagccccgaggaagcagctcgcgaccaaagcggcgaggaaatcagctccggccaccggaggagtgaagaagccgcacaggttccgtcccggaacggtggcgttgagggagatccggaagtaccagaagagcaccgagcttctcatccgcaagctccccttccagcgtctggtccgcgagatcgctcaggatttcaagacggatctgaggttccagagcagcgctgtggctgctttacaagaggctgcagaggcttacctcgttgggttgtttgaagacacgaatctctgcgcgattcacgctaagagggttacgatcatgccgaaggatatccagctcgcgaggagaatccgtggcgaaagagcttgattggttcttcaatgagcaatctacttggtttgattaggtgtagttgctttgttaagttagtacttaaggtgttcgacgaaatatcccaacgaaagtttctcttgtttaatataagtaatattttcccaatgatttcgatatgtttttgctaaaaaaaaaaaaaaaa

SEQ ID NO: 7744 - protein, 136 aa, Zea mays; identical to SEQ ID NO: 358
  misc_feature: Ceres CLONE ID no. 1411335
  misc_feature: Ceres CDNA ID no. 40351806
  misc_feature (58)..(134): Pfam Name: Histone PFAM Desc: Core histone H2A/H2B/H3/H4

SEQ ID NO: 7745 - DNA, 799 bp, Zea mays
  misc_feature: Ceres CLONE ID no. 1411619
  misc_feature: Ceres CDNA ID no. 25445616
  CDS (72)..(491): REFERENCED BY SEQ ID NO: 7746
acaaccgaagactcccaccatctctcctccagcttcttcttcttcgtctctgaaactagtttgattcagccatggctaatgcggcgtcaggtatggcagtccatgatgactgcaagctcaagtttctcgaactcaaggctaaaaggactttccgtttcatcgtttacaagatcgaggagcagcagaaacaagtggttgttgagaagctcggcgagcctggtcaatcccatgatgactttgcagctagtcttcctgctgatgaatgccgttacgcagttttcgattttgatttcgtcactgctgagagttgccaaaagagcaagatcttcttcgtcgcatggtctccggacacagcaagagttagaagcaagatgatctacgcgagctccaaggacaggttcaagagagagcttgatggaattcaagtagagcttcaagctaccgatccaactgagatggatctcgatgttttcaaaagccgagccaactgaggaatacatcctccataaaagaattggttgaatccaactttctcctactattactgaattgatatatgcttgttctttaagtttgctctgaaggcaccaccaaaccaaaacaacttcatttcattggtctttgtcttcctatgtcttttatattttttttggtccttgcagtgttttgcttaaaacttaagagatttggcttgtactcttttaccatttgtgtaagaaaacccaaaccctttaccagaagacgaatcctattggcaaatctatatatctagtggatccatggaaaaaaaaaaaaaaaa

SEQ ID NO: 7746 - protein, 139 aa, Zea mays; identical to SEQ ID NO: 6236
  misc_feature: Ceres CLONE ID no. 1411619
  misc_feature: Ceres CDNA ID no. 25445616
  misc_feature: The plant senesces significantly late copared to wild-type.
  misc_feature: Useful for making plants with modulated time to senescence
  misc_feature (12)..(139): Pfam Name: Cofilin_ADF PFAM Desc: Cofilin/tropomyosin
  misc_feature: Homolog of GI Number: 15810613 NR Desc: putative actin depolymerizing factor 3
  misc_feature: Homolog of GI Number: 17065584 NR Desc: putative actin depolymerizing factor 1
  misc_feature: Homolog of GI Number: 21536985 NR Desc: actin depolymerizing factor 4
  misc_feature: Homolog of GI Number: 23198338 NR Desc: actin depolymerizing factor 2
  misc_feature: Homolog of GI Number: 4185511 NR Desc: actin depolymerizing factor 4
  misc_feature: Homolog of GI Number: 14906219 NR Desc: actin
  misc_feature: Homolog of GI Number: 14906210 NR Desc: actin
  misc_feature: Homolog of GI Number: 68166241 NR Desc: actin depolymerizing factor
  misc_feature: Homolog of GI Number: 19699262 NR Desc: At1g05180/YUP8H12_21
  misc_feature: Homolog of GI Number: 7339501 NR Desc: actin depolymerizing factor 2

SEQ ID NO: 7747 - DNA, 1134 bp, Zea mays
  misc_feature: Ceres CLONE ID no. 1411708
  misc_feature: Ceres CDNA ID no. 40351807
  CDS (534)..(809): REFERENCED BY SEQ ID NO: 7748
tttattggaatattcatctgttaattcttatctttcacccagaaaatttaggtgctggaacaccaggttcaaacaatttttgctcaagtagtactgaaggccttccaagaacttggcaacctggtgaaacaaatgatccaataaatcaaattccgttactccgccgtcagtacctcatgatatttctgataatcatcttgtagtgcaaaatacttactccgattctgtccatctctactatttctaagaattatgtcttaaccatcctcctgtgcatcttttcttgtgaatttgtaagcttcaatctcaaatccgctggccccttcttttagaatgaaccgaacctccaatattctcttgatgatgcttaacatacagagaaacggtgtaacacaaaacagcacaatccatttctttgtactgtttctttttcaaatattttactgttttcaatattgaatctatgtcttgaatgaattgctagcttatctaattcatatttacattcttgacatttcaattatgtctttccaatgtttgatatagttatgccagattttgcgggagtgtacagcttcttaggtagtgttttcgatccaagtacaagtggtcatctgcagaaacttaaggagatgaatccaattgacgttgagacggcactgttgttgatgaggaatctctccatcaatttaaccagtcctgattttgaagatcaaaggaagttgttgtccttatacagcgcttctgatggacctgggctagggagctcaagaagttcagctctagcgacgagcgcgcctttcatgtaaggtgtgccctcctcgctgtcccgccgcctcttttgttcccacaatctacagacaagttcatgactactccaggattaaaggcgagtagtgtggccaggtctctcggcatataatttcagttcgacagacctcaggaggatggtgcctgccctggcgtagtagcaccgatgagtgatgaaggaggcgtttgcaccttttgtgcttctcgctagctccatgccttcggctgacgattgtgtaagggtgcagccgtgtgcggcctgatgtgtgtacatataatttttgccaggaagcgtgcacccttcctggcctttcctaaaaaaaa

SEQ ID NO: 7748 - protein, 91 aa, Zea mays
  misc_feature: Ceres CLONE ID no. 1411708
  misc_feature: Ceres CDNA ID no. 40351807
MFDIVMPDFAGVYSFLGSVFDPSTSGHLQKLKEMNPIDVETALLLMRNLSINLTSPDFEDQRKLLSLYSASDGPGLGSSRSSALATSAPFM

SEQ ID NO: 7749 - DNA, 1202 bp, Zea mays; identical to SEQ ID NO: 7637
  misc_feature: Ceres CLONE ID no. 1411718
  misc_feature: Ceres CDNA ID no. 36593011
  CDS (117)..(974): REFERENCED BY SEQ ID NO: 7750

SEQ ID NO: 7750 - protein, 285 aa, Zea mays; identical to SEQ ID NO: 7638
  misc_feature: Ceres CLONE ID no. 1411718
  misc_feature: Ceres CDNA ID no. 36593011
  misc_feature (29)..(264): Pfam Name: MIP PFAM Desc: Major intrinsic protein
  misc_feature: Homolog of GI Number: 3551133 NR Desc: Plasma membrane aquaporin
  misc_feature: Homolog of GI Number: 7209560 NR Desc: Plasma membrane aquaporin 2b
  misc_feature: Homolog of GI Number: 7209562 NR Desc: Plasma membrane aquaporin 2c
  misc_feature: Homolog of GI Number: 21554356 NR Desc: aquaporin
  misc_feature: Homolog of GI Number: 4371284 NR Desc: aquaporin
  misc_feature: Homolog of GI Number: 21537097 NR Desc: aquaporin
  misc_feature: Homolog of GI Number: 5081421 NR Desc: plasma membrane intrinsic protein 1
  misc_feature: Homolog of GI Number: 5081423 NR Desc: plasma membrane intrinsic protein 2
  misc_feature: Homolog of GI Number: 472879 NR Desc: plasma membrane intrinsic protein 2b
  misc_feature: Homolog of GI Number: 20465733 NR Desc: putative aquaporin protein

SEQ ID NO: 7751 - DNA, 1157 bp, Zea mays
  misc_feature: Ceres CLONE ID no. 1411886
  misc_feature: Ceres CDNA ID no. 25445754
  CDS (126)..(800): REFERENCED BY SEQ ID NO: 7752
aaacacacacaacaccagtcaccagctcatcacatccatctcattctactactgcctcagagaccaagctgctgcaaccggagaaggagatctactctactcttcagagcactgtgcattgggacatggaaaccgtcgtgggagacctcatggcgaccgagctgaggcttggcctgccgggcaccgtggacgactgcagccagcaccagcagcagacccagctgaaggtggccgcgccgccgtccaaccctactaggggcaagaagcgccccgccgccgaggaggaggaggcaaacaagcgcgacgcggaggcagcacccccggcggccaaggcgcccgtggtcggatggccaccggtgaggtcgtaccggaagagctgcttccagcaggcaaagcagcaggccgtcagcagcagcagcagcaaggcggccgacaaagaggatgctgcggcgccggcgccgagctgcacggcgtccgcagccgcctcaaacgccaccgccggcgccggggccggctcattcgtcaaggttagcatggacggcgccccgtacctgcggaagctcgacctgaggatgtacaagggctaccgggagctccgggaggccctggaggccatgttcgtctcctccggcagcgccaacaacaacaacctgtccgagttcgccgtcacctaccaggacaaggacggcgacctcatgctcgtcggagacgtgccgttcgagatgttcgctagcacctgcaggaagctgaggatcatgaagagatctgaagccacaggcctgggatcggcgaggcaatgaaggaggtctgacgacgaccgagggcccgacaacgttcatgtcgatctctctctctcttttttttgccccattattttattttgttctttcttgttcgagagaccccaagccaaaaggatgagcttggtggcgcatcaatctacaaagcgcatgcatatacgcggatgtgtgtgcggctttggttctgtaagacgacgactagtagagctaggtcttttttagcagcagcacagaagctaaggagatgcatgctgatgacgagcggttgtttcggcttagctctccgtatgctgtgtttgtacaaaccaaacaatacagttatcttcatcgtcgttgatcctaaaaaaaaaaaaaaaa

SEQ ID NO: 7752 - protein, 224 aa, Zea mays
  misc_feature: Ceres CLONE ID no. 1411886
  misc_feature: Ceres CDNA ID no. 25445754
  misc_feature (7)..(223): Pfam Name: AUX_IAA PFAM Desc: AUX/IAA family
  misc_feature: Homolog of GI Number: 50917149 NR Desc: putative auxin
  misc_feature: Homolog of GI Number: 77556998 NR Desc: AUX/IAA family
  misc_feature: Homolog of GI Number: 12083196 NR Desc: auxin
  misc_feature: Homolog of GI Number: 7442239 NR Desc: auxin
  misc_feature: Homolog of GI Number: 32400272 NR Desc: IAA1 protein
  misc_feature: Homolog of GI Number: 17154533 NR Desc: putative IAA1 protein
  misc_feature: Homolog of GI Number: 50918575 NR Desc: putative auxin
  misc_feature: Homolog of GI Number: 29028818 NR Desc: At5g43700
  misc_feature: Homolog of GI Number: 4887022 NR Desc: Nt
  misc_feature: Homolog of GI Number: 7442240 NR Desc: auxin
METVVGDLMATELRLGLPGTVDDCSQHQQQTQLKVAAPPSNPTRGKKRPAAEEEEANKRDAEAAPPAAKAPVVGWPPVRSYRKSCFQQAKQQAVSSSSSKAADKEDAAAPAPSCTASAAASNATAGAGAGSFVKVSMDGAPYLRKLDLRMYKGYRELREALEAMFVSSGSANNNNLSEFAVTYQDKDGDLMLVGDVPFEMFASTCRKLRIMKRSEATGLGSARQ

SEQ ID NO: 7753 - DNA, 649 bp, Zea mays; identical to SEQ ID NO: 7561
  misc_feature: Ceres CLONE ID no. 1413907
  misc_feature: Ceres CDNA ID no. 36706978
  CDS (65)..(475): REFERENCED BY SEQ ID NO: 7754

SEQ ID NO: 7754 - protein, 136 aa, Zea mays; identical to SEQ ID NO: 358
  misc_feature: Ceres CLONE ID no. 1413907
  misc_feature: Ceres CDNA ID no. 36706978
  misc_feature (58)..(134): Pfam Name: Histone PFAM Desc: Core histone H2A/H2B/H3/H4
  misc_feature: Homolog of GI Number: 59799581 NR Desc: Histone H3
  misc_feature: Homolog of GI Number: 50728592 NR Desc:  similar to histone protein Hist2h3c1
  misc_feature: Homolog of GI Number: 1362108 NR Desc: histone H3 homolog
  misc_feature: Homolog of GI Number: 55775689 NR Desc: histone 3
  misc_feature: Homolog of GI Number: 166384 NR Desc: histone H3
  misc_feature: Homolog of GI Number: 122083 NR Desc: Histone H3
  misc_feature: Homolog of GI Number: 73808028 NR Desc: histone H3
  misc_feature: Homolog of GI Number: 122070 NR Desc: Histone H3
  misc_feature: Homolog of GI Number: 68441481 NR Desc:  similar to CG31613
  misc_feature: Homolog of GI Number: 74003975 NR Desc:  similar to histone 1

SEQ ID NO: 7755 - DNA, 781 bp, Zea mays
  misc_feature: Ceres CLONE ID no. 1414121
  misc_feature: Ceres CDNA ID no. 25446108
  CDS (437)..(607): REFERENCED BY SEQ ID NO: 7756
acaccgagaagctagcagaaaaaatatacgcaatactttagaataatagaaggtcacatatatacatatgtgtgtgcgcacattcattcatagaagaactaccataagagactcacattttagcacatcttgtttgtcagtatgtgtacatgcataggaatatcagattgtgaaagtgagatgtcggtgcaaactgaaatgataaagacattgtggacatgactgtggacatgactgtgatgcaactatttggattcctaattgattctgtggttggtactttccatacatagaattttactgaaaatttatcaaggtaaaatgaggatccataaatatcatttaattatgttcatatgttttatcttggaagtaatttcttttttgacacttttctacattttgttcccaatccgcagaaagcaaccaaccttttatgaacctagtggcaaagttttctcacaggaagagatgttatcaagctaatgcaacttcattagtagataaaaaaatgaaatcaaagcattggatacatttgacatggtcgattcacattttgatggatacattgattttgaagaataagttgactatgatacagaggtgaaaggacaatacggcaaagactataacagacttatagggaatttggttggttatgaagcagaaaaacatctctacttgggacattgaccgtgtgaacctagagaatgatgaaaatggaaatccaatatgctatgaaaaaacttaagaaagatcttcacttcgacaacaaaaaaaa

SEQ ID NO: 7756 - protein, 56 aa, Zea mays
  misc_feature: Ceres CLONE ID no. 1414121
  misc_feature: Ceres CDNA ID no. 25446108
MNLVAKFSHRKRCYQANATSLVDKKMKSKHWIHLTWSIHILMDTLILKNKLTMIQR

SEQ ID NO: 7757 - DNA, 938 bp, Zea mays
  misc_feature: Ceres CLONE ID no. 1416555
  misc_feature: Ceres CDNA ID no. 36699329
  CDS (55)..(567): REFERENCED BY SEQ ID NO: 7758
aaaacgcaaaacacgagcgagcacaaaaaaaaaatcccaatatccgcaacggcaatgtctccgctgccccgcatcgtgctcctcgccgtcgccgccgccgccgccgcagcggtcacggcgtcagccacgtcgctcagcggcgcggcgaacgacctactccccaagtacggcctcccgaaggggctcatcccggactccgtcgcctcctacagcttcgacgaggccacgggcgccttcgagatccacctcgccggcacctgctacgtccacttcggctcccacctcgtctactacgagaggaccataaccggcaagctctccaagggcgccatctcggacctctccggcgtccaggccaagaagctcttcctctgggtctacgtcacggggatggtcgcgcaccccgaccagggcaccatcgagttccaggccggcttcatctcggagtcgctatcggcctcgatgtttgacgaggtgcccacctgcggttccagcgttggcgcgcagctgcgcggcgcggctggggtgatcggcgagcttgggctgctccccgttgcacaggcctgaacgtgggtttgagagtccacatacagtcccagagaaccgcaggaccttaccgtctgctgtcgcgtgagccctagagtgcaggaggcgttcagccgtggtgtgttctgcttctgcctgtacgtaccagtgtctggttgttgctcccggtgtcaaatggacatggatgatctgtagaaatgtatgtctataatatgctgttactgaacatgcgtaggatgtaggcaaattaagccatcctcagtctcttgtagtcccggactatcgtcgtgtcatcgtgtgtggcaccatgaacttcccaacgactagagtgcccgccttatgctttgtgatgataaaaaaaaaaaaaaaaaaaaataaaaaaaaaaaaaaaa

SEQ ID NO: 7758 - protein, 170 aa, Zea mays
  misc_feature: Ceres CLONE ID no. 1416555
  misc_feature: Ceres CDNA ID no. 36699329
  misc_feature: Homolog of GI Number: 34906900 NR Desc: P0470A12.30
  misc_feature: Homolog of GI Number: 72547023 NR Desc: proteophosphoglycan ppg4
  misc_feature: Homolog of GI Number: 11359723 NR Desc: proteophosphoglycan
  misc_feature: Homolog of GI Number: 72547041 NR Desc: proteophosphoglycan ppg1
  misc_feature: Homolog of GI Number: 72547036 NR Desc: proteophosphoglycan 5
  misc_feature: Homolog of GI Number: 67987177 NR Desc: 4Fe
  misc_feature: Homolog of GI Number: 72547018 NR Desc: proteophosphoglycan ppg3
  misc_feature: Homolog of GI Number: 2429362 NR Desc: proline rich protein
MSPLPRIVLLAVAAAAAAAVTASATSLSGAANDLLPKYGLPKGLIPDSVASYSFDEATGAFEIHLAGTCYVHFGSHLVYYERTITGKLSKGAISDLSGVQAKKLFLWVYVTGMVAHPDQGTIEFQAGFISESLSASMFDEVPTCGSSVGAQLRGAAGVIGELGLLPVAQA

SEQ ID NO: 7759 - DNA, 836 bp, Glycine max
  misc_feature: Ceres CLONE ID no. 1416958
  misc_feature: Ceres CDNA ID no. 25445740
  CDS (159)..(620): REFERENCED BY SEQ ID NO: 7760
gccgttgcctctgcctctcacccgcaggttgtgctctattcccccattctctctccgtttagttcacagtatatttcaccagccttatcttcatcttctttttcttttagggtttagagaaaatttaacaattagggttgcttctcctttgccgacccatggctcccaaagctgatagttcaaagaaggctgatccaaaggcacaggccttgaaaactgccaaggcagttaagtccggtgctaactttaagaagaagaccaagaagatccgaacatctgttaccttccatcgaccaaggactttgaaaaaggataggaaccccaaatatccacgcattagtgctccacccaggaacaagcttgatcactatcagatattgaagtttcctctcacgactgagtctgcaatgaagaagattgaagacaacaacactttggttttcattgttgacttgcgggccgacaagaagaagatcaaggatgcagtcaagaagatgtatgatattcaggccaagaaagtaaacaccttgatcaggcctgatggaaccaagaaggcctatgtcaggttgacacctgattatgacgccctggatgtggccaacaagattggaattatctaaactaatatatggcctcaccaaagtagatttctgtttagatggtagtttgttatggggtgttgaggggagacatttgaagcaacattaagttataaattttcggtttgttatctggtgtattttagttcaattggaattatatttacttttgttacaattttcaatttgatgagtaaatgggccgatattattttccaatcaaaaaacaaaaaaaaa

SEQ ID NO: 7760 - protein, 153 aa, Glycine max
  misc_feature: Ceres CLONE ID no. 1416958
  misc_feature: Ceres CDNA ID no. 25445740
  misc_feature (11)..(65): Pfam Name: Ribosomal_L23eN PFAM Desc: Ribosomal protein L23
  misc_feature (71)..(150): Pfam Name: Ribosomal_L23 PFAM Desc: Ribosomal protein L23
  misc_feature: Homolog of GI Number: 7340791 NR Desc: ribosomal protein L23
  misc_feature: Homolog of GI Number: 76573339 NR Desc: ribosomal protein L25
  misc_feature: Homolog of GI Number: 7711063 NR Desc: ribosomal protein L23
  misc_feature: Homolog of GI Number: 1084424 NR Desc: ribosomal protein L23a
  misc_feature: Homolog of GI Number: 2641201 NR Desc: ribosomal protein L23a
  misc_feature: Homolog of GI Number: 13560777 NR Desc: ribosome protein L23a
  misc_feature: Homolog of GI Number: 3355475 NR Desc: 60S ribosomal protein L23A
  misc_feature: Homolog of GI Number: 21592339 NR Desc: 60S ribosomal protein L23A
  misc_feature: Homolog of GI Number: 2654122 NR Desc: ribosomal protein L23a
  misc_feature: Useful for making bigger plants
  misc_feature: Useful for making plants with increased biomass and foliage
  misc_feature: Useful for sterility
MAPKADSSKKADPKAQALKTAKAVKSGANFKKKTKKIRTSVTFHRPRTLKKDRNPKYPRISAPPRNKLDHYQILKFPLTTESAMKKIEDNNTLVFIVDLRADKKKIKDAVKKMYDIQAKKVNTLIRPDGTKKAYVRLTPDYDALDVANKIGII

SEQ ID NO: 7761 - DNA, 791 bp, Glycine max
  misc_feature: Ceres CLONE ID no. 1416984
  misc_feature: Ceres CDNA ID no. 25446007
  CDS (106)..(546): REFERENCED BY SEQ ID NO: 7762
acgaaggaagtcgaagcagtaaaacccaatcaaagaccctcactctcagcccactcttcacgatctgtaattacaagaagcttagatttgacacaagcaggcacaatggacagcatagttgattctctgaataatgcctatcaagattttgttgctgcagcagctaatgtgttagaagccaaagaaaatgctggttccattaaaacaatggcaacagatactgctctagaaaactttaagcagaagtgggaattgtttagagtagcatgtgatcaagctgaggagtttgtggagtctgtgaagcaaaggataggatctgagtgtctggtggatgaggcaacaaggcctgtggcaggaaaacctggacaagctaccatgaccggtcttcctcccattagtgcagttcggttggaacagatgagtaaagctgttcgatggcttgtgattgaattgcagcatggctctggagctggttctgctaattcagctcttacccacccctcagctccgtttgatgccaggttttctgaagatgctgctcagtagcattaatgtgactgtgatgattaatgttatatatttttttctctatgatgatcatgcttagactatattgtgttaaacattttatacaagattaaggattagatttatgctaagctgttaaagaatgtaacttgtgtgtattgtgcatgacacaacaatccttattccttaattttctgttggtgataattaatgtattttatcctgcaaaaatgaaaacgcatgagttatgcaaaaaaaaaaaa

SEQ ID NO: 7762 - protein, 146 aa, Glycine max
  misc_feature: Ceres CLONE ID no. 1416984
  misc_feature: Ceres CDNA ID no. 25446007
  misc_feature: Homolog of GI Number: 28466841 NR Desc: At1g11760
  misc_feature: Homolog of GI Number: 4835781 NR Desc: F25C20.9
MDSIVDSLNNAYQDFVAAAANVLEAKENAGSIKTMATDTALENFKQKWELFRVACDQAEEFVESVKQRIGSECLVDEATRPVAGKPGQATMTGLPPISAVRLEQMSKAVRWLVIELQHGSGAGSANSALTHPSAPFDARFSEDAAQ

SEQ ID NO: 7763 - DNA, 1507 bp, Glycine max
  misc_feature: Ceres CLONE ID no. 1417012
  misc_feature: Ceres CDNA ID no. 40351808
  CDS (116)..(1246): REFERENCED BY SEQ ID NO: 7764
agaacaggtgacgctcccctcccaccccctgctccccccctcgatccgtttgatctgaaacccaaatctgtcgagttccactcccccctcagatttcttacaggaaacttgacaaatggctgatgaggatgttcaacctatcgtgtgcgataacggcactggaatggtcaaggctggttttgccggtgatgatgcacccagggctgtctttcctagcattgtaggaaggccacgccataccggtgtcatggttggtatgggccaaaaggatgcctatgtgggcgatgaagctcaagcaaagagaggtatcctgactttgaagtaccccattgaacatggcattgtcaacaactgggatgacatggagaaaatatggcatcacacgttctacaacgagctccgtgtcgcaccagaggatcatcctgtgttgctgactgaggcccctctcaaccccaaggccaacagagagaaaatgacccagatcatgttcgaaaccttcagttgcccagcaatgtatgtcgcaatccaggccgttctgtccttgtatgccagcggtcgaacaactggtattgtgctcgactctggtgatggtgtgagccacactgttccaatctatgagggatacacgcttcctcatgctatccttcgtttggaccttgctggccgtgacctcacggataatctaatgaagatcctcacagaaagagggtactccctcacaacaaccgctgagcgggaaattgtcagagacataaaggagaagcttgcttacgtggcccttgattatgagcaggagctggaaacggctaggagcagctcctctgtggagaagagctatgagatgcctgatggtcaggttataacaattggttcagaaaggttcaggtgccctgaggtgctattccagccatctcatgttggtatggaagttcctggtatacacgaagcgacatacaattccatcatgaagtgtgatgttgatatcagaaaggatctgtatggtaatgttgttctcagtggaggttctaccatgtttcctggaattgctgatcgcatgagcaaggagatcacggcccttgctcctagcagtatgaaggttaaagttattgcaccacctgaaaggaaatacagtgtctggatcggtggctctattttggcctctcttagcactttccagcagatgtggatctccaaggcagagtacgacgagtctggtcccggcattgtccacatgaagtgcttctgaagagtcggggaaggttgtttacaaaggggactttgctgccaagaatatatagtagtacatggtacatggttagtgttctgtagaagatgtgtaccctcagaggaataaggggtacaggaaaatcagtctcggttcagcttttccttttggcacaattgcatggccttgcatggtgcttgcctgctgtatgaaataatgaaatggaacatatgtgtatgcctaagcgacattgtgtggtacgccataaaaaaaaaaaaaaaa

SEQ ID NO: 7764 - protein, 376 aa, Glycine max
  misc_feature: Ceres CLONE ID no. 1417012
  misc_feature: Ceres CDNA ID no. 40351808
  misc_feature: The plant flowers significantly late compared to wild-type.
  misc_feature: The plant is abnormally small.
  misc_feature: Useful for making plants with modulated biomass
  misc_feature: Useful for making plants with modulated flowering time
  misc_feature (7)..(376): Pfam Name: Actin PFAM Desc: Actin
MADEDVQPIVCDNGTGMVKAGFAGDDAPRAVFPSIVGRPRHTGVMVGMGQKDAYVGDEAQAKRGILTLKYPIEHGIVNNWDDMEKIWHHTFYNELRVAPEDHPVLLTEAPLNPKANREKMTQIMFETFSCPAMYVAIQAVLSLYASGRTTGIVLDSGDGVSHTVPIYEGYTLPHAILRLDLAGRDLTDNLMKILTERGYSLTTTAEREIVRDIKEKLAYVALDYEQELETARSSSSVEKSYEMPDGQVITIGSERFRCPEVLFQPSHVGMEVPGIHEATYNSIMKCDVDIRKDLYGNVVLSGGSTMFPGIADRMSKEITALAPSSMKVKVIAPPERKYSVWIGGSILASLSTFQQMWISKAEYDESGPGIVHMKCF

SEQ ID NO: 7765 - DNA, 598 bp, Glycine max
  misc_feature: Ceres CLONE ID no. 1417425
  misc_feature: Ceres CDNA ID no. 25445724
  CDS (71)..(337): REFERENCED BY SEQ ID NO: 7766
atttttcactctcaattctcatttctcagcaaattgaatcgagcgaattcacaaaccctagttttcgacgatgggtcagatccagtactccgagaagtacttcgatgacacttatgaatatagacatgtggttcttcctcctgaagtcgcaaaactgcttcccaagaatcgtcttctctccgaaaatgagtggcgagctattggggttcagcagagccgtggctgggttcactatgcaattcatcgccctgagccacacataatgcttttcaggaggccgttgaattatcagcagcagcaggaaaaccaggcccagcaaagcatgcttgtcaaatgaacactttctatgcaaatctgaaagtgggatacaatgttatataggttttaatttgttggtatgtggtggatgttatgaagaccctactgccgtggaattctctttttgtggagaattttcatgtggtttcaactgtcatttttatgttttgtggacatgatgatgtgtcatggatttttattggtgtacctctcgtgtactcttatatgcttggtggattatataatagtcattttcggttaaattctacaaaaaaaaaaa

SEQ ID NO: 7766 - protein, 88 aa, Glycine max
  misc_feature: Ceres CLONE ID no. 1417425
  misc_feature: Ceres CDNA ID no. 25445724
  misc_feature: null
  misc_feature: Useful for making plants with altered oil content
  misc_feature (1)..(72): Pfam Name: CKS PFAM Desc: Cyclin
  misc_feature: Homolog of GI Number: 42362268 NR Desc: cyclin
  misc_feature: Homolog of GI Number: 21593913 NR Desc: putative cyclin
  misc_feature: Homolog of GI Number: 45935118 NR Desc: putative CDK regulatory subunit
  misc_feature: Homolog of GI Number: 50919707 NR Desc: Putative cyclin
  misc_feature: Homolog of GI Number: 40641585 NR Desc: putative cyclin
  misc_feature: Homolog of GI Number: 38566522 NR Desc: At2g27970
  misc_feature: Homolog of GI Number: 27435806 NR Desc: CKS1 protein
  misc_feature: Homolog of GI Number: 55978016 NR Desc: cyclin
  misc_feature: Homolog of GI Number: 2493727 NR Desc: Probable cyclin
  misc_feature: Homolog of GI Number: 58376047 NR Desc: ENSANGP00000018659
MGQIQYSEKYFDDTYEYRHVVLPPEVAKLLPKNRLLSENEWRAIGVQQSRGWVHYAIHRPEPHIMLFRRPLNYQQQQENQAQQSMLVK

SEQ ID NO: 7767 - DNA, 665 bp, Glycine max
  misc_feature: Ceres CLONE ID no. 1417616
  misc_feature: Ceres CDNA ID no. 40351809
  CDS (3)..(170): REFERENCED BY SEQ ID NO: 7768
aatgtgtgtcgggttattttggattttccgtggcgcccttagccttaggcgtagcttttgggtcattcagcaatagccgcggtgaagatcggaaccctccactctacactctgctctgcaatggcgaagatcgaagaactgaacgaatccatccccaaatcgaagaataagaggaatcacggctccaccacgttctttgtctttgtcgattaccttttcattttgttcttcctcggattcctctgcttcatcgttttcaagattctcagcatttgattcgattcctcaaatcacacaacccaccgtgtgttctgagctagagtactaaatggatgaggaagaatgtcttagaagtaccagtattggaggatatccatgctttgaaagatgaagctgttatgtaccaaaagaaagaacgaggatattcgcatgacatagctaggctttcattgcaaacctagttccaagcttgaaggctgcggcaactagcaagtatcatttttaatcagatcctatgatgtaacacttgaatttaccatctttcccaagttttgctctcgaattccaaaatttacactactcatttccccctgtagttttctttcattagtgtcttctgtattacatttgatattttaacatgttcttttccacaaaaaaaaaaa

SEQ ID NO: 7768 - protein, 51 aa, Glycine max
  misc_feature: Ceres CLONE ID no. 1417616
  misc_feature: Ceres CDNA ID no. 40351809
MAKIEELNESIPKSKNKRNHGSTTFFVFVDYLFILFFLGFLCFIVFKILSI

SEQ ID NO: 7769 - DNA, 704 bp, Zea mays
  misc_feature: Ceres CLONE ID no. 1417902
  misc_feature: Ceres CDNA ID no. 40351810
  CDS (79)..(513): REFERENCED BY SEQ ID NO: 7770
aaagccttggacggatccaatattttagctagctagcaagcaaagcaagccttgaacttttgagcggcggctagcgcaatgggaggcgtggcgtcggagctggtgggagccagcagggagaggcagagcaggaagaggaagcagttccacacggtggagctcaaggtcaggatggactgcgacggctgcgagctcaaggtcaggaacacccttgcccgcatgagaggggtggagtcggtggagatcaaccggaagcagcagaaggtgacggtgaaggggttcgtggaggcgcagcgggtgctgaggcgcgcccagtccacggggaagcgcgtcgagctgtggccctacgtgccctacaccaacctctacgtcgcgccgccggtgtacgacaagagggcgccgccgggccacgtccgcagggtcgacgcactcatcgcgcccgccgccggccaggaagagcacctcgccacgctcttcagcgacgataaccccaacgcctgctcccttatgtgattcctcatgctagagccgcccgcctgctccccggccttattatgcgatgctagctgcttgcttcatccacgctgtacctctactagcgatgtcatgctccgtagttacgcagtaatataataatctgtatcttttaattaattaaacaacagtacgtaaatgactttcagaccaaaaaaaaaaaaaaaaaa

SEQ ID NO: 7770 - protein, 144 aa, Zea mays
  misc_feature: Ceres CLONE ID no. 1417902
  misc_feature: Ceres CDNA ID no. 40351810
  misc_feature (26)..(87): Pfam Name: HMA PFAM Desc: Heavy
MGGVASELVGASRERQSRKRKQFHTVELKVRMDCDGCELKVRNTLARMRGVESVEINRKQQKVTVKGFVEAQRVLRRAQSTGKRVELWPYVPYTNLYVAPPVYDKRAPPGHVRRVDALIAPAAGQEEHLATLFSDDNPNACSLM

SEQ ID NO: 7771 - DNA, 696 bp, Zea mays
  misc_feature: Ceres CLONE ID no. 1417941
  misc_feature: Ceres CDNA ID no. 25446109
  CDS (66)..(530): REFERENCED BY SEQ ID NO: 7772
atcccaaaacctaaacctcctcttcgtttccgagaaaatcaaagaaaaagagagagagattcacgatggcgccaaagacaggaaagaaacccgcagagaagaaacccgccgctgccgccgccgcagagaagccagtggaggaagagaaggtagctgagaaagctccagcggagaagaagccgaaggccggaaagaagctacctaaggaagccatcggcgggaccgacaagaagaagaagcgcagcaagaagaacatcgagacgtacaagatctacatcttcaaggttcttaagcaagtccacccagacatcggaatctcgagcaaggccatggggatcatgaacagcttcatcaacgacatcttcgagaagcttgctcaggaagcgtccaaactcgcaaggtacaacaagaagccgaccattacttctcgcgagatccagacagctgttagacttgttcttcccggtgagcttgctaagcacgccgtgtctgaaggaaccaaggctgttactaagtttactagctcttgaatgaaatcacttgttaggattctagatctgaacgcttttgggttttttttcttttgttatggattatgcttatcttagctttatgatttggtggtgactgtgtaataacatatggaatgattaatcgtctctttctgtttaaaaaaaaacaaaaaaaaaaaaaaaa

SEQ ID NO: 7772 - protein, 154 aa, Zea mays
  misc_feature: Ceres CLONE ID no. 1417941
  misc_feature: Ceres CDNA ID no. 25446109
  misc_feature: No seed is being produced by the plant
  misc_feature: The plant flowers significantly late compared to wild-type.
  misc_feature: Useful for biocontainment applications
  misc_feature: Useful for making plants with modulated flowering time
  misc_feature (61)..(133): Pfam Name: Histone PFAM Desc: Core histone H2A/H2B/H3/H4
  misc_feature: Homolog of GI Number: 21553526 NR Desc: putative histone H2B
  misc_feature: Homolog of GI Number: 21554180 NR Desc: histone H2B
  misc_feature: Homolog of GI Number: 30102580 NR Desc: At3g45980
  misc_feature: Homolog of GI Number: 21617908 NR Desc: histone H2B
  misc_feature: Homolog of GI Number: 12083300 NR Desc: putative histone H2B protein
  misc_feature: Homolog of GI Number: 21536602 NR Desc: histone H2B
  misc_feature: Homolog of GI Number: 2558962 NR Desc: histone H2B1
  misc_feature: Homolog of GI Number: 82400146 NR Desc: histone H2B
  misc_feature: Homolog of GI Number: 2746719 NR Desc: histone H2B
  misc_feature: Homolog of GI Number: 3021489 NR Desc: histone H2B
MAPKTGKKPAEKKPAAAAAAEKPVEEEKVAEKAPAEKKPKAGKKLPKEAIGGTDKKKKRSKKNIETYKIYIFKVLKQVHPDIGISSKAMGIMNSFINDIFEKLAQEASKLARYNKKPTITSREIQTAVRLVLPGELAKHAVSEGTKAVTKFTSS

SEQ ID NO: 7773 - DNA, 614 bp, Zea mays
  misc_feature: Ceres CLONE ID no. 1418061
  misc_feature: Ceres CDNA ID no. 25446110
  CDS (1)..(462): REFERENCED BY SEQ ID NO: 7774
cttcagctgccgttgctccttcactttgcatctaccttcaaatccaccgccgcgaaaatggtgttcaagaggtacgtggagattgggagagttgcacttgtcaactacggaaaagatcatggaaagcttgtcgtcatcgtcgacgtcgttgaccagaacagggctttggtagatgctcctgatatggagagaatccagatgaacttcaagaggctgtctcttaccgatatcgtgattgagatcaacagagtcccaaagaagaaggctttgatcgaggccatggaaaaggctgacgtgaagaacaagtgggagaagagctcatggggtaggaagctcattgttcagaagcgtagggctagcctcaatgacttcgacaggttcaagatcatgttggccaaaatcaagaaagctggcgttgtcaggcaagagcttgctaaactcaagaaggagatcactgcttgatcagattgagtactatctgcttatctgttttttttttgtacttttgattggcaattagtgtttttacgaatctcaacatcaatatctatctgtcggattttgaaaccttgtttcttaaaatttagtttgttatttcaaaaaaaaaaaaaaaa

SEQ ID NO: 7774 - protein, 134 aa, Zea mays
  misc_feature: Ceres CLONE ID no. 1418061
  misc_feature: Ceres CDNA ID no. 25446110
  misc_feature (44)..(120): Pfam Name: Ribosomal_L14e PFAM Desc: Ribosomal protein L14
  misc_feature: Homolog of GI Number: 7269562 NR Desc: ribosomal protein L14
  misc_feature: Homolog of GI Number: 20465571 NR Desc: putative 60S ribosomal protein L14
  misc_feature: Homolog of GI Number: 76161008 NR Desc: glycoprotein
  misc_feature: Homolog of GI Number: 5762251 NR Desc: Csf
  misc_feature: Homolog of GI Number: 50926450 NR Desc: OSJNBb0070J16.13
  misc_feature: Homolog of GI Number: 48596905 NR Desc: glycoprotein
  misc_feature: Homolog of GI Number: 50910649 NR Desc: putative hydroxyproline
  misc_feature: Homolog of GI Number: 7488810 NR Desc: hydroxyproline
  misc_feature: Homolog of GI Number: 2500365 NR Desc: Probable 60 ribosomal protein L14
  misc_feature: Homolog of GI Number: 41323492 NR Desc: 60S ribosomal protein L14
MVFKRYVEIGRVALVNYGKDHGKLVVIVDVVDQNRALVDAPDMERIQMNFKRLSLTDIVIEINRVPKKKALIEAMEKADVKNKWEKSSWGRKLIVQKRRASLNDFDRFKIMLAKIKKAGVVRQELAKLKKEITA

SEQ ID NO: 7775 - DNA, 998 bp, Zea mays
  misc_feature: Ceres CLONE ID no. 1418190
  misc_feature: Ceres CDNA ID no. 25447007
  CDS (330)..(722): REFERENCED BY SEQ ID NO: 7776
gtctggccgtcttccagacgtctccaatcggagctcccagcgtctcggagaagaggagcagcacggcacggcagctgtggcgaggaaggctcttgtcctgtcccatcccaacccagcagccgtccaaggaggaggagatccaatcggcgtgcaggcgtccaccgtccatccatcgatccaattccaatctgcaggtgagcagctcgttgagattcccaatcaacagctcgaatcgcctgctctcccatcctattgaatgaaactatggcctctgcgtcgcggcttgttcgtggaggagaggttgctgtggaacccgccgccagttagccatgtcgtcctccgtgctgagggctgcggccgacagggctattcgcaggcaggccctcacgctgacggacgccgcggcgtccaggatccggcagctcctcagcctcaggcagcggccattcctgcggctcggcgtcaaagcgcgtggttgcaacggcctctcgtacacgctcaactatgccgacgaaaaggggaagtttgatgagcttgtggaggagaagggagtgaaggtgctgatcgaccccaaggctctgatgcatgtcataggcaccaagatggactacgttgacgacccgttaaagtccgagttcgtgttcgtaaacccgaactccaagggggagtgtggctgcggcgaatctttcatgacgacgggcagcaaagggacgacgtcgtgaggcgtcgtcgtctgtctgtctgtctgtctgtcggtgtaaagcaaacgcgtccgccgcaggctccagagctatacaggttcactgaggtttctcttgtaggcatctgtcgcgccgccggagtccttatatataaacacaggggaagggcagctgactcgcatgtacttgtaaattcacttgaaacgtttacatggtcaggttttccccccatgttatgcgtatctggtaatgtcacggttcaagggctcgaatttgtgcggaaaaaaaaaaaaaaaa

SEQ ID NO: 7776 - protein, 130 aa, Zea mays
  misc_feature: Ceres CLONE ID no. 1418190
  misc_feature: Ceres CDNA ID no. 25447007
  misc_feature (18)..(121): Pfam Name: HesB PFAM Desc: HesB
  misc_feature: Homolog of GI Number: 55769703 NR Desc: IscA
  misc_feature: Homolog of GI Number: 77555730 NR Desc: HesB
  misc_feature: Homolog of GI Number: 21592728 NR Desc: putative HesB
  misc_feature: Homolog of GI Number: 28466893 NR Desc: At2g16710
  misc_feature: Homolog of GI Number: 34894088 NR Desc: P0005A05.9
  misc_feature: Homolog of GI Number: 16798390 NR Desc: iron
  misc_feature: Homolog of GI Number: 46202563 NR Desc: COG0316: Uncharacterized conserved protein
  misc_feature: Homolog of GI Number: 57335889 NR Desc: Fe
  misc_feature: Homolog of GI Number: 51767565 NR Desc: similar to zinc finger protein 307
  misc_feature: Homolog of GI Number: 45201063 NR Desc: AGL033Cp
MSSSVLRAAADRAIRRQALTLTDAAASRIRQLLSLRQRPFLRLGVKARGCNGLSYTLNYADEKGKFDELVEEKGVKVLIDPKALMHVIGTKMDYVDDPLKSEFVFVNPNSKGECGCGESFMTTGSKGTTS

SEQ ID NO: 7777 - DNA, 657 bp, Zea mays
  misc_feature: Ceres CLONE ID no. 1418906
  misc_feature: Ceres CDNA ID no. 36593244
  CDS (139)..(360): REFERENCED BY SEQ ID NO: 7778
agaatataatctggtgcgctccccccggcccccgcgaacaacttcctgcttgcacgcaagccactccgaggccaagtctagggtttgggaatctgtaggaggggagaggggagcgcgctcagggtcagggaggcgaagatgatcgaggtggtgctgaacgaccgcctggggaagaaggtgcgggtgaagtgcaacgaggacgacaccatcggcgacctcaagaagctggtggcggcgcagacggggacgcgccccgagaagatccgcatccagaagtggtacaacatctacaaggaccacatcacgctcaaggactacgagatccacgacgggatggggctcgagctctactacaactaggcgccctgaccccaaccgtgccctgatgtaaggttaatccgaattctgaagtcatgggtgcgcttccagtcacagcgtctttagctaacaagctcgcatacatataggcaacttgagtgagctatgtagtacggatatggttgtgtggcaaactgccaatgactattgacatccttgcatatattgacatgtgacaaggatcaacctgcaaaactggtgccctgctactcgcagaccttattatcttaaataacacaggtggtgtgtttttcaattatgtgaaaaaaaaaaaaaaaa

SEQ ID NO: 7778 - protein, 73 aa, Zea mays
  misc_feature: Ceres CLONE ID no. 1418906
  misc_feature: Ceres CDNA ID no. 36593244
  misc_feature (2)..(71): Pfam Name: ubiquitin PFAM Desc: Ubiquitin family
  misc_feature: Homolog of GI Number: 77553656 NR Desc: Ubiquitin family
  misc_feature: Homolog of GI Number: 77548651 NR Desc: Ubiquitin family
  misc_feature: Homolog of GI Number: 10177015 NR Desc: ubiquitin
  misc_feature: Homolog of GI Number: 50910751 NR Desc: ubiquitin
  misc_feature: Homolog of GI Number: 56501213 NR Desc: ubiquitin
  misc_feature: Homolog of GI Number: 23509060 NR Desc: ubiquitin
  misc_feature: Homolog of GI Number: 71026115 NR Desc: ubiquitin
  misc_feature: Homolog of GI Number: 65303474 NR Desc: ubiquitin
  misc_feature: Homolog of GI Number: 55648207 NR Desc:  similar to ubiquitin
  misc_feature: Homolog of GI Number: 63635471 NR Desc:  similar to Chain A
MIEVVLNDRLGKKVRVKCNEDDTIGDLKKLVAAQTGTRPEKIRIQKWYNIYKDHITLKDYEIHDGMGLELYYN

SEQ ID NO: 7779 - DNA, 603 bp, Zea mays
  misc_feature: Ceres CLONE ID no. 1418988
  misc_feature: Ceres CDNA ID no. 29191899
  CDS (60)..(476): REFERENCED BY SEQ ID NO: 7780
acagacgcatctttccattaaacaattcaccctctcttcaccaaactcatcgatcgataatggcacccaaggcggcagagaagaaaccggcggagaagaagccagctgagaaatccccggccgagaagcgtccaaaggcggagaagaagatctcaaaagaaggaggaagcgacaagaagaagaagaaggtgaagaagagcgttgagacgtacaagatctacatcttcaaggtcctcaagcaggttcaccccgacatcggaatctcgggtaaagcgatggggatcatgaacagtttcatcaacgacatattcgagaaactggcgcaggaatcatcgaagctcgctaggtacaacaagaagccgaccattacatcgagggagatccagacggcggttaggcttgtattgcccggagaactcgcgaaacacgccgtctctgaggggaccaaggcggttacgaaattcacaagcacttagggatttaaatgtttaggtttaattgttgtttggttgatgaatcgattgtattcggttagtgagatcatttgaatgaacaggtttctttttaatgaataacgattctctatcaaaaaaaaaaaaaaaa

SEQ ID NO: 7780 - protein, 138 aa, Zea mays
  misc_feature: Ceres CLONE ID no. 1418988
  misc_feature: Ceres CDNA ID no. 29191899
  misc_feature: No seed is being produced by the plant
  misc_feature: The plant flowers significantly late compared to wild-type.
  misc_feature: Useful for biocontainment applications
  misc_feature: Useful for making plants with modulated flowering time
  misc_feature (45)..(117): Pfam Name: Histone PFAM Desc: Core histone H2A/H2B/H3/H4
  misc_feature: Homolog of GI Number: 6729516 NR Desc: histone H2B
  misc_feature: Homolog of GI Number: 21592734 NR Desc: putative histone H2B
  misc_feature: Homolog of GI Number: 7635498 NR Desc: histone H2B
  misc_feature: Homolog of GI Number: 30024116 NR Desc: putative histone H4
  misc_feature: Homolog of GI Number: 2558962 NR Desc: histone H2B1
  misc_feature: Homolog of GI Number: 21536602 NR Desc: histone H2B
  misc_feature: Homolog of GI Number: 3021489 NR Desc: histone H2B
  misc_feature: Homolog of GI Number: 82400146 NR Desc: histone H2B
  misc_feature: Homolog of GI Number: 21553526 NR Desc: putative histone H2B
  misc_feature: Homolog of GI Number: 3021483 NR Desc: histone H2B
MAPKAAEKKPAEKKPAEKSPAEKRPKAEKKISKEGGSDKKKKKVKKSVETYKIYIFKVLKQVHPDIGISGKAMGIMNSFINDIFEKLAQESSKLARYNKKPTITSREIQTAVRLVLPGELAKHAVSEGTKAVTKFTST

SEQ ID NO: 7781 - DNA, 1169 bp, Zea mays
  misc_feature: Ceres CLONE ID no. 1419604
  misc_feature: Ceres CDNA ID no. 40041406
  CDS (60)..(830): REFERENCED BY SEQ ID NO: 7782
cttcctctgcctctggtcaggtgtcgcggcggcagcaacggcaatccaattccactccaatggcggcctcgtcctccttcaagccgaacccgctgtcgctgagcgtgccggaccccgcgctcgaccgctggctccgggacagcggctacctggacctcctcgactccaccaccaccaccggaaggccgtcgtcgtcagcctcgggcccctccgccccctcctccgccgcctacagccccggcgccggccaggcttcctccggcgtcgcggccgacgtcctcgccttcgcgcgcaccctcgcctcgctcctcgcgctcaaccccttcgcgcgcctctccaccgccgacctggccgcacccaccccgtcctggtcgctcgccttcgtcggcccccccggcgccgcgtcctactcctggccgcccacgcccacccaggccaggctccgcgtccaggagaacttccgccggtacgcgcgcaactacgccgcgctcgccatcctcgtcttcgcgtgctgcctgtaccggatgccgatggctctgctgggcatgctggccagcctcgctgtctgggagggcgtgcgctactgccgggaccattgggacctcaccaccagagctccgggggttgcccaggctctgctgcactgtgcgcagattgccactgctgtgctactgtacgtctgcaacctacagttcgcgctggtgtacgccgttggggtgagctacgcactgatgctgctgcacgcctccctccggaggctgactactccgtcgagtctaccagacgctagcagcaacaagaacaggagggcgcagccgagacggagctagggtacgttacatgccgggcagtacagggcgctctacagactacaggcgagcgagatgtccatggctgtctagaaccgtgcatggttgatggtcccaaaagcgtcgccggctggtttgttggaagtttggaacagtgcacagcatgctgttgaggcggcgaacatggacgggtgaagaatacggccatcaggacatatatactgtcaccgaaaactccgagaggcatacgctttgtttagtttagtttttttttctttttttggtgtgtggagaaagataaggaagccaaaggtagtttgttcaaaaaaaaaaaaaaaaaaaataaaaaaaaaaaaaaaa

SEQ ID NO: 7782 - protein, 256 aa, Zea mays
  misc_feature: Ceres CLONE ID no. 1419604
  misc_feature: Ceres CDNA ID no. 40041406
  misc_feature (69)..(248): Pfam Name: PRA1 PFAM Desc: PRA1 family protein
  misc_feature: Homolog of GI Number: 67987177 NR Desc: 4Fe
  misc_feature: Homolog of GI Number: 6523547 NR Desc: hydroxyproline
  misc_feature: Homolog of GI Number: 76262498 NR Desc: pherophorin
  misc_feature: Homolog of GI Number: 6649857 NR Desc: kexin
  misc_feature: Homolog of GI Number: 50926032 NR Desc: OSJNBa0067K08.24
  misc_feature: Homolog of GI Number: 488731 NR Desc: chitinase
  misc_feature: Homolog of GI Number: 76262500 NR Desc: pherophorin
  misc_feature: Homolog of GI Number: 51214395 NR Desc: Protease
  misc_feature: Homolog of GI Number: 51228143 NR Desc: Protease
MAASSSFKPNPLSLSVPDPALDRWLRDSGYLDLLDSTTTTGRPSSSASGPSAPSSAAYSPGAGQASSGVAADVLAFARTLASLLALNPFARLSTADLAAPTPSWSLAFVGPPGAASYSWPPTPTQARLRVQENFRRYARNYAALAILVFACCLYRMPMALLGMLASLAVWEGVRYCRDHWDLTTRAPGVAQALLHCAQIATAVLLYVCNLQFALVYAVGVSYALMLLHASLRRLTTPSSLPDASSNKNRRAQPRRS

SEQ ID NO: 7783 - DNA, 560 bp, Zea mays
  misc_feature: Ceres CLONE ID no. 1420188
  misc_feature: Ceres CDNA ID no. 25447460
  CDS (72)..(386): REFERENCED BY SEQ ID NO: 7784
gggatcgtcttctatttcatcggcgagacaaaaccagatcgggattctctctcttatacccaacgcaagacatgaatctaggcttcgtaattggagtaatcggcgtcctgattctctcccacgccgcttattcaacaatccaatatagaggattgttgaagatcacggaggaagagttcaccggacctcccttgaatgttgttctggagttgatcgtgggactagctctttgtatgtgggctgctttgactttccctgggaagttcctctccattcaccctgactctgatgaaaacagggcggtttctttaccagataactctgatttcatgatattcaatcaccgtggccgcctcttcccaccagagatcaccatgaagttttgatttttcctcctttttttttttttatatcggacttcttagtcaaacactcatctgtccactgtaatgagatgttgtttccattgatattctaagtgatttccatcgatttgtgatttttagtgaaatattgtttagaaatagaaagtcaacataacgacaaaaaaaaaaaaaaaa

SEQ ID NO: 7784 - protein, 104 aa, Zea mays
  misc_feature: Ceres CLONE ID no. 1420188
  misc_feature: Ceres CDNA ID no. 25447460
  misc_feature: Homolog of GI Number: 57209584 NR Desc: OTTHUMP00000062347
  misc_feature: Homolog of GI Number: 57162563 NR Desc: transmembrane protein 32
  misc_feature: Homolog of GI Number: 58393198 NR Desc: ENSANGP00000010639
  misc_feature: Homolog of GI Number: 74009006 NR Desc:  similar to transmembrane protein 32
  misc_feature: Homolog of GI Number: 49255985 NR Desc: MGC80346 protein
  misc_feature: Homolog of GI Number: 62858009 NR Desc: LOC549307
  misc_feature: Homolog of GI Number: 72127581 NR Desc:  similar to transmembrane protein 32
MNLGFVIGVIGVLILSHAAYSTIQYRGLLKITEEEFTGPPLNVVLELIVGLALCMWAALTFPGKFLSIHPDSDENRAVSLPDNSDFMIFNHRGRLFPPEITMKF

SEQ ID NO: 7785 - DNA, 626 bp, Zea mays
  misc_feature: Ceres CLONE ID no. 1420425
  misc_feature: Ceres CDNA ID no. 25446111
  CDS (3)..(350): REFERENCED BY SEQ ID NO: 7786
agattccgacttcctggttcctgcagcaggatgcgttcgtgactccctacaccccagcgccgcttccgcgtgggatgatcgagctctcagcgccgccacacgcttcgcggtccccagcgccacgtgggatgaccagacgctcagcgccgccacacggtcgggctccccagcgccgcgtgggagtgggacgaccgtacgctcggcctgacgctcgacgctccctgccagatccgacttggcgctcctcgtctcgggtgactcgggtccggtgccgctcctccctctccgcctgtctcaacactccgcccgctcggctcctactatccttcactgtcgtggcaccgccgtgactagtcatctcagatggaattttcactgaaggcagggttttgatccttgaataatttatgcattgttcgatgggctcctgatactgccaggagtgacccttccactgctgctaacttcgagcttgatcaaaaggtctttctactcatatgcaaggtgtaagactatcgagttatgtggtatattggtgttgatcattcatgtaatcactttgaggctatgggtgtttgccttgctcatacttatttaatttgcttccatcaaaaaaaaaaaaaaaa

SEQ ID NO: 7786 - protein, 91 aa, Zea mays
  misc_feature: Ceres CLONE ID no. 1420425
  misc_feature: Ceres CDNA ID no. 25446111
MIELSAPPHASRSPAPRGMTRRSAPPHGRAPQRRVGVGRPYARPDARRSLPDPTWRSSSRVTRVRCRSSLSACLNTPPARLLLSFTVVAPP

SEQ ID NO: 7787 - DNA, 1375 bp, Zea mays
  misc_feature: Ceres CLONE ID no. 1420590
  misc_feature: Ceres CDNA ID no. 25891786
  CDS (139)..(1182): REFERENCED BY SEQ ID NO: 7788
attgaattgaatgatggtttcacagagcagaggaagcacgacgatttagcagggcttcgacgaaccccgatccaggtggttttccgtcgatctcgctctccccagatttcagaatcatccttgatcgttttctccgcgatgagttccaatacggcgtcgtcgagtgccggatcgggagattcttccgctgccaggaagaattcgaagcggcccaagtattccaagttcacacaacaggagcttccagcttgcaagcccattcttacgcctggctgggtgatttcgacatttttgatagtcagtgtcatctttattccccttggagttatctctcttttcgcttcccaggatgttgtggagatcgttgatcggtatgataatgattgcattcctgcacctgctaggactaacaaggttgcttttattcaaggagctgctcctaaatcttgtaaccgaactctaacagtgaccaagcgtatgaagcagcctatctatgtttactaccagcttgaaaacttctaccagaatcaccgaaggtatgtgaaaagcagaagtgattcacagctgagaagtccaaaattcgagaatcaaattagcgcatgcaagcctgaggatgatgctggtgggaagccgattgtgccatgtggtctcattgcttggagtctttttaatgatacctacactttatcaagaaataatacaccccttgctgtgaacaaaaaaggcattgcctggaagagcgacaaggagcacaagtttgggaacaaagtcttccccaagaattttcaaaaggggaacctcactggtggtgccactctaaatccagatataccgcttagtgaacaagaagatctcatcgtgtggatgagaactgcagcattgccaacatttagaaaactctacgggaagatagagaccgaccttgagaatggtgacaccatacaggttacgctgcagaacaactataacacttacagttttagtgggaagaagaagcttgttttgtcgacaacgagctggctgggtgggaagaacgatttcctcggcattgcttacctgacagttggcgggatctgcttctttttggcactcgcatttaccatcatgtaccttgtgaaacccaggcgacttggggatccgtcctacttgtcatggaatagaaatcctggtggaggtcgttaacaagcttggggagggagagagagctcagctctgctctgcgtgtgtaaatcttgtgtgtccatgtatacctactttacattgaaatccacatatttattactttgttgttgttccaaacattacttttgtcccaacaaacctctcctgttattttcttataaccattcacattcacagaaaaaaaaaaaaaaaa

SEQ ID NO: 7788 - protein, 347 aa, Zea mays
  misc_feature: Ceres CLONE ID no. 1420590
  misc_feature: Ceres CDNA ID no. 25891786
  misc_feature (65)..(335): Pfam Name: CDC50 PFAM Desc: LEM3
  misc_feature: Homolog of GI Number: 4966357 NR Desc:
  misc_feature: Homolog of GI Number: 42562089 NR Desc: LEM3
  misc_feature: Homolog of GI Number: 50905645 NR Desc: LEM3
  misc_feature: Homolog of GI Number: 52076505 NR Desc: LEM3
  misc_feature: Homolog of GI Number: 4835763 NR Desc: T8K14.13
  misc_feature: Homolog of GI Number: 50932413 NR Desc: putative membrane protein
  misc_feature: Homolog of GI Number: 19570056 NR Desc: similar to membrane protein common family
  misc_feature: Homolog of GI Number: 57094606 NR Desc:  similar to transmembrane protein 30A
  misc_feature: Homolog of GI Number: 38079829 NR Desc:  RIKEN cDNA 4933401B01
  misc_feature: Useful for delaying flowering time
  misc_feature: Useful for making ornamental plants with modified leaves
  misc_feature: Useful for making plants with increased biomass and foliage
  misc_feature: Useful for making plants with increased biomass and foliage
MSSNTASSSAGSGDSSAARKNSKRPKYSKFTQQELPACKPILTPGWVISTFLIVSVIFIPLGVISLFASQDVVEIVDRYDNDCIPAPARTNKVAFIQGAAPKSCNRTLTVTKRMKQPIYVYYQLENFYQNHRRYVKSRSDSQLRSPKFENQISACKPEDDAGGKPIVPCGLIAWSLFNDTYTLSRNNTPLAVNKKGIAWKSDKEHKFGNKVFPKNFQKGNLTGGATLNPDIPLSEQEDLIVWMRTAALPTFRKLYGKIETDLENGDTIQVTLQNNYNTYSFSGKKKLVLSTTSWLGGKNDFLGIAYLTVGGICFFLALAFTIMYLVKPRRLGDPSYLSWNRNPGGGR

SEQ ID NO: 7789 - DNA, 1552 bp, Zea mays
  misc_feature: Ceres CLONE ID no. 1420621
  misc_feature: Ceres CDNA ID no. 25446792
  CDS (166)..(1209): REFERENCED BY SEQ ID NO: 7790
gtcctccgcgctccgtgcctgccagcctgccactgctcggttctagaatccactccctgacctgtgcggcgctccgtgcctggctgccagcctgccactgctcggttctagaatccactccctgacctgtgcggcgttcccgtgcccggccggagtatcgatcgcatggcctgcgccggcgccgcgcagaaggtctcagcggtgctctaccactacccgtgcccggacggcgcgttcgcagcgctcgccgctcacctctatttttccggcgccgcccacccggtccgattcttccccaataccgtctacgaccccatcaggagtgattcacttccactggaagaaataaaagatgtttaccttcttgactttgtgggacctcctggttttgttgaagatatagcccctaaagtcgaaagaataacaatcctggaccatcataagaccgcttttgaaagtttgtgtgtgaatgccacacttgggcaaaatgtgaccaaggtgatagacatgcagcgtagtggtgcgacaattgcatttgacttctttagaaacaagctcttaacagaagttagcacctcacggggtaatgaaagtggtaaagatgtagccaaggtcaaatatgtacctgacaacaaggctgaaacagtacacaagctttttaagtttattgaagacggggacttatggagatggaaaattccaaatagcaaggccttcagcagtggacttaaagatttggacattgaattcaatgtcaatgcaaataataaattgtttgatcagttgttggagttggatcctgagcatgtcatttcccatggacaagcgacattattagagaagcaaagattaatagatgattgtttggagaaatcctatgaaatttccctgggatgtggccagtttgggagttgtctggctgttgatgctgatgctatttcaaatttgagaagcgaacttggaaatcaactagctagcaagagccgtgattttaatctaaggggtattggggctgttgtatacaaagttcctgagttgaataatgaccagatactgaaagtaagtctaagaagtttagaacaagaagacacaacctgtatctctcaggaatatggtggtgggggacatcggaatgcaagctcgtttattttgagtgtgactgagtttgacaggtggaaagtcggatcttctcgaccaaaaggtgcataaccatctggctttcttcattgctctacaagattaatgaagaaacacatgcagagggaacaaaaccccaaacttggggatgtgggacatgagaaacatcatagctgcatatcagacaattctcgacacttacgcagcattctgctatcatgccatatcttaccctatggcacttattaataggctgctatttgggcacttagttttacaaaatctgctgaaatcataattggagaactctacatgtctcacgtactggcttagacactgaacatattagtccttaaatgcgtctttttacattttatttatgcaagtgctactttgattaaaaaaaaaaaaaaaa

SEQ ID NO: 7790 - protein, 347 aa, Zea mays
  misc_feature: Ceres CLONE ID no. 1420621
  misc_feature: Ceres CDNA ID no. 25446792
  misc_feature: Homolog of GI Number: 25405983 NR Desc: protein F12M16.25
MACAGAAQKVSAVLYHYPCPDGAFAALAAHLYFSGAAHPVRFFPNTVYDPIRSDSLPLEEIKDVYLLDFVGPPGFVEDIAPKVERITILDHHKTAFESLCVNATLGQNVTKVIDMQRSGATIAFDFFRNKLLTEVSTSRGNESGKDVAKVKYVPDNKAETVHKLFKFIEDGDLWRWKIPNSKAFSSGLKDLDIEFNVNANNKLFDQLLELDPEHVISHGQATLLEKQRLIDDCLEKSYEISLGCGQFGSCLAVDADAISNLRSELGNQLASKSRDFNLRGIGAVVYKVPELNNDQILKVSLRSLEQEDTTCISQEYGGGGHRNASSFILSVTEFDRWKVGSSRPKGA

SEQ ID NO: 7791 - DNA, 781 bp, Zea mays
  misc_feature: Ceres CLONE ID no. 1421965
  misc_feature: Ceres CDNA ID no. 40351811
  CDS (92)..(502): REFERENCED BY SEQ ID NO: 7792
aaggttagggtttcgctcgaatcgactgatgcgttcgatgatgattcacgggggccatcctccacgcccttttcttgacatcatttgctagatggcgcgtaccaagcagaccgctcgcaagtccactggaggaaaggctcctaggaagcaactcgctacaaaggcagcccggaagtctgcacccacaactggaggagtgaagaagcctcaccgttaccgcccagggactgttgctcttcgtgagatccgcaagtaccagaagagcactgagttgctgattaggaagctgccgttccagaggcttgtgagggagattgctcaggatttcaagacggatctgcgcttccagagccatgccgtgcttgctctgcaggaggcagcagaggcctacctggttggtctcttcgaagataccaatctgtgcgcgatccatgccaagcgcgtgaccatcatgcccaaggacattcagctggcaagaaggatccgtggcgagagggcgtgagtctgtcgacgggaggaagaactctgcgctcgttttgtgtgttcgcctctctcaccctgtaagttttgtgaaaagataatctagtaaactgtacttggcctgtttgactgtagccgcagtagcgtatgcgcatactattggctgttgtcgtgtctggagtcttttatccatccattctactacttaataatcgggttgctgaacgtgtatccagacttaactgtgtgtttggctgtctgaacctctgaatcgttattgatgtcaaaaaaaaaaaaaaaa

SEQ ID NO: 7792 - protein, 136 aa, Zea mays; identical to SEQ ID NO: 30
  misc_feature: Ceres CLONE ID no. 1421965
  misc_feature: Ceres CDNA ID no. 40351811
  misc_feature (58)..(134): Pfam Name: Histone PFAM Desc: Core histone H2A/H2B/H3/H4

SEQ ID NO: 7793 - DNA, 854 bp, Zea mays
  misc_feature: Ceres CLONE ID no. 1422580
  misc_feature: Ceres CDNA ID no. 25401385
  CDS (78)..(683): REFERENCED BY SEQ ID NO: 7794
atcgtcttctagggttttaaggtttccgcacaattcacactctctctcactctcagcttaaagagcatatcatcatcatgactaccgaagagaaagagatcctcgccgccaaattggaagaacagaagatcgatcttgataagcctgaagtcgaggacgctgatgacaatgatgaggatgactctgacgatgatgacgacgctgagggacaagagggagagaccggaggcaagtcaaagcaaagcagaagtgagaagaagagtcgcaaagctatgctgaagctcggaatgaaacccatcactggtgtcagccgtgtcaccgtcaaaaagagcaagaatgtcatgtttgtcatatcaaaacctgatgtgttcaagagccctgcatcggacacatacgtgatcttcggagaggccaagatcgaggacttgagctcgcagatccagtctcaagctgcagagcagttcaaggctccggatctcagcagcatgatctcaaagggtgagtcgtcgtccagcgctgcagtggtgcaggatgatgatgaggaggtcgacgaggaaggtgttgagccaaaggacgttgagttggtgatgactcaagcaggtgtgactaggccaaaggctgttaaggcgctcaaggctgctgatggagatatcgtctctgccatcatggagcttaccacctaaactcaaaatcttttcaacttaggtgtggcttaaatcgagttatgtccccgagattgtgtcaaaaaggattcgaaattttttgttttcatgttttctttgagtgattttcattgttgtattagtataaacctcgtaaattattgaatttcagtttgaaaaaaaaaaaaaaaa

SEQ ID NO: 7794 - protein, 201 aa, Zea mays
  misc_feature: Ceres CLONE ID no. 1422580
  misc_feature: Ceres CDNA ID no. 25401385
  misc_feature (162)..(199): Pfam Name: UBA PFAM Desc: UBA/TS
  misc_feature (58)..(116): Pfam Name: NAC PFAM Desc: NAC domain
  misc_feature: Homolog of GI Number: 48310641 NR Desc: At5g13850
  misc_feature: Homolog of GI Number: 6752882 NR Desc: nascent polypeptide associated complex alpha chain
  misc_feature: Homolog of GI Number: 50931251 NR Desc: putative nascent polypeptide associated complex alpha chain
  misc_feature: Homolog of GI Number: 34907258 NR Desc: putative nascent polypeptide associated complex alpha chain
  misc_feature: Homolog of GI Number: 18377570 NR Desc: alpha NAC
  misc_feature: Homolog of GI Number: 20465565 NR Desc: putative alpha NAC protein
  misc_feature: Homolog of GI Number: 6561948 NR Desc: alpha NAC
  misc_feature: Homolog of GI Number: 34902238 NR Desc: Putative nascent polypeptide associated complex alpha chain
  misc_feature: Homolog of GI Number: 56784713 NR Desc: alpha NAC
  misc_feature: Homolog of GI Number: 34911462 NR Desc: putative nascent polypeptide associated complex alpha chain
MTTEEKEILAAKLEEQKIDLDKPEVEDADDNDEDDSDDDDDAEGQEGETGGKSKQSRSEKKSRKAMLKLGMKPITGVSRVTVKKSKNVMFVISKPDVFKSPASDTYVIFGEAKIEDLSSQIQSQAAEQFKAPDLSSMISKGESSSSAAVVQDDDEEVDEEGVEPKDVELVMTQAGVTRPKAVKALKAADGDIVSAIMELTT

SEQ ID NO: 7795 - DNA, 698 bp, Zea mays
  misc_feature: Ceres CLONE ID no. 1423828
  misc_feature: Ceres CDNA ID no. 25447055
  CDS (273)..(395): REFERENCED BY SEQ ID NO: 7796
attcgtttccgcatcggcgtatctcccggcggcaaaggcgctctcctcccgacctccctgcggtgccggtacgacagtcgacagacttcaagaaggagcttaggaccctcaacagagagcttcaattgcatattttggagctggcagatatattagttgagagaccatctcaatatgctcgtagggtagaagatattacgctcatattcaagaacttacatcatcttctcaattccttacgacctcatcaggcaagggccacattgattcacatgcttgagagccaaattcggcaccgcaaggaagcaattgaagatataaagcagaggagggaggaagcgcaaaaaatgcttggggaatcactgcttatcttggatggaagtcaaactaactaggctgacgccgtcaagttagttggttcaagaccgattcttctatgagttaaagagtgttagtagaagacaagatgtgtctggattgttgtggtatcatctgttgtggcttgtggtatttccagctttgataactgaattttcttacttctatggtctatgttagcaaagttggattactttcttacttccattggtactcaactgcatcatgggttactttcttgtggaagtgtatattgtgagattgattcctcgtggccagcttaattgaaaggttgttatatgcgaaaaaaaaaaaaaaaa

SEQ ID NO: 7796 - protein, 40 aa, Zea mays
  misc_feature: Ceres CLONE ID no. 1423828
  misc_feature: Ceres CDNA ID no. 25447055
  misc_feature (1)..(35): Pfam Name: MED7 PFAM Desc: MED7 protein
  misc_feature: Homolog of GI Number: 50929385 NR Desc: OSJNBa0084K01.4
  misc_feature: Homolog of GI Number: 21618057 NR Desc: transcription co
  misc_feature: Homolog of GI Number: 20453355 NR Desc: At5g03505/C320EPL23M
  misc_feature: Homolog of GI Number: 15242771 NR Desc: transcriptional co
  misc_feature: Homolog of GI Number: 66526464 NR Desc:  similar to ENSANGP00000016924
  misc_feature: Homolog of GI Number: 6474201 NR Desc: Hypothetical nuclear protein
  misc_feature: Homolog of GI Number: 49119407 NR Desc: MGC82657 protein
  misc_feature: Homolog of GI Number: 58382667 NR Desc: ENSANGP00000016924
  misc_feature: Homolog of GI Number: 30585209 NR Desc: Homo sapiens cofactor required for Sp1 transcriptional activation
  misc_feature: Homolog of GI Number: 61884739 NR Desc:  similar to Cofactor required for Sp1 transcriptional activation subunit 9
MLESQIRHRKEAIEDIKQRREEAQKMLGESLLILDGSQTN

SEQ ID NO: 7797 - DNA, 944 bp, Zea mays
  misc_feature: Ceres CLONE ID no. 1423851
  misc_feature: Ceres CDNA ID no. 40351812
  CDS (130)..(636): REFERENCED BY SEQ ID NO: 7798
agagaactttattctctcctctaacctctcaacttctgctggatctctccagcagacggaagatcttcttcggagagattcttaggggaccgaacgatctatcgatcaaggcttctcgggcaaacagaaatggaccacgacaagacaggatgccaaagcccacccgagggtcccaagctatgcatcaacaactgcggtttcttcggaagcgctgccacaatgaacatgtgttccaagtgccacaagactatcttgtttcaacaggaacagggggccaagcttgcatctgcagtgtctggatcacccagcaacatcctaaaggaaaccttcactgctgatttggttgatgctggaaccaaatccatcgagcctgtggctgtctctgtacaagctgttgcagaggtagtagcaccagaagaagctgcagcaaaaccaaaggaagggcccagccgatgtactacttgcaacaaacgggttggtttgactggattcaaatgtcgatgtggtgacctcttctgtggtacgcaccgctatgcagacgttcataactgctctttcgattaccatgttgctgcgcaagaagctatagccaaagcgaacccggttgtgaaggcagataagcttgacaagatctgaaactcagaaactatgtttccttcttcatgtccgtgtctggttcaagcgtgtgttgatctttagcttcttccgttctctctgccagtatctgtggtgtgaaaactttctatattatcttgtgtttgcaagcagagaagtgtgctcttaaatatatatatatgctttgatgtgtttctctttttttttttttaatattatttatgagcactatggtttggttatgtttactcctttgggtctgtatcatattgagattgtaactttagctatatgaagatttttcttaaaagctaaaaaaaaaaaaaaaa

SEQ ID NO: 7798 - protein, 168 aa, Zea mays
  misc_feature: Ceres CLONE ID no. 1423851
  misc_feature: Ceres CDNA ID no. 40351812
  misc_feature (109)..(149): Pfam Name: zf PFAM Desc: AN1
  misc_feature (15)..(39): Pfam Name: zf PFAM Desc: A20
MDHDKTGCQSPPEGPKLCINNCGFFGSAATMNMCSKCHKTILFQQEQGAKLASAVSGSPSNILKETFTADLVDAGTKSIEPVAVSVQAVAEVVAPEEAAAKPKEGPSRCTTCNKRVGLTGFKCRCGDLFCGTHRYADVHNCSFDYHVAAQEAIAKANPVVKADKLDKI

SEQ ID NO: 7799 - DNA, 895 bp, Zea mays
  misc_feature: Ceres CLONE ID no. 1424215
  misc_feature: Ceres CDNA ID no. 36701838
  CDS (116)..(487): REFERENCED BY SEQ ID NO: 7800
acaacaccagaatccgcgaatcacagacgcgtctatctcagcttgctgcgctgcactaccctgccctgccatcatatcgtacgtgagcccggccgagcgagagcgagggagaggcatggctgctccgaagctcgcgacgctggcgctggccgtgctcctggcggcgaccgtggtggctcccccggccgcggtgcgcgcggcgatgtcgtgttccaccgtgtacagcacgctgatgccgtgcctgccgttcgtccagatgggcggggccatgccgccccagccgtgctgcggcggcatccgcagcctgctgcagcaggccaacaacacccccgaccgccgcaccatctgcggctgcctcaagaacgtcgccaacggcgccaacgggagcggcacctacatcagccgcgccgccgcgctgcccagcaagtgcggcgtcgccctgccgtacaagatcagcaccaacgttaactgcaacacgattaattaaatgaggcgtcctgtgcgcgtccgggcgaggaatgcatgcatggcggagagtaataaagtaatgctactggtattttaagctagatcgaggtgtgcctgtctctagtcatttatggtgtttagcaatcgtctacacagttcgtaaacggtgtatcgtggatgcatgttgccgcgagcagagtacgtaggcatgaaccgatgtgtgcgcttctgtctgtgtactctctctatgtagtaatgtgtggccagtgggtgctttgatccagatgtattcgctcgtgagtggtgagtcgtggaagttgatcgtttcagtatcattaccgtgtattctttcttttacatgcgattctgaaaagggacctgcacgaagttccagtatacgacgttgccgcgaaaaaaaaaaaaaaaa

SEQ ID NO: 7800 - protein, 123 aa, Zea mays; identical to SEQ ID NO: 6812
  misc_feature: Ceres CLONE ID no. 1424215
  misc_feature: Ceres CDNA ID no. 36701838
  misc_feature (32)..(119): Pfam Name: Tryp_alpha_amyl PFAM Desc: Protease inhibitor/seed storage/LTP family
  misc_feature: Homolog of GI Number: 56201992 NR Desc: putative lipid transfer protein
  misc_feature: Homolog of GI Number: 34907830 NR Desc: putative lipid transfer protein
  misc_feature: Homolog of GI Number: 56713109 NR Desc: type 1 non
  misc_feature: Homolog of GI Number: 6492243 NR Desc: lipid transfer protein
  misc_feature: Homolog of GI Number: 42374744 NR Desc: lipid
  misc_feature: Homolog of GI Number: 48526017 NR Desc: lipid transfer protein 1 precursor
  misc_feature: Homolog of GI Number: 49659943 NR Desc: lipid transfer protein
  misc_feature: Homolog of GI Number: 6782436 NR Desc: lipid
  misc_feature: Homolog of GI Number: 77553487 NR Desc: nonspecific lipid
  misc_feature: Homolog of GI Number: 49659947 NR Desc: lipid transfer protein

SEQ ID NO: 7801 - DNA, 665 bp, Zea mays
  misc_feature: Ceres CLONE ID no. 1424470
  misc_feature: Ceres CDNA ID no. 25445929
  CDS (46)..(477): REFERENCED BY SEQ ID NO: 7802
gatcgttcaatctgcgagaagaagaagaaggtgaaagtttagcagatggggaaagacgcaaagtctggtgggaagggtaagggaaagcaagcaagtggcagtgatgatgctgctgcctccaagggtaaaggcaaatctggaaaagccgctgatggtcttggaacatgcacttatgttaaagctagacatgttttgtgcgaaaagcaagggaagatcaacgaggcatacaaaaagttgcaggatggttggttgagcaatggagacaaggttcctcctgctgagtttgcaaagattgcagcagagtactcggagtgcccgtccgggaaaaaaggaggagatcttggatggttccctagaggaaagatggctggtccattccaagatgttgccttcaacactcctgttggtgtcaccagtgcccccttcaaatctacgcacggataccatattatcttgtctgaaggaaggaagaactgacagattacatatctgaaatgctctgctctactcttgtggaagtcacttgctagttgtttactgtaacctatatataaaaaaaactcagcctttgttgttctggttaaaatgtttgcttcaaattgttaacaaatcttctctgccgttttgaataatgaatttctcaaaggctaaaaaaaaaaaaaaaa

SEQ ID NO: 7802 - protein, 143 aa, Zea mays
  misc_feature: Ceres CLONE ID no. 1424470
  misc_feature: Ceres CDNA ID no. 25445929
  misc_feature (77)..(140): Pfam Name: Rotamase PFAM Desc: PPIC
  misc_feature: Homolog of GI Number: 64213910 NR Desc: putative peptidyl
  misc_feature: Homolog of GI Number: 50252332 NR Desc: putative peptidyl
  misc_feature: Homolog of GI Number: 56474474 NR Desc: peptidyl
  misc_feature: Homolog of GI Number: 31206735 NR Desc: ENSANGP00000010568
  misc_feature: Homolog of GI Number: 47683021 NR Desc: PIN4 protein
  misc_feature: Homolog of GI Number: 38679892 NR Desc: protein
  misc_feature: Homolog of GI Number: 51762910 NR Desc: similar to PIN4 protein
  misc_feature: Homolog of GI Number: 62739712 NR Desc: Protein
  misc_feature: Homolog of GI Number: 75773864 NR Desc: PIN4 protein
  misc_feature: Homolog of GI Number: 30584149 NR Desc: Homo sapiens protein
MGKDAKSGGKGKGKQASGSDDAAASKGKGKSGKAADGLGTCTYVKARHVLCEKQGKINEAYKKLQDGWLSNGDKVPPAEFAKIAAEYSECPSGKKGGDLGWFPRGKMAGPFQDVAFNTPVGVTSAPFKSTHGYHIILSEGRKN

SEQ ID NO: 7803 - DNA, 798 bp, Zea mays
  misc_feature: Ceres CLONE ID no. 1424924
  misc_feature: Ceres CDNA ID no. 40041407
  CDS (1)..(549): REFERENCED BY SEQ ID NO: 7804
aacccctcgtctccctccccagatccaaatcgcgcaggaccaggcatcccatccaggcggttattggtcttcttgcgtgcgcaggtgagccctctccctctctccctcctctgcgtgctccctttttttttcgatcaagccgctgtgccgtggccatgtcccctgcggcagggcgtcttcaatccatggctgcctcccctgcgtgctccctctattttcctcggtcggcggcgcggtgtggccaggcccgacgtcctcgggcgcggcgtcccggcgcggccagcgcgcggcagcctgcgcggctcgtccagcgcgacgcgggcgaccccagcaccccggcgtgcaggccccgcgcgccctcgcactgctccctcgcgcggtcgagctgtccctacgcaggcccctgtacgtgtgtttgtacgcggctgcattctccgtgcggctgctcaccacgccgtgctggcccctgcggtgtttgcctctcctgttagcgcggtggtccaaggctcccggcgagatcccctggtggccgatttcttgttccattagtgcccaggtcggcctcccttctctccatgctgctggcgagggagtttttcatttgtgatccatcgtgaggagagaaaggaagaagctagccacatgtgatcctaagcttgggatcttctatagctgtgtttcgtgtgaccatatgtgtggccagcctctagccaataataattagccatgtcgattaaattccgtaaagtactaaataattaatatatgtcaagttataaatcaaaaaaaaaaaaaaaa

SEQ ID NO: 7804 - protein, 111 aa, Zea mays
  misc_feature: Ceres CLONE ID no. 1424924
  misc_feature: Ceres CDNA ID no. 40041407
MSPAAGRLQSMAASPACSLYFPRSAARCGQARRPRARRPGAASARQPARLVQRDAGDPSTPACRPRAPSHCSLARSSCPYAGPCTCVCTRLHSPCGCSPRRAGPCGVCLSC

SEQ ID NO: 7805 - DNA, 679 bp, Zea mays
  misc_feature: Ceres CLONE ID no. 1424939
  misc_feature: Ceres CDNA ID no. 25446112
  CDS (81)..(425): REFERENCED BY SEQ ID NO: 7806
catcccgaagtcaccgcgctgagctccaaagaatctagcagctaggagcaggccgtgtatacgccatccaccacggcaacatgtgctccggctcctggtcctggagcagcagcaagaagcgcccgtctcttgttgtcgtcaacctcaagcggcagcagctgcagaagacgccgccgccgacgccgcctcgtgcctcagttgctatcaggaggaagaggctgaggctgaggaggttgagagccggagcagaggccatggagatggtgaacctgaagctctacctggagaaccggtgcatcatcgcggagaacgagaggctgcgggagagggccagcgcgctccgccgcgagaacctcgcgctgctccaggacctgtccaagacgccggccgtgccagaggcaggagcgggagctggagctgcgtgagattgcttcctcttgctgcctgctgagcatggagtagctagcttagcttgcgttccctcgctggcgcttgtgctagttgcgtgggcaggacagcggactcctaggtatctatctgcttggctgctccgccatgtctgtgctctgctgtctgctcatacatcaccaggctcctggagctctcttgggtgctctgtgccatggtgtttgtacattatatataagtgcgcggattaactagaaaaaaaaaaaaaaaa

SEQ ID NO: 7806 - protein, 114 aa, Zea mays
  misc_feature: Ceres CLONE ID no. 1424939
  misc_feature: Ceres CDNA ID no. 25446112
MCSGSWSWSSSKKRPSLVVVNLKRQQLQKTPPPTPPRASVAIRRKRLRLRRLRAGAEAMEMVNLKLYLENRCIIAENERLRERASALRRENLALLQDLSKTPAVPEAGAGAGAA

SEQ ID NO: 7807 - DNA, 667 bp, Zea mays
  misc_feature: Ceres CLONE ID no. 1425326
  misc_feature: Ceres CDNA ID no. 25447056
  CDS (105)..(353): REFERENCED BY SEQ ID NO: 7808
aattccccatcgcgataggcccgttcgcacgaatcactgctctgctttcaccccccgcatcgaacctcacccccgatctgatcgaatcgaaggctgcggcggcgatgggcggtgaccatggcggtgggcacgccggcggcgacttccgccagaaggtatggagcatgacgggcggcccctactgccgccccgtccactggcgccgtaacaccgccatcgccatgttcggcgtcttcctcatctgcatccccatcgctatgaagtccgcagagctcgagcaacgcccgcatcacccagtccggccaatcccatctcaactgtggtgcaaaaactttggtaagaaggaatactgaaggaccctccaactagcatgaagtgtgggcaccttgcttttgccttctttttgtggaaacctgtgcctagccataatgctgggttaagtgttaggagcatctctggaatgcttcgcgtagtatcttttgattcttctttccttttgttgtctcaatcgtgttacatgagaaatgtctgatgaactcaaataatgaaccggtgattcaaaagcctgtgatgaatttactcgagggttttgatcatgtaattgtaaacatggcatgtcgtctgcacacttaatgttgaagcttgattcataaaaaaaaaaaaaaaa

SEQ ID NO: 7808 - protein, 82 aa, Zea mays
  misc_feature: Ceres CLONE ID no. 1425326
  misc_feature: Ceres CDNA ID no. 25447056
MGGDHGGGHAGGDFRQKVWSMTGGPYCRPVHWRRNTAIAMFGVFLICIPIAMKSAELEQRPHHPVRPIPSQLWCKNFGKKEY

SEQ ID NO: 7809 - DNA, 508 bp, Zea mays
  misc_feature: Ceres CLONE ID no. 1426754
  misc_feature: Ceres CDNA ID no. 36704584
  CDS (78)..(353): REFERENCED BY SEQ ID NO: 7810
atactatatattagacataccggtattattgttcttagacatcgcacaagactcttgtcaacaagaccaacaacaggatgaggactgccgtgcatgctgcgctttgcattgtgcttgtgataatgtcttcaacactgtcatcttgcgaggacgatgagaaggtatctatcgcatgtgacacaggatgcaatgccgcgatctcccgtctcaaatgcttcctgatggcctattctgaagggaaagtgttggtcagcagcaactgcgaaacgccgaccaggtgcggctgcgtgtttcgtcacaaacaagatgcagcccttatcgccggcgacgttggcaacaaaaagggatactgatggcagacgtgtacttcttggttgaataatactgctagaattaatatgggcaccaacgaaatatctataatgttattcttcagtgtaatgcttccagcatgttctgatttagtttaactaaatatctatctttccccctaaaaaaaaaaaaaaaa

SEQ ID NO: 7810 - protein, 91 aa, Zea mays; identical to SEQ ID NO: 5620
  misc_feature: Ceres CLONE ID no. 1426754
  misc_feature: Ceres CDNA ID no. 36704584

SEQ ID NO: 7811 - DNA, 573 bp, Zea mays
  misc_feature: Ceres CLONE ID no. 1426920
  misc_feature: Ceres CDNA ID no. 36704585
  CDS (62)..(388): REFERENCED BY SEQ ID NO: 7812
gtctccgtgagcctcatcttcgttcggtctctagtatacacaccgattgttactcaacctcatggcgccaaagaaggacaaggttccaccaccatcatcgaagccggccaaatccggaggtggaaaacagaagaagaagaagtggagcaagggaaagcaaaaggagaaggtgaacaacatggtgttgtttgatcaggctacttacgacaagcttctcactgaagctcccaagttcaagctcatcaccccttccattctctccgaccgtatgaggatcaacgggtctctagcaaggaaggctattagggagctaatggcgaaaggtgtgatcaggatggtcgctgctcactcgagccagcagatctacactcgtgccaccaacacctaaacagattaactctgtcgatggtttggttctccagtctcatctcagtttctgctttttgctgtatacattaatcttcagagctcttctttatttggtttttctgtactcctttgtattcgagaaactcttttttgggattatatgtctacttaattcagaatcattttctaaaaaaaaaaaaaaaa

SEQ ID NO: 7812 - protein, 108 aa, Zea mays
  misc_feature: Ceres CLONE ID no. 1426920
  misc_feature: Ceres CDNA ID no. 36704585
  misc_feature (1)..(106): Pfam Name: Ribosomal_S25 PFAM Desc: S25 ribosomal protein
  misc_feature: Homolog of GI Number: 21553704 NR Desc: ribosomal protein S25
  misc_feature: Homolog of GI Number: 4567232 NR Desc: 40S ribosomal protein S25
  misc_feature: Homolog of GI Number: 21617899 NR Desc: ribosomal protein S25
  misc_feature: Homolog of GI Number: 79322680 NR Desc: structural constituent of ribosome
  misc_feature: Homolog of GI Number: 435679 NR Desc: ribosomal protein S25
  misc_feature: Homolog of GI Number: 51979721 NR Desc: PREDICTED P0562A06.14 gene product
  misc_feature: Homolog of GI Number: 52077174 NR Desc: putative 40S ribosomal protein 25S
  misc_feature: Homolog of GI Number: 62701664 NR Desc: S25 ribosomal protein
  misc_feature: Homolog of GI Number: 33590374 NR Desc: 40S ribosomal protein S25
  misc_feature: Homolog of GI Number: 14276683 NR Desc: ribosomal protein S25
MAPKKDKVPPPSSKPAKSGGGKQKKKKWSKGKQKEKVNNMVLFDQATYDKLLTEAPKFKLITPSILSDRMRINGSLARKAIRELMAKGVIRMVAAHSSQQIYTRATNT

SEQ ID NO: 7813 - DNA, 570 bp, Zea mays
  misc_feature: Ceres CLONE ID no. 1427145
  misc_feature: Ceres CDNA ID no. 40351813
  CDS (62)..(388): REFERENCED BY SEQ ID NO: 7814
gtctccgtgagcctcatcttcgttcggtctctagtatacacaccgattgttactcaacctcatggcgccaaagaaggacaaggttccaccaccatcatcgaagccggccaaatccggaggtggaaaacagaagaagaagaagtggagcaagggaaagcaaaaggagaaggtgaacaacatggtgttgtttgatcaggctacttacgacaagcttctcactgaagctcccaagttcaagctcatcaccccttccattctctccgaccgtatgaggatcaacgggtctctagcaaggaaggctattagggagctaatggcgaaaggtgtgatcaggatggtcgctgctcactcgagccagcagatctacactcgtgccaccaacacctaaacagattaactctgtcgatggtttggttctccagtctcatctcagtttctgctttttgctgtatacattaatcttcagagctcttctttatttggtttttctgtactcctttgtattcgagaaactcttttttgggattatatgtctacttaattcagaatcattttctaaaaaaaaaaaaa

SEQ ID NO: 7814 - protein, 108 aa, Zea mays; identical to SEQ ID NO: 7812
  misc_feature: Ceres CLONE ID no. 1427145
  misc_feature: Ceres CDNA ID no. 40351813
  misc_feature (1)..(106): Pfam Name: Ribosomal_S25 PFAM Desc: S25 ribosomal protein

SEQ ID NO: 7815 - DNA, 887 bp, Zea mays
  misc_feature: Ceres CLONE ID no. 1427269
  misc_feature: Ceres CDNA ID no. 40351814
  CDS (107)..(601): REFERENCED BY SEQ ID NO: 7816
agttgccatctcgcaaagtcgcaataacttgtcttctcgaatcggctgcaaccccaccccagaccccaccgccgccgccgctagggttttggggtgaggatcgccgatgtcgacggctcccaggcgtcccttccgaggccgcggcgccatgccctcgagcaccggctacgtccgccgcggccccgccccaggctccgccgacgccgccaagcccctgcgcaagcccgtcttcaccaccgtcgaccagcttcgcccccagacacacggtcacactctcacagcccgcgtcattgccgtccgcaccgtcctcgacaagccctccacgcacctcggccgcacccgcgtcgccgagtgcctcgtcggagacagcaccggcaccgtcctcgtcaccgcccgcaacgaacaggttgaccttttgaagccagatacaacagtgatcttccgcaatgccaagattgatatgttcaagggcaccatgagactggcggtggacaagtggggccggattgaggtgactgattcttctgttttcaaggtgaatgaagacaacaacatgtcactggtggagtacgagctggtggatgtggatgaagaggagtgagctgaagcgatattgcattgccatctgttgggccaagtcgtgctgcggatatgtatttccagctaaaggagggcggtagcgtttaggcttctatctagttatttattattattattatcctggaaggctggcgattgggacggttagttttaagaccatcctaaagaagcacgtcaaattatgtacatcagcattaggtgttctgtctgactgatgctttctgttccgcgacgccgaagtctatcctaatgctactacttttttccctctcaaaaaaaaaaaaaaa

SEQ ID NO: 7816 - protein, 150 aa, Zea mays
  misc_feature: Ceres CLONE ID no. 1427269
  misc_feature: Ceres CDNA ID no. 40351814
MPSSTGYVRRGPAPGSADAAKPLRKPVFTTVDQLRPQTHGHTLTARVIAVRTVLDKPSTHLGRTRVAECLVGDSTGTVLVTARNEQVDLLKPDTTVIFRNAKIDMFKGTMRLAVDKWGRIEVTDSSVFKVNEDNNMSLVEYELVDVDEEE

SEQ ID NO: 7817 - DNA, 1090 bp, Zea mays
  misc_feature: Ceres CLONE ID no. 1427308
  misc_feature: Ceres CDNA ID no. 40351815
  CDS (104)..(664): REFERENCED BY SEQ ID NO: 7818
aactactccgtcactttgtttgcaaagctcctcctcgatccatcgatcactgcaccggccggcggcaccgcgctcgcaggggctagccaacgagacggcagcaatggcggaccgtgaccgcagcggcatctacggcggcgcccacgccacctacgggcagcagcagcagcagggaggaggcgggcgcccgatgggtgagcaggtgaagggcatgctccacgacaaggggccgacggcgtcgcaggcgctgacggtggcgacgctgttcccgctgggcgggctgctgctggtgctgtcggggctggcgctgacggcctccgtggtggggctggccgtggccacgccggtgttcctgatcttcagccccgtgctggtccccgccgcgctgctcatcgggacggccgtcatggggttcctcacgtcgggcgcgctggggctcgggggcctgtcctcgctcacgtgcctcgccaacacggcgcggcaggcgttccagcgcaccccggactacgtggaggaggcgcaccgcaggatggcggaggccgcggcgcacgcgggccacaagaccgcgcaggcaggccaggccatccagggcagggcgcaggaggccggcgccgggggaggtgcaggtgccggcgctggcggcggcggcagggcttcctcgtaagcaagtcatccatgcatggattatggatagatgcgcgcgtgcgtgtctatcagtatcagcagccagcagggtcgtcgcggaatgctgtgttcctgtacgtgtgggtgaccgtccttccgtccttcgtctttctccccccgagtgtgtgttacgtatgtcctggtgttcgtcgtgtgtgttcatcgccgctccagttgaattccggtgtctgttcatcgccgctccaggtcgtagatgtgaatatactttgctaggggaataagtgataagtctgtctggaaggtaatgtttgagctttgctagtgtggctgggcactctggtcactggttgtgttgtgcatgcatcagctgtatgatcgtcgtctgttgtggaaaattggtcaatgtattctcttgctgaataatttgtgaaaaaaaaaaaaaaaa

SEQ ID NO: 7818 - protein, 186 aa, Zea mays; identical to SEQ ID NO: 4702
  misc_feature: Ceres CLONE ID no. 1427308
  misc_feature: Ceres CDNA ID no. 40351815
  misc_feature (44)..(161): Pfam Name: Oleosin PFAM Desc: Oleosin

SEQ ID NO: 7819 - DNA, 1225 bp, Zea mays
  misc_feature: Ceres CLONE ID no. 1428026
  misc_feature: Ceres CDNA ID no. 36593108
  CDS (487)..(903): REFERENCED BY SEQ ID NO: 7820
gctcactcgctggtcgttgcctgctgcggattgcccccactcactccgctgctgatatttcgtttggttctcctttccgtcttgtccgtcgccgaggccttccgctcgctcggtcgctccccagctccagcaggcagatcagatccatccaaccacgaacaggaaggtgagcgccgggaacgagccctccgtcctcctactagctgcgatccgtagccttgcgtcgctttcgcgcctagatcgccacgttctagatctgtggtgttttactttcccgggtgcgggtggtcgaatccttccatccaccaggagagctcgtgggttcgttttggttttttcggtgccgtgagccagaatacgaacgaagggggcttgtctttgattcgctcggtctcccctgtgcccgtgatctgatatacgtccggatctgtctgctgtaatcatcaggaaggtaggaggcctgaggggctgggctgaagttgaaccatgagtgccgtcgcggtttcgtcgtcgctgaacccgaacgcgccgctcttcatcccggcggcgctgctgcaggtggaggacttctcgccgcagtggtgggacctcatcaccaccaccgcctggttccgcgaccactggtcccgcgagcacgcccacctggacgagatagccgagcagctcgagttggtcgccctccttgcctacgatgaggatgaggacctcttctacggcgagcaggcccccgccgccgccgcccttaagacagattcggtgctcaaggcgctgaacttgggctccccgaagagcggcgacgccccgcgggggttccgggagaaacccaggcactccgagaagccgaccaagtacgccggcagccccaagagcagcgctcctcgcgtgatccaccagcctcgctaggttcgctggctggccctggcctgatggggactcagtgactcacatggaaggctgctgcctctctagcagcatctgctcctggctgcagctgccgtcggcgtcgtggtctgtctgtcaaagtcgaagtaaaaaaacgtgagtagttgtactactgtagaagtttcttttgtatagcatgcacgtaagaaatgaccaaaaaatataacaagaatgcagctgttagtttactgctgctctcctcgtgtgtctagggtgcacttctgtaagcaaacgtatatgatgtgtaatggcagacagcttaatgttacaaaaaaaaaaaaaa

SEQ ID NO: 7820 - protein, 138 aa, Zea mays; identical to SEQ ID NO: 4766
  misc_feature: Ceres CLONE ID no. 1428026
  misc_feature: Ceres CDNA ID no. 36593108
  misc_feature (5)..(22): Pfam Name: PAM2 PFAM Desc: Ataxin
  misc_feature: Homolog of GI Number: 21592689 NR Desc: ERD15 protein
  misc_feature: Homolog of GI Number: 20197424 NR Desc: ERD15 protein
  misc_feature: Homolog of GI Number: 56481295 NR Desc: early response to dehydration 15
  misc_feature: Homolog of GI Number: 56481331 NR Desc: early response to dehydration 15
  misc_feature: Homolog of GI Number: 33415268 NR Desc: poly
  misc_feature: Homolog of GI Number: 56481323 NR Desc: early response to dehydration 15
  misc_feature: Homolog of GI Number: 8489786 NR Desc: dehydration
  misc_feature: Homolog of GI Number: 75755868 NR Desc: TO44
  misc_feature: Homolog of GI Number: 42571167 NR Desc: dehydration

SEQ ID NO: 7821 - DNA, 920 bp, Zea mays
  misc_feature: Ceres CLONE ID no. 1428031
  misc_feature: Ceres CDNA ID no. 25445930
  CDS (45)..(725): REFERENCED BY SEQ ID NO: 7822
ctccgcagttttttttgtctacagagaaaacctaagttgcaaccatgggtatttctcgtgactccatccacaagaggcgtgccactggaggcaagcagaagcaatggaggaagaagcgaaagtacgagatgggaagacagccagctaacaccaagctgtccagcaacaagacggtcagaagaatccgtgtccgtggaggcaacgtcaagtggcgtgcattgagactcgataccggtaactactcgtggggaagtgaagctgttacccgcaagaccagagtccttgacgtggtctacaatgcctccaacaacgagcttgtccgtaccaagacacttgttaagagcgccattgttcaggtcgacgctgctcctttcaagcagtggtacttgcagcactacggtgttgaggttggtcgcaagaagaagaatgctgctgcttctgccgccaagaaggaaggagaggatggcgaagatgctgctccagctgctgctgcacctgaggaggtgaagaagagcaaccatgtgcagaggaagattgagagccgtcaagaaggtcgcactcttgattcccacattgaggaccagtttgcaagtggacggttgttggcctgcatctcctcaaggcccggccaatgtggtcgtgctgatggatacattcttgaaggcaaagagcttgagttctaccagaagaaaattcagaagaagaagggcaagggtgccgcttaaagctcgttgtctgcttgaaagctttatgtttttttcatgaaacatgtttgagttttcagtttagtgtctgagaagcctatgttttggatttagctttgctatatggtatttcataaactcccgtcgttacaatgtgatttgtctcgtaatttttgtttaatttaaaaacgtctttgatgaaaaaaaaaaaaaaaa

SEQ ID NO: 7822 - protein, 226 aa, Zea mays
  misc_feature: Ceres CLONE ID no. 1428031
  misc_feature: Ceres CDNA ID no. 25445930
  misc_feature (1)..(205): Pfam Name: Ribosomal_S8e PFAM Desc: Ribosomal protein S8e
  misc_feature: Homolog of GI Number: 50908507 NR Desc: putative 40S ribosomal protein S8
  misc_feature: Homolog of GI Number: 32489919 NR Desc: OSJNBa0038P21.4
  misc_feature: Homolog of GI Number: 1498053 NR Desc: ribosomal protein S8
  misc_feature: Homolog of GI Number: 7440236 NR Desc: probable ribosomal protein S8
  misc_feature: Homolog of GI Number: 28416637 NR Desc: At5g59240
  misc_feature: Homolog of GI Number: 3264759 NR Desc: 40S ribosomal protein S8
  misc_feature: Homolog of GI Number: 82400150 NR Desc: putative 40S ribosomal protein S8
  misc_feature: Homolog of GI Number: 61654716 NR Desc: S8
  misc_feature: Homolog of GI Number: 29539344 NR Desc: ribosomal protein S8
MGISRDSIHKRRATGGKQKQWRKKRKYEMGRQPANTKLSSNKTVRRIRVRGGNVKWRALRLDTGNYSWGSEAVTRKTRVLDVVYNASNNELVRTKTLVKSAIVQVDAAPFKQWYLQHYGVEVGRKKKNAAASAAKKEGEDGEDAAPAAAAPEEVKKSNHVQRKIESRQEGRTLDSHIEDQFASGRLLACISSRPGQCGRADGYILEGKELEFYQKKIQKKKGKGAA

SEQ ID NO: 7823 - DNA, 1233 bp, Zea mays
  misc_feature: Ceres CLONE ID no. 1428190
  misc_feature: Ceres CDNA ID no. 40351816
  CDS (131)..(1042): REFERENCED BY SEQ ID NO: 7824
accgattcggcaaccgtgctaatcgatatccgtgcaattccacctcccgaaccgaatccctccaccgacccaaaccctagcgcgcacccttctccgtcgtcctttcctggcgcgcgggccggtgtcggagatgcgggcgctgctcgcggacggcgggatggcactggcggtgtcgccggaggccaacgagtcgtcgggtggcgctgcggtgtcgctagggccgttatcgtgggcgtcggagtgccacggggtactgtacaacctggccttgatgctgccatcgctggcctttgtggggttcctggcgtggcaggcgcggcggagcttccgtaggctcagctacggccgctctcacgtcgttgtcgtcgcgtactacgcgctcctctgggccgtcgccgtactcaacctcctctggtgcttcctgcaggcatggcaatgtatgcctgacagagcattctcttggaatgtactgtcactgtttacaaaatcaggaatgttattcttggaagtaagtctcatagcctttctacttcaaggaaatgatgccagcggttttgaatctttggcacggacctttgttttatctggagctgtagttgctgctgatgtattgctcaagactatatatgtttttggcttcggtgttcctttgttcattgatactgatcaaggaactagtgggaaatggggcctgtggattctccacaaacttgtgcttactggagtctatgggctgattgttttcatgcatcattcaagatggagagacaggctgcctgcaaaaccagcatactacaactatgtatgtgtgatgttgctactgaatggcatatcactgtttggatgtttcgttattgcaagtggagctggatttggtttatggttatataatctcacaaccgtatgctatcattctctttaccttcccctcctatatgtgactttcttagcagacttcttccaggaggaagacatgctcctagagaacgtctactattctgaaatgaaggatgctgggttcttcgatgctgactgggattaatccgtggctactgtgctgtatgacccatcccatatgaagtacgctgtatttgtttttattttatctgtgtactctcaacgtagaacaggaaatgtatgtagctagtcgtggtagtgaatggaaatatgtaatcttactgctgcatacttcagaaaatcagaattcaagtgattccaaaaaaaaaaaaaaaa

SEQ ID NO: 7824 - protein, 303 aa, Zea mays
  misc_feature: Ceres CLONE ID no. 1428190
  misc_feature: Ceres CDNA ID no. 40351816
MRALLADGGMALAVSPEANESSGGAAVSLGPLSWASECHGVLYNLALMLPSLAFVGFLAWQARRSFRRLSYGRSHVVVVAYYALLWAVAVLNLLWCFLQAWQCMPDRAFSWNVLSLFTKSGMLFLEVSLIAFLLQGNDASGFESLARTFVLSGAVVAADVLLKTIYVFGFGVPLFIDTDQGTSGKWGLWILHKLVLTGVYGLIVFMHHSRWRDRLPAKPAYYNYVCVMLLLNGISLFGCFVIASGAGFGLWLYNLTTVCYHSLYLPLLYVTFLADFFQEEDMLLENVYYSEMKDAGFFDADWD

SEQ ID NO: 7825 - DNA, 1027 bp, Zea mays
  misc_feature: Ceres CLONE ID no. 1428337
  misc_feature: Ceres CDNA ID no. 25401462
  CDS (104)..(850): REFERENCED BY SEQ ID NO: 7826
gtagtgggcactgtcgtgtgcccacgcacagtcacacggacatgttaatcctcttcccctggtgaggtctcgcggcggcgggcaaatccattcgacgatcccaatggcggcctcgtcgtcgttcaagccgaacccgctgtcgctgagcgtgccggaccccgcgctcgaccgctggctccgggacaccggttacctcgacctcctcgactccacccccaccggagggccgtcgtcagcctcagccccctccacctccagccccgccgcgggcccggactcatctggcgtcgcggtcgacatcctcgccttcgcgcgcaccctcgcctcgctcctcgcgctcaaccccttcgcgcgcctctccgccaccgacctggccgcgcccaccccttcctggtcgcttgccttcctaggcacccccggcgccgcgtcctactcctggccgcccacacccacccaggccaggctccgcgtccaggagaacgtccgccggtacgcgcgcaactacgccgcgctcaccatcctcgtcttcgcgtgctgcctgtaccggatgccgatggcgctgctggggatgctggtcagcctcgccgtctgggagggcgtgcgctactgccgggaccattggggtcttaccaccagggctccaggggttgcccaggctctgttgcactgtgcgcagattgctaccgccatactcctgtacgtctgcaacctacagtttgctctcgtgtacgccatcggattgagctatgcgttgatgatgttgcacgcctcgcttcggaagttgactccctcgagtctaccagatcccagcagcaagcagaacaggagggcgcagccgagacggatctaggttaacatgccggacagtacagatgttcatcaggacataaactggagtattatacgcacacactgaagctccgcccttggatttaatcctcagctttcttttgcaatataattttagctgatcgttgatcaaaattaataaaatttgtgctttgccttgtcaaaaaaaaaaaaaaaa

SEQ ID NO: 7826 - protein, 248 aa, Zea mays
  misc_feature: Ceres CLONE ID no. 1428337
  misc_feature: Ceres CDNA ID no. 25401462
  misc_feature (62)..(227): Pfam Name: PRA1 PFAM Desc: PRA1 family protein
  misc_feature: Homolog of GI Number: 67987177 NR Desc: 4Fe
  misc_feature: Homolog of GI Number: 51766362 NR Desc: similar to paternally expressed gene 3
  misc_feature: Homolog of GI Number: 21992 NR Desc: extensin
  misc_feature: Homolog of GI Number: 7441829 NR Desc: proline
  misc_feature: Homolog of GI Number: 91206 NR Desc: proline
  misc_feature: Homolog of GI Number: 7441828 NR Desc: extensin
  misc_feature: Homolog of GI Number: 21219450 NR Desc: putative secreted proline
  misc_feature: Homolog of GI Number: 28912428 NR Desc: serine
  misc_feature: Homolog of GI Number: 49182258 NR Desc: serine/proline
MAASSSFKPNPLSLSVPDPALDRWLRDTGYLDLLDSTPTGGPSSASAPSTSSPAAGPDSSGVAVDILAFARTLASLLALNPFARLSATDLAAPTPSWSLAFLGTPGAASYSWPPTPTQARLRVQENVRRYARNYAALTILVFACCLYRMPMALLGMLVSLAVWEGVRYCRDHWGLTTRAPGVAQALLHCAQIATAILLYVCNLQFALVYAIGLSYALMMLHASLRKLTPSSLPDPSSKQNRRAQPRRI

SEQ ID NO: 7827 - DNA, 1011 bp, Zea mays
  misc_feature: Ceres CLONE ID no. 1429555
  misc_feature: Ceres CDNA ID no. 40351817
  CDS (65)..(517): REFERENCED BY SEQ ID NO: 7828
ctagcttcagaacgaactaaaacccgcgatctgaagcgactagtcgaaggcggcggcggcggcgatggggagcgacctggagacggagaagaagaagaccccggtggcgctgatgcccatcgcgaagcctctcgctggaaagaagctctgcaagcggaccctcaagctcgtgcgacgagcctctgaggccaagtgcctcaagcgcggagtcaaagaggtagtcaagagcattcgccgcgggaacaaagggttgtgtgtgattgctggaaatatttctcctattgatgtgattacacacgttccaatactatgtgaggaatctaatgttccttacatatatgttccatcaaaagaggatcttgcgaccgcaggaaccactaagaggccaacttgttgcgtcctggttctgaccaaaccaaacaagggggagctcagtgacgaggtgaaggataaactgaagtcagactatgaccaagttgtaacggaagttgctgaggctacatctgcaatgttctaaggaccattcagggaccacatcatctgagaatcatgcagctacattcttggcgtactatgtaacctgatccctgtcagtctgccctgcttgcgtgaaccgcaccagtatgctttgcatggtggctggagggatatgactatatgagtttacctatatattatggactatccttgttggcgtattgttttattaacgattatatttagccagttataatccgttaggtgagcagattgtttgcttgggttaccagatcttggtagccagtgggtgcggttccaggtcttctgttgatgacttatcacaagatgtgcttgtgattcccgtgtatgaggaattgcgacatcgtagaggcgtaggctatgttcagtagatcgtgccttgcctcgtgtataataatactgttttgtatcgtagacaatattgtttacagagatgatgatgagtaagctgctggacatagccagtgccttatatcaaaaaaaaaaaaaaaa

SEQ ID NO: 7828 - protein, 150 aa, Zea mays
  misc_feature: Ceres CLONE ID no. 1429555
  misc_feature: Ceres CDNA ID no. 40351817
  misc_feature (30)..(124): Pfam Name: Ribosomal_L7Ae PFAM Desc: Ribosomal protein L7Ae/L30e/S12e/Gadd45 family
MGSDLETEKKKTPVALMPIAKPLAGKKLCKRTLKLVRRASEAKCLKRGVKEVVKSIRRGNKGLCVIAGNISPIDVITHVPILCEESNVPYIYVPSKEDLATAGTTKRPTCCVLVLTKPNKGELSDEVKDKLKSDYDQVVTEVAEATSAMF

SEQ ID NO: 7829 - DNA, 1084 bp, Zea mays
  misc_feature: Ceres CLONE ID no. 1429618
  misc_feature: Ceres CDNA ID no. 40351818
  CDS (124)..(900): REFERENCED BY SEQ ID NO: 7830
aactcggcgcgagtcatccttatagaatcacctctccgcctccaagcgccagtcgccgcctctccccactccctctcgtcgccgtcctctcccgttcgcaacgccacgctccccaccgccgaaatggccccgaagcgaggtggcagggcaccggtgccggccaagaagaagacggataaagtgacgaaccctctgttcgagaaaaggccgaagcagttcggcatcggcggcgcgttgcctcccaagaaggacctgcaccgattcgtcaagtggcccaaggtcgtgcgcatccagcgccagcgtcgcatcctcaagcagcgcctcaaggtgcctccggcgctcaaccagttcacccgcaccctcgacaagaacctcgctaccaacctgttcaagatgcttcttaagtaccggcccgaagacaaggctgccaagaaggagaggcttctgaagagggcccaggctgagaatgaaggaaaaactgttgaatccaagaaaccaattgttgtgaagtatggccttaaccatgtgacttacctcattgagcagaacaaggctcagctcgttgtcatcgctcatgatgtggatccgattgaactggttgtttggcttccagccctgtgcaggaaaatggaggtcccatactgcattgttaaaggaaaggctcgccttggatcgatcgttcacaagaagactgcatcagtcttgtgtctgaccactgtcaagaacgaggacaagcttgagttcagcaagatcttggaggctattaaggcgaacttcaatgacaagtttgatgaagtcaggaagaagtggggaggtggcatcatgggctccaagtcgcaggccaagaccaaggccagggaaaagttgctggccaaggaggccgcccagcggatgacgtagattatccactgttgagtttgcccctgtagtttgacgtggaagaaccgatgagcattgtgcactcgtattgtgtttttttgaatctactttcatatgtttctgtccatcagaccgtgtttagaaactttggaagacagttctacagtgtttgtgcaatgtcttatatcgaaaaaaaaaaaaaaaa

SEQ ID NO: 7830 - protein, 258 aa, Zea mays
  misc_feature: Ceres CLONE ID no. 1429618
  misc_feature: Ceres CDNA ID no. 40351818
  misc_feature (113)..(208): Pfam Name: Ribosomal_L7Ae PFAM Desc: Ribosomal protein L7Ae/L30e/S12e/Gadd45 family
MAPKRGGRAPVPAKKKTDKVTNPLFEKRPKQFGIGGALPPKKDLHRFVKWPKVVRIQRQRRILKQRLKVPPALNQFTRTLDKNLATNLFKMLLKYRPEDKAAKKERLLKRAQAENEGKTVESKKPIVVKYGLNHVTYLIEQNKAQLVVIAHDVDPIELVVWLPALCRKMEVPYCIVKGKARLGSIVHKKTASVLCLTTVKNEDKLEFSKILEAIKANFNDKFDEVRKKWGGGIMGSKSQAKTKAREKLLAKEAAQRMT

SEQ ID NO: 7831 - DNA, 856 bp, Zea mays
  misc_feature: Ceres CLONE ID no. 1430111
  misc_feature: Ceres CDNA ID no. 36593304
  CDS (132)..(611): REFERENCED BY SEQ ID NO: 7832
aaaacaacttctattttggaatagagggagtagggaaaaaaacctgctctcccaatccccaggtcctcatcggcctcctctctctcggtctccgccagatctccccacggaaccctacccgagcatcagccatggcaatcgcggcgcgcgccctgcgccgcctcccgcttcacctctccccctcgatctcccgctctttctgcgcagtttccccggccgccgcctcggcccccgccgccgcgtccgccaaggtcgctgaccgcatcgtgcgcgtcctcgccatcgatcccgacggggcgcgccgcgatgtggtcggcctctcggggcagacactccttcgcgctctggccaacgcggggctcatcgagccggcctcccaccgcctcgaggatatcgacgcgtgctccgccgagtgcgaggtccacatcgcgcaggagtggcttgacaagctgccaccaccgtcctacgaggagcgatacgtgctcacgcgcgcgtccaggaaccgcgagctcaacaagcacgcgcgcctgggctgccaggtcgtcctcgcgccggagctgcaggggatggtcgtcgccatccccgagcctaagccgtgggacatcccataatggcctgccgacgaaaggtaaggtgcggcttttgacgctgtgagccttccttaattcccttggctcggtcaagctgtgcgcctgtgccatccccttttatatgttacggatttagtgaagaataataatttgatgagcaaaacttggcattggttaacttttgttcctagtatatgatgctgtaatgtggaatccttttgcaactaccgcagtttaatgtttcatggtcaaaaaaaaaaaaaaaa

SEQ ID NO: 7832 - protein, 159 aa, Zea mays
  misc_feature: Ceres CLONE ID no. 1430111
  misc_feature: Ceres CDNA ID no. 36593304
  misc_feature: Homolog of GI Number: 76621515 NR Desc:  similar to CG4205
  misc_feature: Homolog of GI Number: 27663688 NR Desc: similar to Ferredoxin CG4205
  misc_feature: Homolog of GI Number: 57101982 NR Desc:  similar to CG4205
  misc_feature: Homolog of GI Number: 61828375 NR Desc:  similar to MGC19604 protein
  misc_feature: Homolog of GI Number: 48847962 NR Desc: COG0633: Ferredoxin
  misc_feature: Homolog of GI Number: 68443061 NR Desc:  similar to MGC19604 protein
  misc_feature: Homolog of GI Number: 67987177 NR Desc: 4Fe
  misc_feature: Homolog of GI Number: 72547018 NR Desc: proteophosphoglycan ppg3
  misc_feature: Homolog of GI Number: 73998353 NR Desc:  similar to PGC
  misc_feature: Homolog of GI Number: 73998351 NR Desc:  similar to PGC
MAIAARALRRLPLHLSPSISRSFCAVSPAAASAPAAASAKVADRIVRVLAIDPDGARRDVVGLSGQTLLRALANAGLIEPASHRLEDIDACSAECEVHIAQEWLDKLPPPSYEERYVLTRASRNRELNKHARLGCQVVLAPELQGMVVAIPEPKPWDIP

SEQ ID NO: 7833 - DNA, 951 bp, Zea mays
  misc_feature: Ceres CLONE ID no. 1430456
  misc_feature: Ceres CDNA ID no. 25891787
  CDS (66)..(710): REFERENCED BY SEQ ID NO: 7834
acgcgctttactgttctttcttcttacttttcgcaagattgttctgttctttacacgattccaagatgagtgaagaggtcaaagagaatcagtctgggaagcttcagaagccaactccacgtttaaacgagaggatcctctcatctttatctaagagatcggttgctgctcatccatggcatgatcttgaaatcggacctggagctccagtgattttcaatgtggttgttgagatctcaaagggtagcaaggtcaaatatgaacttgacaaaaagacaggactaatcaaggttgatcggatcctttattcatcggttgtgtatccgcataactacggttttattccccgcacattatgcgaagacaatgatccgttggatgtgctagtcatcatgcaggagcctgtacttccaggttgttttctgcgcgcccgagctattggattaatgcccatgattgatcagggagaaaaagatgacaagatcattgcggtatgtgttgatgatcctgagtataagcattacactgacatcaaagaacttcctcctcatcgtcttactgaaattcggcgattctttgaagattacaagaagaatgagaacaaggaagttgctgtaaatgattttctaccgaatggtcctgctgttgaagctattcagtactcaatggacctttacgctgagtacattcttcacaccctgagaagataagaaaaggactattcctgccaaaaaaaagcaagaatttgtcttatatttgaattttgaataaagcactgttcatgaaactgttctgatattttgtctttaaagcttctttgttgttgttttcttctggggatcttttgtctgaagattaatcccaattgagttttttttttctcttatttgtattggattttttttatccctttaaagttttgatttcgttccaagaaaaaaaaaaaaaaaa

SEQ ID NO: 7834 - protein, 214 aa, Zea mays
  misc_feature: Ceres CLONE ID no. 1430456
  misc_feature: Ceres CDNA ID no. 25891787
  misc_feature: null
  misc_feature: Useful for making plants with modulated nitrogen use efficiency
  misc_feature (52)..(206): Pfam Name: Pyrophosphatase PFAM Desc: Inorganic pyrophosphatase
  misc_feature: Homolog of GI Number: 21537232 NR Desc: soluble inorganic pyrophosphatase
  misc_feature: Homolog of GI Number: 20148677 NR Desc: similar to inorganic pyrophosphatase
  misc_feature: Homolog of GI Number: 6715648 NR Desc: T25K16.5
  misc_feature: Homolog of GI Number: 5669924 NR Desc: soluble inorganic pyrophosphatase
  misc_feature: Homolog of GI Number: 20197320 NR Desc: putative inorganic pyrophosphatase
  misc_feature: Homolog of GI Number: 26451240 NR Desc: putative inorganic pyrophosphatase
  misc_feature: Homolog of GI Number: 534916 NR Desc: soluble inorganic pyrophosphatase
  misc_feature: Homolog of GI Number: 78708597 NR Desc: inorganic pyrophosphatase
  misc_feature: Homolog of GI Number: 4033424 NR Desc: Soluble inorganic pyrophosphatase
  misc_feature: Homolog of GI Number: 50931109 NR Desc: putative inorganic pyrophosphatase
  misc_feature: Useful for making plants with altered leaf shape eg curled leaves
MSEEVKENQSGKLQKPTPRLNERILSSLSKRSVAAHPWHDLEIGPGAPVIFNVVVEISKGSKVKYELDKKTGLIKVDRILYSSVVYPHNYGFIPRTLCEDNDPLDVLVIMQEPVLPGCFLRARAIGLMPMIDQGEKDDKIIAVCVDDPEYKHYTDIKELPPHRLTEIRRFFEDYKKNENKEVAVNDFLPNGPAVEAIQYSMDLYAEYILHTLRR

SEQ ID NO: 7835 - DNA, 683 bp, Glycine max
  misc_feature: Ceres CLONE ID no. 1431003
  misc_feature: Ceres CDNA ID no. 29191638
  CDS (3)..(455): REFERENCED BY SEQ ID NO: 7836
acttttcctctccccctcgcacgcggcctcttccttccgttccgtccttccttgcgcttgcggcggcggcgcgaagccatcggagaactttcgagggggagccagctagggtttgggccgcggcggcgcgcgacgatgtcggcgtacgacgaggtggagatcgaggacatggagtggagcgaggagctgggggcgtacacgtacccgtgcccctgcggcgacctcttccagatcacgctcgccgacctccgcctcggggaggagatcgcgcgctgcccctcctgctcgctcttcctcaccgtcgtctacaacgaggaggacttcgccgacgccaaggagcccccgcagaagccgccgcccgccccgcagcccgtcgccgtcgcctgaagcgcaatcccccgcaccccccgtgggtggctcgtcggcatggacggacgacaggatcagcatcgtagctgggagaggaatgagagagattgcttggcatacgcgggagcatctgtacttgtacttgtaaaatgagaaaaatcgcagcgtcgtatcaacttttggttgtttaactgaatttatccgtgtggactcactcagttgttacaaaggcactgtccatgactggtgcttcaaaatttcgttatcccagtttttgtacctgatgactcaccgatccaaaaaaaaaaaaaaaa

SEQ ID NO: 7836 - protein, 83 aa, Glycine max
  misc_feature: Ceres CLONE ID no. 1431003
  misc_feature: Ceres CDNA ID no. 29191638
  misc_feature (5)..(59): Pfam Name: zf PFAM Desc: CSL zinc finger
  misc_feature: Homolog of GI Number: 62738806 NR Desc: Chain A
  misc_feature: Homolog of GI Number: 62738697 NR Desc: Chain A
  misc_feature: Homolog of GI Number: 45201470 NR Desc: AGR374Cp
  misc_feature: Homolog of GI Number: 50732744 NR Desc:  similar to RIKEN cDNA 2610018L09
  misc_feature: Homolog of GI Number: 61822745 NR Desc:  similar to Zinc finger
  misc_feature: Homolog of GI Number: 57103884 NR Desc:  similar to Zinc finger
  misc_feature: Homolog of GI Number: 7949115 NR Desc: Ser/Arg
  misc_feature: Homolog of GI Number: 6056417 NR Desc: alternative splicing factor SF2a
  misc_feature: Homolog of GI Number: 166844 NR Desc: ribonucleoprotein
MSAYDEVEIEDMEWSEELGAYTYPCPCGDLFQITLADLRLGEEIARCPSCSLFLTVVYNEEDFADAKEPPQKPPPAPQPVAVA

SEQ ID NO: 7837 - DNA, 504 bp, Glycine max
  misc_feature: Ceres CLONE ID no. 1431017
  misc_feature: Ceres CDNA ID no. 35383392
  CDS (51)..(419): REFERENCED BY SEQ ID NO: 7838
agaattattggaatttggaagaaagggttgagctgcacaacaacctaagaatgggaggaagttcgagcttcagggatgagtataccttggaacaaaggctcggagaatcgcgggatattgtggccaaatatcccgatcgagtccccgtgattgtggaaagatatgcgaaatgcgatctgcctgagttggagaagaaaaaataccttgttcctcgagacttgtctgttgggcatttcattcatattttgagttccagacttagtctgccccctgggaaagctctctttgtatttgtgaagaataccttgcctcaaactgctaatatgatggactctgtgtatagatcattcaaggatgaggatggatttctttacatgtattatagcaccgaaaaaacctttggttcgtacatcatgtaaaatattaaactctgtacactattgtatccaacactttgtgaagtgactactatcacgaaaccttgtataaaaaaaaaaaaaaaaa

SEQ ID NO: 7838 - protein, 122 aa, Glycine max
  misc_feature: Ceres CLONE ID no. 1431017
  misc_feature: Ceres CDNA ID no. 35383392
  misc_feature (15)..(118): Pfam Name: MAP1_LC3 PFAM Desc: Microtubule associated protein 1A/1B
  misc_feature: Homolog of GI Number: 21554285 NR Desc: putative microtubule
  misc_feature: Homolog of GI Number: 50937683 NR Desc: putative microtubule associated protein
  misc_feature: Homolog of GI Number: 21592920 NR Desc: putative microtubule
  misc_feature: Homolog of GI Number: 4581162 NR Desc: putative microtubule
  misc_feature: Homolog of GI Number: 50941899 NR Desc: putative microtubial binding protein
  misc_feature: Homolog of GI Number: 50928837 NR Desc: OSJNBa0053K19.12
  misc_feature: Homolog of GI Number: 34595981 NR Desc: microtubule
  misc_feature: Homolog of GI Number: 37776903 NR Desc: putative microtubule
  misc_feature: Homolog of GI Number: 3024687 NR Desc: SYMBIOSIS
  misc_feature: Homolog of GI Number: 2072023 NR Desc: symbiosis
  misc_feature: Useful for accelerating flowering time
  misc_feature: Useful for making ornamental plants with modified flowers
  misc_feature: Useful for making ornamental plants with modified leaves
  misc_feature: Useful for making plants with increased biomass and foliage
  misc_feature: Useful for making plants with increased biomass and foliage
  misc_feature: Useful for making shorter plants
  misc_feature: Useful for making shorter plants and plants with modified flowers
  misc_feature: Useful for making smaller plants
  misc_feature: Useful for modifying plant structure
  misc_feature: Useful for sterility
MGGSSSFRDEYTLEQRLGESRDIVAKYPDRVPVIVERYAKCDLPELEKKKYLVPRDLSVGHFIHILSSRLSLPPGKALFVFVKNTLPQTANMMDSVYRSFKDEDGFLYMYYSTEKTFGSYIM

SEQ ID NO: 7839 - DNA, 737 bp, Zea mays
  misc_feature: Ceres CLONE ID no. 1431052
  misc_feature: Ceres CDNA ID no. 40351819
  CDS (118)..(477): REFERENCED BY SEQ ID NO: 7840
aagcacaagtcgacgaccaaaaacagagggagaagaaaaggcaaaggtctccaagatctcggctcagagagagagagagagagagagagagagatctgagagagaggtgcttcggagatgcacgacttctgcttcacgatcccctacgggttcgcggtcctggccggcggcctgctgggctacctccgccgcggcagcaccgcctccctggcgggcggcgccggcgtgggcgggcttctcctcctggcagggttcgtcagcctcaaggccttcgagaagcgccgcaactcctacctcgccctcgcgctcgagaccctttgcgcactggccttgacttttgttatggggcagagataccttgaaacttcaaagataatgccggctagtgttgttgctggcctcagtgttctgatgtcggcattctatctattcaaaattgctaccggtggcaaccatttctcgccaaagaaagagtagaccagacggtgcttggccaaactcaaagaccatatggcatattgtgttctgcattccaattgtaacttgactgatgctctatgttgtgcttgcacctttgctcaaatgttttgtatgcggacctgggaagtattcaccatgtaaatgaactaacatttcaattgtgcttcgccgaggtgcaaacttgtcttaattgcctgttgttattgagcaaaagtaaatacacctaatttcttggtcttcgaaaaaaaaaaaaaaaa

SEQ ID NO: 7840 - protein, 119 aa, Zea mays
  misc_feature: Ceres CLONE ID no. 1431052
  misc_feature: Ceres CDNA ID no. 40351819
  misc_feature (4)..(107): Pfam Name: TMEM14 PFAM Desc: Transmembrane proteins 14C
MHDFCFTIPYGFAVLAGGLLGYLRRGSTASLAGGAGVGGLLLLAGFVSLKAFEKRRNSYLALALETLCALALTFVMGQRYLETSKIMPASVVAGLSVLMSAFYLFKIATGGNHFSPKKE

SEQ ID NO: 7841 - DNA, 1318 bp, Zea mays
  misc_feature: Ceres CLONE ID no. 1431054
  misc_feature: Ceres CDNA ID no. 40041408
  CDS (84)..(1097): REFERENCED BY SEQ ID NO: 7842
atcgcaatctcgagtagccgtcccaatcctcgatctgttctcagaccctcctccgtccgtcgcagctccagatttccttccccatggctccgatcaagatcggtatcaacggtttcggccggatcggcaggcttgtggccagggttgcgctccagagccccgatgtcgagctcgtcgccgtcaacgaccccttcatcaccaccgactacatgacctacatgttcaagtatgacactgtccacggacagtggaagcaccatgaagttaaggtgaaggactccaagacccttctcttcggtgagaaggaggttgctgtgtttggctgcaggaaccctgaggagatcccatgggctgctgctggtgctgagtacgttgttgagtccaccggtgttttcaccaacaaggacaaggctgcagctcacattaagggtggtgccaagaaggtcatcatttctgctcccagcaaggatgctcccatgtttgtctgtggtgtcaatgagaaggaatacaagtctgacatcgacattgtctccaacgctagctgcaccactaactgccttgctcctcttgctaaggttatcaatgacaggtttggcattgttgagggtttgatgaccacagttcatgccatgactgcaacccagaagactgttgatggtccttccagcaaggactggagaggtggaagggctgccagcttcaacatcattccaagcagcactggtgccgcaaaggctgttggcaaggtgctcccagagcttaacggaaagttgactggaatggccttccgtgttcccactgttgatgtttctgttgttgatctgactgttagacttgcgaagccagcaacctatgatcagattaaggctgctatcaaggaggagtctgagggaaacctcaagggcattttgggttacgttgatgaggaccttgtttccactgactttcagggtgacaacaggtccagcatcttcgatgccaaggccgggattgctctgaacgacaactttgtcaagcttgtctcctggtacgacaacgagtggggatacagcacccgcgtggtcgacctcatccgtcacatgcacagcaccaagtaaatgagaggcatgaagatacaggggagagtggtttgccccagaggagtgttcaaagcctcttcttctgagaataaatttttgtatggaattatgtcagctaaaaaccttttattggatgtatcctgatggttggtcacattttggtggtattatgtacttgcttgaactaaatcatgagtcattttcactcatcttctttggttataaaaaaaaaaaaaaaa

SEQ ID NO: 7842 - protein, 337 aa, Zea mays
  misc_feature: Ceres CLONE ID no. 1431054
  misc_feature: Ceres CDNA ID no. 40041408
  misc_feature (159)..(316): Pfam Name: Gp_dh_C PFAM Desc: Glyceraldehyde 3
  misc_feature (4)..(154): Pfam Name: Gp_dh_N PFAM Desc: Glyceraldehyde 3
  misc_feature: Homolog of GI Number: 120666 NR Desc: Glyceraldehyde
  misc_feature: Homolog of GI Number: 462137 NR Desc: Glyceraldehyde
  misc_feature: Homolog of GI Number: 120668 NR Desc: Glyceraldehyde
  misc_feature: Homolog of GI Number: 50925303 NR Desc: OJ000223_09.15
  misc_feature: Homolog of GI Number: 51964138 NR Desc: PREDICTED OJ1791_B03.34 gene product
  misc_feature: Homolog of GI Number: 1184774 NR Desc: cytosolic glyceroldehyde
  misc_feature: Homolog of GI Number: 1184776 NR Desc: cytosolic glyceroldehyde
  misc_feature: Homolog of GI Number: 51703306 NR Desc: glyceraldehyde 3
  misc_feature: Homolog of GI Number: 56069874 NR Desc: glyceraldehyde
  misc_feature: Homolog of GI Number: 1345501 NR Desc: glycolytic glyceraldehyde 3
  misc_feature: Useful for making ornamental plants with modified leaves
MAPIKIGINGFGRIGRLVARVALQSPDVELVAVNDPFITTDYMTYMFKYDTVHGQWKHHEVKVKDSKTLLFGEKEVAVFGCRNPEEIPWAAAGAEYVVESTGVFTNKDKAAAHIKGGAKKVIISAPSKDAPMFVCGVNEKEYKSDIDIVSNASCTTNCLAPLAKVINDRFGIVEGLMTTVHAMTATQKTVDGPSSKDWRGGRAASFNIIPSSTGAAKAVGKVLPELNGKLTGMAFRVPTVDVSVVDLTVRLAKPATYDQIKAAIKEESEGNLKGILGYVDEDLVSTDFQGDNRSSIFDAKAGIALNDNFVKLVSWYDNEWGYSTRVVDLIRHMHSTK

SEQ ID NO: 7843 - DNA, 1054 bp, Glycine max
  misc_feature: Ceres CLONE ID no. 1431158
  misc_feature: Ceres CDNA ID no. 29191298
  CDS (3)..(725): REFERENCED BY SEQ ID NO: 7844
agctagttaaagagctcccttctcgcttcctcctcaccccgcactgccccaccgcgccggccccgactccgactccgacactccccggcggcgcgcgctcgccgagctcggtcgcgctgcggttcggatcccccggaggcgtgcggcttcggcgcgggcgagggtcggcggcggtcgcgatggcatccgacgggcgcgtggagcggatcgcgtccagcatccgcgccatccccaacttccccaagccagggattttgtttcaggacatcacaaccttgcttctcgatccgcaggcattccgtgacaccactgacctctttgtcgagcggtacaaggacaaagacataactgtagttgctggtgttgaagccagaggattcatttttggtcctcccattgcattagccataggtgcaaagtttgttccaataaggaagccgaaaaaattacctggtgaggtgatatcggaagaatattctctggaatatggcactgacaaaattgaaatgcacgtaggagctgtgcagcccaatgaccgagtccttattgtggatgatctaattgccacagggggaaccctttgtgccgctgccaaacttattgagcgtgttggagcaaaggtggttgagtgtgcctgtgttattgaactgccagagctgaagggccgggacaagttgggggacatgccagtttttgtcctagtgcaggcagacgagtcagtatgaaacaagttgtgactcttgagttgttccaatgatgtttcccttctggaactatactggaagcagcaaagatatccgttacaatcttagctagttcctatctggagctgctcaataaaagttttatctttaaatttgtccttctggaactgtttgggaatgcagacttgattgttgttccctgtaatatgtggcttatttctgtcaaaaacagtgcaaattattcatgtcaatgaaggatagtctgtactgaagtttgtttctgttgctacttgctagcattatttactttcatgctttgttggtgcttgtcaataaaaaaaaaaaaaaaa

SEQ ID NO: 7844 - protein, 181 aa, Glycine max; identical to SEQ ID NO: 2558
  misc_feature: Ceres CLONE ID no. 1431158
  misc_feature: Ceres CDNA ID no. 29191298
  misc_feature (29)..(165): Pfam Name: Pribosyltran PFAM Desc: Phosphoribosyl transferase domain
  misc_feature: Homolog of GI Number: 726305 NR Desc: adenine phosphoribosyltransferase form 1
  misc_feature: Homolog of GI Number: 9711921 NR Desc: Adenine phosphoribosyltransferase
  misc_feature: Homolog of GI Number: 77556961 NR Desc: adenine phosphoribosyltransferase
  misc_feature: Homolog of GI Number: 32492063 NR Desc: adenine phosphoribosyltransferase
  misc_feature: Homolog of GI Number: 82621166 NR Desc: adenine phosphoribosyltransferase
  misc_feature: Homolog of GI Number: 21536559 NR Desc: adenine phosphoribosyltransferase 1
  misc_feature: Homolog of GI Number: 23198324 NR Desc: adenine phosphoribosyltransferase 1
  misc_feature: Homolog of GI Number: 9802535 NR Desc: F17L21.24
  misc_feature: Homolog of GI Number: 50937177 NR Desc: putative adenine phosphoribosyl transferase
  misc_feature: Homolog of GI Number: 28393997 NR Desc: putative adenine phosphoribosyltransferase

SEQ ID NO: 7845 - DNA, 659 bp, Zea mays
  misc_feature: Ceres CLONE ID no. 1431200
  misc_feature: Ceres CDNA ID no. 25892272
  CDS (43)..(507): REFERENCED BY SEQ ID NO: 7846
atcgcaaaaacctaaatcccctctcttcgcttcccgagaaaaatggcaccaaaggcaggaaagaaacccgcagagaagaagcccgccgccgccgcagcccccgcggcagagaagccggcggaggaggtagccgagaaggccccggcggagaagaaacccaaggcggggaagaagctgccgaaggaagccatcggggcgacggacaagaagaagaagaggagcaagaagagcatcgagacgtacaagatctacatcttcaaggtgctgaagcaggtccacccggacatcgggatctcgagcaaggccatggggatcatgaacagcttcatcaacgacatcttcgagaagctcgcccaggaggcctcgaagctcgctaggtacaacaagaagcccacgattacctcccgcgagatccagaccgccgtgaggctcgttctccccggtgagctcgctaagcacgccgtctccgaaggaaccaaggccgtgactaagtttactagctcttgaattgaaagttgtgtgttttaggggtctagatctggttgtttttttctaatttggtttgtaattgttgaagaacatatcgactggtgttaaatcgtctcttttggaagcaaaatctcaatataacgcgttggttattaaaaaaaaaaaaaaaa

SEQ ID NO: 7846 - protein, 154 aa, Zea mays
  misc_feature: Ceres CLONE ID no. 1431200
  misc_feature: Ceres CDNA ID no. 25892272
  misc_feature: No seed is being produced by the plant
  misc_feature: The plant flowers significantly late compared to wild-type.
  misc_feature: Useful for biocontainment applications
  misc_feature: Useful for making plants with modulated flowering time
  misc_feature (61)..(133): Pfam Name: Histone PFAM Desc: Core histone H2A/H2B/H3/H4
  misc_feature: Homolog of GI Number: 21553526 NR Desc: putative histone H2B
  misc_feature: Homolog of GI Number: 21554180 NR Desc: histone H2B
  misc_feature: Homolog of GI Number: 30102580 NR Desc: At3g45980
  misc_feature: Homolog of GI Number: 2558962 NR Desc: histone H2B1
  misc_feature: Homolog of GI Number: 21617908 NR Desc: histone H2B
  misc_feature: Homolog of GI Number: 12083300 NR Desc: putative histone H2B protein
  misc_feature: Homolog of GI Number: 82400146 NR Desc: histone H2B
  misc_feature: Homolog of GI Number: 2746719 NR Desc: histone H2B
  misc_feature: Homolog of GI Number: 21536602 NR Desc: histone H2B
  misc_feature: Homolog of GI Number: 10177235 NR Desc: histone H2B like protein
MAPKAGKKPAEKKPAAAAAPAAEKPAEEVAEKAPAEKKPKAGKKLPKEAIGATDKKKKRSKKSIETYKIYIFKVLKQVHPDIGISSKAMGIMNSFINDIFEKLAQEASKLARYNKKPTITSREIQTAVRLVLPGELAKHAVSEGTKAVTKFTSS

SEQ ID NO: 7847 - DNA, 623 bp, Zea mays
  misc_feature: Ceres CLONE ID no. 1431211
  misc_feature: Ceres CDNA ID no. 29191447
  CDS (1)..(432): REFERENCED BY SEQ ID NO: 7848
atattcgtagcgcccatcccaccgagcgccacacggccgccagccagacgacgttgttgccgtcgcctcgcatcccagtcccagcgagccgccgcccggagagcagagactgagaaacagagatcgcatggcgcgctccctcgtcctcgtggccacgctcaccgcggtcctactggcggcggcgcctcctccgacgcgggcggcgtgggtggagtcggactacccgtcgagcgtgccgtgcggggtgaccatccccgtggagcagtgcgacccggcggtcacggcggcgaacgccgcgtgccgggacatgtgccactacgggggccggcgaggcgggcggtgcgtgtccccgggccggctcgcgctggtgcagggatgccattgcaggtgctagctcgccggcccgggcggccgccaacgcgcgtgacgtgacgggcggcggccgggccggggcaggggggacgcagtgccttccccgtgggaaataacaggcctgcatgacggcgtgcggatagcagtgtgacctaatcgtatctagctctgtttgttgatgctgtgatctgttgacttggtacaatgctacagcacgcaatgtgttttgtcctgcaaaaaaaaaaaaaaaa

SEQ ID NO: 7848 - protein, 88 aa, Zea mays
  misc_feature: Ceres CLONE ID no. 1431211
  misc_feature: Ceres CDNA ID no. 29191447
MARSLVLVATLTAVLLAAAPPPTRAAWVESDYPSSVPCGVTIPVEQCDPAVTAANAACRDMCHYGGRRGGRCVSPGRLALVQGCHCRC

SEQ ID NO: 7849 - DNA, 985 bp, Zea mays
  misc_feature: Ceres CLONE ID no. 1431230
  misc_feature: Ceres CDNA ID no. 36705357
  CDS (3)..(659): REFERENCED BY SEQ ID NO: 7850
gcatctccatccacctgtcctcgcgtctcccttcccagatccatcgactcgctcgggccgcccctcccgtcgtccccgttcgaaggtgcggcagccggcaggcgagcgatttgattcgacatgaatcccgagtagacgattcttatttggacagctatatcagcacaattggggttgatttcaaaattcgcacagtggagcaagatgggaagaccataaaacttcaaatttgggatactgctgggcaagagcgcttcaggacaatcactagcagctactaccgcggagctcatggaatcattattgtatatgacgtgacagaccaagaaagcttcaataatgtgaagcaatggttgaacgagatagaccgttatgcaagtgataatgttaacaagctccttgttgggaacaagagtgaccttactgccaacaaagttgtggcaactgagacagcaaaggcgtttgctgatgagatgggcatcccattcatggagacgagtgccaaaaacgccatcaacgtggagcaggccttcatggctatggctgcatccatcaaggataggatggccagccaaccagccgcggccaacgctaggccagcgaccgtgcagatccgcgggcaacccgtcaaccagaagacgtcttgctgctcgtcctaagattgcctcatttctttggttccttgtgactatttctacggtttgtgcgcgcacgcaaatgtatttgcattattcctgatagcatctattcgttggccagatgattagagagctgaaaatatgttaagaacaataccatagagagaagttcctcagtgctctcgcagcttaaggagcaaacagcaacactttacttcgttttttatactttattatagccgcactgtttattactcgggctacatttgtgaacagcgactgtaatatttttttactctatattcgtagttagatgaaatcctgtgtgtgcaaaaaaaaaaaaaaaa

SEQ ID NO: 7850 - protein, 61 aa, Zea mays
  misc_feature: Ceres CLONE ID no. 1431230
  misc_feature: Ceres CDNA ID no. 36705357
  misc_feature (1)..(29): Pfam Name: Ras PFAM Desc: Ras family
  misc_feature: Homolog of GI Number: 287835 NR Desc: yptm2
  misc_feature: Homolog of GI Number: 50911379 NR Desc: putative GTP
  misc_feature: Homolog of GI Number: 51468996 NR Desc: RAB1
  misc_feature: Homolog of GI Number: 34906164 NR Desc: putative GTP
  misc_feature: Homolog of GI Number: 1053063 NR Desc: small GTP
  misc_feature: Homolog of GI Number: 1616614 NR Desc: small GTP
  misc_feature: Homolog of GI Number: 51468998 NR Desc: RAB1
  misc_feature: Homolog of GI Number: 303750 NR Desc: GTP
  misc_feature: Homolog of GI Number: 4586580 NR Desc: rab
  misc_feature: Homolog of GI Number: 1370166 NR Desc: RAB1C
MGIPFMETSAKNAINVEQAFMAMAASIKDRMASQPAAANARPATVQIRGQPVNQKTSCCSS

SEQ ID NO: 7851 - DNA, 687 bp, Glycine max
  misc_feature: Ceres CLONE ID no. 1431273
  misc_feature: Ceres CDNA ID no. 36706810
  CDS (106)..(498): REFERENCED BY SEQ ID NO: 7852
gtttctctccccgccgtcgccttcctccctcgccctcgcctccccgccgccacccaacccaagcacagagctcccggcttctcccccctacgaggttaggcaaggatggtgagggttagcgtcctgaatgatgctctcaagagcatgtacaacgctgagaagcgtggcaagaggcaggtcatgatcaggccttcctcaaaggtgatcatcaagttcctcatcgtcatgcagaagcacggttacattggtgagtttgagtatgttgatgaccacagatctggcaagattgttgtggagttgaacggcagactgaacaagtgtggagtcatcagcccccgctttgatgttggtgtcaaggagatcgagggatggaccgccaggctgcttccatctcgtcagtttggttacatcgtcctgacaacctctgctggcatcatggatcacgaggaagccaggaggaagaacgttggtggcaaagtgctaggctttttctactgagcgggaattttgtgaaagttgtatttcagaccggtgtgataggatgttatctcaggacatcaaggttgtctactttttgcctgcatagctgctatgcctttgttatgttatgttggattcagttaattatgagatgcactttggtcttaaaaaaaaaaaaaaaaaaaaaaaataaaaaaaaaaaaaaaa

SEQ ID NO: 7852 - protein, 130 aa, Glycine max; identical to SEQ ID NO: 2516
  misc_feature: Ceres CLONE ID no. 1431273
  misc_feature: Ceres CDNA ID no. 36706810
  misc_feature (5)..(130): Pfam Name: Ribosomal_S8 PFAM Desc: Ribosomal protein S8
  misc_feature: Homolog of GI Number: 23397065 NR Desc: putative cytoplasmic ribosomal protein S15a
  misc_feature: Homolog of GI Number: 17863 NR Desc: r
  misc_feature: Homolog of GI Number: 20259193 NR Desc: putative cytoplasmic ribosomal protein S15a
  misc_feature: Homolog of GI Number: 6683481 NR Desc: wrp15a
  misc_feature: Homolog of GI Number: 50908303 NR Desc: putative ribosomal protein S15
  misc_feature: Homolog of GI Number: 13560779 NR Desc: cytoplasmic ribosomal protein S15a
  misc_feature: Homolog of GI Number: 50935123 NR Desc: ribosomal protein S15
  misc_feature: Homolog of GI Number: 2130985 NR Desc: r
  misc_feature: Homolog of GI Number: 3355488 NR Desc: 40S ribosomal protein S15A

SEQ ID NO: 7853 - DNA, 913 bp, Zea mays
  misc_feature: Ceres CLONE ID no. 1431525
  misc_feature: Ceres CDNA ID no. 36593306
  CDS (121)..(699): REFERENCED BY SEQ ID NO: 7854
atcgtcgacctggccgcccgttctctgcttaccatctccctttgcgctgtttgctgatccgtgctctccttttcgaatttcctccgccgctgcaggatccggcggcgaaggtaaggcaagatgtacaccgcgaggaagaagatccagaaggataagggccttgagccctccgagttcgaggactccgtcgcccaggctttcttcgacctggagaacggtaaccaggagctcaagagcgacctcaaggacctttacatcaacggtgctatccagctggatgttgccgggagcaggaaggctgttgtgatccacgtcccataccgcttgcgtaaggccttcaggaagatccatgtcaggatcgtcagggagctggagaagaaattcagcggcaaggatgtggtaattgttgccacaaggaggatcgtgaggccgcccaagaagggttcagctgttcagcgccctcgcaccaggactctgactgctgtccatgatggcatcctggaggatgttgtcttcccagctgagattgtggggaagcgtgtcaggtaccgtctggatggtgccaagatcatcaagatcttcttggacccaaaggagaggaacaacacagaatacaagctggacacctacactacggtctaccgcaggctgtgtgggaaagatgtggtctttgagtaccctatggccgaaaatgcataaatatgacgcccggatatccccattttattttgttgaatctggatgtttctttggggtctcaactagactgctccgtatgtacttcaaaaaccatagttttgatgccaaagttgttgcctaggaatttggtactcgggaattggtagcggacctgaacaatgttaagttttgagcatttaaatttacctttgtcatgataaaaaaaaaaaaaaaa

SEQ ID NO: 7854 - protein, 192 aa, Zea mays
  misc_feature: Ceres CLONE ID no. 1431525
  misc_feature: Ceres CDNA ID no. 36593306
  misc_feature: The plant is abnormally large.
  misc_feature: The plant is abnormally small.
  misc_feature: Useful for making plants with modulated biomass
  misc_feature (4)..(191): Pfam Name: Ribosomal_S7e PFAM Desc: Ribosomal protein S7e
  misc_feature: Homolog of GI Number: 4588906 NR Desc: ribosomal protein S7
  misc_feature: Homolog of GI Number: 57471724 NR Desc: ribosomal protein S7
  misc_feature: Homolog of GI Number: 22671664 NR Desc: ribosomal protein S7
  misc_feature: Homolog of GI Number: 55167942 NR Desc: putative 40S ribosomal protein S7
  misc_feature: Homolog of GI Number: 14787424 NR Desc: Ribosomal protein S7
  misc_feature: Homolog of GI Number: 77999315 NR Desc: ribosomal protein S7
  misc_feature: Homolog of GI Number: 4128206 NR Desc: 40S ribosome protein S7
  misc_feature: Homolog of GI Number: 5532505 NR Desc: 40S ribosomal protein S7 homolog
  misc_feature: Homolog of GI Number: 21555683 NR Desc: 40S ribosomal protein S7 homolog
  misc_feature: Homolog of GI Number: 6957719 NR Desc: putative 40S ribosomal protein
MYTARKKIQKDKGLEPSEFEDSVAQAFFDLENGNQELKSDLKDLYINGAIQLDVAGSRKAVVIHVPYRLRKAFRKIHVRIVRELEKKFSGKDVVIVATRRIVRPPKKGSAVQRPRTRTLTAVHDGILEDVVFPAEIVGKRVRYRLDGAKIIKIFLDPKERNNTEYKLDTYTTVYRRLCGKDVVFEYPMAENA

SEQ ID NO: 7855 - DNA, 925 bp, Zea mays
  misc_feature: Ceres CLONE ID no. 1431656
  misc_feature: Ceres CDNA ID no. 25445704
  CDS (263)..(601): REFERENCED BY SEQ ID NO: 7856
agaagcctacgcgcagtcgcagagagaccatcccgccacggcagcaagcgaagcgagcctagccagccaaaccggggccaggccaggccgccagggggacgggacgggaaggaaaccgaggcaggcggcggcagcggcagcggcagcggtagcagcagcgcagggcgcacgcgcttctcgtttcgtgtcgccaggggaaggaggaggagcgagtgggttgggggatcggctggcggccgagggtccgggagctgcgggcggcatggggagggacgagatgctacggcgtagcctcgtggcgctggcggcggccgtggcgctcacggggctggccacggcgtcgctgcgcaaggcggcggtcacgtacggcttcggcatcctcgccatcgccggcgtcctgctcccggactgggagttcttcgaccgcgactactcccagtggctaacccccatgcccgcctcccgccgcacggccgccgccgcggctgccgaccgggagcacgacgtctggaaattcaagccgtatcctctccgggtggccatgctgacgacgatctacgggttcggtctttacaagtggtggatgtacgtatctagctagtgtgggtcgtccactcgtcctctccccccttgccgttcctcattgtgagcagatgcgatagatggagtatattgcctggctaatatgctgctgatagcctgatatgaagaaccaccctcaagacaggttgatgtatgtaatgtaacgagcgggtttttgtgatgcgcaaacgccacgccaatcattcttatctggaaacatgaatctaggttttattctttctccccctttgtcactccttcggtcttccttgttccatcatcatagcttcccaagggctacatgaacatgaatcttacagtttgcacaaaaaaaaaaaaaaaa

SEQ ID NO: 7856 - protein, 112 aa, Zea mays
  misc_feature: Ceres CLONE ID no. 1431656
  misc_feature: Ceres CDNA ID no. 25445704
  misc_feature: Homolog of GI Number: 68562018 NR Desc: Di
  misc_feature: Homolog of GI Number: 66776365 NR Desc: PE
  misc_feature: Homolog of GI Number: 929566 NR Desc: fibrillarin
  misc_feature: Homolog of GI Number: 66776103 NR Desc: LigA
  misc_feature: Homolog of GI Number: 55775280 NR Desc: putative glycine
  misc_feature: Homolog of GI Number: 20247 NR Desc: glycine
  misc_feature: Homolog of GI Number: 9453857 NR Desc: EBNA
MGRDEMLRRSLVALAAAVALTGLATASLRKAAVTYGFGILAIAGVLLPDWEFFDRDYSQWLTPMPASRRTAAAAAADREHDVWKFKPYPLRVAMLTTIYGFGLYKWWMYVSS

SEQ ID NO: 7857 - DNA, 970 bp, Zea mays
  misc_feature: Ceres CLONE ID no. 1431672
  misc_feature: Ceres CDNA ID no. 25445489
  CDS (140)..(448): REFERENCED BY SEQ ID NO: 7858
aacatgcatggttagcaataaagcagtgaccaagagaacgaaggaaccggagaaagaaagctacaccagagggaggacggagatcagctactagcgtacatagtctctcgtttcgggtagtcaagccacaacggtatatatgcacgggagaaccgccatggcagtggcctgccttctgtgcatgacggctctgctgctagtccaggatgtccagtccaggaggctactgtggacggagcaggagaagaaacaatcccatggtggccttggcaaccatggcgccgctgaccggcgaagcacctccctggaaccgtgcagtggcgctatgggaggaggcggcacaggaagtgcagacaagcagggcgaattcccgtgtgatgatgatacgtcaaaatggacagaactgcacacggattacatatacacccaagacttcaagcacccataaactgttagctagctggctcgatcgcgtgtgccaagtttctgaagattaggccctgtttgggaacaaagtttttgaaaactacagtttttgaaatactatactatactttagttatgacaataccgtagtttataataccgcagttttgaaaactgaggtccagagctaagtttagaatgccttaaaacaattatagtatttgcaatacttcagttttgaaaacagagattttactcagcttgccaaacaccattatatatataatactgcagtatttgagaatactgcagtattcttccaaaactgcagaaaaactttgttcccaaacaccctcttattagttttgtctgtaggcgttgcgcgttcaatgctatagtatgggtgtataattaattagctagccagtcatcagtgactactgtagttaagacttaagagtacgctgaatgagtatcatgtatggacgcattagatggtttaatatatgcatgcatgtttgtatcatgaaaaaaaaaaaaaaaa

SEQ ID NO: 7858 - protein, 102 aa, Zea mays
  misc_feature: Ceres CLONE ID no. 1431672
  misc_feature: Ceres CDNA ID no. 25445489
  misc_feature (87)..(101): Pfam Name: PSK PFAM Desc: Phytosulfokine precursor protein
  misc_feature: Homolog of GI Number: 14916641 NR Desc: Phytosulfokines 1 precursor
  misc_feature: Homolog of GI Number: 51535767 NR Desc: Phytosulfokines 1 precursor
MHGRTAMAVACLLCMTALLLVQDVQSRRLLWTEQEKKQSHGGLGNHGAADRRSTSLEPCSGAMGGGGTGSADKQGEFPCDDDTSKWTELHTDYIYTQDFKHP

SEQ ID NO: 7859 - DNA, 659 bp, Glycine max
  misc_feature: Ceres CLONE ID no. 1432199
  misc_feature: Ceres CDNA ID no. 29191639
  CDS (55)..(495): REFERENCED BY SEQ ID NO: 7860
actctcagcattagttttcattttagcggcggcgaaggagcagaagaactaaccatggcgactcaagcggccaaacaatccgtgcaatgcttcgggcgtaagaagacagcagtggctgttacccactgcaagcctggatgcggtatgatcaagctcaacggctccccgatcgagctgttcaacccagagatcctccgtttcaagatcttcgagcctgtcctcctcctcggcaagcaccgtttcgctggcgtcgacatgaggatccgcgtcaagggtggtggtcacacttcccaggtctacgccatccgtcagagtatcgccaaggcgcttgtggcgttctaccagaagtacgtggacgagcagtcgaagaaggaggtgaaggatatccttatccgttacgataggactctccttgtggcggatccgaggaggtgcgagccgaagaagtttggtgggcgtggtgctcgttcccgtttccagaagagttaccgttaattgctggtttgttttgtttcggtttcggatcgttgcaaggtttcattttcagacttcatgttttgtttggatatctaagaacttattatgttttgctatgtttacgtgtttggtatcggaaagttttaatatttatcactttatatttaaaaaaaaaaaaaaaa

SEQ ID NO: 7860 - protein, 146 aa, Glycine max
  misc_feature: Ceres CLONE ID no. 1432199
  misc_feature: Ceres CDNA ID no. 29191639
  misc_feature (14)..(146): Pfam Name: Ribosomal_S9 PFAM Desc: Ribosomal protein S9/S16
  misc_feature: Homolog of GI Number: 16323500 NR Desc: putative 40S ribosomal protein S16
  misc_feature: Homolog of GI Number: 21555842 NR Desc: 40S ribosomal protein S16
  misc_feature: Homolog of GI Number: 6721162 NR Desc: putative 40S ribosomal protein S16
  misc_feature: Homolog of GI Number: 6984222 NR Desc: 40S ribosomal protein S16
  misc_feature: Homolog of GI Number: 2641209 NR Desc: ribosomal protein S16
  misc_feature: Homolog of GI Number: 439654 NR Desc: RS16 protein
  misc_feature: Homolog of GI Number: 4574242 NR Desc: ribosomal protein S16
  misc_feature: Homolog of GI Number: 77552917 NR Desc: ribosomal protein S9
  misc_feature: Homolog of GI Number: 57036563 NR Desc:  similar to ribosomal protein S16
  misc_feature: Homolog of GI Number: 62639239 NR Desc:  similar to 40S ribosomal protein S16
MATQAAKQSVQCFGRKKTAVAVTHCKPGCGMIKLNGSPIELFNPEILRFKIFEPVLLLGKHRFAGVDMRIRVKGGGHTSQVYAIRQSIAKALVAFYQKYVDEQSKKEVKDILIRYDRTLLVADPRRCEPKKFGGRGARSRFQKSYR

SEQ ID NO: 7861 - DNA, 664 bp, Glycine max
  misc_feature: Ceres CLONE ID no. 1432211
  misc_feature: Ceres CDNA ID no. 25893170
  CDS (38)..(469): REFERENCED BY SEQ ID NO: 7862
gatcgttcaatctgcgagaagaagaagaaggtgaaagatggggaaagacgcaaagtctggtgggaagggtaagggaaagcaagcaagtggcagtgatgatgctgctgcctccaagggtaaaggcaaatctggaaaagccgctgatggtcttggaacatgcacttatgttaaagctagacatgttttgtgcgaaaagcaagggaagatcaacgaggcatacaaaaagttgcaggatggttggttgagcaatggagacaaggttcctcctgctgagtttgcaaagattgcagcagagtactcggagtgcccgtccgggaaaaaaggaggagatcttggatggttccctagaggaaagatggctggtccattccaagatgttgccttcaacactcctgttggtgtcaccagtgcccccttcaaatctacgcacggataccatattatcttgtctgaaggaaggaagaactgacagattacatatctgaaatgctctgctctactcttgtggaagtcacttgctagttgtttactgtaacctatatataaaaaaaactcagcctttgttgttctggttaaaatgtttgcttcaaattgttaacaaatcttctctgccgttttgaataatgaatttctcaaaggctattttataaaaaaaaaaaaaaaa

SEQ ID NO: 7862 - protein, 143 aa, Glycine max; identical to SEQ ID NO: 7802
  misc_feature: Ceres CLONE ID no. 1432211
  misc_feature: Ceres CDNA ID no. 25893170
  misc_feature (77)..(140): Pfam Name: Rotamase PFAM Desc: PPIC
  misc_feature: Homolog of GI Number: 64213910 NR Desc: putative peptidyl
  misc_feature: Homolog of GI Number: 50252332 NR Desc: putative peptidyl
  misc_feature: Homolog of GI Number: 56474474 NR Desc: peptidyl
  misc_feature: Homolog of GI Number: 47683021 NR Desc: PIN4 protein
  misc_feature: Homolog of GI Number: 62739712 NR Desc: Protein
  misc_feature: Homolog of GI Number: 38679892 NR Desc: protein
  misc_feature: Homolog of GI Number: 75773864 NR Desc: PIN4 protein
  misc_feature: Homolog of GI Number: 31206735 NR Desc: ENSANGP00000010568
  misc_feature: Homolog of GI Number: 30584149 NR Desc: Homo sapiens protein
  misc_feature: Homolog of GI Number: 57163115 NR Desc: OTTHUMP00000062024

SEQ ID NO: 7863 - DNA, 1016 bp, Zea mays
  misc_feature: Ceres CLONE ID no. 1432331
  misc_feature: Ceres CDNA ID no. 40351820
  CDS (168)..(719): REFERENCED BY SEQ ID NO: 7864
aaccccaccattacttcccaaaccccataacaattctctcctcgcaccaacccggcgaccaccgtaccagagcttgcccaagaaacgcgcgccacggcgctctgcttttgctctgccgtggcatccccaatctggcagtggtagctgacaaccaatcaacgagcggcatgtccgcggtggacgcgccggggtcggggactccaccgccgccgggccaccgcgggtgctgcgcctcgggcgcgacgctggagctggtgggcgcgttcacggcggtgtgcctggtgctgtacggggtgatactgtacatgaactacctgtacgtgcggtggagcggccgcgacggcgtgcaccggacggactccggcctcgcagggctgcccgcgcagaagaggcccgcgggcgggatggacagggcggcgctagcggccatgccagtgctcaggttcagggctgacgcgcacggcggcggcggcgagtctcctgcggagtgcgcggtgtgcctgagcgccttgcaggacggggacgcggtgcgcgcgctgcccggatgccggcacgcgttccacgccgcctgcgtcgacgcctggctctgcgcgcgcgccacctgccccgtctgccgcgcgcgccccgtgctcccgccgccgcagcaggcgcccaaggccggcgccaaggtggtggccgggtcctccggccggcagctggacctggagagccaagtgtagctcccgcgccacggtgaactgcaaaaggtaggtagctgttgcgttgcgttctgctccaaaactgcatccttcttcttggagtcagtgagtgaatggtagatagacaccccgcaagtacataattttggtgccaatttctttcgatttgtacggagaaggataccatggcatgtaaaattcgtcttgtgcattgtttggcagtgaaaaccttttctgcaatccctctgcgaaatttaagtgttcttttttttggaaggacctgcagtattttgcattgcattaaaaaaaaaaaaaaaa

SEQ ID NO: 7864 - protein, 183 aa, Zea mays
  misc_feature: Ceres CLONE ID no. 1432331
  misc_feature: Ceres CDNA ID no. 40351820
  misc_feature (108)..(149): Pfam Name: zf PFAM Desc: Zinc finger
MSAVDAPGSGTPPPPGHRGCCASGATLELVGAFTAVCLVLYGVILYMNYLYVRWSGRDGVHRTDSGLAGLPAQKRPAGGMDRAALAAMPVLRFRADAHGGGGESPAECAVCLSALQDGDAVRALPGCRHAFHAACVDAWLCARATCPVCRARPVLPPPQQAPKAGAKVVAGSSGRQLDLESQV

SEQ ID NO: 7865 - DNA, 974 bp, Glycine max
  misc_feature: Ceres CLONE ID no. 1432562
  misc_feature: Ceres CDNA ID no. 29191640
  CDS (197)..(691): REFERENCED BY SEQ ID NO: 7866
actctctcccccttctctctcgtgacctcctgtttccgcccaccttctccggctccggcgccggcgaacccaccgcggatcgagcgattcctccgatcaggagaggccagccgggaggaagagcacctacgcgggaggagaggagatggggctcacgttcaccaagctgttcagccgcctgttcgcgaagaaggagatgcggatcctgatggtgggtctcgacgccgcgggaaagaccaccatcctctacaagctcaagctcggcgagatcgtcaccaccatccccaccatcgggttcaatgttgaaactgtggagtacaagaacatcagcttcactgtctgggatgtcgggggtcaggacaagatcaggccactgtggaggcattacttccagaacacacagggtctcatctttgttgtggacagcaacgatagggaccgtgttgttgaagcaagggatgagctccacaggatgctgaatgaggatgagttacgtgatgctgtgctgcttgtgtttgctaacaagcaagatcttccaaatgccatgaatgctgctgagatcactgataagcttggcctgcactcccttcgccagcgacactggtacatccagagcacttgtgctacaacaggggagggactgtatgaaggcctggactggctgtccagcaacattgccaacaagtcctaaattttcgtcaagattttgaaggagctaggagcgctttggatggacgattgaatcaccgggtacctagggattgtgttgggatgggatggtgctatgctattcccgtatgtactgtgtattttcctgagatcaacagctactgagccagctccggctgtggtttcactgtcatactattgttttattgtattttgagccctaagatgtttcttctgaagtaaacagctaaagagagtcctgttcaatttcgtaataagtgttccaagcaaaaaaaaaaaaaaaa

SEQ ID NO: 7866 - protein, 181 aa, Glycine max; identical to SEQ ID NO: 2440
  misc_feature: Ceres CLONE ID no. 1432562
  misc_feature: Ceres CDNA ID no. 29191640
  misc_feature: null
  misc_feature: Useful for making plants with altered Lignin content
  misc_feature: Useful for making plants with altered alkaloid content
  misc_feature (4)..(177): Pfam Name: Arf PFAM Desc: ADP
  misc_feature: Homolog of GI Number: 32129330 NR Desc: ADP
  misc_feature: Homolog of GI Number: 34909214 NR Desc: putative ADP
  misc_feature: Homolog of GI Number: 556686 NR Desc: ADP
  misc_feature: Homolog of GI Number: 50511366 NR Desc: ADP
  misc_feature: Homolog of GI Number: 52548250 NR Desc: ADP
  misc_feature: Homolog of GI Number: 77812440 NR Desc: ADP ribosylation factor 002
  misc_feature: Homolog of GI Number: 47026845 NR Desc: ADP
  misc_feature: Homolog of GI Number: 39653273 NR Desc: ADP
  misc_feature: Homolog of GI Number: 56785043 NR Desc: ADP
  misc_feature: Useful for increasing seed/fruit yield or modifying fruit content
  misc_feature: Useful for making ornamental plants with modified leaves
  misc_feature: Useful for sterility

SEQ ID NO: 7867 - DNA, 823 bp, Zea mays
  misc_feature: Ceres CLONE ID no. 1432890
  misc_feature: Ceres CDNA ID no. 40351821
  CDS (102)..(629): REFERENCED BY SEQ ID NO: 7868
accaaagctcccagcttttttccccttcctccgccgccgcgactagagtttcctcgctagggtttcgtctcccggtccggatccagcagcagcagcgggcgatggcggccgcgggagacgccggcgagaagaagatgatcacactcaagagctcggacggcgaggagttcgaggtggaggaggcggtggccatggagtcgcagacgatccgccacatgatcgaggacgactgcgccgacaacggcatcccgctccccaacgtcaactccaagatcctctccaaggtcatcgagtactgcaacaagcacgtccaggccaagcccgccgatggggctgccgccggagccggagccggagcctcggacgccgcccccgccgcccccgccgaggacctcaagaactgggacgccgagttcgtcaaggtcgaccaggccaccctcttcgacctcatcctggctgccaactacctgaacatcaaggggctgctggacctgacctgccagactgttgctgacatgatcaagggcaagaccccagaggagatccgcaagaccttcaacatcaagaacgactttacgcccgaggaggaggaggagatccgcagggagaaccagtgggcctttgagtagaggagcatctaggcaggcgatgccgccgccgcgttgaatgaacgaacaacgcttagtattcgtcatgtctgcatttcagcgctcttctttatgtctgtcgtaatgggttgtaattatcctggagtctatgaggtggtgtcggtgaacatgttcggtcagtggttatgtttgcgacaacaaaaaaaaaaaaaaaa

SEQ ID NO: 7868 - protein, 175 aa, Zea mays
  misc_feature: Ceres CLONE ID no. 1432890
  misc_feature: Ceres CDNA ID no. 40351821
  misc_feature (11)..(71): Pfam Name: Skp1_POZ PFAM Desc: Skp1 family
  misc_feature (98)..(175): Pfam Name: Skp1 PFAM Desc: Skp1 family
MAAAGDAGEKKMITLKSSDGEEFEVEEAVAMESQTIRHMIEDDCADNGIPLPNVNSKILSKVIEYCNKHVQAKPADGAAAGAGAGASDAAPAAPAEDLKNWDAEFVKVDQATLFDLILAANYLNIKGLLDLTCQTVADMIKGKTPEEIRKTFNIKNDFTPEEEEEIRRENQWAFE

SEQ ID NO: 7869 - DNA, 792 bp, Zea mays
  misc_feature: Ceres CLONE ID no. 1432891
  misc_feature: Ceres CDNA ID no. 25401497
  CDS (106)..(441): REFERENCED BY SEQ ID NO: 7870
accacacaacgaaagcaacatctagccagcgatcgagacagcaagaagctcactcaactacccccagtcccgatcacaggtagctagtcactcggcgcaatcggcatggccagcaagtcggcgtccctgctgatcctcgcggcgctggtggccgcggcgtgcctcgccgggctgggctcggcggcgcgcagcgtgccggcggagaagcccgcggaggacgcggtgaagcggccggacacgttccaggaggggacggtgctgatcccggggatcgggcggtacgagctgggcacccactacatcccggacatcggcgggctggaccacagcatcccggccgccgccagcgggcagttcatccccggcgccgacgacacctgggtgcccaacccgggcttcgaggtgcccaaccccttccgcccccgctccgagtccccctgatgggccgagccggccggccggccagcacgcccacgttacgcccatcgtccgtccagttgcaccgatccatctactacttggtagagctagcctgctacaaatcattttccgctagcttttttggttgctataataaaatagctgctgctacatagccatgcatgcatgtccgatgcatgcatgtgtctgcgactgcgttcgcgccgtcgacgtctcgtgtttgattgaagtgtacgtgtagtcgtgtatgggatatggatggatgcataggaagcacccatcgcatgtctcgcttggtttgttgttgccagtgtaatgtgcttggtttgttgttgaaaaaaaaaaaaaaaa

SEQ ID NO: 7870 - protein, 111 aa, Zea mays
  misc_feature: Ceres CLONE ID no. 1432891
  misc_feature: Ceres CDNA ID no. 25401497
MASKSASLLILAALVAAACLAGLGSAARSVPAEKPAEDAVKRPDTFQEGTVLIPGIGRYELGTHYIPDIGGLDHSIPAAASGQFIPGADDTWVPNPGFEVPNPFRPRSESP

SEQ ID NO: 7871 - DNA, 929 bp, Zea mays
  misc_feature: Ceres CLONE ID no. 1432983
  misc_feature: Ceres CDNA ID no. 25891923
  CDS (57)..(755): REFERENCED BY SEQ ID NO: 7872
attttcgcagccggaaaaaattcatctccttcgaaaattgtcgccaagacccagcgatgccggcaaagcagaggacgccgaaggtcagcagaaaccctgatctgatcaggggagtcggtaaatactcgaggtcgcagatgtaccacaagaggggtctttgggctatcaaggccaaaaacggcggcgttttccctcgccacgacgctaaatcgaaggttgatgctgtagctgagaaaccaccaaagttctatccagctgaagatgttaagaaacctctcgccaacaggcgcaaggcaaatccgaccaagctcagatccagcatcaccccaggaacagtgctgatcatccttgctggtaggttcaagggcaaaagagttgtcttcttgaagcagctttcctctggtttgcttcttgtgtccggaccgttcaagatcaatggtgtgcctctgagacgtgttaaccagtcttacgtgatcggaacgtcctcaaaggtggatgtttctggtgttatccttgagaaattcgatgataagtattttggaaaggtggctgagaagaagaacaagaagggagaaggcgagttcttcgaagtagagaaagaagagaaggtgttcccacaagggaagaaagatgaccagaaagctgtggacggagcattgatcaaagccattgagtcagttcctgagttgaagacttaccttggcgcaaggttttcactgaaacaaggaatgaagccacatgagcttgttttctagatttcaatataaacttttatgtgtgtgtttagagtattgtttactctcaacgtttgtttttgttcttgtccacttactagaattttggcttatacattctatattttatgttttcacatttggtataaacaatcgatcttaatgtgaactttgaagcgaaaaaaaaaaaaaaaa

SEQ ID NO: 7872 - protein, 232 aa, Zea mays
  misc_feature: Ceres CLONE ID no. 1432983
  misc_feature: Ceres CDNA ID no. 25891923
  misc_feature (1)..(58): Pfam Name: Ribosomal_L6e_N PFAM Desc: Ribosomal protein L6
  misc_feature (126)..(232): Pfam Name: Ribosomal_L6e PFAM Desc: Ribosomal protein L6e
  misc_feature: Homolog of GI Number: 21592925 NR Desc: putative 60S ribosomal protein L6
  misc_feature: Homolog of GI Number: 27311965 NR Desc: putative 60S ribosomal protein L6
  misc_feature: Homolog of GI Number: 9795602 NR Desc: Putative  60S ribosomal protein L6
  misc_feature: Homolog of GI Number: 21593910 NR Desc: 60S ribosomal protein L6
  misc_feature: Homolog of GI Number: 19539 NR Desc: ribosomal protein YL16
  misc_feature: Homolog of GI Number: 7208784 NR Desc: 60S ribosomal protein L6
  misc_feature: Homolog of GI Number: 50925014 NR Desc: OSJNBb0022F23.11
  misc_feature: Homolog of GI Number: 50909993 NR Desc: putative 60S ribosomal protein L6
  misc_feature: Homolog of GI Number: 57471700 NR Desc: ribosomal protein L6
  misc_feature: Homolog of GI Number: 57999636 NR Desc: 60S ribosomal protein L6 CgRPL6
MPAKQRTPKVSRNPDLIRGVGKYSRSQMYHKRGLWAIKAKNGGVFPRHDAKSKVDAVAEKPPKFYPAEDVKKPLANRRKANPTKLRSSITPGTVLIILAGRFKGKRVVFLKQLSSGLLLVSGPFKINGVPLRRVNQSYVIGTSSKVDVSGVILEKFDDKYFGKVAEKKNKKGEGEFFEVEKEEKVFPQGKKDDQKAVDGALIKAIESVPELKTYLGARFSLKQGMKPHELVF

SEQ ID NO: 7873 - DNA, 632 bp, Glycine max
  misc_feature: Ceres CLONE ID no. 1433548
  misc_feature: Ceres CDNA ID no. 29191299
  CDS (33)..(455): REFERENCED BY SEQ ID NO: 7874
aacaaaacagagattagctcaagccgtccaaaatgtcgaagcgaggacgtggaggtacgtctggtaacaagttcaggatgtcgcttggtctccccgtagcggcgaccgtgaactgtgccgacaacacaggtgccaagaacctctacatcatttccgtgaagggaatcaagggtcgtctcaaccgattgccttccgcttgtgtcggggacatggtgatggccaccgtgaagaaagggaagcctgatctaaggaaaaaggttctgccagctgtcatcgttaggcagaggaagccgtggcgccgaaaggatggtgttttcatgtacttcgaagataatgctggagtcattgtgaaccccaagggagaaatgaaaggttctgcggtcactggtcctatcggtaaagagtgtgctgatctttggccaaggattgctagtgctgccaatgccattgtctgaagacaagatcaatcaatcacttgccgtttggttttctttcaaaacaaatttggtaatttttggtagatgtttttttttttttttaattttctggcaatatgtacgacattcaaatgttttggttatatagacatctatcaatggtttctacttttgtcttgaaaaaaaaaaaaaaaa

SEQ ID NO: 7874 - protein, 140 aa, Glycine max
  misc_feature: Ceres CLONE ID no. 1433548
  misc_feature: Ceres CDNA ID no. 29191299
  misc_feature: The plant is abnormally small.
  misc_feature: Useful for making plants with modulated biomass
  misc_feature (19)..(140): Pfam Name: Ribosomal_L14 PFAM Desc: Ribosomal protein L14p/L23e
  misc_feature: Homolog of GI Number: 7547099 NR Desc: ribosomal protein L17
  misc_feature: Homolog of GI Number: 21618149 NR Desc: putative 60S ribosomal protein L17
  misc_feature: Homolog of GI Number: 32400871 NR Desc: ribosomal Pr 117
  misc_feature: Homolog of GI Number: 13430182 NR Desc: ribosomal protein L17
  misc_feature: Homolog of GI Number: 57471720 NR Desc: ribosomal protein L17
  misc_feature: Homolog of GI Number: 50915826 NR Desc: 60S ribosomal protein L17
  misc_feature: Homolog of GI Number: 7440849 NR Desc: ribosomal protein L17
  misc_feature: Homolog of GI Number: 2982289 NR Desc: 60S ribosomal protein L17
  misc_feature: Homolog of GI Number: 4574244 NR Desc: ribosomal protein L17
  misc_feature: Homolog of GI Number: 55645299 NR Desc:  similar to ribosomal protein L23
  misc_feature: Useful for delaying flowering time
  misc_feature: Useful for increasing chlorophyll and photosynthetic capacity
  misc_feature: Useful for increasing seed/fruit yield or modifying fruit content
  misc_feature: Useful for making ornamental plants with modified leaves
  misc_feature: Useful for making plants with increased biomass and foliage
  misc_feature: Useful for making plants with increased biomass and foliage
  misc_feature: Useful for making plants with increased biomass and foliage
  misc_feature: Useful for making shorter plants
  misc_feature: Useful for sterility
MSKRGRGGTSGNKFRMSLGLPVAATVNCADNTGAKNLYIISVKGIKGRLNRLPSACVGDMVMATVKKGKPDLRKKVLPAVIVRQRKPWRRKDGVFMYFEDNAGVIVNPKGEMKGSAVTGPIGKECADLWPRIASAANAIV

SEQ ID NO: 7875 - DNA, 693 bp, Glycine max
  misc_feature: Ceres CLONE ID no. 1433558
  misc_feature: Ceres CDNA ID no. 25445675
  CDS (3)..(518): REFERENCED BY SEQ ID NO: 7876
acatcgcagcatccgcagtccccccagcccacaccttccaaccaagcaccaagctccaccgccgtcgaagcacccatggcacccaaggcggagaagaagccggcgccggagaagaccccggcggggaagaagcccgcggcggagaagaggcccgcggccgggaagacggcgtccaaggagggcgggggcgagaagaaggggaagaagaaggccaagaagagcgtggagacgtacaagatctacatcttcaaggtgctcaagcaggtgcaccccgacatcggcatctcctccaaggccatgtccatcatgaactccttcatcaacgacatcttcgagaagctcgccggcgagtccgccaagctggcccgctacaacaagaagcccaccatcacgtcgagggagatccagacctccgtccgcctcgtcctccccggcgagctcgccaagcacgccgtctccgagggcaccaaggccgtcaccaagttcacctcttcttaggcttcatccttgtatcatgagttgatggcggtgttctgtgtgtagttagcagtgcgatgttacaatctctgtaagaattgtgctgcttgtgggtctgaagaattagtcaggttgctgtctgaattattgctcaatcgtgtgcttgttttattcagtttcggttggaaggttctaaaaagaaaaaaaaaaaaaaaa

SEQ ID NO: 7876 - protein, 140 aa, Glycine max
  misc_feature: Ceres CLONE ID no. 1433558
  misc_feature: Ceres CDNA ID no. 25445675
  misc_feature: No seed is being produced by the plant
  misc_feature: The plant flowers significantly late compared to wild-type.
  misc_feature: Useful for biocontainment applications
  misc_feature: Useful for making plants with modulated flowering time
  misc_feature (47)..(119): Pfam Name: Histone PFAM Desc: Core histone H2A/H2B/H3/H4
  misc_feature: Homolog of GI Number: 21801 NR Desc: histone H2B
  misc_feature: Homolog of GI Number: 22325 NR Desc: H2B histone
  misc_feature: Homolog of GI Number: 577825 NR Desc: H2B histone
  misc_feature: Homolog of GI Number: 22323 NR Desc: H2B histone
  misc_feature: Homolog of GI Number: 1708107 NR Desc: Histone H2B
  misc_feature: Homolog of GI Number: 122033 NR Desc: Histone H2B.2
  misc_feature: Homolog of GI Number: 34908130 NR Desc: putative histone H2B
  misc_feature: Homolog of GI Number: 34895838 NR Desc: putative histone H2B
  misc_feature: Homolog of GI Number: 531058 NR Desc: protein H2B
  misc_feature: Homolog of GI Number: 34895832 NR Desc: putative histone H2B
MAPKAEKKPAPEKTPAGKKPAAEKRPAAGKTASKEGGGEKKGKKKAKKSVETYKIYIFKVLKQVHPDIGISSKAMSIMNSFINDIFEKLAGESAKLARYNKKPTITSREIQTSVRLVLPGELAKHAVSEGTKAVTKFTSS

SEQ ID NO: 7877 - DNA, 1001 bp, Zea mays
  misc_feature: Ceres CLONE ID no. 1433587
  misc_feature: Ceres CDNA ID no. 25402995
  CDS (125)..(649): REFERENCED BY SEQ ID NO: 7878
tcatcgctctcggggttggcttctcctccccttccggttcgggttctggttcggttcgggtccgagagtagctagcctagtctagggtttccgtagttcggagaggagagaaagggagagatccatggcggagacggagtaccgctgcttcgtgggcggcctcgcctgggccaccgacgaccacaacctccagcaggccttcagccagtacggcgagatcctcgacgccaagatcatcaacgaccgcgagacgggcaggtcccgtggcttcggcttcgtcacgttcggcagcgaggagtcgatgcgccaggccatcgaggagatgaacggcaaggagctcgacgggcgcaacatcaccgtcaacgaggcccagtcccgccggtccggcggtgggggcggcggcggcggctacggcggccagcgcggcggtagcggaggctacggcggcggcggcggtggctacggcggccagggcggtggcggctacggccagggaggcggtggcggctacggccagggcggtggtggctacggcggccagcgcggtggcggcggctacggcggcggcggcggcggctacggcggcggcggtggtggctacggcggccagcgtggtggcggtgactccggcggccagtggaggaactgagcggcggggccctccagttatcgatctatctaccatctcgtcgtcttcgtcagcaagttatcttcagttcctgtgtcagtcagtctgagtcgtcgtgtgtgtcgttgagtcctgtggtgtttttgatcgcgagctcgagtgtcgctctgtccggggttaattagagctggttacgcgaggaagaaacaacatgtgttatctttcagtcttggtcggtcggtcgtcggtgatgcagcaatcccttctgtcatggattgggatgtgatgttggaatatcctatgtttgaactcggtttaaatggaagaaaatgcaagtcgtcatagctgcgaaatatcaaaaaaaaaaaaaaaa

SEQ ID NO: 7878 - protein, 174 aa, Zea mays
  misc_feature: Ceres CLONE ID no. 1433587
  misc_feature: Ceres CDNA ID no. 25402995
  misc_feature: The plant flowers significantly late compared to wild-type.
  misc_feature: The plant is abnormally small.
  misc_feature: Useful for making plants with modulated growth and phenotype characteristics
  misc_feature: null
  misc_feature: The sequence is a functional homolog of  SEQ ID NO 1016 in the  11/435,388 US patent application
  misc_feature: Useful for making plants with altered Lignin content
  misc_feature: Useful for making plants with altered alkaloid content
  misc_feature: Useful for making plants with modulated biomass
  misc_feature: Useful for making plants with modulated flowering time
  misc_feature: Useful for making plants with modulated nitrogen use efficiency
  misc_feature (8)..(79): Pfam Name: RRM_1 PFAM Desc: RNA recognition motif.
  misc_feature: Homolog of GI Number: 728594 NR Desc: glycine rich protein
  misc_feature: Homolog of GI Number: 974605 NR Desc: single
  misc_feature: Homolog of GI Number: 21625 NR Desc: glycine
  misc_feature: Homolog of GI Number: 50881454 NR Desc: glycine
  misc_feature: Homolog of GI Number: 77557139 NR Desc: glycine
  misc_feature: Homolog of GI Number: 17819 NR Desc: glycine
  misc_feature: Homolog of GI Number: 2267593 NR Desc: glycine
  misc_feature: Homolog of GI Number: 10799202 NR Desc: glycine
  misc_feature: Homolog of GI Number: 2331131 NR Desc: glycine
  misc_feature: Homolog of GI Number: 2331133 NR Desc: glycine
  misc_feature: Useful for delaying flowering time
  misc_feature: Useful for increasing chlorophyll and photosynthetic capacity
  misc_feature: Useful for making ornamental plants with modified leaves
  misc_feature: Useful for making plants with altered leaf shape eg curled leaves
  misc_feature: Useful for making plants with altered leaf shape eg curled leaves
  misc_feature: Useful for making plants with altered leaf shape eg curled leaves
  misc_feature: Useful for making plants with increased biomass and foliage
  misc_feature: Useful for making plants with increased biomass and foliage
  misc_feature: Useful for making shorter plants
  misc_feature: Useful for sterility
MAETEYRCFVGGLAWATDDHNLQQAFSQYGEILDAKIINDRETGRSRGFGFVTFGSEESMRQAIEEMNGKELDGRNITVNEAQSRRSGGGGGGGGYGGQRGGSGGYGGGGGGYGGQGGGGYGQGGGGGYGQGGGGYGGQRGGGGYGGGGGGYGGGGGGYGGQRGGGDSGGQWRN

SEQ ID NO: 7879 - DNA, 822 bp, Glycine max
  misc_feature: Ceres CLONE ID no. 1433622
  misc_feature: Ceres CDNA ID no. 25893171
  CDS (78)..(683): REFERENCED BY SEQ ID NO: 7880
gttagacatccttagacgacgacgacgagagagaaccaatcggagcttggaagggttgagacttgaacgagcgagagatgagcaactacgcgattccactttcttcttcgtcctctctctccaatgcctatcatcaaccttctcgtgtttgcttcgttttccgcaatcctcgttccaattttgagtttcgcgggacacgactaagtggtggggttcgaagcacctctttaaagtgcaattgctgcagcaaagggaagggaggtacaggttctggtgaaaacgaaaacagaaatgtgttggatgctttctttttgggaaaggcactagctgaggttatcaacgagcgaattgagtccactgttggcgaagttttgggtaacattggaaggtttcaagctgagcaacagaggcaagttcaagagattcagggagaggtacttgaaagagccaaaaaagctaaggaaagagcagctagagaaaccatggaggcacaaggactcgtaccggaatccacaaacccaaacccaaagccggctgctggtgttgttgcctctgttgtaacccctacctcgatcgtcgaaagcaaggctttaagaaatgatgagaagctgtctggtttctccggatcttcaatgggggacgatatggatagctcgagttctagctacgaagacagtgtctaagcgattgttccttggccaatttcatgatttggtgatagatgcagacttgtttgaaaccgttgagaacatcttcgttgatatatgtacttaaaatgatgtttgagaataaataaccttgatattaaaaaaaaaaaaaaaa

SEQ ID NO: 7880 - protein, 201 aa, Glycine max
  misc_feature: Ceres CLONE ID no. 1433622
  misc_feature: Ceres CDNA ID no. 25893171
  misc_feature: Homolog of GI Number: 23130619 NR Desc: COG0840: Methyl
MSNYAIPLSSSSSLSNAYHQPSRVCFVFRNPRSNFEFRGTRLSGGVRSTSLKCNCCSKGKGGTGSGENENRNVLDAFFLGKALAEVINERIESTVGEVLGNIGRFQAEQQRQVQEIQGEVLERAKKAKERAARETMEAQGLVPESTNPNPKPAAGVVASVVTPTSIVESKALRNDEKLSGFSGSSMGDDMDSSSSSYEDSV

SEQ ID NO: 7881 - DNA, 937 bp, Glycine max
  misc_feature: Ceres CLONE ID no. 1433649
  misc_feature: Ceres CDNA ID no. 29191641
  CDS (3)..(731): REFERENCED BY SEQ ID NO: 7882
acacagagagaaaaaaaaagagcacaacgcatcagcccagacgccgacgccacccaacccaagctctccaactcgaagcgcccaccctctccgccggcggcgaccggccgatggggtccaacgaggcggacaagccgctgcgccggatcggcgcgtcgttcgagcagctcgcggccgtcgccaaacagcagcaacagcccgcgatggcggcgggggacttctcgcgcgcctgctccaacgtctccgtcctctttggctgcctcggcatcgccttcaagttcgccgagatggactacgtcgccaaggttaatgatttactggaggcatccaagacgatttcaacattgccctccatggttgagcttgacattcaaaagggcactgtcaggcaggcggggagccatacgaggaatctactgagggttaagcgtgggattgatatggtgaaagttctgtttgagcagatattggtcacagaaggcaactccctgaaggacgcagcgtcaaaggcttatgctcaggtgtttgctcctcaccatggctgggccataaggaaggccgttggtgctggaatgtatgccctcccttctaagtcgcagctcttgaagaaactgaatgaagatgaaaattcggcaagggctcaaatgcagagtttcgtcaggtcgtctggaccagtaattctctacgtcgaagacctcttcacctccaagaatttagggctggactggtgagcaaagcctatacagagagacttccaatgtactaatgcgactagatggtgtgctgtgacctcaaacaactgtagctggttttggtgttttgagttcgagagttcagagttgtaacctaaattcaataagctgtgctaccgtggaggttcttgacgggtggatatgggcgggagccgttgttacaaacctgaaaaaaaaaaaaaaaa

SEQ ID NO: 7882 - protein, 206 aa, Glycine max
  misc_feature: Ceres CLONE ID no. 1433649
  misc_feature: Ceres CDNA ID no. 29191641
  misc_feature: Homolog of GI Number: 24656881 NR Desc: CG30392
  misc_feature: Homolog of GI Number: 17861418 NR Desc: GH03649p
  misc_feature: Homolog of GI Number: 51011077 NR Desc: zgc:92000
  misc_feature: Homolog of GI Number: 62659013 NR Desc:  similar to Glycolipid transfer protein
MGSNEADKPLRRIGASFEQLAAVAKQQQQPAMAAGDFSRACSNVSVLFGCLGIAFKFAEMDYVAKVNDLLEASKTISTLPSMVELDIQKGTVRQAGSHTRNLLRVKRGIDMVKVLFEQILVTEGNSLKDAASKAYAQVFAPHHGWAIRKAVGAGMYALPSKSQLLKKLNEDENSARAQMQSFVRSSGPVILYVEDLFTSKNLGLDW

SEQ ID NO: 7883 - DNA, 770 bp, Zea mays
  misc_feature: Ceres CLONE ID no. 1433672
  misc_feature: Ceres CDNA ID no. 40351822
  CDS (88)..(549): REFERENCED BY SEQ ID NO: 7884
acaccatcccagcccccacctcccctgcctccagcaaactcacagcccccaccaccgaagctcccaaccccacccgaagcggcagccatggcccccaaggcagacaagaagccggccgcggagaacaaggtcgagaaggcgacggagaagacccccgcgggcaagaagcccaaggccgagaagcggctgccggcgggcaagacggcgtccaaggaggccggcggcgagggcaagacccggggccgcaagaagggcagcaaggcgaagaagggcgtggagacgtacaagatctacatcttcaaggtgctgaagcaggtgcaccctgacatcggcatctcctccaaggccatgtccatcatgaactccttcatcaacgacatcttcgagaagctcgccggggagtccgccaagctggcccgctacaacaagaagcccaccatcacctcccgggagatccagacctccgtccgcctcgtcctccccggggagctcgccaagcacgccgtctccgagggcaccaaggccgtcaccaagttcacctcctcctagactgacgatgcgtcgcttgttgtgacagatgtggctgtctgatgtatctgcaagtagaagtagtagttcgtgtggtagaagattgccaacgctttgttggcttcttggttgtgagaactgaacgtgttgcttttgcaaactgaaatctatctaaaaaatgttgcggttgtggtactactacatctgtgacagtgatgttcttactaaaaaaaaaaaaaaaa

SEQ ID NO: 7884 - protein, 153 aa, Zea mays; identical to SEQ ID NO: 7088
  misc_feature: Ceres CLONE ID no. 1433672
  misc_feature: Ceres CDNA ID no. 40351822
  misc_feature: No seed is being produced by the plant
  misc_feature: The plant flowers significantly late compared to wild-type.
  misc_feature: Useful for biocontainment applications
  misc_feature: Useful for making plants with modulated flowering time
  misc_feature (60)..(132): Pfam Name: Histone PFAM Desc: Core histone H2A/H2B/H3/H4

SEQ ID NO: 7885 - DNA, 1003 bp, Zea mays
  misc_feature: Ceres CLONE ID no. 1433812
  misc_feature: Ceres CDNA ID no. 25445860
  CDS (2)..(790): REFERENCED BY SEQ ID NO: 7886
ccgatcgagccgcccacctcgagaggccgccataattcattccatccattcatccgctgccgcgtatataagcgcggccattggggcgctcgtggggtgctcgtcacatcgtcgcatcaggcgcgcgcaggccgagatcagatcggcggcggcggcggcgacggcgacggcgaccatgttcagcgggacgcagcagaagtgcaaggtgtgcaccaagacggtgtaccccatggaccagctctccaccgacggcgccgtcttccaccgcgcctgcttcaagtgccaccactgcaagtccaccctctcctttagcagctactcctcctttgaaggagtgccctactgcaagccccatttcgcgcagctgttcaaggagaccgggagctacaacaagagcttccagtcacaatcccccgcgaaatctgcgacggagaagttgactcctgagctgaccagatcgccaagcaaagctgcgggcatgttttcgggaacgcaggacaagtgcgccacttgtggtaaaacagcataccctcttgagaaggtgacagttgaagagaagtcctaccacaagtcctgcttcaaatgctctcatggaggctgcgccctctcgccgtccaactacgcggccttggaaggcatcctctactgcaagcaccatttctcccagcttttcaaggagaaggggagctacaaccatctgatcaagtgcgcatcggtcaagcgcgcagcagaggcgcaaacagcacaggcggcggcacaaacagctccggcggctgctgaatcctcctgattatgctgccatcttcatagtgggctttgagggcgaaagtttggaaagcgcctcttttttttacgattgtaacctgctgtgtgctgtgttctagctctggggataccaggactatatttcgtgtccccatatgtggctagctcgatcacgttgttgaaccatggagttgaatgtcatttcggaagaaattgttgtgcaaaaaaaaaaaaaaaa

SEQ ID NO: 7886 - protein, 204 aa, Zea mays
  misc_feature: Ceres CLONE ID no. 1433812
  misc_feature: Ceres CDNA ID no. 25445860
  misc_feature: Useful for making plants with modulated growth and phenotype characteristics
  misc_feature: The sequence is a functional homolog of  SEQ ID NO 428 in the  10/412,699 US patent application
  misc_feature: The sequence is a functional homolog of  SEQ ID NO 504 in the  11/435,388 US patent application
  misc_feature: The sequence is a functional homolog of  SEQ ID NO 616 in the  11/435,388 US patent application
  misc_feature: The sequence is a functional homolog of  SEQ ID NO 988 in the  11/479,226 US patent application
  misc_feature: The sequence is a functional homolog of  SEQ ID NO 992 in the  11/479,226 US patent application
  misc_feature (110)..(167): Pfam Name: LIM PFAM Desc: LIM domain
  misc_feature: Homolog of GI Number: 34902012 NR Desc: putative LIM
  misc_feature: Homolog of GI Number: 21689625 NR Desc: At2g39900/T28M21.6
  misc_feature: Homolog of GI Number: 1841464 NR Desc: LIM
  misc_feature: Homolog of GI Number: 20258945 NR Desc: putative transcription factor L2
  misc_feature: Homolog of GI Number: 17227092 NR Desc: LIM domain protein
  misc_feature: Homolog of GI Number: 1890352 NR Desc: transcription factor L2
  misc_feature: Homolog of GI Number: 50911110 NR Desc: putative LIM domain protein PLIM
  misc_feature: Homolog of GI Number: 8515104 NR Desc: LIM domain protein PLIM
  misc_feature: Homolog of GI Number: 28973363 NR Desc: putative LIM
  misc_feature: Homolog of GI Number: 15223476 NR Desc: LIM domain
  misc_feature: Useful for making bigger plants
  misc_feature: Useful for making stronger plants
MFSGTQQKCKVCTKTVYPMDQLSTDGAVFHRACFKCHHCKSTLSFSSYSSFEGVPYCKPHFAQLFKETGSYNKSFQSQSPAKSATEKLTPELTRSPSKAAGMFSGTQDKCATCGKTAYPLEKVTVEEKSYHKSCFKCSHGGCALSPSNYAALEGILYCKHHFSQLFKEKGSYNHLIKCASVKRAAEAQTAQAAAQTAPAAAESS

SEQ ID NO: 7887 - DNA, 882 bp, Glycine max
  misc_feature: Ceres CLONE ID no. 1433918
  misc_feature: Ceres CDNA ID no. 36707064
  CDS (88)..(603): REFERENCED BY SEQ ID NO: 7888
acagagcccgaagccaaaggtaatccaatccgcacagaaatccccatctcaaaaccctagccctcatccccgatcccggcgagagagatggccaacccgagggtgttcttcgacatgaccgtcggcggcgcgccggcggggcgcatcgtgatggagctgtacaaggacgcggtgccgcggacggtggagaacttccgcgcgctctgcaccggcgagaagggcgtcggcaagagcggcaagccgctgcactacaagggcagcgccttccaccgcgtgatccccgacttcatgtgccagggcggcgacttcaccaggggcaacggcaccggcggcgagtccatctacggcgagaagttcgccgacgagaagttcgtccacaagcacaccaagcccgggatcctctccatggccaacgccgggcccaacaccaacggctcccagttcttcatctgcaccgtcccctgcaattggctcgacggcaagcacgtggtcttcggcgaggtcgtcgagggcatggacgtcgtcaagaacatcgagaaggtgggctcccgcagcggcacctgctccaagcaggtcgtcatcgccgactgcggccagctctagatccgcccgcccgccggtcacctttcgccgtcgttgtcgtcgccccgtgtgtcccgtgtcgtgtcgtcgatctaaataagagagtcgtgtgtcgtgtgtcgtgtcttcccctggtccgtccggtgagatctccgtggttggtttaggagggttttaggtggactctttgggccgctggatctgcgtccggcggccttggttatcttcctgtgtctgctgctatcttaccgtttgaatgagatgaactccgctatgaattatccaaaaaaaaaaaaaaaa

SEQ ID NO: 7888 - protein, 171 aa, Glycine max; identical to SEQ ID NO: 5444
  misc_feature: Ceres CLONE ID no. 1433918
  misc_feature: Ceres CDNA ID no. 36707064
  misc_feature (5)..(171): Pfam Name: Pro_isomerase PFAM Desc: Cyclophilin type peptidyl
  misc_feature: Homolog of GI Number: 13925737 NR Desc: cyclophilin A
  misc_feature: Homolog of GI Number: 13925734 NR Desc: cyclophilin A
  misc_feature: Homolog of GI Number: 50904851 NR Desc: peptidylprolyl isomerase Cyp2
  misc_feature: Homolog of GI Number: 600769 NR Desc: cyclophilin 2
  misc_feature: Homolog of GI Number: 829148 NR Desc: cyclophilin
  misc_feature: Homolog of GI Number: 62728587 NR Desc: cyclophilin
  misc_feature: Homolog of GI Number: 1563719 NR Desc: cyclophylin
  misc_feature: Homolog of GI Number: 52788398 NR Desc: cyclophilin
  misc_feature: Homolog of GI Number: 18076088 NR Desc: cyclophilin
  misc_feature: Homolog of GI Number: 18376589 NR Desc: putative cyclosporin A

SEQ ID NO: 7889 - DNA, 759 bp, Zea mays
  misc_feature: Ceres CLONE ID no. 1434154
  misc_feature: Ceres CDNA ID no. 40351823
  CDS (1)..(582): REFERENCED BY SEQ ID NO: 7890
atatcgcttgaggtttcttccgcattgccccccctcgagacgaaaatggttgctttcaggtttcaccagtaccaggttgtcggaagagctctcccgacagagaaggatgttcaacccaagatttacaggatgaagctctgggccaccaacgaggttcgtgccaagtccaagttctggtacttcttgaggaagctgaagaaggtcaagaagagtaatggtcagatgctcgccattaacgagatctttgagaagaacccgacaaccatcaagaacttcggaatctggttgaggtaccagagcagaactggataccacaacatgtacaaggagtaccgtgacactaccttgaacggagctgttgagcagatgtacactgagatggcgtcccgacaccgtgtgaggttcccttgcatccagatcatcaagacagcaactgtcccggctaaactttgcaagagggagagcaccaaacagtttcacaacagtaagatcaagttccccttggtgttccgtaaggtgagaccaccaagcaggaagctcaagaccacttacaaggcatccaaacccaaccttttcatgtaaaaggctcacatgtttttgtttggggctcatatcttcatgaagttatgcaacctgctgttttggattttatttttctactataacaattttttaggttttgtattcatcaaacttgagtatttgtttcttgctatgaaaaaaactctttaccttgtttccataaaaaaaaaaaaaaaa

SEQ ID NO: 7890 - protein, 178 aa, Zea mays
  misc_feature: Ceres CLONE ID no. 1434154
  misc_feature: Ceres CDNA ID no. 40351823
  misc_feature (5)..(178): Pfam Name: Ribosomal_L18ae PFAM Desc: Ribosomal L18ae protein family
MVAFRFHQYQVVGRALPTEKDVQPKIYRMKLWATNEVRAKSKFWYFLRKLKKVKKSNGQMLAINEIFEKNPTTIKNFGIWLRYQSRTGYHNMYKEYRDTTLNGAVEQMYTEMASRHRVRFPCIQIIKTATVPAKLCKRESTKQFHNSKIKFPLVFRKVRPPSRKLKTTYKASKPNLFM

SEQ ID NO: 7891 - DNA, 641 bp, Zea mays
  misc_feature: Ceres CLONE ID no. 1434289
  misc_feature: Ceres CDNA ID no. 40351824
  CDS (65)..(475): REFERENCED BY SEQ ID NO: 7892
accaaacgcattctctctcctaaagcaaatatcaaaatctagaagagtaactttgaaaccatagatggctcgtaccaagcaaaccgctagaaaatccaccggaggaaaggctccgaggaagcagctggcgacgaaagcggcgaggaagtcggctccggccaccggaggagtgaagaagccgcacagattccgccccggaacggtggcgctgagagagatcaggaagtaccagaagagcaccgagcttctcatccgcaagcttccgttccagcgtctggttcgtgagatcgctcaggatttcaagacggatctgaggttccagagcagtgccgtcgcggctttacaagaggctgccgaggcttaccttgttgggttgttcgaagacacgaatctgtgtgcgattcacgccaagagagtcacgatcatgccgaaggatatccagctcgctaggagaatcagaggtgaaagagcttgaagacctatctagctttgtctagttcgttaatgtgtactttgatctatggtgaattttctaattctgggtttgctaaaggtttagtctttgttaagatagtccttaaggtgttcgacgaaatacctcaatgaaaatgttctcttgtttaataaaaaaaaaaaaaaaa

SEQ ID NO: 7892 - protein, 136 aa, Zea mays; identical to SEQ ID NO: 358
  misc_feature: Ceres CLONE ID no. 1434289
  misc_feature: Ceres CDNA ID no. 40351824
  misc_feature (58)..(134): Pfam Name: Histone PFAM Desc: Core histone H2A/H2B/H3/H4

SEQ ID NO: 7893 - DNA, 654 bp, Zea mays
  misc_feature: Ceres CLONE ID no. 1434413
  misc_feature: Ceres CDNA ID no. 40351825
  CDS (102)..(452): REFERENCED BY SEQ ID NO: 7894
acccaaagcctgacctaagctattcggctatctgtagtcggacctgatctaatcgcagtgtggtccttcaaccagatcggttcctgagcgagctgacgagcatgtacgagcggagcacggagaagggctccgtctgggtcaccatgaagcgatcaactctcaagggcaaggcacagttgcggaagatggagaataaggggcaggaggtagagcacaggtgcctcgtccgcgcctccaatggcaagaagaacatctccacctcggtttctctaaaggagtacacaaagttccaagcttcatacgcaacagttcttaaggcccatatgcatgctctgaagaaaagggagaggaaagacaagaagaaggctgcagatgctgagaaggcaattgagaccgcacccaagaagcagaagaaagcatcttcaaagaaatcttcggggtccaagtcataaggcgctcgcagaaatcagtgtcttctcccttctgttgttaccgcaccgccagactaattagagtgtcgtgaattttatctggtttttatccgaatgtgtgtctgggagatcaaagcctgtgaatacacttttatagagccgtgtcatcgatgctaacattttttgaagcagagttttgaggtgaataaaaaaaaaaaaaaaa

SEQ ID NO: 7894 - protein, 116 aa, Zea mays
  misc_feature: Ceres CLONE ID no. 1434413
  misc_feature: Ceres CDNA ID no. 40351825
  misc_feature (1)..(78): Pfam Name: SRP14 PFAM Desc: Signal recognition particle 14kD protein
MYERSTEKGSVWVTMKRSTLKGKAQLRKMENKGQEVEHRCLVRASNGKKNISTSVSLKEYTKFQASYATVLKAHMHALKKRERKDKKKAADAEKAIETAPKKQKKASSKKSSGSKS

SEQ ID NO: 7895 - DNA, 788 bp, Zea mays
  misc_feature: Ceres CLONE ID no. 1434544
  misc_feature: Ceres CDNA ID no. 25445490
  CDS (76)..(435): REFERENCED BY SEQ ID NO: 7896
aatgacatttacttcttcagtttaggagtacgtcgcctctcatcccggctctcgcctctcgctccccagccatccatggcgatgccaccgagccgttcgtgggcggagctgcagcacgacctcctggtgtcgatcatgacccgagtgggcgcgccggacctcctatggggcggcgcttcccgcgcctgctcttcgtggcgggccgcggcgcgggacccactcgcgtggcgacgcgtcgacctccgcgactgggtcgccctcacctccggccggcgcgccgcgagacctggacactccagctctcgcgtacccgtccacgccgcgctcgtcggcatcctggaggtcgccgccaagttggccgaagggcggatcgaggccgtgctgctccccgagtttgctgatgaggaccatctcttgttcctcgctgagaggtgaaatcttctccctgtccctttgaacttggctggctgttccaggtggggaaatgcccgttgaccttttaattagcaccttattgatgctaaaagttaattaggttatggtactagtaggaggcgttattgtattcgcatcagatccacccgaattcgcttatttaatgacagttttcatcttaggtgaatgtgttttttttttcatttctgttgtaggtgccaaatcactgcaagcttgcatcatatggatgttttgctgattttcttatgagtttttgcgatgttcatttgtaatgcttatcgcagggaaaatatatgtgaattgtagtttcacttccaaaaaaaaaaaaaaaa

SEQ ID NO: 7896 - protein, 119 aa, Zea mays
  misc_feature: Ceres CLONE ID no. 1434544
  misc_feature: Ceres CDNA ID no. 25445490
  misc_feature: Homolog of GI Number: 62733502 NR Desc: F
MAMPPSRSWAELQHDLLVSIMTRVGAPDLLWGGASRACSSWRAAARDPLAWRRVDLRDWVALTSGRRAARPGHSSSRVPVHAALVGILEVAAKLAEGRIEAVLLPEFADEDHLLFLAER

SEQ ID NO: 7897 - DNA, 648 bp, Glycine max
  misc_feature: Ceres CLONE ID no. 1434900
  misc_feature: Ceres CDNA ID no. 29191642
  CDS (1)..(528): REFERENCED BY SEQ ID NO: 7898
accatcccaagcacacccgcgccctccacctgctcccggatcccggccatctctccgccgacccacagcaccagcgcgctcacccaccaccgtgaaccagaagatggccatcgccggcagcgggaggggcaaggcgaagcccgccgccagcgccaagtccgtgtcccggtcgtccaaggccggcctgcagttccccgtcggccgcgtcgcccgctacctcaaagtcggcaagtacgcgcagcgcgtcggcgccggcgcccccgtctacctggccgccgttctcgagtacctcgccgcagagaccctggagctcgctgggaacgcggcgcgggacaacaagaagaaccggatcgtgccgcgccacatccagctggcggtgcgcaacgacgaggagctgagccggctgctgggctcggtcaccatcgccgccggcggggtgctgcccagcatccacaccacgctcctccgcaagaaggccggcaagggcaagggcgacatcggctccgcttcccaggagttttagattagattggaaacttggaatgcatctcgcaatcttgttcttgttgtgactgcctgtgacgcccttgtcaatactaatatgaatgaaacggatatgttgctactgttttaaaaaaaaaaaaaaaa

SEQ ID NO: 7898 - protein, 139 aa, Glycine max
  misc_feature: Ceres CLONE ID no. 1434900
  misc_feature: Ceres CDNA ID no. 29191642
  misc_feature (22)..(97): Pfam Name: Histone PFAM Desc: Core histone H2A/H2B/H3/H4
  misc_feature: Homolog of GI Number: 77555982 NR Desc: histone h2a.
  misc_feature: Homolog of GI Number: 3204129 NR Desc: histone H2A
  misc_feature: Homolog of GI Number: 297871 NR Desc: histone H2A
  misc_feature: Homolog of GI Number: 21553797 NR Desc: histone H2A
  misc_feature: Homolog of GI Number: 20334750 NR Desc: At1g08880/F7G19_24
  misc_feature: Homolog of GI Number: 21593507 NR Desc: putative histone H2A
  misc_feature: Homolog of GI Number: 121985 NR Desc: Histone H2A
  misc_feature: Homolog of GI Number: 121981 NR Desc: Histone H2A
  misc_feature: Homolog of GI Number: 536896 NR Desc: protein H2A
  misc_feature: Homolog of GI Number: 1708102 NR Desc: Histone H2A
MAIAGSGRGKAKPAASAKSVSRSSKAGLQFPVGRVARYLKVGKYAQRVGAGAPVYLAAVLEYLAAETLELAGNAARDNKKNRIVPRHIQLAVRNDEELSRLLGSVTIAAGGVLPSIHTTLLRKKAGKGKGDIGSASQEF

SEQ ID NO: 7899 - DNA, 762 bp, Glycine max
  misc_feature: Ceres CLONE ID no. 1434932
  misc_feature: Ceres CDNA ID no. 29191841
  CDS (56)..(574): REFERENCED BY SEQ ID NO: 7900
atccacgactgatccaaaaccattccttcaaagctctctcataccaatcaaaacgatggcgtttcctaaagttttcttcgacatgaccgttgacggcaagcccgcgggaaggatcgtgatggagctgtacaccgacaagactcccaagactgctgagaacttcagagctctctgcacgggtgagaagggtgtcgggagcaaaggcaagcctcttcacttcaaggggtcttccttccaccgtgtgatccctaacttcatgtgccagggaggagatttcacggccgggaacgggacgggaggcgagtccatctacggggagaagttcgccgacgagaatttcgagaggaagcacaccggtcctgggatcctctccatggccaacgctggtcccaacaccaacgggtctcagttctttatctgcactgttaagacagattggcttgatagtaagcacgtggtgttcgggcaggtggtggaagggttggacgtggtgaaggcgatcgagaaggtggggtcggcttctggaaagccgtcgaagccggtggttgtggctgactgtggtcagctctcttagattgcatgagatctaaaattagcgtcttcgttgtcctctagtgagtggtggtgttcggtcctcatcgtgtgtctgtctgtgttttgcttttgtgttacttttcatttggtgtaatcataaaagcttggtgtgtgttcgttctcatgtcaccctaattagtagctagttccataaaaaaaaaaaaaaaa

SEQ ID NO: 7900 - protein, 172 aa, Glycine max
  misc_feature: Ceres CLONE ID no. 1434932
  misc_feature: Ceres CDNA ID no. 29191841
  misc_feature (5)..(171): Pfam Name: Pro_isomerase PFAM Desc: Cyclophilin type peptidyl
  misc_feature: Homolog of GI Number: 21593682 NR Desc: peptidylprolyl isomerase ROC1
  misc_feature: Homolog of GI Number: 2443757 NR Desc: cyclophilin
  misc_feature: Homolog of GI Number: 21593051 NR Desc: cyclophilin CYP2
  misc_feature: Homolog of GI Number: 62728587 NR Desc: cyclophilin
  misc_feature: Homolog of GI Number: 18076088 NR Desc: cyclophilin
  misc_feature: Homolog of GI Number: 829119 NR Desc: cyclophilin
  misc_feature: Homolog of GI Number: 1563719 NR Desc: cyclophylin
  misc_feature: Homolog of GI Number: 18146786 NR Desc: CYP1
  misc_feature: Homolog of GI Number: 21886603 NR Desc: peptidylprolyl isomerase
  misc_feature: Homolog of GI Number: 1561575 NR Desc: cyclophilin
MAFPKVFFDMTVDGKPAGRIVMELYTDKTPKTAENFRALCTGEKGVGSKGKPLHFKGSSFHRVIPNFMCQGGDFTAGNGTGGESIYGEKFADENFERKHTGPGILSMANAGPNTNGSQFFICTVKTDWLDSKHVVFGQVVEGLDVVKAIEKVGSASGKPSKPVVVADCGQLS

SEQ ID NO: 7901 - DNA, 1030 bp, Glycine max
  misc_feature: Ceres CLONE ID no. 1434943
  misc_feature: Ceres CDNA ID no. 35383393
  CDS (58)..(819): REFERENCED BY SEQ ID NO: 7902
agaccaatcactactctcaatacgttttaacctcgaaccaattaattctctccgatcatgccgaccagaaacatcgccatcggcggagtccaagaagaagtgactcaccccagcgcacttagggcggccctcgctgagtttatctcgactttgatcttcgtcttcgccggctcaggctcaggaatcgctttcaacaagctcactgacaatggagccaccactccttcaggccttgtcgccgctgccttagctcatgctttcggtctcttcgtcgctgtttctgtcggtgccaacatctccggtggacacgttaaccctgccgttaccttcggtgccttcctcggtggaaacatcactctcctccgtggtctcctctactggattgctcagcttcttggctcagtcgtcgcttgcttcctccttcagttcgccaccggtggcttggcagttccagcgttcggtctctcggcaggagttggaaccttaaacggtctcgtcttcgagatcgtgatgaccttcgggcttgtctacaccgtctacgccacagccatcgaccccaaaaacggtagcctcggaactatcgcacccatcgccattggtttcatcgtcggagctaacatcctcgctggtggagctttcagcggagcctccatgaacccagccgtcgctttcggaccagccgtcgtgagctggtcatggagtaaccactggatttactgggttggtcctcttgtcggtggtggactcgccggaatcatctacgactttgtttacatcatcgaaaacggtcacgagcaattgcccaccactgattactgaagacgctgaaaattactgttgtaatatgatttgtttttatttcgcatcgtaattgaatttctatgtggccgttggatcttctttttagatgaatccttgtccgttgatgtatgtttgtatttgggtttgttgttggagttgtaattttccttgaaggctttttagacgaatgtgaattatgcatgcttctacgctaaaaaaaaaaaaaaaa

SEQ ID NO: 7902 - protein, 253 aa, Glycine max
  misc_feature: Ceres CLONE ID no. 1434943
  misc_feature: Ceres CDNA ID no. 35383393
  misc_feature (14)..(235): Pfam Name: MIP PFAM Desc: Major intrinsic protein
  misc_feature: Homolog of GI Number: 5081419 NR Desc: tonoplast intrinsic protein
  misc_feature: Homolog of GI Number: 1514977 NR Desc: VM23
  misc_feature: Homolog of GI Number: 9293929 NR Desc: salt
  misc_feature: Homolog of GI Number: 3688799 NR Desc: gamma tonoplast intrinsic protein 2
  misc_feature: Homolog of GI Number: 21593151 NR Desc: putative aquaporin
  misc_feature: Homolog of GI Number: 22858917 NR Desc: tonoplast intrinsic protein bobTIP26
  misc_feature: Homolog of GI Number: 475048 NR Desc: tonoplast intrinsic protein gamma
  misc_feature: Homolog of GI Number: 16323492 NR Desc: putative aquaporin
  misc_feature: Homolog of GI Number: 21284370 NR Desc: tonoplast intrinsic protein bobTIP26
  misc_feature: Homolog of GI Number: 16492 NR Desc: possible membrane channel protein
  misc_feature: Useful for making plants with increased biomass and foliage
  misc_feature: Useful for making plants with increased biomass and foliage
MPTRNIAIGGVQEEVTHPSALRAALAEFISTLIFVFAGSGSGIAFNKLTDNGATTPSGLVAAALAHAFGLFVAVSVGANISGGHVNPAVTFGAFLGGNITLLRGLLYWIAQLLGSVVACFLLQFATGGLAVPAFGLSAGVGTLNGLVFEIVMTFGLVYTVYATAIDPKNGSLGTIAPIAIGFIVGANILAGGAFSGASMNPAVAFGPAVVSWSWSNHWIYWVGPLVGGGLAGIIYDFVYIIENGHEQLPTTDY

SEQ ID NO: 7903 - DNA, 832 bp, Glycine max
  misc_feature: Ceres CLONE ID no. 1434962
  misc_feature: Ceres CDNA ID no. 29191448
  CDS (52)..(555): REFERENCED BY SEQ ID NO: 7904
aaacaaaatccttggctccccccgaatctagctttctccctctctctctcgatggagaagaatcaagcaagccttcttctccagcaacagctcaaacatctgtgcaagaacccggttgatggtttctctgctggtctcgtcgacgagagtaacgtctttcagtggagcgtctcgatcatgggtcctcccgatactttgtatgaagggggattctttaatgcaattatgacatttccagagcaatatcctaacctcccaccaactgtgaggttcacctcggagatgtggcatcccaatgtttattctgatgggaaagtttgcatatcgattcttcatcatcctggcgatgatcctaatggatacgagcttgcctctgaacgttggacacctgtccatacggtagaaaccattatgttgagtatcatatccatgctctcgagtccaaacgatgagtcaccagcgaacgtggaagctgcaaaagagtggagagagaacagagcagggtttaggaagaaagtgagtcgctgtgttagaaaatcgcaagagatgctatgagccatctcttcttggcgtttttatgtgttgtagaaatttcgatcctaagctaagagagagagaacgtaagtagcatcaatcatcaagtagcaggcggatgaatctgtgtgctcaaaagcttgttttctttttatggttttggagatggctttaaggtttggaatattgtggtggaatcaaatcaactccaccttttaggattataatcttactctcgttaatggattcgttttcacattccttttttaatttgtttatctgaaaaaaaaaaaaaaaa

SEQ ID NO: 7904 - protein, 167 aa, Glycine max
  misc_feature: Ceres CLONE ID no. 1434962
  misc_feature: Ceres CDNA ID no. 29191448
  misc_feature (9)..(160): Pfam Name: UQ_con PFAM Desc: Ubiquitin
  misc_feature: Homolog of GI Number: 66354438 NR Desc: ubiquitinating enzyme
  misc_feature: Homolog of GI Number: 19347846 NR Desc: putative E2
  misc_feature: Homolog of GI Number: 28973769 NR Desc: putative E2
  misc_feature: Homolog of GI Number: 9759251 NR Desc: ubiquitin
  misc_feature: Homolog of GI Number: 81076243 NR Desc: ubiquitin
  misc_feature: Homolog of GI Number: 2641619 NR Desc: ubiquitin
  misc_feature: Homolog of GI Number: 66354436 NR Desc: ubiquitinating enzyme
  misc_feature: Homolog of GI Number: 50931677 NR Desc: putative ubiquitin
  misc_feature: Homolog of GI Number: 34908132 NR Desc: putative Ubiquitin carrier protein UBC7
  misc_feature: Homolog of GI Number: 2624417 NR Desc: Ubiquitin carrier protein
MEKNQASLLLQQQLKHLCKNPVDGFSAGLVDESNVFQWSVSIMGPPDTLYEGGFFNAIMTFPEQYPNLPPTVRFTSEMWHPNVYSDGKVCISILHHPGDDPNGYELASERWTPVHTVETIMLSIISMLSSPNDESPANVEAAKEWRENRAGFRKKVSRCVRKSQEML

SEQ ID NO: 7905 - DNA, 744 bp, Glycine max
  misc_feature: Ceres CLONE ID no. 1434963
  misc_feature: Ceres CDNA ID no. 36706811
  CDS (2)..(568): REFERENCED BY SEQ ID NO: 7906
aaccaaccagactctcgaatcccaatccacgccgccgcagccgccgacgcaacaggtggtaaatctcggcgagcgagggcgagatgcagatctttgtgaagacgctgacggggaagacgatcacgctggaggtggagtcgtcggacacgatcgacaacgtcaaggccaagatccaggacaaggaggggatcccgccggaccagcagcggctcatcttcgccgggaagcagctggaggacgggcgcacgctggccgactacaacatccagaaggagtcgacgctgcacctggtcctccgcctccgcggcggcgccaagaagcgcaagaagaagacctactcgacgcccaagaaggtcaagcacgagcgcgagaagaccccgctcgccgtgctcggctactacagggtggacgacgcgacgggcaaggtggagaggctgcgcaaggagtgccccaacccggactgcggcgccgggaccttcatggcggcgcacgccgaccgccacgcctgcggcaagtgcggcctcacctacgcctacgccgaggcccagagcccagagatcgacagtgattgatcaggtggtgtgattcgatgacggagttggattcgcgccatggattcagtgtacgtctggtaatgaatttttcaaagaacaattattctggataattttctcaattagtcatcagtaagcatgttttagtctgaattggaatgtgctttggtatgcaaaaaaaaaaaaaaaa

SEQ ID NO: 7906 - protein, 162 aa, Glycine max
  misc_feature: Ceres CLONE ID no. 1434963
  misc_feature: Ceres CDNA ID no. 36706811
  misc_feature (1)..(74): Pfam Name: ubiquitin PFAM Desc: Ubiquitin family
  misc_feature (101)..(148): Pfam Name: Ribosomal_S27 PFAM Desc: Ribosomal protein S27a
  misc_feature: Homolog of GI Number: 50932205 NR Desc: putative ubiquitin / ribosomal protein S27a
  misc_feature: Homolog of GI Number: 167073 NR Desc: ubiquitin
  misc_feature: Homolog of GI Number: 167075 NR Desc: ubiquitin
  misc_feature: Homolog of GI Number: 82733 NR Desc: ubiquitin / ribosomal protein S27a
  misc_feature: Homolog of GI Number: 34894792 NR Desc: ubiquitin / ribosomal protein S27a
  misc_feature: Homolog of GI Number: 21601 NR Desc: ubiquitin monomer/ribosomal protein
  misc_feature: Homolog of GI Number: 1771780 NR Desc: ubiquitin extension protein
  misc_feature: Homolog of GI Number: 2894306 NR Desc: ubiquitin extension protein
  misc_feature: Homolog of GI Number: 34581769 NR Desc: ubiquitin extension protein
  misc_feature: Homolog of GI Number: 71913239 NR Desc: ubiquitin extension protein
MQIFVKTLTGKTITLEVESSDTIDNVKAKIQDKEGIPPDQQRLIFAGKQLEDGRTLADYNIQKESTLHLVLRLRGGAKKRKKKTYSTPKKVKHEREKTPLAVLGYYRVDDATGKVERLRKECPNPDCGAGTFMAAHADRHACGKCGLTYAYAEAQSPEIDSD

SEQ ID NO: 7907 - DNA, 676 bp, Glycine max
  misc_feature: Ceres CLONE ID no. 1434981
  misc_feature: Ceres CDNA ID no. 40351826
  CDS (1)..(360): REFERENCED BY SEQ ID NO: 7908
acctctcgcccgcgccgccgcctccctgccctctttgccgccgccgcccgttgccgcggacgcctcctcctcgccggcgagatgacgaagcgcaccaagaaggctggaatcgttggcaaatatggtaccaggtacggtgccagtcttcgtaagcagatcaagaagatggaggtctcccagcactccaagtacttctgtgagttctgtggcaagtttgccgtgaagaggaaagcagtcggaatctggggatgcaaggactgcgggaaggttaaggccggtggtgcctataccatgaacactgccagtgcggtcactgtcaggagcacgatccgtcgcctgagggagcagactgaagcttgatcgcggtcgatctgaccaaggagcctttggattttgtagttcagacgagactcgtgcaacgctatgtagcctaaattgacaacatacaatgttatttatcggcttgttgggttctgaaagtatccggctacgctaaaatgtgtatctcgtttatcgtgcttagttgatcgtctgaaggtactctttgtgtgtgtcgttggttcttgaatcttgatgctattgtcatctgttattagaagaactagcagggcagcctgtgcatctgtgcgtctatttgcatatactttagctgttgttcacaaaaaaaaaaaaaaaa

SEQ ID NO: 7908 - protein, 92 aa, Glycine max; identical to SEQ ID NO: 294
  misc_feature: Ceres CLONE ID no. 1434981
  misc_feature: Ceres CDNA ID no. 40351826
  misc_feature: null
  misc_feature: Useful for making plants with modulated cold sensitivity
  misc_feature (2)..(91): Pfam Name: Ribosomal_L37ae PFAM Desc: Ribosomal L37ae protein family

SEQ ID NO: 7909 - DNA, 1039 bp, Zea mays
  misc_feature: Ceres CLONE ID no. 1435001
  misc_feature: Ceres CDNA ID no. 29191449
  CDS (319)..(723): REFERENCED BY SEQ ID NO: 7910
aatccaagagtaggccttgggggaatcgcggcttcggcctccggcctcagtggctcagccaaccacgacgccgccgtgcgcgccagcctccgtgggacacggctgccggcttcggtccgctgtcggctctcgcccctcaggcctcagccacgccgcacgcggccggcacggcggcgcccgcctccacggctccacgccgcggccccagccacgctacacgcggccacgccgcacgccagcacgctcagccgcgtgcccgcctgccgcctgctcggctcctcccctgctcttgctcggctgctccgtggtgcctgatccatggcggagaaggaggcggcggctacgtggggtggcgacgacaagctcattctgcgcggccttcagttccatggcttccacggtgttctgcaggaggagaagacgttgggacagaagttcgtggttgacatcgacgcctggatagacctcgccgctgccggcgagtccgactgcattgctgacaccgtcagctacaccgatatctacagcattgcaaaggatgttgtcgagggcacgccacgcaacctcttggagtcggtagctcactcgatcgcagaggccacgctgctcaagttccctcagatctccgcagtccgagtgaaggttggcaagcctcacgtcgcggtgcgaggcgttctggactacctgggcgtggagataacgaggcacagaaagaaagaatgagatgctgtacacatgtggtgatggggagccagttcaatgctgatggcactgcggccataaccataatccacgcacgcttgttgcttgttggcaactaggcatatccctttcacctctgaactgttggaatatcgggaatctgttcccctagttgctttattacgaattcagatcatatctggctagtaagatcaaccttcttctggtctgtaacatctttttttttttgtccatgttgctagtcgttgctcttcataccaactcatttcttgcacaaccattgagcctcagtttattgctagtaccaaaaaaaaaa

SEQ ID NO: 7910 - protein, 134 aa, Zea mays
  misc_feature: Ceres CLONE ID no. 1435001
  misc_feature: Ceres CDNA ID no. 29191449
  misc_feature (16)..(129): Pfam Name: FolB PFAM Desc: Dihydroneopterin aldolase
  misc_feature: Homolog of GI Number: 52077046 NR Desc: putative dihydroneopterin aldolase
  misc_feature: Homolog of GI Number: 55297441 NR Desc: putative dihydroneopterin aldolase
  misc_feature: Homolog of GI Number: 50948415 NR Desc: putative dihydroneopterin aldolase
  misc_feature: Homolog of GI Number: 38564521 NR Desc: dihydroneopterin aldolase
  misc_feature: Homolog of GI Number: 40557572 NR Desc: 7
  misc_feature: Homolog of GI Number: 6671931 NR Desc: putative dihydroneopterin aldolase
  misc_feature: Homolog of GI Number: 28393163 NR Desc: putative dihydroneopterin aldolase
  misc_feature: Homolog of GI Number: 51536552 NR Desc: At3g21730
  misc_feature: Homolog of GI Number: 42572511 NR Desc: dihydroneopterin aldolase family protein
  misc_feature: Homolog of GI Number: 11994640 NR Desc: dihydroneopterin aldolase
MAEKEAAATWGGDDKLILRGLQFHGFHGVLQEEKTLGQKFVVDIDAWIDLAAAGESDCIADTVSYTDIYSIAKDVVEGTPRNLLESVAHSIAEATLLKFPQISAVRVKVGKPHVAVRGVLDYLGVEITRHRKKE

SEQ ID NO: 7911 - DNA, 939 bp, Zea mays
  misc_feature: Ceres CLONE ID no. 1435026
  misc_feature: Ceres CDNA ID no. 25446793
  CDS (5)..(538): REFERENCED BY SEQ ID NO: 7912
ctctatgaatgatgcatgtacagttctggagtgtgtatggataaaagataaattcgttttgcatgaaaaggttaaagatatctctcaggagacccaagttgagaatcagaagtgccgcgatcctgaatctacagtccagtatgaaacgcttgcactgattagtgaagatatgaaaatcctagaagaaacgaacttgccagacagacagacagatactgctctagcggagcaaccggataaaatgattcattgcaatgatgctggagattctcagaaggggaggcaactagaaaatgaaagcagtgctcgtttagttcctgacacccttagtactcggaagcacctgaagcccgagtctaggaagagagtagcatttgtagcagttggaaattcgaaagttacgggtgcagcctcagaaataaaatcatcagaggtgaacaagaagcaaaggctagacatgatttctccttccaacatacaatctggactgtacaacaaattgctggattgtgagtttgcagaaaaatccttactttagtatgttcagaatttaatacttcaatactttttcaactggaaaagcaatagataggaaagtgcgcttgtgcgaaagtatctcaaggtacggcaaatgtcagtgttctgaagctgaggccctttatcatttctgtttcaaatttctaaggatgatctgcaacattgttttgtagtgtttgtattagggagatgcccatcttcacatcaatgttcagaagttatgtgcgctatgagatttaaattatgagctgccagattgttttgtagagtttgtatttggtcattgtcgtgtcaatgttcagaagcatgctcttatacaactgagttttgtttgcatcagcagatttctgccttgcagattttattattcattcattcattgtgtgaaaaaaaaaaaaaaaa

SEQ ID NO: 7912 - protein, 122 aa, Zea mays
  misc_feature: Ceres CLONE ID no. 1435026
  misc_feature: Ceres CDNA ID no. 25446793
MKILEETNLPDRQTDTALAEQPDKMIHCNDAGDSQKGRQLENESSARLVPDTLSTRKHLKPESRKRVAFVAVGNSKVTGAASEIKSSEVNKKQRLDMISPSNIQSGLYNKLLDCEFAEKSLL

SEQ ID NO: 7913 - DNA, 589 bp, Glycine max
  misc_feature: Ceres CLONE ID no. 1435058
  misc_feature: Ceres CDNA ID no. 29191778
  CDS (3)..(422): REFERENCED BY SEQ ID NO: 7914
tcttcccgggcgctggcggcggattagggtttcacctgcgtccattctcaacgttagcaggagcgagtgggagtccggccatggcgccgtcgcagcccaagtcagggctcttcgtgggcatcaacaagggccacgtcgtcaccaagcgcgagctgccgccacgcccgtccgaccgcaaggggaaaggtaccaagagggtgcattttgtcaggaacttgattagggaggttgctggattcgctccctatgagaaacgtatcactgagcttcttaaggttggaaaggacaagcgcgcactcaaggtcgccaagagaaagcttggtactcacaagagagcaaagaagaagagagaggagatgtcaagtgtccttaggaagatgaggtctgctggtggtggtggtgctggtgacaagaagaaatagagcgtggctagtcggtgaattttatcccaaaactctgtcctgtattaccagtccgtacctttagagctatctatggccatagtgttggattttggaattaagcccgtggtttctattttgagaagaccaatctttttaagatatttatgccaaaaaaaaaaaaaaaa

SEQ ID NO: 7914 - protein, 113 aa, Glycine max; identical to SEQ ID NO: 2316
  misc_feature: Ceres CLONE ID no. 1435058
  misc_feature: Ceres CDNA ID no. 29191778
  misc_feature (5)..(103): Pfam Name: Ribosomal_L36e PFAM Desc: Ribosomal protein L36e
  misc_feature: Homolog of GI Number: 57471698 NR Desc: ribosomal protein L36
  misc_feature: Homolog of GI Number: 50931673 NR Desc: putative 60S ribosomal protein L36
  misc_feature: Homolog of GI Number: 34908154 NR Desc: putative 60S RIBOSOMAL PROTEIN L36
  misc_feature: Homolog of GI Number: 56182368 NR Desc: putative 60S ribosomal protein L36
  misc_feature: Homolog of GI Number: 20148501 NR Desc: 60S ribosomal protein L36
  misc_feature: Homolog of GI Number: 12642884 NR Desc: putative 60S ribosomal protein
  misc_feature: Homolog of GI Number: 21592383 NR Desc: 60S ribosomal protein L36
  misc_feature: Homolog of GI Number: 21554932 NR Desc: 60S RIBOSOMAL PROTEIN L36 homolog
  misc_feature: Homolog of GI Number: 17865758 NR Desc: 60S ribosomal protein L36
  misc_feature: Homolog of GI Number: 1276967 NR Desc: putative ribosomal protein
  misc_feature: Useful for sterility

SEQ ID NO: 7915 - DNA, 565 bp, Zea mays
  misc_feature: Ceres CLONE ID no. 1435081
  misc_feature: Ceres CDNA ID no. 29191450
  CDS (63)..(389): REFERENCED BY SEQ ID NO: 7916
gactcccgccgccgccgcttccgctccgtcgctcgcctcacgcctccggcgccacctccaccatggccccgaagaaggagaaggccccgccgccatcgtccaagccggccaagtccggaggcgggaagcagaagaagaagaagtggagcaagggtaagcagaaggagaaggtcaacaacgctgtgctcttcgaccaggccacctacgataagctgctctccgaggtgcccaagtacaagcagatcaccccatccatcctatctgagcgcctcagggttaatggatccttggcacggagggccatcaaggatctgatggcaaaggggctcataaggatggtctctgttcattctagccagcagatatacaccagggcaaccaacacatgatgggtgttttgcgtcttgtggacgttatctagtctagacgacttgatgttgctattatatcaagtttaatttaatcgtggctcgatcaatcttactgtcgtgttgaatgtcgaatatttttgagattattgtactattttaatatcatgttttttataacaaaaaaaaaaaaaaaa

SEQ ID NO: 7916 - protein, 108 aa, Zea mays
  misc_feature: Ceres CLONE ID no. 1435081
  misc_feature: Ceres CDNA ID no. 29191450
  misc_feature (1)..(106): Pfam Name: Ribosomal_S25 PFAM Desc: S25 ribosomal protein
  misc_feature: Homolog of GI Number: 51979721 NR Desc: PREDICTED P0562A06.14 gene product
  misc_feature: Homolog of GI Number: 52077174 NR Desc: putative 40S ribosomal protein 25S
  misc_feature: Homolog of GI Number: 62701664 NR Desc: S25 ribosomal protein
  misc_feature: Homolog of GI Number: 4567232 NR Desc: 40S ribosomal protein S25
  misc_feature: Homolog of GI Number: 21553704 NR Desc: ribosomal protein S25
  misc_feature: Homolog of GI Number: 21617899 NR Desc: ribosomal protein S25
  misc_feature: Homolog of GI Number: 435679 NR Desc: ribosomal protein S25
  misc_feature: Homolog of GI Number: 79322680 NR Desc: structural constituent of ribosome
  misc_feature: Homolog of GI Number: 14276683 NR Desc: ribosomal protein S25
  misc_feature: Homolog of GI Number: 33590374 NR Desc: 40S ribosomal protein S25
MAPKKEKAPPPSSKPAKSGGGKQKKKKWSKGKQKEKVNNAVLFDQATYDKLLSEVPKYKQITPSILSERLRVNGSLARRAIKDLMAKGLIRMVSVHSSQQIYTRATNT

SEQ ID NO: 7917 - DNA, 912 bp, Zea mays
  misc_feature: Ceres CLONE ID no. 1435086
  misc_feature: Ceres CDNA ID no. 40351827
  CDS (117)..(740): REFERENCED BY SEQ ID NO: 7918
cttttttcaagcaagcaagcaagcaagcagaggagagggaccgggaccgggagtgagaggaagtcgagctcttttcttcgtcgacgctggtttttggcccctgactgctggtcgagatgtcgaagatggcggacgagaaggtgatttcggcgccggcgaccggcggaggagaggacgggctgatcgcaggggacctgtcagccacggaggcgcgtgtccgtccgttggagacgctgctgcgcgccgcgcctctggggctctgcgtcgccgccatggccgtcatgctccgcgacacgcagaccaacgagtacggcaccgtctcctactccgacctcggcggattcaagtacctggtttatgccaacgggctgtgcgcggcctactccctggtctccgcgttctacactgccgtgccgcggccggcgaccctgtcccgctcctggatcgtcttcctcctagatcaggtgttcacgtacctgatcctggcggccggcgcggcgtcggcagagctactctacctggcgtacaacggcgacaaggaggtgacgtggagcgaggcgtgcggcgtgttcggcggcttctgcaggcaggcccggacgtcggtggccatcaccttcggctccgtcgtctgctacatcctcctctccctcatctcgtcctaccgcctcttcagcgcctacgacgcacccatgccctcgctcggcaacaagggcgtcgagatcgctgccttcccgcgctgagccgagaggatccctagctgctgtgccttggctactcgatgacgggtcaaaactcaaaacacgtacgtacgtagtagtatcgctgtgtgtgtaggcgaacgaaataatctgtaagggctcatagttaatttcaagctacatatagtgcaaaaaaataaaaaaaaaaaaaaaa

SEQ ID NO: 7918 - protein, 204 aa, Zea mays
  misc_feature: Ceres CLONE ID no. 1435086
  misc_feature: Ceres CDNA ID no. 40351827
MADEKVISAPATGGGEDGLIAGDLSATEARVRPLETLLRAAPLGLCVAAMAVMLRDTQTNEYGTVSYSDLGGFKYLVYANGLCAAYSLVSAFYTAVPRPATLSRSWIVFLLDQVFTYLILAAGAASAELLYLAYNGDKEVTWSEACGVFGGFCRQARTSVAITFGSVVCYILLSLISSYRLFSAYDAPMPSLGNKGVEIAAFPR

SEQ ID NO: 7919 - DNA, 751 bp, Glycine max
  misc_feature: Ceres CLONE ID no. 1435340
  misc_feature: Ceres CDNA ID no. 29191643
  CDS (2)..(574): REFERENCED BY SEQ ID NO: 7920
ccccgccgccaactcctctcagagcctcgcacccgcatctccgcgctccgccgccgccgccgcctccgagccgctcgaagcccacctcgcagccatggcggagcagaccgagaagtctttcctcaagcagccaaaggttttcctcagcaccaaaaaggccgacaaggcaaagaggcccggcaaggctggcaaccgcttctggaagagtgttggccttggtttcaagaccccaagggaggcgattgatggtacctacattgacaagaagtgcccattcactggaactgttgccatcaggggcagaatcatagctggaacctgccacagtgccaagatgaacaggaccatcattgttcgcaggaactaccttcattttgtcaagaagtatcagaggtatgagaagaggcactccaacatcccagctcacatctccccctgcttccgtgtcaaggaaggcgaccatgtcatcattggccagtgcaggcccctgtcgaaaaccgtgagattcaatgtcctgaaggtcgttccagctggaaccaccggaggcgggaagaaggctttcgtcgctgcctaagcccagactctgattcatgagtagttcatagtcagaactttttcgcacttgaaatttaccaggctgctgtttcgagatttgattccgtgttatctgtcaaaccgaatgtcgtgatctgaacatgttttgtggaatctatctatcattaatagtttcgctttaaaaaaaaaaaaaaaa

SEQ ID NO: 7920 - protein, 159 aa, Glycine max
  misc_feature: Ceres CLONE ID no. 1435340
  misc_feature: Ceres CDNA ID no. 29191643
  misc_feature (74)..(143): Pfam Name: Ribosomal_S17 PFAM Desc: Ribosomal protein S17
  misc_feature: Homolog of GI Number: 50938417 NR Desc: putative 40S ribosomal protein S11
  misc_feature: Homolog of GI Number: 6984142 NR Desc: 40S ribosomal protein S11
  misc_feature: Homolog of GI Number: 22470 NR Desc: ribosomal protein S11
  misc_feature: Homolog of GI Number: 50928689 NR Desc: OSJNBa0070C17.20
  misc_feature: Homolog of GI Number: 454848 NR Desc: ribosomal protein S11
  misc_feature: Homolog of GI Number: 34899760 NR Desc: putative 40S ribosomal protein S11
  misc_feature: Homolog of GI Number: 166867 NR Desc: ribosomal protein S11
  misc_feature: Homolog of GI Number: 21593611 NR Desc: cytosolic ribosomal protein S11
  misc_feature: Homolog of GI Number: 17065614 NR Desc: putative 40S ribosomal protein S11
  misc_feature: Homolog of GI Number: 20258899 NR Desc: putative ribosomal protein S11
MAEQTEKSFLKQPKVFLSTKKADKAKRPGKAGNRFWKSVGLGFKTPREAIDGTYIDKKCPFTGTVAIRGRIIAGTCHSAKMNRTIIVRRNYLHFVKKYQRYEKRHSNIPAHISPCFRVKEGDHVIIGQCRPLSKTVRFNVLKVVPAGTTGGGKKAFVAA

SEQ ID NO: 7921 - DNA, 833 bp, Zea mays
  misc_feature: Ceres CLONE ID no. 1435825
  misc_feature: Ceres CDNA ID no. 25401062
  CDS (2)..(538): REFERENCED BY SEQ ID NO: 7922
aaccttttcactgatccagcgaaggcatactgccgccgccgtttctgcatctcccatcttcgcaacgccggcgctccatcttgcgctccctccctcactcgctctcggtacgcaggcggcggcggcggcggcggtggcggctctcagattcgggctctcagcgacggcgtcagcagcttccactcccgcctctcgccagttgcctcgcgccctcgcctccggtcctccgcacaccgccggttacccttctaaaacacctcatccccaaatgaagcacatattcaagattgctgcaatactggtagcaatctctgctatctggattgctctccttgaaacctccactgttcctcgaagttatacttggctgcttcccatctacttggtagtggctcttggatgctatggcctttttatggttggatttggacttatgttcttcccaacttgtcctcgagaagctgtactactgcaacaggatattgtggaggcaaaggaattcttaggaaagaggggtgttgatgtgggctctgagtgagatcaattttaagtggttgacatacatgtctgttttgaaggatcaccattctgttccttggaataggttgcttttttgggtactgtagataggaaacatataattccactatgttcagctattactaacacggtttttgtgagttggcatgttatagttctgcttttgtcaatgatggggctcacattgacttgccggtgtttttcaagttttaaagactgaactgttctaggaatatttggtttctatcttgatttcccgtcagtggaccatttacctaaaaaaaaaaaaaaaa

SEQ ID NO: 7922 - protein, 89 aa, Zea mays
  misc_feature: Ceres CLONE ID no. 1435825
  misc_feature: Ceres CDNA ID no. 25401062
  misc_feature: Homolog of GI Number: 50912793 NR Desc: dolichol
  misc_feature: Homolog of GI Number: 8778529 NR Desc: F21D18.14
MKHIFKIAAILVAISAIWIALLETSTVPRSYTWLLPIYLVVALGCYGLFMVGFGLMFFPTCPREAVLLQQDIVEAKEFLGKRGVDVGSE

SEQ ID NO: 7923 - DNA, 777 bp, Zea mays
  misc_feature: Ceres CLONE ID no. 1436190
  misc_feature: Ceres CDNA ID no. 29191283
  CDS (62)..(610): REFERENCED BY SEQ ID NO: 7924
agctttcgtttccgcaactctctttgcttcttctctctaactcgactttgatctccttacaatggcgtcggagaagaagctctcgaacccaatgagggacattaaggtccagaaacttgttctcaacatctccgttggtgagagtggtgatcgtctcactcgtgcctccaaggttttggaacagctcagtggacaaacccctgttttctccaaggcgagatacactgtgaggtcttttggtatcaggcgtaacgaaaagattgcgtgctatgtgactgtgagaggtgacaaggcaatgcagcttcttgagagtggtttgaaagttaaggagtatgagcttcttaggaggaactttagtgacactggttgctttggtttcggtatccaagagcacattgatcttggtatcaagtacgatccatctactggtatctacggaatggacttctatgttgttctcgaacgtccaggataccgtgtggctcgtcgccgtagatgcaagactcgtgttggtatccaacacagagtgaccaaggatgatgcaatgaaatggttccaagtcaagtatgaaggagttatcctcaacaagtctcagaacatcactggctaaaccaaacttcaatctttattgatttttgtttattttagctttgtttcaaagtttcagtttttactattttctggatgttaaagaatttcttgttatagtaaaaccttttttgacatcagcatggtataatctaaatttccaagaacgttggaaaaaaaaaaaaaaaa

SEQ ID NO: 7924 - protein, 182 aa, Zea mays
  misc_feature: Ceres CLONE ID no. 1436190
  misc_feature: Ceres CDNA ID no. 29191283
  misc_feature (66)..(165): Pfam Name: Ribosomal_L5_C PFAM Desc: ribosomal L5P family C
  misc_feature (9)..(62): Pfam Name: Ribosomal_L5 PFAM Desc: Ribosomal protein L5
  misc_feature: Homolog of GI Number: 12642874 NR Desc: putative ribosomal protein L11
  misc_feature: Homolog of GI Number: 7268667 NR Desc: ribosomal protein L11
  misc_feature: Homolog of GI Number: 550544 NR Desc: ribosomal protein L16
  misc_feature: Homolog of GI Number: 21542441 NR Desc: 60S ribosomal protein L11
  misc_feature: Homolog of GI Number: 624938 NR Desc: ribosomal protein L16
  misc_feature: Homolog of GI Number: 24817256 NR Desc: ribosomal protein RL5
  misc_feature: Homolog of GI Number: 47027024 NR Desc: 60S ribosomal protein L11
  misc_feature: Homolog of GI Number: 463252 NR Desc: RL5 ribosomal protein
  misc_feature: Homolog of GI Number: 10799832 NR Desc: ribosomal protein L11
  misc_feature: Homolog of GI Number: 78191444 NR Desc: ribosomal protein L11
MASEKKLSNPMRDIKVQKLVLNISVGESGDRLTRASKVLEQLSGQTPVFSKARYTVRSFGIRRNEKIACYVTVRGDKAMQLLESGLKVKEYELLRRNFSDTGCFGFGIQEHIDLGIKYDPSTGIYGMDFYVVLERPGYRVARRRRCKTRVGIQHRVTKDDAMKWFQVKYEGVILNKSQNITG

SEQ ID NO: 7925 - DNA, 752 bp, Glycine max
  misc_feature: Ceres CLONE ID no. 1436245
  misc_feature: Ceres CDNA ID no. 29191644
  CDS (2)..(517): REFERENCED BY SEQ ID NO: 7926
ctcccgctccagccccctcgcgccccagccgccgccgtcgccgccgccgactgcagccatgtcgctgagcgcgggtgaggagttccagcacatcctgcgtgtgctcaacaccaacgtcgacggtaagcagaagatcatgttcgcgctcacctccatcaagggtgtgggccgccgcttctccaacatcgtctgcaagaaggccgacatcgacatgaacaagagggccggagagctttccgcggaggagatggaccgtctgatggcggtggtgcacaacccgcgccagttcaaggtgccggactggttcctcaacaggaagaaggactacaaggacggcaggttctcccaggtcgtgtccaacgccgtggacatgaagctcagggatgaccttgagaggctcaagaagatcaggaaccatcgtggtctgcgtcactactggggtgtgcgtgtccgcggtcagcacaccaagactaccggcaggagaggaaagactgttggtgtctccaagaagcgataagctgcttcacaaagatgccgcatagctttgctactactttgttggtccatttccagaatcttaaggagtgttcttatttaggcgattaccttggatgatgtttttcctagataatgttccttgttatatagccgggaggcctttgccgtcaattcttgaaaagcaaaaggaagcttcattttatgctgccctataatataattttgtcatcgaccacgtaaaaaaaaaaaaaaaa

SEQ ID NO: 7926 - protein, 152 aa, Glycine max
  misc_feature: Ceres CLONE ID no. 1436245
  misc_feature: Ceres CDNA ID no. 29191644
  misc_feature (14)..(142): Pfam Name: Ribosomal_S13 PFAM Desc: Ribosomal protein S13/S18
  misc_feature: Homolog of GI Number: 22204120 NR Desc: putative ribosomal protein S18
  misc_feature: Homolog of GI Number: 50919149 NR Desc: putative ribosomal protein S18A
  misc_feature: Homolog of GI Number: 50934523 NR Desc: putative ribosomal protein S18
  misc_feature: Homolog of GI Number: 56236126 NR Desc: At1g22780
  misc_feature: Homolog of GI Number: 17978783 NR Desc: S18.A ribosomal protein
  misc_feature: Homolog of GI Number: 40287492 NR Desc: putative ribosomal protein
  misc_feature: Homolog of GI Number: 24266988 NR Desc: ribosomal protein S18
  misc_feature: Homolog of GI Number: 67083901 NR Desc: ribosomal protein S18
  misc_feature: Homolog of GI Number: 71040621 NR Desc: ribosomal protein S18
MSLSAGEEFQHILRVLNTNVDGKQKIMFALTSIKGVGRRFSNIVCKKADIDMNKRAGELSAEEMDRLMAVVHNPRQFKVPDWFLNRKKDYKDGRFSQVVSNAVDMKLRDDLERLKKIRNHRGLRHYWGVRVRGQHTKTTGRRGKTVGVSKKR

SEQ ID NO: 7927 - DNA, 433 bp, Glycine max
  misc_feature: Ceres CLONE ID no. 1436253
  misc_feature: Ceres CDNA ID no. 35383394
  CDS (77)..(229): REFERENCED BY SEQ ID NO: 7928
aacaacaacctaggtcacaaccgaggcagtcttttattttatagtataattcattctgtcatatatctgtgtagcaatggtggtctttctttgcaaggaagaatatggtgtgctcttgggcaatgactgggctgcaactcatgaatttggccacaacttttgtatctcaaatgaaggtgacgatgacgatgatgataatggcgtcattgatgtggccccagcggcatagaagaatttcgcaaaacatgcataaatgaggaggatgaggagggatatagtagtagtcagtgtaagcttcattctgtggtcttgcttagtaattacattacatttgtgtttactcttggaataggttctagtgttatgcttaattacggtcactataaatttgagacataatacatgttttattagcaaaaaaaaaaaaaaaaaa

SEQ ID NO: 7928 - protein, 50 aa, Glycine max; identical to SEQ ID NO: 3926
  misc_feature: Ceres CLONE ID no. 1436253
  misc_feature: Ceres CDNA ID no. 35383394

SEQ ID NO: 7929 - DNA, 902 bp, Glycine max
  misc_feature: Ceres CLONE ID no. 1436315
  misc_feature: Ceres CDNA ID no. 36706852
  CDS (59)..(673): REFERENCED BY SEQ ID NO: 7930
ctaagtcaccacactccgtttcccgccgcctccgccctctgccgccgcagccgcagccatgggcgcgtacaagttcgtgtcggagctatggaggaggaagcagtccgacgtgatgaggttcgtgcagcgcgtgcgttgctgggagtacaggcagcagcccgccatcgtccgcatcaccaggcccacccgccccgacagggcacgccgtctcggcttcaaggccaagcaggggtatgtggtctaccgtatccgtgtgagacgtggtggcaggaagcgcccagtgcccaagggtattgtttatggcaagcctaagcaccagggtattacccaactcaagttccagaggaacaagaggtctgttgctgaggaaagagctgggcgcaggcttggtggtcttcgtgtcctcaactcctactgggtgaatgaggactccacctacaagtactttgaggtcatccttgttgacgttgctcacagcgctgtccgcaacgatccaaggatcaactggctctgcaagcctgtgcacaagcaccgtgagctgcgtggtctcacctctgcgggaaagaaattccgtggtctgcgtggcaagggtcaccgccaccacaagaacaggccctcaaggagagccacctggaagaggaaccagaccgtctccctccgccgctaccgttaagcttatgtgctgttatgttctgtggaacctgccctatgcttaccttgatagtatctgtttgcaccgtcaaattttgctaccttcgttctgtggctgaacctccaggcatgtctgttgaactatttgctatgtgcctgtgttacctggaattcgaatgattgaagtagtcctcgatgtgtgctgattattgttttaatgctttgatgttttttcaaaaaaaaaaaaaaaa

SEQ ID NO: 7930 - protein, 204 aa, Glycine max; identical to SEQ ID NO: 7210
  misc_feature: Ceres CLONE ID no. 1436315
  misc_feature: Ceres CDNA ID no. 36706852
  misc_feature (2)..(193): Pfam Name: Ribosomal_L15e PFAM Desc: Ribosomal L15
  misc_feature: Homolog of GI Number: 14585879 NR Desc: ribosomal protein L15
  misc_feature: Homolog of GI Number: 48596903 NR Desc: ribosomal protein
  misc_feature: Homolog of GI Number: 34896990 NR Desc: ribosomal protein L15
  misc_feature: Homolog of GI Number: 21689875 NR Desc: putative 60S ribosomal protein L15
  misc_feature: Homolog of GI Number: 23505795 NR Desc: At4g16720/dl4385c
  misc_feature: Homolog of GI Number: 50878349 NR Desc: putative 60s ribosomal protein L15
  misc_feature: Homolog of GI Number: 3608479 NR Desc: ribosomal protein L15
  misc_feature: Homolog of GI Number: 7268491 NR Desc: ribosomal protein
  misc_feature: Homolog of GI Number: 2982318 NR Desc: probable 60S ribosomal protein L15
  misc_feature: Homolog of GI Number: 2982249 NR Desc: probable 60S ribosomal protein L15

SEQ ID NO: 7931 - DNA, 433 bp, Glycine max; identical to SEQ ID NO: 7927
  misc_feature: Ceres CLONE ID no. 1436319
  misc_feature: Ceres CDNA ID no. 35383395
  CDS (77)..(229): REFERENCED BY SEQ ID NO: 7932

SEQ ID NO: 7932 - protein, 50 aa, Glycine max; identical to SEQ ID NO: 3926
  misc_feature: Ceres CLONE ID no. 1436319
  misc_feature: Ceres CDNA ID no. 35383395

SEQ ID NO: 7933 - DNA, 731 bp, Glycine max
  misc_feature: Ceres CLONE ID no. 1436331
  misc_feature: Ceres CDNA ID no. 25447057
  CDS (127)..(438): REFERENCED BY SEQ ID NO: 7934
gaaggcgtgagaatccttcttccgaatctgacactacacaaaattcaccaattcccagttccgtggactgcagcacccttagatttcgttaccaaagacaaggagaagcaccggaagcgtaataaaatggatatgtacattcgtgttaaacgtagtaagacaacctacttcattcggtgcaagccatttgataaaattcttgacataaagcagaagttgcaagaacttattgatcagccagctattaatcaacggttaattttacctgatacaggagaagtattagaagactctaagactctggcagatcaaagggttgaaaatgatgctgttgttgcactgaccttgagaaaagatgagaatgagtttgaggaggtcaacattgtccggccaaatgatttctaccaagctcgggatgcggatggtgcgaattggtaaagccatactccaataattactggtggtatgatgaaatccacaattgctcaggaaacattttcaaacgattgatcaaatgtagggttaatgacgtgcttgtttgtataatactgaatttattgccttgagagaatatggcactttattttctttggtaaaatgaagaattaaagaaagcaagttacatcagtgacatagagtccgtccactggtgtgcataagtgcaatggttttatatcatattaaatcaaattagtgaataaggtctagtagacaaaaaaaaaaaaaaaaaa

SEQ ID NO: 7934 - protein, 103 aa, Glycine max
  misc_feature: Ceres CLONE ID no. 1436331
  misc_feature: Ceres CDNA ID no. 25447057
  misc_feature (1)..(77): Pfam Name: ubiquitin PFAM Desc: Ubiquitin family
  misc_feature: Homolog of GI Number: 17154771 NR Desc: ubiquitin
  misc_feature: Homolog of GI Number: 21618108 NR Desc: ubiquitin
MDMYIRVKRSKTTYFIRCKPFDKILDIKQKLQELIDQPAINQRLILPDTGEVLEDSKTLADQRVENDAVVALTLRKDENEFEEVNIVRPNDFYQARDADGANW

SEQ ID NO: 7935 - DNA, 1022 bp, Zea mays
  misc_feature: Ceres CLONE ID no. 1436388
  misc_feature: Ceres CDNA ID no. 29191842
  CDS (109)..(768): REFERENCED BY SEQ ID NO: 7936
acaccaatactgctactgtaactgctcttcaagccaagaaagaaaaaaaattacgttacggaatctcttctacagctgcgcgatcgaagcttcaaattgcatcttgatatggctgatatcaaggatgaaggaacccccaagagctctgcttcttctcctctgaggaatcctaatgttacccttaacgaaaggaattttgctgccttcactcacagatcagctgctgctcatccttggcacgacttggagattggtccggaagctcctgctgttttcaactgtgttgttgaaattagcaaaggtggcaaggtgaaatatgagctagacaagaacagtggccttattaaggttgatcgtgtcctgtactcatccattgtgtacccacacaactacggcttcattcctcgaaccatttgtgaagatagtgatcctatagatgtcctggtactcatgcagaagcctgtgctaactggatcgttcctccgtgcccgtgctattgggttaatgcccatgattgatcagggtgaaaaagacgacaagatcatcgcagtgtgtgctgatgatcccgagttccgtcattacagagacatcaaagagcttcctcctcaccgtctagctgaaattcgccgcttcttcgaggattacaagaagaacgagaacaagaaagtggacgttgaaggtttcctccccgctcaagctgccatagacgcgattaaagactccatggatctttacgcagcttacatcaaagctggcctgcagcgttagtgaaccacctacatgctcgttatagcttgtgcattttcgcaatgtacattaaaaaacttttgtcgcattatacgctttctaatgatgacgatgaaaaatgtcagtttcaatcactaaaacttggagatgcatacattagctcatgcctgatttttgtattaatgatgtttgcaaactcttctttgtcttcttgtagttcactgaataatgtcatctcttaatcgagtacatttaacttaaaaaaaaaaaaaaaa

SEQ ID NO: 7936 - protein, 219 aa, Zea mays
  misc_feature: Ceres CLONE ID no. 1436388
  misc_feature: Ceres CDNA ID no. 29191842
  misc_feature: null
  misc_feature: Useful for making plants with modulated nitrogen use efficiency
  misc_feature (57)..(211): Pfam Name: Pyrophosphatase PFAM Desc: Inorganic pyrophosphatase
  misc_feature: Homolog of GI Number: 4309743 NR Desc: putative inorganic pyrophosphatase
  misc_feature: Homolog of GI Number: 21595532 NR Desc: putative inorganic pyrophosphatase
  misc_feature: Homolog of GI Number: 16348 NR Desc: inorganic pyrophosphatase
  misc_feature: Homolog of GI Number: 6729513 NR Desc: inorganic pyrophosphatase
  misc_feature: Homolog of GI Number: 50931109 NR Desc: putative inorganic pyrophosphatase
  misc_feature: Homolog of GI Number: 21593570 NR Desc: inorganic pyrophosphatase
  misc_feature: Homolog of GI Number: 48927683 NR Desc: putative inorganic pyrophosphatase
  misc_feature: Homolog of GI Number: 4033424 NR Desc: Soluble inorganic pyrophosphatase
  misc_feature: Homolog of GI Number: 50929813 NR Desc: OSJNBa0070M12.12
  misc_feature: Homolog of GI Number: 50911915 NR Desc: inorganic pyrophosphatase
  misc_feature: Useful for making ornamental plants with modified flowers
  misc_feature: Useful for making plants with altered leaf shape eg curled leaves
MADIKDEGTPKSSASSPLRNPNVTLNERNFAAFTHRSAAAHPWHDLEIGPEAPAVFNCVVEISKGGKVKYELDKNSGLIKVDRVLYSSIVYPHNYGFIPRTICEDSDPIDVLVLMQKPVLTGSFLRARAIGLMPMIDQGEKDDKIIAVCADDPEFRHYRDIKELPPHRLAEIRRFFEDYKKNENKKVDVEGFLPAQAAIDAIKDSMDLYAAYIKAGLQR

SEQ ID NO: 7937 - DNA, 661 bp, Zea mays
  misc_feature: Ceres CLONE ID no. 1436531
  misc_feature: Ceres CDNA ID no. 29191451
  CDS (3)..(359): REFERENCED BY SEQ ID NO: 7938
ccgcatctcgcattctcgccggtgctgctgcaattaacgccgaccccggccaaccacccgaaacctaccctccgccgccgtcgtcgccaccgtcaacatggcgagccaaggggagccctcggcctctgcttccgatccgaaggagaagaaggacttctcgacggcgatcctggagaggaaaaagtcaccgaaccgccttgtcgtcgacgaggccaccaacgacgataactccgtcgtcgcgctgcaccctgacaccatggagaggctgcagctcttccgcggcgacaccgtgctcctcaaggtctaatatgtctaagctgagcttttcgcagcagctttgggaagttgagctggtttagcagattgtattatcatgcgaccgatctgtgtgtgaccgacccgaattcggtgtattcatagtgcagatctattagaaataaccttagctttatcactgttcagtacttgctgagtttgctgagggtatttgggcccctctgattcgctgctatagtgtgtagatttttgccaatttgcattcgtacaccattgattcagttgaaggttaatggtaatctagattgcttttattgcttcagtagcatattttaatatacttggtttgttatgttcaaatattctcctaaaaaaaaaaaaaaaa

SEQ ID NO: 7938 - protein, 69 aa, Zea mays
  misc_feature: Ceres CLONE ID no. 1436531
  misc_feature: Ceres CDNA ID no. 29191451
  misc_feature (30)..(68): Pfam Name: CDC48_N PFAM Desc: Cell division protein 48
  misc_feature: Homolog of GI Number: 31432331 NR Desc: putative endoplasmic reticulum membrane fusion protein
  misc_feature: Homolog of GI Number: 1705678 NR Desc: Cell division cycle protein 48 homolog
  misc_feature: Homolog of GI Number: 6681343 NR Desc: putative transitional endoplasmic reticulum ATPase
  misc_feature: Homolog of GI Number: 30102750 NR Desc: At5g03340
  misc_feature: Homolog of GI Number: 7378614 NR Desc: transitional endoplasmic reticulum ATPase
  misc_feature: Homolog of GI Number: 6630743 NR Desc: CDC48
  misc_feature: Homolog of GI Number: 1669660 NR Desc: protein of AAA family
  misc_feature: Homolog of GI Number: 50811096 NR Desc:  similar to Transitional endoplasmic reticulum ATPase
  misc_feature: Homolog of GI Number: 66853683 NR Desc: cell division control protein Cdc48
MASQGEPSASASDPKEKKDFSTAILERKKSPNRLVVDEATNDDNSVVALHPDTMERLQLFRGDTVLLKV

SEQ ID NO: 7939 - DNA, 733 bp, Zea mays
  misc_feature: Ceres CLONE ID no. 1436542
  misc_feature: Ceres CDNA ID no. 25891071
  CDS (130)..(519): REFERENCED BY SEQ ID NO: 7940
atcccatcgtgcatcttccttcgtccaagcggtacggaagggaagcagccgacgtctccgtcgccgtcgtctcgttcgtccccaaatcttcaccgagcttccgctccccgcagcaacgcggaggaaggaatggacaagtatcacagcaacacccgctttgcacccctgagagacgctccatttgctctccgtggtgcctttggtacctccaactcgtctttcaacaacatggatggccttagacactcctcaagcattgggcaagcaaggagctacacatcttctcccttaggagctctgcgacagaagattcctccatctggaaaccgatccctacatacaagtcgtcccctgtctgctcctgttgcgaaccgcccactgtctccccatcttcctctgaagaagccacagctgagcgctacgttctccatctcacaccgtatatttggcgtcgctctgggtgctgccatcatatccattcctcttgctaccaggttcagcgtcatgtttgaggtctgagtgaaatgcagcgtgcatcgatgaggggtaacattgctgtgactgtttcgtcgttgggcagaatgcaactgtaggtacagttgtcataaagtcttatcaatcttgcagattttatgaataataagggaaactatcctaaacatcagtgtaacgaaaacataattttgggatccgaaccagatcttgtgctttggtttcaaaaaaaaaaaaaaaa

SEQ ID NO: 7940 - protein, 129 aa, Zea mays
  misc_feature: Ceres CLONE ID no. 1436542
  misc_feature: Ceres CDNA ID no. 25891071
  misc_feature (78)..(119): Pfam Name: Sdh_cyt PFAM Desc: Succinate dehydrogenase cytochrome b subunit
  misc_feature: Homolog of GI Number: 32400816 NR Desc: succinate dehydrogenase subunit 3
  misc_feature: Homolog of GI Number: 50937817 NR Desc: succinate dehydrogenase subunit 3
  misc_feature: Homolog of GI Number: 50904863 NR Desc: succinate dehydrogenase subunit 3
MDKYHSNTRFAPLRDAPFALRGAFGTSNSSFNNMDGLRHSSSIGQARSYTSSPLGALRQKIPPSGNRSLHTSRPLSAPVANRPLSPHLPLKKPQLSATFSISHRIFGVALGAAIISIPLATRFSVMFEV

SEQ ID NO: 7941 - DNA, 567 bp, Glycine max
  misc_feature: Ceres CLONE ID no. 1436620
  misc_feature: Ceres CDNA ID no. 25447058
  CDS (108)..(329): REFERENCED BY SEQ ID NO: 7942
aacttttcctcacagacacgcacgctgcttgattcaaaagtagtacatacaagattcttcgctcatagggtttatactccaacatcatctataattcaggtttttccatggcgaccgaacccaaagcagtcactgaggacgtcaagatcgatctcttcgaagacgatgatgagtttgaagagtttgaaatcaatgaagagtgggatgacaaagaggaaggaaaagaagtgactcagcagtgggaggatgattgggatgatgatgatgttagtgatgatttctctctccagttgaaaagggagttggagagcaacactaataagaattaaatcacctgctagttattattgcttgatataacatgttatatgacttgggtgtttaagctctaggaaggaaatgaaaattatgccttgttaggaaggaaatgtaagactgtaagaacagaatagggacagtatttctgttcttgaatatctgcatagaagttaatgagtgcttgtacttaaattgaattatgtacaaggctttaagatttgatttacaatctcaaaaaaaaaaaaaaaa

SEQ ID NO: 7942 - protein, 73 aa, Glycine max
  misc_feature: Ceres CLONE ID no. 1436620
  misc_feature: Ceres CDNA ID no. 25447058
  misc_feature (7)..(69): Pfam Name: DSS1_SEM1 PFAM Desc: DSS1/SEM1 family
  misc_feature: Homolog of GI Number: 37050895 NR Desc: deleted in split hand/splt foot protein 1
  misc_feature: Homolog of GI Number: 66509809 NR Desc:  similar to ENSANGP00000017966
  misc_feature: Homolog of GI Number: 32416282 NR Desc: predicted protein
  misc_feature: Homolog of GI Number: 51593680 NR Desc: MGC85362 protein
  misc_feature: Homolog of GI Number: 58380251 NR Desc: ENSANGP00000017966
  misc_feature: Homolog of GI Number: 55628924 NR Desc:  similar to 26 proteasome complex subunit DSS1
MATEPKAVTEDVKIDLFEDDDEFEEFEINEEWDDKEEGKEVTQQWEDDWDDDDVSDDFSLQLKRELESNTNKN

SEQ ID NO: 7943 - DNA, 1639 bp, Zea mays
  misc_feature: Ceres CLONE ID no. 1436643
  misc_feature: Ceres CDNA ID no. 35383396
  CDS (545)..(1231): REFERENCED BY SEQ ID NO: 7944
aaagcaaatgctgcgcccgaatctctcgcctttttatcgctgtcgcccgctcctctctctccaaaccttgtcccatcccatctcgcgcgagatcggcgcagccgcgcgctgctttcccctcccttgacctttccactggtctctgcgctcctgccccgcctgctcctcgggcgtagcgaccgccgaccggctggctgcggctgctgccgccgctgctgctgcaggtgctcgagtggagctctgctgcgtgctctgtgctctctctccgctttctcgttgcagttgcagcagccgcttcctgtgacccgtccggccaactagcgcatcccaccggccgccggccagccagcctgtgtctctctcagtggctcaccgcactgcgccccgtttcagagtggtagcagtgctgcgactgcgtgcacagggtatatagatagataggagtacactgcgtaggagacagcaagagggcgagaaggctgtgtgtgagtgtgagagagggagaggcagagaacattcggcagtgtgagaatcggaatcggagatggcttggaatggccgcttcggcgacgacgaggaggggagcggccttgagctcagccttagcctcccgggctacttctccggatcgccaacccaagcttcagcaggtttcgaggacaaagcagacggcggctctgctgctgctgctgctgctgcgcgaacaaagggaagcaatggcttcaaggccaggtcggcggcagctgctccggtcgtgggatggccgccagtgcgcgcgttccggcggaacctcgcctcggcgtcctccaagccgtcccgcgagccgccaccaagccacagaggaaacgagcccgcgagcgccggcgccggcggcaacaagggcctgttcgtcaaggtcaacatggacggcgtgcccatcggccggaagctcgacctgggcggccacgccggctacgacacgctaaccgccgccgtcgaccacctcttccgcggcctcctcgccgctcaaacgtcgggaccagacggcgagcggcaggcggtcgcggggatcctgaacggtggcggcgagtacacgctggtgtacgaggacgacgagggagaccagatgctggtcggggacgtgccgtggcagatgttcgccgccaccgccaggcgtctgcgcgtgctgcggagctccgatctcaacccctcgtcgctaagggcagcgaccaggaagagagctgcagcttagtgctgcgctggcgtaccctggagtctcaactctgaacattttgcggccttttcggagggccaccaatgtaaaattgaagcggtttttcgtggattttagttaccattaccatcatgtatgtgatcaagtagggaagcaggaatctagaggtgatgagcggtgttggtagaatcacgtaatttagtgctaggaccagcagtgtctcaacttttctgaaagtctaacaaggtgtcttggcgctggagtgtatagttcatacttacatagtgctactgcttgcatcgctctggatcagctaaagccctaccaaatggttaaaaaaacttggtttctagtggcatctgccatatttttttcgtacatcattcgaaagaaggctcctaaatttttctcaaaaaaaaaaaaaaa

SEQ ID NO: 7944 - protein, 228 aa, Zea mays
  misc_feature: Ceres CLONE ID no. 1436643
  misc_feature: Ceres CDNA ID no. 35383396
  misc_feature (70)..(212): Pfam Name: AUX_IAA PFAM Desc: AUX/IAA family
  misc_feature: Homolog of GI Number: 50933087 NR Desc: putative auxin
  misc_feature: Homolog of GI Number: 34906394 NR Desc: P0710E05.9
  misc_feature: Homolog of GI Number: 50906555 NR Desc: putative aux/IAA protein
  misc_feature: Homolog of GI Number: 30410707 NR Desc: auxin
  misc_feature: Homolog of GI Number: 21593333 NR Desc: phytochrome
  misc_feature: Homolog of GI Number: 4093155 NR Desc: phytochrome
  misc_feature: Homolog of GI Number: 15810073 NR Desc: At1g51950/T14L22_14
  misc_feature: Homolog of GI Number: 34909384 NR Desc: putative phytochrome
  misc_feature: Homolog of GI Number: 2618725 NR Desc: IAA18
  misc_feature: Homolog of GI Number: 21594025 NR Desc: auxin regulated protein IAA18
  misc_feature: Useful for sterility
MAWNGRFGDDEEGSGLELSLSLPGYFSGSPTQASAGFEDKADGGSAAAAAAARTKGSNGFKARSAAAAPVVGWPPVRAFRRNLASASSKPSREPPPSHRGNEPASAGAGGNKGLFVKVNMDGVPIGRKLDLGGHAGYDTLTAAVDHLFRGLLAAQTSGPDGERQAVAGILNGGGEYTLVYEDDEGDQMLVGDVPWQMFAATARRLRVLRSSDLNPSSLRAATRKRAAA

SEQ ID NO: 7945 - DNA, 636 bp, Zea mays
  misc_feature: Ceres CLONE ID no. 1436747
  misc_feature: Ceres CDNA ID no. 25445822
  CDS (88)..(429): REFERENCED BY SEQ ID NO: 7946
aaatttctgagtgttgtcgctcctctggactgaattggtggtggaatctctttatgatgttctaaaaaaacatctatctgttcaataatgcagtgctacgcagagaagcaggctctgggtgaagtgagccaggagctgctggacactcaggtgaacccagctgtgtgggagatcagtggacacatggtgctgaaacggaggatggactatgaggaggcatctgaaacctccgcgtggaaactcctcgctgaggtctctctctccgaggagcgcttcgaggaagtgaaggcgtacatcttcagcgctgctggcctggttcagtatgatgaggaagaggaggaagccagcgacggtgagggccctacggcctatgttcctgtcaaggttacccctctgcccgtcgctgaagggtgcctcgtcctcccgtgagtccgtggtcggttaaataaagggccgtatatgattgcgagccctgtgctctgccgctattttcttctcgtttgtgtcttgctgctctcgtggtgaactcgctactccagtgttctgcaatattaagcagaagctattgtattgtttgggtcgtttgtcagctaattgaaatgcgatggacatttactagtaaaaaaaaaaaaaaaa

SEQ ID NO: 7946 - protein, 113 aa, Zea mays
  misc_feature: Ceres CLONE ID no. 1436747
  misc_feature: Ceres CDNA ID no. 25445822
  misc_feature: Homolog of GI Number: 21070346 NR Desc: VTC2
  misc_feature: Homolog of GI Number: 34907712 NR Desc: P0035F12.16
MQCYAEKQALGEVSQELLDTQVNPAVWEISGHMVLKRRMDYEEASETSAWKLLAEVSLSEERFEEVKAYIFSAAGLVQYDEEEEEASDGEGPTAYVPVKVTPLPVAEGCLVLP

SEQ ID NO: 7947 - DNA, 681 bp, Glycine max
  misc_feature: Ceres CLONE ID no. 1437541
  misc_feature: Ceres CDNA ID no. 25893174
  CDS (53)..(454): REFERENCED BY SEQ ID NO: 7948
ataatttttcgtacgcttccctctacttctttcaaaactttcataaaacaaaatggcgggtcgtggaaaaactctcggatctggggttgctaagaaggcgacgtctcggagcagcaaggcgggtctccagttccccgtcggccgtatcgcccggttcttgaaaaacggcaagtacgccgaacgtgtcggcgccggagctccggtctacttggccgccgtactcgaataccttgccgcagaggttttggaattggctgggaacgcggcgagggacaacaagaaaacaagaatcgtgccgcgtcacattcaactggcggtgaggaacgacgaggagctgagcaagttgcttggagacgtgacgattgctaatggcggtgtgatgccgaacattcacaatcttcttcttcccaagaaggctggtggtgcttacaaaccttccggtgacgacgaatagatctcagttcagttctgtaatgaagtgtagatttagattagtcctgttttaaatcgatcttgtctgtaaacgtttgcagtgtgttacccttagattaaatatgtctggtcttaaaagatttgatcttgaacatcgtgaacttgaccaatgtttctctgtttccatccccataaaagagatataatttgccaatgtgcaacggttaaatctgaaaaaaaaaaaaaaaa

SEQ ID NO: 7948 - protein, 133 aa, Glycine max
  misc_feature: Ceres CLONE ID no. 1437541
  misc_feature: Ceres CDNA ID no. 25893174
  misc_feature (25)..(89): Pfam Name: CBFD_NFYB_HMF PFAM Desc: Histone
  misc_feature: Homolog of GI Number: 19310641 NR Desc: putative histone H2A protein
  misc_feature: Homolog of GI Number: 17065594 NR Desc: putative histone H2A protein
  misc_feature: Homolog of GI Number: 21593834 NR Desc: histone H2A
  misc_feature: Homolog of GI Number: 29824201 NR Desc: putative histone H2A
  misc_feature: Homolog of GI Number: 21617982 NR Desc: histone H2A
  misc_feature: Homolog of GI Number: 50938211 NR Desc: putative histone H2A
  misc_feature: Homolog of GI Number: 50945929 NR Desc: putative histone H2A
  misc_feature: Homolog of GI Number: 536896 NR Desc: protein H2A
  misc_feature: Homolog of GI Number: 77555213 NR Desc: Core histone H2A/H2B/H3/H4
  misc_feature: Homolog of GI Number: 50938209 NR Desc: histone H2A
MAGRGKTLGSGVAKKATSRSSKAGLQFPVGRIARFLKNGKYAERVGAGAPVYLAAVLEYLAAEVLELAGNAARDNKKTRIVPRHIQLAVRNDEELSKLLGDVTIANGGVMPNIHNLLLPKKAGGAYKPSGDDE

SEQ ID NO: 7949 - DNA, 635 bp, Zea mays
  misc_feature: Ceres CLONE ID no. 1437547
  misc_feature: Ceres CDNA ID no. 25446017
  CDS (89)..(430): REFERENCED BY SEQ ID NO: 7950
aacattcccagacacccaagcacccacacaaagaacacatacacacagcaagcggaagaagcttttttcccgaggaagagcggcgaggatgcagacggccaaggtgaaggtgaaggacgcggtgagctcggccaaggagaaggcgaaggagggcacggccaaggcgcagggcaagacgggcaaggccacggcgaccacgcacggcgagaaggagatggccaaggaggagacgcgcgccaacgaggcccaggccaaggccgagatgcaccaggagaaggccgagcaccgcgccgaggccgccgcggggcgccacggtgccacgcacgtgcccctcaccgggccgcatggccaccaccgccctgcgggcgccgccgccgaccctgcgtacacgggcaccggcgcgtacccgaccacggacaagtacgtctagacgccagatgatcgggggatcaggagctggcagctagtgttttttgtgtgtggctagtgatcctgcccgtgtgtcgtagttggcgcgcgcgtgtatgctgtgcgaacatgcgtgtgcccgaataaaatgtatcggtcagttgtaaaatgcacctttgatgtactagtaatttgtgagtccaaaaaaaaaaaaaaaaaaaaaaaaa

SEQ ID NO: 7950 - protein, 113 aa, Zea mays
  misc_feature: Ceres CLONE ID no. 1437547
  misc_feature: Ceres CDNA ID no. 25446017
  misc_feature (1)..(73): Pfam Name: LEA_1 PFAM Desc: Late embryogenesis abundant
  misc_feature: Homolog of GI Number: 50928369 NR Desc: OSJNBa0086O06.12
  misc_feature: Homolog of GI Number: 21387075 NR Desc: late embryogenesis
  misc_feature: Homolog of GI Number: 4836407 NR Desc: seed maturation protein PM29
  misc_feature: Homolog of GI Number: 20465321 NR Desc: putative late
  misc_feature: Homolog of GI Number: 4102692 NR Desc: late
  misc_feature: Homolog of GI Number: 72398490 NR Desc: class 4 LEA protein
  misc_feature: Homolog of GI Number: 9837379 NR Desc: retinitis pigmentosa GTPase regulator
  misc_feature: Homolog of GI Number: 50929791 NR Desc: OSJNBa0088H09.19
MQTAKVKVKDAVSSAKEKAKEGTAKAQGKTGKATATTHGEKEMAKEETRANEAQAKAEMHQEKAEHRAEAAAGRHGATHVPLTGPHGHHRPAGAAADPAYTGTGAYPTTDKYV

SEQ ID NO: 7951 - DNA, 877 bp, Zea mays
  misc_feature: Ceres CLONE ID no. 1437557
  misc_feature: Ceres CDNA ID no. 40351828
  CDS (94)..(744): REFERENCED BY SEQ ID NO: 7952
actcagtcagcctctgcgagcatccaacgccgaccaaccaccaccacaaggtccacaagttcaccgctaccaccactgcacggagtcacggcgatgacgccgcctcaccaccccgtgaacttcgccgtccttctcctcttcctatgcctcccggcagtcccacccgccgccgccgcggccgacccgaccccgaccccatggcccccgcagttccacgcgacgctggtgatggactaccacgacaacatgtccgtggccgacctctggtacgactggccgggcggccgcaacctgcacgtcatccgctaccagctcgccgccgacgcgccctactacgacaacgagtggaacaacggcacctccttcttttacacgccggcgctccgcacctgccgctccgccgccgtcggggtcggcatcctccgcccggactggctccgccccggggccgtctacctcggccgccgcgacgccggcggattcgactgccacgtctgggccaaggccgacttcatcacctactacgaggacgtcaacaccaagcgacccgtcaagtgggtcttctacacaggtaggaccgcctacgttatgagctttgaggtgggagcggtgctggaggacgcggcgtggcaggccccggagtactgcttcaccaacgacaacgacggtgggcttgggctggccgccgagaccaccaccaccatcgctggcggcagcagcttcgtccccaggagcgtgctgtgagtgtgaggtccccacgagcggcagcagcttcagtatttggagaaatacggtcgatatgtgcacagcgtacgcgcagtaatgtaatctttttgcctgtctgttgtttatctctgagcgaaaaaaaaaaaaaaaa

SEQ ID NO: 7952 - protein, 216 aa, Zea mays
  misc_feature: Ceres CLONE ID no. 1437557
  misc_feature: Ceres CDNA ID no. 40351828
MTPPHHPVNFAVLLLFLCLPAVPPAAAAADPTPTPWPPQFHATLVMDYHDNMSVADLWYDWPGGRNLHVIRYQLAADAPYYDNEWNNGTSFFYTPALRTCRSAAVGVGILRPDWLRPGAVYLGRRDAGGFDCHVWAKADFITYYEDVNTKRPVKWVFYTGRTAYVMSFEVGAVLEDAAWQAPEYCFTNDNDGGLGLAAETTTTIAGGSSFVPRSVL

SEQ ID NO: 7953 - DNA, 992 bp, Zea mays
  misc_feature: Ceres CLONE ID no. 1437576
  misc_feature: Ceres CDNA ID no. 25401502
  CDS (2)..(724): REFERENCED BY SEQ ID NO: 7954
aaaaaccagctggattttctttccacttcggtgtgctggtcgacgtggtccttctctcctctcgtctccacagtccacacacaccgtgtgcggcggtagctgctgctgcccgtgcctaccgaagaagacaagtccaacactgttgttctgttccgtgattgcggaatttgcttcaccacaccttcatcagagagccgagacgacacgctcgagacccagcaaggcaagaagaacacgagagagacagcaggcaccaggcagggatcaatcatccgtccatggagaacctaaaggagcagcggggccacgacgcggcgggcgccaacgcctggatgacggtgccggcgttcggggactgggacacgaagaacggcgcgctgccggactactccatggacttctccaagatccgcgagatgcgcaagcagaacaagaaggagctctcccgcgccagcctcggcggcgacgacgacctcctcgcccacgcccagaagccgcagcccagtatcgccccgcccaagctcggccgcccccgccccggccccgccgacgaccactccccaacgggagggaagaagttcctgagctacttccggtgttgtatcaaggcctgaagaggtgctgctctagtgcctgcagtccctgtgtttttttttcgcagcagaacacttgtgagcaatcaggcctcggttttgttaagtaccccgtgtccaaaaacgtgtaatatatttgtccttatggatcagtcgttgggcctgtatgaagaacagaccagtttatggggtaagcaacgttctttttgtacacatacatcaccatcgatttgtccttgatacgatcaaggggcatggttcgaatgaattggttttgtaattatgatgggaaaatacgtacggaaagcacaaatgactcctggcacctttttctataggagcacacaattttttatatatagaagtgtggagacttctcagcgaaaaaaaaaaaaaaaa

SEQ ID NO: 7954 - protein, 111 aa, Zea mays
  misc_feature: Ceres CLONE ID no. 1437576
  misc_feature: Ceres CDNA ID no. 25401502
  misc_feature: Homolog of GI Number: 72384402 NR Desc: 4D11_4
  misc_feature: Homolog of GI Number: 71834736 NR Desc: 80C09_15
MENLKEQRGHDAAGANAWMTVPAFGDWDTKNGALPDYSMDFSKIREMRKQNKKELSRASLGGDDDLLAHAQKPQPSIAPPKLGRPRPGPADDHSPTGGKKFLSYFRCCIKA

SEQ ID NO: 7955 - DNA, 795 bp, Glycine max
  misc_feature: Ceres CLONE ID no. 1437591
  misc_feature: Ceres CDNA ID no. 29191645
  CDS (39)..(524): REFERENCED BY SEQ ID NO: 7956
atcgcttccctcaaatctctcaaaaacaaatcaaaaagatgtcgacgaagaagattgtgttgaagagctccgacgacgagtctttcgaggttgacgaggccgtggctcgcgagtctcagaccctagctcacatggtcgaagacgactgcaccgacaacggcatccctcttcccaacgtcaccggcaagatcctcgccaaggtcatcgagtattgcaagaagcacgtcgacgccgctgctgccaagacagaggccaccgccgatggtggcgctccctccgacgaggacctcaaggcttgggatgccgagttcatgaatatcgatcaagctaccctcttcgaactcatcctggctgctaactatctgaacatcaagaaccttcttgaccttacgtgccagacggtggctgatatgatcaaaggcaagactccagacgagattcgcacgaccttcaacatcaagaacgacttctcgcctgaggaggaagaggaggtgcgcagggagaaccaatgggcttttgaatgatgatcaaagagaagccttgttccttgttgaagctagctactagacctgcaaagcttcttccttttatcttatttgcgtctttatgttcttaggaaaatataatgatttatgttggttcctcctagtgcttttccatttaccgattaagaaccgatgattggataatttgtggttataatcagtctttggttatgttgctatcttgtttatgctttatctaatctacgagtatgcaagatgatgcatttaaacaacaaaaaaaaaaaaaaaa

SEQ ID NO: 7956 - protein, 161 aa, Glycine max
  misc_feature: Ceres CLONE ID no. 1437591
  misc_feature: Ceres CDNA ID no. 29191645
  misc_feature (4)..(64): Pfam Name: Skp1_POZ PFAM Desc: Skp1 family
  misc_feature (84)..(161): Pfam Name: Skp1 PFAM Desc: Skp1 family
  misc_feature: Homolog of GI Number: 18958249 NR Desc: kinetochore protein
  misc_feature: Homolog of GI Number: 81248477 NR Desc: SKP1
  misc_feature: Homolog of GI Number: 18958255 NR Desc: kinetochore protein
  misc_feature: Homolog of GI Number: 18958257 NR Desc: kinetochore protein
  misc_feature: Homolog of GI Number: 18958259 NR Desc: kinetochore protein
  misc_feature: Homolog of GI Number: 18958253 NR Desc: kinetochore protein
  misc_feature: Homolog of GI Number: 21281127 NR Desc: putative SKP1/ASK1 protein At1
  misc_feature: Homolog of GI Number: 28466911 NR Desc: At5g42190
  misc_feature: Homolog of GI Number: 4959710 NR Desc: Skp1
  misc_feature: Homolog of GI Number: 3719211 NR Desc: UIP2
MSTKKIVLKSSDDESFEVDEAVARESQTLAHMVEDDCTDNGIPLPNVTGKILAKVIEYCKKHVDAAAAKTEATADGGAPSDEDLKAWDAEFMNIDQATLFELILAANYLNIKNLLDLTCQTVADMIKGKTPDEIRTTFNIKNDFSPEEEEEVRRENQWAFE

SEQ ID NO: 7957 - DNA, 862 bp, Glycine max
  misc_feature: Ceres CLONE ID no. 1437592
  misc_feature: Ceres CDNA ID no. 40351829
  CDS (3)..(554): REFERENCED BY SEQ ID NO: 7958
gtgttcccccatccccactgacgcctcctccgcacgaaacaccggcgccgcactcatcggagaggaggaagctcccgccccggctcgatccgatggccaacagcaaccttcctcgacgaatcatcaaggagacgcagagacttctcagcgagccagcaccggggatcagcgcttcgccctcggaggagaacatgcggtacttcaacgtcatgatccttggtccggcgcagtcaccctacgaagggggagtttttaagctggaactctttttacccgaggaatatccgatggctgccccaaaggttaggtttctgaccaaaatataccatcccaacattgacaagcttggtaggatatgccttgacattctcaaggataaatggagtccggctcttcagattcgaacagttcttttgagtatccaggcactcctaagtgcaccaaatccagatgaccctctctctgaaaacattgctaagcactggaagtccaatgaggcagaagctgttgaaacagcgaaggagtggactcgtctgtatgccagtggtgcatgacaaccccatgccgctctcgatgtaataatccatcatactttagccagcaatcaagtgccattttgttgataagaacaaactggagatgtttgcgctggaagggagtatctgaatgactagtgctcgagctatttggttggttgtaacacctgtgttggttggttcccttcaccctggggcaccttctgactgatctgtatctgatagaactttctatgctcctccactacaatacccttgtgtaggagaagttaacaagtgtccacattgttgaaattgaagctggcttgccaaaaaaaaaaaaaaaa

SEQ ID NO: 7958 - protein, 153 aa, Glycine max
  misc_feature: Ceres CLONE ID no. 1437592
  misc_feature: Ceres CDNA ID no. 40351829
  misc_feature (9)..(146): Pfam Name: UQ_con PFAM Desc: Ubiquitin
MANSNLPRRIIKETQRLLSEPAPGISASPSEENMRYFNVMILGPAQSPYEGGVFKLELFLPEEYPMAAPKVRFLTKIYHPNIDKLGRICLDILKDKWSPALQIRTVLLSIQALLSAPNPDDPLSENIAKHWKSNEAEAVETAKEWTRLYASGA

SEQ ID NO: 7959 - DNA, 1339 bp, Glycine max
  misc_feature: Ceres CLONE ID no. 1437641
  misc_feature: Ceres CDNA ID no. 36707087
  CDS (58)..(1134): REFERENCED BY SEQ ID NO: 7960
atctctctcgtctgccttctctatcaaaaacttttatcgacctttccgtcataaaccatgtctgccttcaccagcaaattcgccgatgagctgatcgctaacgctgcctacatcggcacacctggaaaaggtattctcgccgccgatgagtccaccggtaccatcggaaagcgtctcgctagcatcaacgtcgagaacgttgaaaccaacagacgtgctctccgtgagcttctcttcaccgcccccggtgctctcccttgcctcagcggtgtcatcctcttcgaagagactctttaccaaaagagttccgatggcaagcttttcgttgatattttgaaggaaggaggagtcctcccaggtatcaaagtcgacaagggtaccgttgagctagccggaaccaacggtgagaccaccactcaaggtcttgacggtctcggtgagcgttgcaagaagtactacgaagctggtgcccgtttcgccaagtggcgtgcggttctcaagatcggcgagaacgagccatcagagcattccatccacgagaacgcttacgggttggctagatacgctgtcatctgccaggagaacggtcttgtaccaatcgttgagcctgagatccttgtcgacggatcccacgacatccacaagtgtgctgccgtcaccgagcgtgtccttgcggcttgctacaaggctcttagcgaccaccacgttttgcttgagggaactttgttgaagcctaacatggtcacacctggatccgacagtgccaaggtcgcgcctgaggttatcgctgagcacaccgtccgtgctcttcagagaacggtaccagcagctgttccagctattgttttcttgtctggtggacagagcgaggaggaggcgaccaagaacttgaacgcgataaaccagttgaagaccaagaagccatggtcattgtctttctcgttcggacgtgcgttgcaacagagcactttgaagacatgggcagggaaagaggagaatgttaaggcagctcaagaggcgttgtatgtgaggtgcaaggctaactctgaagccacactcggaacgtacaaaggtgatgctaagcttggtgatggagctgcagagagccttcacgtgaaggactacaagtactgagaattcaacttcaatggtttctgttgtgatgtcctcatcagcaccctcgatatatttctgagggtttcttctactttttgcttgacattatcggcttttcgatttttgtttttcgatttttgttttgatttaagaatgatgagtgtttaaaaacgccaaaataaaatgccatctgaggttatttctgctaaaaaaaaaaaaaaaa

SEQ ID NO: 7960 - protein, 358 aa, Glycine max
  misc_feature: Ceres CLONE ID no. 1437641
  misc_feature: Ceres CDNA ID no. 36707087
  misc_feature: null
  misc_feature: Useful for making plants with modulated phosphate use efficiency
  misc_feature (11)..(358): Pfam Name: Glycolytic PFAM Desc: Fructose
  misc_feature: Homolog of GI Number: 10645188 NR Desc: cytosolic aldolase
  misc_feature: Homolog of GI Number: 3021338 NR Desc: cytosolic fructose
  misc_feature: Homolog of GI Number: 21592946 NR Desc: fructose bisphosphate aldolase
  misc_feature: Homolog of GI Number: 927505 NR Desc: fructose
  misc_feature: Homolog of GI Number: 10800924 NR Desc: fructose
  misc_feature: Homolog of GI Number: 18414312 NR Desc: fructose
  misc_feature: Homolog of GI Number: 21553388 NR Desc: fructose
  misc_feature: Homolog of GI Number: 20260022 NR Desc: fructose
  misc_feature: Homolog of GI Number: 7340654 NR Desc: fructose
  misc_feature: Homolog of GI Number: 17104659 NR Desc: putative fructose bisphosphate aldolase
MSAFTSKFADELIANAAYIGTPGKGILAADESTGTIGKRLASINVENVETNRRALRELLFTAPGALPCLSGVILFEETLYQKSSDGKLFVDILKEGGVLPGIKVDKGTVELAGTNGETTTQGLDGLGERCKKYYEAGARFAKWRAVLKIGENEPSEHSIHENAYGLARYAVICQENGLVPIVEPEILVDGSHDIHKCAAVTERVLAACYKALSDHHVLLEGTLLKPNMVTPGSDSAKVAPEVIAEHTVRALQRTVPAAVPAIVFLSGGQSEEEATKNLNAINQLKTKKPWSLSFSFGRALQQSTLKTWAGKEENVKAAQEALYVRCKANSEATLGTYKGDAKLGDGAAESLHVKDYKY

SEQ ID NO: 7961 - DNA, 526 bp, Zea mays
  misc_feature: Ceres CLONE ID no. 1437719
  misc_feature: Ceres CDNA ID no. 29191285
  CDS (76)..(357): REFERENCED BY SEQ ID NO: 7962
ccaactcgaaaccccccaaaaccctaccgcgcctcctcccgtcctcgccgtcgcccccctcgctcctccggaacgatgccgctggggctgatactgagctcgatcgggaggtcgatgcggcggaagcggacgtcctcgctcaacatcctctcctccaagagggcgccccgggattactacaagggcaagaactgcaagcccaccgggttccacacccgcaaaggtggctatgtgatggtggatgcaaagttaccaagattcgtggtccctgacttgactgattttaagttgaagccatatgtatcacaatgtgccagggacgaactcggagcctcctcaactgaaaacaagaactgatatgtttctagatgctctagttgttacttgttttacaagaatgcaatgcatctttgcaattatgttttcttacggtgcccatgttcagagcatctaacctcgtcaagattgctacgtgtggactagtcttaataacaaactttgtgcctcagcaaaaaaaaaaaaaaaa

SEQ ID NO: 7962 - protein, 93 aa, Zea mays
  misc_feature: Ceres CLONE ID no. 1437719
  misc_feature: Ceres CDNA ID no. 29191285
  misc_feature: Homolog of GI Number: 50910555 NR Desc: 60S ribosomal protein
  misc_feature: Homolog of GI Number: 57092137 NR Desc:  similar to mitochondrial ribosomal protein L41
  misc_feature: Homolog of GI Number: 73967437 NR Desc:  similar to mitochondrial ribosomal protein L41
  misc_feature: Homolog of GI Number: 76646691 NR Desc:  similar to mitochondrial ribosomal protein L41
  misc_feature: Homolog of GI Number: 62858839 NR Desc: LOC549033
  misc_feature: Homolog of GI Number: 61809965 NR Desc:  similar to mitochondrial ribosomal protein L41
  misc_feature: Homolog of GI Number: 49670436 NR Desc: Mrpl41
  misc_feature: Homolog of GI Number: 50757492 NR Desc:  similar to mitochondrial ribosomal protein L41
  misc_feature: Homolog of GI Number: 48735076 NR Desc: MGC83146 protein
MPLGLILSSIGRSMRRKRTSSLNILSSKRAPRDYYKGKNCKPTGFHTRKGGYVMVDAKLPRFVVPDLTDFKLKPYVSQCARDELGASSTENKN

SEQ ID NO: 7963 - DNA, 666 bp, Zea mays
  misc_feature: Ceres CLONE ID no. 1437728
  misc_feature: Ceres CDNA ID no. 25401503
  CDS (84)..(476): REFERENCED BY SEQ ID NO: 7964
aaaagacctaaacttgctcacgaagaaaaaaaatcgaaatcgaaactctccgccgagtcagatccaatcgcaaaccgtccccaatggctctcgagtgggttgtcctaggctacgcggcagccgccgaagcgatcatggtcatcctgctaaccatgccaggactcgacgcgctccgcaaaggcttgatcgccgtcacgcgcaacctcctgaagccgtttctctcgatcatccccttctgcctcttcctcctcatggacatctactggaagtacgagacccgcccctcctgcgacggcgactcgtgcactccctccgagcacctccgccaccagaagtcgatcatgaagtcccagcgcaacgcgctcctgatcgcgtcggcgcttgtattctactggattttgtattccgttacgaatcttgttgtgaggatcgagcagcttaaccagagggttgagaggcttaggaagagagagtaaagcgtcgtcgtttcgggctctgatttggtgttctttctgcgtttgtttgcttttatcttgtggagattgtaagaatctatgctctcccttttcaatcctatttgtttagtctctgaatcttgatgatactttgctctgttatcttggttagttataatgaatctgtctacgaccaaaaaaaaaaaaaaaa

SEQ ID NO: 7964 - protein, 130 aa, Zea mays
  misc_feature: Ceres CLONE ID no. 1437728
  misc_feature: Ceres CDNA ID no. 25401503
  misc_feature: Homolog of GI Number: 28207685 NR Desc: Erwinia induced protein 2
  misc_feature: Homolog of GI Number: 50912505 NR Desc: Erwinia induced protein 2
  misc_feature: Homolog of GI Number: 8778685 NR Desc: T1N15.5
MALEWVVLGYAAAAEAIMVILLTMPGLDALRKGLIAVTRNLLKPFLSIIPFCLFLLMDIYWKYETRPSCDGDSCTPSEHLRHQKSIMKSQRNALLIASALVFYWILYSVTNLVVRIEQLNQRVERLRKRE

SEQ ID NO: 7965 - DNA, 631 bp, Zea mays
  misc_feature: Ceres CLONE ID no. 1437887
  misc_feature: Ceres CDNA ID no. 36594001
  CDS (60)..(416): REFERENCED BY SEQ ID NO: 7966
gaaccaaattggcacttccgtaccccgaccccggccaccgtgtggaaacagaaacagcaatggcggggaggctggtgccgagcacgaagaaggcgatggagcaccgggaggagaagcccaaggtgccgtcgagcgacccgggctccgacctcgacctggtgcagctggtggccgggcagcagccgcccaacatctcggagatgaagccgctgacgcgggaggcgtacggcggcgggatgtacgcggccgaggaggagggcggccggcggaggggccccgcgcggccgcgcgcgagcgccacgcagagcgccgacgggcccgaggagcagcgcgctggcgcgaggcccagccacccgccgccgccgtccaccggcgaccgcgacctcgacatcaccggccagtcctacatccagtagccgcatgtgccggctgccgagcgccgcgcttgggcgttggccattggcgttgtgtgtgtgtacacagtacagtacagtaagtacttgctagtatacttggttgtgtacttgccaaagtgtccttgtacacgtcgctttgttaagatgtgtacgtacgtactagttgccgacgaataaaggtttggacttgggctttcagaaaaaaaaaaaaaaaa

SEQ ID NO: 7966 - protein, 118 aa, Zea mays
  misc_feature: Ceres CLONE ID no. 1437887
  misc_feature: Ceres CDNA ID no. 36594001
  misc_feature: Homolog of GI Number: 67984658 NR Desc: type II secretion system protein E
  misc_feature: Homolog of GI Number: 67985765 NR Desc: Pantoate
MAGRLVPSTKKAMEHREEKPKVPSSDPGSDLDLVQLVAGQQPPNISEMKPLTREAYGGGMYAAEEEGGRRRGPARPRASATQSADGPEEQRAGARPSHPPPPSTGDRDLDITGQSYIQ

SEQ ID NO: 7967 - DNA, 961 bp, Zea mays
  misc_feature: Ceres CLONE ID no. 1438370
  misc_feature: Ceres CDNA ID no. 29191286
  CDS (48)..(818): REFERENCED BY SEQ ID NO: 7968
ctaaattagagtctccctttgaccctcttcgccgtcagtctgtagcaatggcacccaaaaagggagtgaaggtggttaccaagaagaagacggagaaggtaaccaacccgttgtttgagagaaggccaaagcaattcggtatcggtggagctctgcctcctaagaaggatctgactcgttacatcaaatggcccaagtccatccgtctccaaaggcagaagcgtatcctcaagcagaggctcaaggtccctcctgctttgaaccagttcaccaagactcttgacaagaaccttgcgacccagcttttcaaggttcttatgaagtacaggcctgaggacaaggccgcaaagaaggatcgtcttttgaaaaaggcccaagccgaggctgagggaaagccttctgaatccaagaagcctatcgttgtcaagtacgggctcaaccacgtgacttacctcatcgagcagaacaaggcgcagcttgtggtcattgctcacgatgttgaccccatcgagcttgtcgtctggttacctgctctttgcagaaagatggaagtgccttactgcattgttaaaggcaaatctcgtcttggaacggttgttcaccagaagaccgctgcttgcttgtgcttaaccactgtcaagaacgaggataagctcgagttcagcaaaatccttgaagccatcaaggcaaacttcaacgacaagtacgaggagtacaggaagaagtggggaggaggcataatgggatccaagtctcaagccaagaccaaagctaaggagagggttctcgccaaggaggctgcccagagaatgaactaagctgaaacttaatgattgacggtggttttgttttagcgatttcatggaatgttttgaaactttatgctcttactatcaatgttgcacacttgaggttgaggatattattattgcagttttgttatacaaaaaaaaaaaaaaaa

SEQ ID NO: 7968 - protein, 256 aa, Zea mays
  misc_feature: Ceres CLONE ID no. 1438370
  misc_feature: Ceres CDNA ID no. 29191286
  misc_feature (111)..(206): Pfam Name: Ribosomal_L7Ae PFAM Desc: Ribosomal protein L7Ae/L30e/S12e/Gadd45 family
  misc_feature: Homolog of GI Number: 23308199 NR Desc: At2g47610/T30B22.8
  misc_feature: Homolog of GI Number: 21592470 NR Desc: 60S RIBOSOMAL PROTEIN L7A protein
  misc_feature: Homolog of GI Number: 50944205 NR Desc: 60S ribosomal protein L7A
  misc_feature: Homolog of GI Number: 82400140 NR Desc: 60S ribosomal protein L7A
  misc_feature: Homolog of GI Number: 82623429 NR Desc: 60S ribosomal protein L7A
  misc_feature: Homolog of GI Number: 50904347 NR Desc: putative 60S ribosomal protein
  misc_feature: Homolog of GI Number: 57900205 NR Desc: putative 60S ribosomal protein L7A
  misc_feature: Homolog of GI Number: 61654624 NR Desc: L7a
  misc_feature: Homolog of GI Number: 54609203 NR Desc: ribosomal protein L7A
  misc_feature: Homolog of GI Number: 66848810 NR Desc: cytosolic large ribosomal subunit protein L7A
  misc_feature: Useful for making plants with altered leaf shape eg curled leaves
  misc_feature: Useful for making plants with increased biomass and foliage
  misc_feature: Useful for making plants with increased biomass and foliage
  misc_feature: Useful for making shorter plants
MAPKKGVKVVTKKKTEKVTNPLFERRPKQFGIGGALPPKKDLTRYIKWPKSIRLQRQKRILKQRLKVPPALNQFTKTLDKNLATQLFKVLMKYRPEDKAAKKDRLLKKAQAEAEGKPSESKKPIVVKYGLNHVTYLIEQNKAQLVVIAHDVDPIELVVWLPALCRKMEVPYCIVKGKSRLGTVVHQKTAACLCLTTVKNEDKLEFSKILEAIKANFNDKYEEYRKKWGGGIMGSKSQAKTKAKERVLAKEAAQRMN

SEQ ID NO: 7969 - DNA, 668 bp, Zea mays
  misc_feature: Ceres CLONE ID no. 1438372
  misc_feature: Ceres CDNA ID no. 40351830
  CDS (76)..(486): REFERENCED BY SEQ ID NO: 7970
cccagcccgtccccaaatctccaagcgcgagcgacaaccggccctgcctcaaccccccggcgcgtctccgactccatggcccgcaccaagcagacggcgaggaagtccaccggcggcaaggcgccgcggaagcagctggcgaccaaggccgcccgcaagtccgccccggccaccggcggcgtcaagaagccccaccgcttccgccccggcaccgtcgcgctccgcgagatccgcaagtaccagaagagcacggagctgctcatccgcaagctccccttccagcgcctcgtccgcgagatcgcccaggacttcaagaccgacctccgcttccagtcctccgccgtctccgccctgcaggaggccgccgaggcctacctcgtcggcctcttcgaggacaccaacctctgcgccatccacgccaagcgcgtcaccatcatgcccaaggacatccagctcgcccgccgcatccgtggcgagagggcctaggctgcaacccatgcgccgtctgttagatccctgttaggctgagttcgtcggtggaaatgtgtgtgcttgtagtgttcttgccatggtcgatgcgttgtgcctaatctgatggtaccctcttgttgccatcagcggtggaaatgaaaaatgttggcttcccgttcacaaaaaaaaaaaaaaaa

SEQ ID NO: 7970 - protein, 136 aa, Zea mays; identical to SEQ ID NO: 588
  misc_feature: Ceres CLONE ID no. 1438372
  misc_feature: Ceres CDNA ID no. 40351830
  misc_feature (58)..(134): Pfam Name: Histone PFAM Desc: Core histone H2A/H2B/H3/H4

SEQ ID NO: 7971 - DNA, 636 bp, Zea mays; identical to SEQ ID NO: 7945
  misc_feature: Ceres CLONE ID no. 1438381
  misc_feature: Ceres CDNA ID no. 25445822
  CDS (88)..(429): REFERENCED BY SEQ ID NO: 7972

SEQ ID NO: 7972 - protein, 113 aa, Zea mays; identical to SEQ ID NO: 7946
  misc_feature: Ceres CLONE ID no. 1438381
  misc_feature: Ceres CDNA ID no. 25445822
  misc_feature: Homolog of GI Number: 21070346 NR Desc: VTC2
  misc_feature: Homolog of GI Number: 34907712 NR Desc: P0035F12.16

SEQ ID NO: 7973 - DNA, 712 bp, Zea mays
  misc_feature: Ceres CLONE ID no. 1438388
  misc_feature: Ceres CDNA ID no. 35383397
  CDS (55)..(504): REFERENCED BY SEQ ID NO: 7974
atcgcaaaaacctaaatctctttctttcccccaaaaaaaaccagatcaatcaagatggcaccaaaggcaggaaagaagccagcagagaagaaacccgccgccgccgccgagaagccagcggaggaggtagccgagaaagccccggcggagaagaaacccaaggccgggaagaagctgccgaaggaggccggggccatcgacaagaagaagaagcggaacaagaagagcatcgagacgtacaagatctacatcttcaaggtgctgaagcaggtccaccctgacatcgggatctcgagtaaggccatggggatcatgaacagcttcatcaacgacatcttcgagaagctcgcccaggaggcctcgaagctcgctaggtacaacaagaagcccacgattacttcgagggagatccagactgctgttaggcttgttctccccggtgagctcgcgaagcacgctgtgtctgaaggaaccaaggccgtgactaagtttactagctcttgaatggtgttttcgtgttttaggggttctaaatctggtcgcttttggttttatctacttaaaaaaatcgtatgggttatgcttatctagttttaatgagttggtttgtaattgtggaagaacatatgttatggtttaatgaatcttatccctttgttcaataattagtttgaaaattactcgagttgttaacttaaaaaaaaaaaaaaaa

SEQ ID NO: 7974 - protein, 149 aa, Zea mays
  misc_feature: Ceres CLONE ID no. 1438388
  misc_feature: Ceres CDNA ID no. 35383397
  misc_feature: No seed is being produced by the plant
  misc_feature: The plant flowers significantly late compared to wild-type.
  misc_feature: Useful for biocontainment applications
  misc_feature: Useful for making plants with modulated flowering time
  misc_feature (56)..(128): Pfam Name: Histone PFAM Desc: Core histone H2A/H2B/H3/H4
  misc_feature: Homolog of GI Number: 21553526 NR Desc: putative histone H2B
  misc_feature: Homolog of GI Number: 21554180 NR Desc: histone H2B
  misc_feature: Homolog of GI Number: 30102580 NR Desc: At3g45980
  misc_feature: Homolog of GI Number: 2558962 NR Desc: histone H2B1
  misc_feature: Homolog of GI Number: 21617908 NR Desc: histone H2B
  misc_feature: Homolog of GI Number: 12083300 NR Desc: putative histone H2B protein
  misc_feature: Homolog of GI Number: 82400146 NR Desc: histone H2B
  misc_feature: Homolog of GI Number: 2746719 NR Desc: histone H2B
  misc_feature: Homolog of GI Number: 21536602 NR Desc: histone H2B
  misc_feature: Homolog of GI Number: 3021489 NR Desc: histone H2B
MAPKAGKKPAEKKPAAAAEKPAEEVAEKAPAEKKPKAGKKLPKEAGAIDKKKKRNKKSIETYKIYIFKVLKQVHPDIGISSKAMGIMNSFINDIFEKLAQEASKLARYNKKPTITSREIQTAVRLVLPGELAKHAVSEGTKAVTKFTSS

SEQ ID NO: 7975 - DNA, 596 bp, Zea mays
  misc_feature: Ceres CLONE ID no. 1438919
  misc_feature: Ceres CDNA ID no. 29191452
  CDS (95)..(337): REFERENCED BY SEQ ID NO: 7976
attcaaaaaagaagtaaacggaaagtcttgtctcatccacctcctcacgccggcagggcagagcagagcaggtgcagcggatcgacatcgacccatggattcttcggccctcagcaatccgcgtctcatggcgctcattgaggaggagaaaaaaagggccatggcgaacgagctggtggcgaagctgacgtttgtctgctgggacaagtgcgtgacggggagcgtggggagcagcctgagcaggagcgagacctcgtgcctgtccaactgcgcgaaacgcttcgccgaggtgaagatgatggccctgcagcgcttcaccactaccggccgcggctgaagtcccaacggccaaccacgcgcgcaaacgcaggcatctctctctctctctctctctgcccctgcgtggacggagcaatgtgtgtgtgtggtgtgtcctctggagtgtgccattgttggtgagatggtagaaaactagaaagacatgtcaatgtatcctatgcattttttttgtttaagacggtgttagaattaagttgattctgagatgttgatgcaagaagtggctgcggctcttccgttcaaaaaaaaaaaaaaaa

SEQ ID NO: 7976 - protein, 80 aa, Zea mays
  misc_feature: Ceres CLONE ID no. 1438919
  misc_feature: Ceres CDNA ID no. 29191452
  misc_feature (12)..(77): Pfam Name: zf PFAM Desc: Tim10/DDP family zinc finger
  misc_feature: Homolog of GI Number: 77548554 NR Desc: small zinc finger
  misc_feature: Homolog of GI Number: 77553573 NR Desc: SET domain protein 105
  misc_feature: Homolog of GI Number: 5107157 NR Desc: small zinc finger
  misc_feature: Homolog of GI Number: 21592903 NR Desc: small zinc finger
  misc_feature: Homolog of GI Number: 50947997 NR Desc: putative small zinc finger
  misc_feature: Homolog of GI Number: 5107159 NR Desc: small zinc finger
  misc_feature: Homolog of GI Number: 57227509 NR Desc: itochondrial import inner membrane translocase subunit tim8
  misc_feature: Homolog of GI Number: 19113742 NR Desc: small mitochondrial carrier import zinc finger protein tim8
MDSSALSNPRLMALIEEEKKRAMANELVAKLTFVCWDKCVTGSVGSSLSRSETSCLSNCAKRFAEVKMMALQRFTTTGRG

SEQ ID NO: 7977 - DNA, 1173 bp, Zea mays
  misc_feature: Ceres CLONE ID no. 1438949
  misc_feature: Ceres CDNA ID no. 25446672
  CDS (247)..(996): REFERENCED BY SEQ ID NO: 7978
atagcactgccgcatgagaagatagcagtatagcaccgcccgctgcaatgaaccgcgcttcttggttgctccttgttctggtgcagctctcttgcttgcactgctactcagccacccaccatggcggcggccggaagcacggacgcccactactacccgcgcccgccaacgtcgtcgtcggctccgttgtcgtcgtccactccggcagctccgaggctaccaccaccgccgtttcttcaggtgcgcatgcaactattgctgcttcgagcgtggtgtttactttgggcctcgattgtgtgcctgcctgcttcgaccgtgtacctagctaacacagtctcaggcaccctggtcggggtccgctgccacgacgggaacggccggacggtgttccggaaggacggcgtcgtgacggaccgcagcggcaggttccgcgtgcacctcgcgcacgggccaagcagcggcagcagcagcagccaccagctccggtccgtcacgtcctgctcggtggcggtgcacctcccgcaggcgtcgccgccgtgcgtcgccaccgccagctccgctcgcgggctccacctcgtcgcccaccacaacaagcacgaccacggcggcggcgctcgcgtcttctccgccggcgccttctccgtccgcccggagctctgcagcaacaagggcctgttcttcccgccggtcccgctcgtgccggagccacccaacgtcggcggcgtgcccatcccgcccaacccggtcacgcccgccccgccgtccctcgtgccgccgctcctgcctaccccgtctccgccgtccgtcctgccaccgcttgtcccacagccaccgccgtcgtcggtaataccgccgttgttgccgttggttaagccgccgccgccgccaccgccgccccagcttcttccacccctggtgccggttcttcctccgggggtgcctggcgtaccgccggcctccgcttcaacgaatcgccgccccgtgaatcatccctgagaaaaaaacttggagctgtactgtgttgtcttttacatttacacgcacgtacgtacgaactgccgtcagctgtaattttcatgttcgtcaatctgagctgtaattttctactctaccaaaaatgaaactattcactatataaagcactaatttccatcgtcaaaaaaaaaaaaaaaa

SEQ ID NO: 7978 - protein, 249 aa, Zea mays
  misc_feature: Ceres CLONE ID no. 1438949
  misc_feature: Ceres CDNA ID no. 25446672
  misc_feature: Homolog of GI Number: 31430878 NR Desc: putative proline
  misc_feature: Homolog of GI Number: 53828649 NR Desc: At5g15780
  misc_feature: Homolog of GI Number: 12018147 NR Desc: vegetative cell wall protein gp1
  misc_feature: Homolog of GI Number: 27371271 NR Desc: Sf3a2
  misc_feature: Homolog of GI Number: 21592385 NR Desc: extensin
  misc_feature: Homolog of GI Number: 7620015 NR Desc: proline
  misc_feature: Homolog of GI Number: 24030361 NR Desc: putative extensin protein
MQLLLLRAWCLLWASIVCLPASTVYLANTVSGTLVGVRCHDGNGRTVFRKDGVVTDRSGRFRVHLAHGPSSGSSSSHQLRSVTSCSVAVHLPQASPPCVATASSARGLHLVAHHNKHDHGGGARVFSAGAFSVRPELCSNKGLFFPPVPLVPEPPNVGGVPIPPNPVTPAPPSLVPPLLPTPSPPSVLPPLVPQPPPSSVIPPLLPLVKPPPPPPPPQLLPPLVPVLPPGVPGVPPASASTNRRPVNHP

SEQ ID NO: 7979 - DNA, 906 bp, Glycine max
  misc_feature: Ceres CLONE ID no. 1438959
  misc_feature: Ceres CDNA ID no. 25893175
  CDS (93)..(698): REFERENCED BY SEQ ID NO: 7980
agttttggataaggacttgtcctccgccacaacaacaagagaagtaaaaaatggtgtctctgaagatccagaagcggctcgccgcatcggtgatgaagtgcgggaagggcaaagtatggctcgatcccaacgaatcctccgacatctcgatggccaattcccgccagaacatcaggaagctggtgaaggatggtttcatcatcaggaaaccaacgaagatccactctcgttccagagctcgccgtatgaagatcgccaaaatgaaggggcgtcactctggatatggtaagaggaagggtacccgtgaagctaggctgccaactaagatactttggatgcgtaggatgcgtgtgctaaggcgtctcttgaagaagtacagagagtcgaagaagattgacaagcacatgtaccatgacatgtacatgcgtgttaagggtaacgtcttcaagaacaagcgtgtcttgatggagagcatccacaagtccaaggccgagaaggccagagagaagactctctctgatcagtttgaggctaagagggctaagaacaaggctagccgtgaaaggaaacacgctaggagagaagagcgtcttgctaagggtcctggaggagatgttgcccctgcaactgcaccaccagctgctgctgctactaccactactactgcagaagtaccgaagaagaagtctaaaaagtgaatgtgaaggggataaagtgatcgagctatatagatcatctcgcttacttgacttgaagaaacttttgaattgggtttgttgaattactttgtttgcgcaaaaaacataaattatgtccgttactctttatgctttcagattatccgtgtttcatgaaacttgctcttcaaaatgttgtgcgttttcttatctaaaaaaaaaaaaaaaa

SEQ ID NO: 7980 - protein, 215 aa, Glycine max
  misc_feature: Ceres CLONE ID no. 1438959
  misc_feature: Ceres CDNA ID no. 25893175
  misc_feature (2)..(149): Pfam Name: Ribosomal_L19e PFAM Desc: Ribosomal protein L19e
  misc_feature: Homolog of GI Number: 33589762 NR Desc: At1g02780/T14P4_3
  misc_feature: Homolog of GI Number: 18087585 NR Desc: At1g02780/T14P4_3
  misc_feature: Homolog of GI Number: 7268983 NR Desc: putative ribosomal protein L19
  misc_feature: Homolog of GI Number: 3377797 NR Desc: Similar to 60S ribosome protein L19
  misc_feature: Homolog of GI Number: 40287526 NR Desc: 60S ribosomal protein L19
  misc_feature: Homolog of GI Number: 19699260 NR Desc: AT3g16780/MGL6_23
  misc_feature: Homolog of GI Number: 83284003 NR Desc: 60S ribosomal protein L19
  misc_feature: Homolog of GI Number: 29837764 NR Desc: putative ribosomal protein L19
  misc_feature: Homolog of GI Number: 47026900 NR Desc: ribosomal protein L19
  misc_feature: Homolog of GI Number: 32401377 NR Desc: ribosomal protein L19
MVSLKIQKRLAASVMKCGKGKVWLDPNESSDISMANSRQNIRKLVKDGFIIRKPTKIHSRSRARRMKIAKMKGRHSGYGKRKGTREARLPTKILWMRRMRVLRRLLKKYRESKKIDKHMYHDMYMRVKGNVFKNKRVLMESIHKSKAEKAREKTLSDQFEAKRAKNKASRERKHARREERLAKGPGGDVAPATAPPAAAATTTTTAEVPKKKSKK

SEQ ID NO: 7981 - DNA, 826 bp, Zea mays
  misc_feature: Ceres CLONE ID no. 1438991
  misc_feature: Ceres CDNA ID no. 29191287
  CDS (118)..(633): REFERENCED BY SEQ ID NO: 7982
gcactgtctctttccaacgcacccgagcagtcaactgaacggcagccaaccaagcgtcccagccggtcaccgggaggcttcgccgcgtgggtgggcgtcccgggagcagcaggaacgatgcagtcgctgcaggacaaggcgtcggagtggagcggcgtggcggccgccgacgccttcgccatcgacgaggtcaacgtcttcgaggcgctcggcggcaccccgcagcccttcgtcgacctctccaccaacttctacaccagggtttatgaggacgaggaggagtggttccgggagatattctcgggttccaagaaggaggacgcgatccagaaccagtacgagttcttggttcagcggatgggcggcccgccgctattctcccagaggagaggacatcctgccctgataggacgacatcgaccattcccagttacccaccgagctgcggagcgatggctgcatcacatgcagcaagctctggagacgacagaaagcataaacccagatacaaaacccaaaatgatgaattttttcaggcacactgcatacttccttgtcgccggtaatgagatgacaaggcaaacgcaaagtgtacctccctgcaagcatgcaacgagcaaaccagccgagtaaccgctcaaacttaaccggttgaataacgatttcagctcccgtgttcctaataggattcccatgttcaatgggatcaagcttatttatgcattatgcattatagggaacgacacgcctgatgttctatgggcagcaacacttgagcagagagcatctcaaaattgataaattgcttacaaaaaaaaaaaaaaaa

SEQ ID NO: 7982 - protein, 171 aa, Zea mays
  misc_feature: Ceres CLONE ID no. 1438991
  misc_feature: Ceres CDNA ID no. 29191287
  misc_feature (26)..(146): Pfam Name: Bac_globin PFAM Desc: Bacterial
  misc_feature: Homolog of GI Number: 14165165 NR Desc: 2
  misc_feature: Homolog of GI Number: 27085257 NR Desc: hemoglobin Hb2
  misc_feature: Homolog of GI Number: 50725383 NR Desc: putative 2
  misc_feature: Homolog of GI Number: 62318701 NR Desc: 2
  misc_feature: Homolog of GI Number: 31559437 NR Desc: 2
  misc_feature: Homolog of GI Number: 14165163 NR Desc: 2
  misc_feature: Homolog of GI Number: 44888958 NR Desc: 2
  misc_feature: Homolog of GI Number: 53799877 NR Desc: COG2346: Truncated hemoglobins
  misc_feature: Homolog of GI Number: 76260253 NR Desc: Protozoan/cyanobacterial globin
  misc_feature: Homolog of GI Number: 41408389 NR Desc: GlbO
MQSLQDKASEWSGVAAADAFAIDEVNVFEALGGTPQPFVDLSTNFYTRVYEDEEEWFREIFSGSKKEDAIQNQYEFLVQRMGGPPLFSQRRGHPALIGRHRPFPVTHRAAERWLHHMQQALETTESINPDTKPKMMNFFRHTAYFLVAGNEMTRQTQSVPPCKHATSKPAE

SEQ ID NO: 7983 - DNA, 875 bp, Zea mays
  misc_feature: Ceres CLONE ID no. 1439086
  misc_feature: Ceres CDNA ID no. 29191288
  CDS (60)..(761): REFERENCED BY SEQ ID NO: 7984
agcaagtcagaaacaccacatcactgagagagcaaggagcagagagagaagggaaaacaatggcgggagaaggagacatcaagctgctcggcatggtggtgagcccattcgtggtccgtgtgcgaatggcactgcacatgaagggcgtgagctatgagtacatcgagcaggacctcttcaacaagagcgagctcctcctcaggtccaacccggtgaacaagaaggtgccggtgctcatccacggcggcaagcccatctacgagtcgctcgtcatcatgcagtacgccgacgaggtgtggagcggcaagggcgcctccatcctccccgccgacccgcacgagcgcgcagtcgctcgcttttgggccgcctatgtcgacgacaagatgttccctgcttacatcgacatcatgaaagcggcgacggaggaagcaagagcggagaaggccaaggaggcgcttgtggggttagcgaacctggaagaggccttcgcccaatgctcaaaagggaagcctttcttcgccggcgactccgtcgggtacctcgacctcgccgtcggatgcaacctgttctggctcgaggcgatacgcaagatgtttggggtgacgttctttgacgtgggcaagaccccgctcctggccgcgtgggcggagcggttcgcgggaaccgagatggcgagggaggtggtgccggacgccgacagcgccgtggtgtttgccaagaagcttcaggctcggtttggctctaacacgtctgccaagtagagtagcagtgtacgttttctttttccggatagtagtgtacggtttcattatcgaattatctcggaaactctttgtaataaatgaggcagatcatggacaaaaaaaaaaaaaaaa

SEQ ID NO: 7984 - protein, 233 aa, Zea mays
  misc_feature: Ceres CLONE ID no. 1439086
  misc_feature: Ceres CDNA ID no. 29191288
  misc_feature (7)..(78): Pfam Name: GST_N PFAM Desc: Glutathione S
  misc_feature (88)..(203): Pfam Name: GST_C PFAM Desc: Glutathione S
  misc_feature: Homolog of GI Number: 22022398 NR Desc: glutathione
  misc_feature: Homolog of GI Number: 20143565 NR Desc: putative glutathione S
  misc_feature: Homolog of GI Number: 20143566 NR Desc: putative glutathione S
  misc_feature: Homolog of GI Number: 11385503 NR Desc: glutathione S
  misc_feature: Homolog of GI Number: 11385517 NR Desc: glutathione S
  misc_feature: Homolog of GI Number: 20143571 NR Desc: putative glutathione S
  misc_feature: Homolog of GI Number: 20143573 NR Desc: putative glutathione S
  misc_feature: Homolog of GI Number: 20143553 NR Desc: putative glutathione S
  misc_feature: Homolog of GI Number: 37536250 NR Desc: putative glutathione S
  misc_feature: Homolog of GI Number: 11385535 NR Desc: glutathione S
  misc_feature: Useful for making plants with altered leaf shape eg curled leaves
MAGEGDIKLLGMVVSPFVVRVRMALHMKGVSYEYIEQDLFNKSELLLRSNPVNKKVPVLIHGGKPIYESLVIMQYADEVWSGKGASILPADPHERAVARFWAAYVDDKMFPAYIDIMKAATEEARAEKAKEALVGLANLEEAFAQCSKGKPFFAGDSVGYLDLAVGCNLFWLEAIRKMFGVTFFDVGKTPLLAAWAERFAGTEMAREVVPDADSAVVFAKKLQARFGSNTSAK

SEQ ID NO: 7985 - DNA, 593 bp, Zea mays
  misc_feature: Ceres CLONE ID no. 1439112
  misc_feature: Ceres CDNA ID no. 40351831
  CDS (20)..(409): REFERENCED BY SEQ ID NO: 7986
ctcaacacccttcgccaaaatgcagatcttcgtcaagaccctcacggggaagaccatcaccctcgaggttgagagcagcgataccatcgacaatgtcaaggccaagatccaggacaaggaggggatcccgccggaccagcagcggctgatcttcgccggcaagcagttggaggacggccgcacccttgccgactacaacatccagaaggagtcgaccctccatctcgtcctcaggctccgcggaggcatcatcgagccatccctgcaggcgcttgcccgcaagtacaaccaggagaagatgatctgccgcaaatgctatgcgcgcctgcaccctagggctgtcaactgccgcaagaagaagtgtggccacagcaaccagctgaggcccaagaagaagatcaagaactagagtgccactagtcagtttcatgggccggttgaatccatcgcgtgtcggagtttatgctattatcgtctcgtttgtcgttgaaccttattttactttgctttcagcctcgtatcgttgtggtgataattgacagtattggtatatggtagcagacctataattttgccgaaaaaaaaaaaaaaaa

SEQ ID NO: 7986 - protein, 129 aa, Zea mays; identical to SEQ ID NO: 3710
  misc_feature: Ceres CLONE ID no. 1439112
  misc_feature: Ceres CDNA ID no. 40351831
  misc_feature (1)..(74): Pfam Name: ubiquitin PFAM Desc: Ubiquitin family
  misc_feature (77)..(128): Pfam Name: Ribosomal_L40e PFAM Desc: Ribosomal L40e family

SEQ ID NO: 7987 - DNA, 917 bp, Zea mays
  misc_feature: Ceres CLONE ID no. 1439114
  misc_feature: Ceres CDNA ID no. 29191289
  CDS (93)..(740): REFERENCED BY SEQ ID NO: 7988
attgttgcaacttgtcgggaagagagggggagatagggaagagagaggggaaaccctagattccatttgctccgtctctcgaatcgaaggcgatggtgttctacttcaaggctcgtccagatgctggggactacaccatcttcatggggcttgataagtttgagaacgaggagctcatcaagtacggcttccccgaagacgtctggtttcacgttgacaaaatgtcctcagctcacgtttacctaaggcttcataaaggccagggttttgatgacattaacgaaggtgtgctggaggactgtgctcagcttgtgaaagccaactccattcaaggcaacaaggtgaacaacgtcgatgttgtgtacactccctggtccaacttgaagaaaaccgcctccatggatgttggtcaagttggtttccacaactcaaagatggtccggactatcagagtggagaaacgagtcaatgatatagttaacaggttgaacaaaacaaaagttgagagaacccctgatctgagagccgagagagaagcagtgaacgctgcagagagagctgagaggaagcaacacctgagggagaagaagaaacgtgaagagatagagaggctggagaaggagaggcaagcagagatgaggagctacaaggggttgatggtaactgataaaatgacatccaacaaagacattgcttcgagcaacaaatcgcttcaagaactcgaagacgatttcatgtaaaactctgattttcccattgaaatgtttcagaggattgagtctgagttgtgaggaaaacagagagcattacctcaggtgagccagtgatcttgtgcgatcatggtttactctaccttgctgtgtttgttgaatatcattttactacccttatatttttacccaaaaaaaaaaaaaaaa

SEQ ID NO: 7988 - protein, 215 aa, Zea mays
  misc_feature: Ceres CLONE ID no. 1439114
  misc_feature: Ceres CDNA ID no. 29191289
  misc_feature: Homolog of GI Number: 34909556 NR Desc: P0046E05.9
  misc_feature: Homolog of GI Number: 29165654 NR Desc: FLJ10853 protein
  misc_feature: Homolog of GI Number: 73993916 NR Desc:  similar to coiled
  misc_feature: Homolog of GI Number: 62661649 NR Desc:  similar to RIKEN cDNA 2610528H13
  misc_feature: Homolog of GI Number: 55630404 NR Desc:  similar to FLJ10853 protein
  misc_feature: Homolog of GI Number: 72088443 NR Desc:  similar to CG4593
  misc_feature: Homolog of GI Number: 54643880 NR Desc: GA18284
MVFYFKARPDAGDYTIFMGLDKFENEELIKYGFPEDVWFHVDKMSSAHVYLRLHKGQGFDDINEGVLEDCAQLVKANSIQGNKVNNVDVVYTPWSNLKKTASMDVGQVGFHNSKMVRTIRVEKRVNDIVNRLNKTKVERTPDLRAEREAVNAAERAERKQHLREKKKREEIERLEKERQAEMRSYKGLMVTDKMTSNKDIASSNKSLQELEDDFM

SEQ ID NO: 7989 - DNA, 1345 bp, Zea mays
  misc_feature: Ceres CLONE ID no. 1439349
  misc_feature: Ceres CDNA ID no. 40351832
  CDS (123)..(1103): REFERENCED BY SEQ ID NO: 7990
acacaaagcctcttgtccaagcgcagctagggttttgctccgccgcaacgcacgatctagatccccacacttccctaaccctacccaaccctacacctcccggcggcagcggcagcgtcaagatgaggcctattctcatgaaggggcacgagcgcccgctcacgttcctgaagtacaaccgggacggcgacctgctgttctcatgcgccaaagaccacacccccaccgtctggtacgccgacaacggcgaccgcctcggcacctaccgcggacacaacggcgcggtatggtcctgcgatgtctcccgccactccacgcgtctcatcacggggagcgccgaccagactgccaagctctgggacgtcaagacggggaaggagctcttcaccttcagattcgacgcccccgcgcgctccgtggacttagccatcggcgaccacctggcggtcatcaccaccgacagtttcatggggaatatgcccaccgcgcaggtcaagcgcatcgccgaggacctgcaagaccagacggaggagtcagcgcttgtgatctccggcatcacggggaggattaacagggccgtgtgggggcccggcaaccggaccatcatcaccgccggtgaggatgccaccatccgcatctgggactctgagaccggaaagctgctgaaggagtcagacaaggaggttggacatcagaaggcaattagctcactgtcaaaatccttagattggtctcatttcctcacaggttccttggataaatctgccaagctatgggatgcaagaacactgaccctgataaagacatatgtcacagagcgaccggttaatgctgttgacatatctcctactcttgatcatgtggttattggaggtggccaagatgctatgaatgttactatgacagatcgccgtgcgggtaaatttgaggccaaatttttccacaagattttagaagaagagattggtggtgttaaaggacattttggacctatcaatgcattagcatttaatcctgatgggaggagcttttcgagtggtggtgaggatggatatgtgaggctacaccattttgatcctgagtatttcaacatcaagatgtaagcctgtgaatttctcaaggctgcagttgagagacctccctagtaccctggagagaacatagtttttttccggctcaatttgtgagagaacttgacttagctggatggtctactatgtgatagcacaccttttcctacaatcagcaatggagatgcttaaatgggtgacatcgtgttgccttccctgtcagtgttgtttatccaaaacattctacttttgattcgataaaaaaaaaaaaaaaa

SEQ ID NO: 7990 - protein, 326 aa, Zea mays
  misc_feature: Ceres CLONE ID no. 1439349
  misc_feature: Ceres CDNA ID no. 40351832
  misc_feature (182)..(219): Pfam Name: WD40 PFAM Desc: WD domain
MRPILMKGHERPLTFLKYNRDGDLLFSCAKDHTPTVWYADNGDRLGTYRGHNGAVWSCDVSRHSTRLITGSADQTAKLWDVKTGKELFTFRFDAPARSVDLAIGDHLAVITTDSFMGNMPTAQVKRIAEDLQDQTEESALVISGITGRINRAVWGPGNRTIITAGEDATIRIWDSETGKLLKESDKEVGHQKAISSLSKSLDWSHFLTGSLDKSAKLWDARTLTLIKTYVTERPVNAVDISPTLDHVVIGGGQDAMNVTMTDRRAGKFEAKFFHKILEEEIGGVKGHFGPINALAFNPDGRSFSSGGEDGYVRLHHFDPEYFNIKM

SEQ ID NO: 7991 - DNA, 747 bp, Zea mays
  misc_feature: Ceres CLONE ID no. 1439664
  misc_feature: Ceres CDNA ID no. 36593594
  CDS (98)..(502): REFERENCED BY SEQ ID NO: 7992
ctaccagccgaatacccacaccacaccgcctccgcacttcctcccggcgcctcgctttccatttcacaaccgcggatcccctcggagtactgtagacatggccggaaggggcaaggcgattggttcgggcgccgccaagaaggccatctccaggagctccaaggccgggctccagttccccgtcggcaggatcgcgcggttcctcaaggccggcaagtacgccgagagggtcggcgccggcgcccccgtctacctcgccgccgtgctggagtatctcgccgctgaggttctggagttggccgggaacgcggcgagggacaacaagaagacccgcatcgtgccgcgccacatccagctcgccgtccgcaacgacgaggagctctcccgcctgctcggcatggtcacaatcgccagcggcggtgtcatgcccaacatccacaaccttctgctccccaagaaggccggaggcagcaaggccgtggctgccgacgacgatagctagatgacgactcctcctctgaggtcgtgggtgctcggctgtatccagttctgtgtagtagcgtgttcagttaagtgttgcctaggtgttgcgttttactactactaggatgttagtactactattagtttctgaatctgtgtgcttgtaccgatgctaaactaggtgtggacaatggttacatcctctgtaattcgttgctatgttctataaaacgttgcacctatggattaaaaaaaaaaaaaaaa

SEQ ID NO: 7992 - protein, 134 aa, Zea mays
  misc_feature: Ceres CLONE ID no. 1439664
  misc_feature: Ceres CDNA ID no. 36593594
  misc_feature (25)..(89): Pfam Name: CBFD_NFYB_HMF PFAM Desc: Histone
  misc_feature: Homolog of GI Number: 536896 NR Desc: protein H2A
  misc_feature: Homolog of GI Number: 50938211 NR Desc: putative histone H2A
  misc_feature: Homolog of GI Number: 50945929 NR Desc: putative histone H2A
  misc_feature: Homolog of GI Number: 77555213 NR Desc: Core histone H2A/H2B/H3/H4
  misc_feature: Homolog of GI Number: 50938209 NR Desc: histone H2A
  misc_feature: Homolog of GI Number: 29824201 NR Desc: putative histone H2A
  misc_feature: Homolog of GI Number: 17065594 NR Desc: putative histone H2A protein
  misc_feature: Homolog of GI Number: 21593834 NR Desc: histone H2A
  misc_feature: Homolog of GI Number: 1154954 NR Desc: histone H2A
  misc_feature: Homolog of GI Number: 21617982 NR Desc: histone H2A
MAGRGKAIGSGAAKKAISRSSKAGLQFPVGRIARFLKAGKYAERVGAGAPVYLAAVLEYLAAEVLELAGNAARDNKKTRIVPRHIQLAVRNDEELSRLLGMVTIASGGVMPNIHNLLLPKKAGGSKAVAADDDS

SEQ ID NO: 7993 - DNA, 834 bp, Zea mays
  misc_feature: Ceres CLONE ID no. 1439682
  misc_feature: Ceres CDNA ID no. 40351833
  CDS (121)..(585): REFERENCED BY SEQ ID NO: 7994
acggcgaaacaccccagaaatctcacccgcctccacccagaaggaaaatcgcgagagatatttcgtcccggacgcgtccgccccgacgacagacgaacagcagagaaaagtgaggtgatcatgagcaccatggcgatgtcggcgctgaacccggacgcgcccatgttcatcccggcggcgttcaagaaggtggaggactactcgcccgagtggtgggagctggtcaaaaccaccgcctggttccgcgaccactggttccgccagcaccagctctacgaggacctcgccgacgacgtcgacgacgtcgccgccctcctccccgacgactccgtcgacctcctcgacgccgacgacctcttctactccccgccgtcgccccagccccagcccgacttctaccactacaaaccagcagggttcggcggcgacatggacgcggtgctgaagacgctgagcctgaactcgccgaggggcggtggcccggcaccagcctgggcgccgatgaggcacgccgagaagccggcgcagcacgtcagccccagggccggcggcggcgcccgccgcgccatccaccagcctcgctagaagctaaacgagcgctgctgctgctgctgtgtagtgtaaccttcagttcagttcagttgggttcagtctagtctctccctgcatctgtgtatacagctgaaaaatgaaggggaaaacaaactgcaggcccctgcttgctagctagtgctctcccttcccttgtagctcccctcctcccgtgttcagaaatggtcaagaacaaaagcaaaaaaaaaaagatcatgtgtaattccaaaaaaaaaaaaaaaa

SEQ ID NO: 7994 - protein, 154 aa, Zea mays
  misc_feature: Ceres CLONE ID no. 1439682
  misc_feature: Ceres CDNA ID no. 40351833
MSTMAMSALNPDAPMFIPAAFKKVEDYSPEWWELVKTTAWFRDHWFRQHQLYEDLADDVDDVAALLPDDSVDLLDADDLFYSPPSPQPQPDFYHYKPAGFGGDMDAVLKTLSLNSPRGGGPAPAWAPMRHAEKPAQHVSPRAGGGARRAIHQPR

SEQ ID NO: 7995 - DNA, 1375 bp, Zea mays
  misc_feature: Ceres CLONE ID no. 1439710
  misc_feature: Ceres CDNA ID no. 40351834
  CDS (97)..(1029): REFERENCED BY SEQ ID NO: 7996
acaagaggtggccgccgcagtccgcaccccctccccaatcacgccacccgacaccgcgctccgcagattcgtagtcgccgctaggcttccggcgagatggacgtggtgaaggcggcgcagttgtcggggcggacgctggaacgggtagtggtgcatcccttggtgctgctcagcatcgtcgaccactacaaccgcgtcgcccgcgacacccgcaagcgcgtcgtcggcgtcctcctcggcacctcatcccgcgggtccgtcgatgtcaccaactcctacgccgtgccgtttgaggaggatgacaaggatcctaggatctggttccttgaccacaattaccacgagtcaatgttctccatgttcaagaggattaatgccaaggagcatgttgttggctggtacagcactggcccaaaactaagggagaacgacttggatgtccatgcattattcaacagttatgttcctaatccagtcttggtgattattgatgtccaacccaaggagctgggtataccgaccaaagcgtactacgctgtggaggaggttaaagagaatgcaactcagaaaagtcagaaggtatttgtccatgttccttcagaaattgcagctcatgaagttgaggaaattggagttgaacaccttctaagggatgtcaaggacacaacaataagcacacttgctacagaggtcactagcaagcttgcagccttaaagggactcgatgcaaggcttagggagatccgaagctatttggatcttgtaattgacgggaagctcccactgaatcacgaaattttgtaccatttgcaggatgtctttaatctccttccaaatctgaacgtaaatgagctaattaaagcctttgcagtgaaaactaacgacatgatgttggtgatatacctgtcttctctgatccggagcgtcattgcgcttcacaatttaatcaacaataagatgctaaacaaggagcacgagaaggccgaggattcgaaaccaaccgccattcctactgctgccggaagctaaacgtgcttttgatcactgattggattggtggctaagaaaagggaagaaacttgtgatgacatgttagcacggttgtgctcgaaccaactgtcttgaccttgaatggacattttttatgtttattttatgtatgatcaggtcaacggcaagagaaaccaattacactgtatgagctttagatcacacctcaagttattctgtagatcttggtgctatttcatctgatgggtcatgtttcatgatgttgactccgtttcctgtgattgatttatagcgagcctgtacgttgtatgtcatgcaattcatctatgtccatgaatgatttgtagcaaaaaaaaaaaaaaaa

SEQ ID NO: 7996 - protein, 310 aa, Zea mays
  misc_feature: Ceres CLONE ID no. 1439710
  misc_feature: Ceres CDNA ID no. 40351834
  misc_feature (12)..(125): Pfam Name: Mov34 PFAM Desc: Mov34/MPN/PAD
MDVVKAAQLSGRTLERVVVHPLVLLSIVDHYNRVARDTRKRVVGVLLGTSSRGSVDVTNSYAVPFEEDDKDPRIWFLDHNYHESMFSMFKRINAKEHVVGWYSTGPKLRENDLDVHALFNSYVPNPVLVIIDVQPKELGIPTKAYYAVEEVKENATQKSQKVFVHVPSEIAAHEVEEIGVEHLLRDVKDTTISTLATEVTSKLAALKGLDARLREIRSYLDLVIDGKLPLNHEILYHLQDVFNLLPNLNVNELIKAFAVKTNDMMLVIYLSSLIRSVIALHNLINNKMLNKEHEKAEDSKPTAIPTAAGS

SEQ ID NO: 7997 - DNA, 816 bp, Zea mays
  misc_feature: Ceres CLONE ID no. 1439937
  misc_feature: Ceres CDNA ID no. 25445491
  CDS (66)..(617): REFERENCED BY SEQ ID NO: 7998
accaccaccactggacgtcagcctagcaattagctcatcgactccagattggagaactcgacaccatgaaggtgctgatcgttgcccttgctctcctggcgctcgctgcgagcgccgcctccagtacaagcggcggctgtggctgccagacaccaccatttcatctaccgcctccgttctatatgccgcctccgttctatctgccgccgcagcagcagccgcagccatggcaataccccactcaaccaccgcagctaagcccgtgccagcagttcggatcctgcggcgtcggcagcgtcggcagcccgttcctgggccagtgcgtcgagttcctgaggcaccagtgcagcccggcggcgacgccctacggctcgccacagtgccaggcgctgcagcagcagtgctgccaccagatcaggcaggtggagccgctgcaccggtaccaggcgacatacggtgtggtcctgcagtccttcctgcagcagcagccgcagggcgagctcgcggcgctgatggcggcccaggtagcgcagcagctgacggcgatgtgcggtctgcagctgcagcagccaggtccctgcccttgcaacgcagctgccggcggtgtctactactgaggaaactatgtactgtagtaataatgtaatggagccgctgactagctacctatagctagttcactcgtttagcggcgatgagtaacggagtgtcacccatcaccatgggtggcagtgtgagcaatgacctgaatgaaccattgaaatggaaaggaataatatatagggaaaaaggatgtttggaaaaaaaaaaaaaaaa

SEQ ID NO: 7998 - protein, 183 aa, Zea mays; identical to SEQ ID NO: 7678
  misc_feature: Ceres CLONE ID no. 1439937
  misc_feature: Ceres CDNA ID no. 25445491
  misc_feature (86)..(172): Pfam Name: Tryp_alpha_amyl PFAM Desc: Protease inhibitor/seed storage/LTP family
  misc_feature: Homolog of GI Number: 18054 NR Desc: gamma
  misc_feature: Homolog of GI Number: 170156 NR Desc:
  misc_feature: Homolog of GI Number: 168695 NR Desc: gamma zein
  misc_feature: Homolog of GI Number: 2119755 NR Desc: gamma
  misc_feature: Homolog of GI Number: 671656 NR Desc: gamma
  misc_feature: Homolog of GI Number: 45645342 NR Desc: gamma kafirin protein
  misc_feature: Homolog of GI Number: 45645344 NR Desc: gamma kafirin protein
  misc_feature: Homolog of GI Number: 22550 NR Desc: 27kDa storage protein
  misc_feature: Homolog of GI Number: 52352777 NR Desc: low molecular weight glutenin subunit
  misc_feature: Homolog of GI Number: 16305113 NR Desc: 50kD gamma zein

SEQ ID NO: 7999 - DNA, 859 bp, Zea mays
  misc_feature: Ceres CLONE ID no. 1439975
  misc_feature: Ceres CDNA ID no. 40351835
  CDS (137)..(595): REFERENCED BY SEQ ID NO: 8000
aaaaaaaaaaaaaaaaaaaaaaaaaaaaaaaaaaaaaaaaaaaaaaaaaaaaaaagtctcacctcacctctcctcctcgcgaagtatcggcggcggcgagcgcggcaggctagagcctcgttgctgaggaggggagatggcgggtatgggcgatatgccgatgaggcctgcgcggccgggcccgccgatgcagcaccgtggtccgcccccgatggcgcgcctccgccccgaaccaatcgaccgcgagaagacctgtcctctgctgctcagggttttcacaagggttgctggtcaccaccaaaatgaagagtttgcagtgagagggaaggaaccaaaggatgaagttcagatttacacatggaaggatgcgaccctccgcgagctcactgatcttgtgaaagaggttgctcttccagcaagaaaaaggaatgcaaggctttcttttgcatttgtatacccagacaagaatggtcgttttgttgtcagacaggtgggttcgaccttcgcttacggtcatggaagaggcgacgatgccaaaactcttgcagagctcggattccagatcggtgattatttgagcgttgcaatcatgtagacggtgcccgcaccggatgtaattgctgtgatgtcaaaagggctctggttgcaacagtaaggcacgattctctgttagcactaggaactgcaaccagaattgtctgtaataccggtagtatcaaatttacctagacacttcgaacgagcaaggcgtctgtaataccggtacttacctgtggtgcctggagcttccaaatctggatagcgtgggtttttcattgagaatttagtgttggctcgggttccaaaaaaaaaaaaaaaa

SEQ ID NO: 8000 - protein, 149 aa, Zea mays
  misc_feature: Ceres CLONE ID no. 1439975
  misc_feature: Ceres CDNA ID no. 40351835
  misc_feature (27)..(148): Pfam Name: SAP18 PFAM Desc: Sin3 associated polypeptide p18
MGDMPMRPARPGPPMQHRGPPPMARLRPEPIDREKTCPLLLRVFTRVAGHHQNEEFAVRGKEPKDEVQIYTWKDATLRELTDLVKEVALPARKRNARLSFAFVYPDKNGRFVVRQVGSTFAYGHGRGDDAKTLAELGFQIGDYLSVAIM

SEQ ID NO: 8001 - DNA, 1006 bp, Zea mays
  misc_feature: Ceres CLONE ID no. 1440154
  misc_feature: Ceres CDNA ID no. 40351836
  CDS (91)..(750): REFERENCED BY SEQ ID NO: 8002
ctctgtctctctagggtttttgattttagccgccgccgctgctcatctcacatccctcgagaagacgcctgctcctcgccgatcgatacgatggccgtcttctccgacctccacaccgccgacggcctcaagtccctcgaggctcacctcgccggcaaaacctatgtgtctggtgactccattactaaggatgacattaaggtcttcgccgcggtgccgtcgaagcctggcgctgagtttcctaatgccgcccgctggtacgagaccgtctctgcggctgtagcctcaagattccctggtaaggctgttggtgtaaatctgcctgcgggatcagctcctgcggcagctgctcctgcggatgaggctgaggacgatgatgaccttgatctttttggtgatgaaactgaggaggacaagaaggcagctgatgagcgtgccgccgctgccaaggcctcttctaaaaagaaagaaagtggtaaatcctccgtccttatggatgtcaaaccatgggacgatgagactgatatgaagaagctggaggaggctgtccgcagtgtccagatggagggtctgacttggggagcatcaaagcttgtgcctgttggatacggcatcaagaagatgactatcatgttgacaattgtcgacgatcttgtgtccatcgacactctaattgaggaccaccttacgcaagagcccatcaatgagtacgtccagagttgcgacattgtggctttcaacaagatctagagttcagtttctgagtttgggcaacggcagcggctcagctcgtcaagtttgtgctgggatgccagtttatcccttctagtctattacagaaatgttgttcggagctgagtctattataaacatcttggtctgagtttattgttgagtggtgccagtttttttcaatatacatttatcttaaaaacagcggtactgatgtttttttgtctaaagttaatgagtttgcaatggttctgagtctaaaaaaaaaaaaaaa

SEQ ID NO: 8002 - protein, 219 aa, Zea mays
  misc_feature: Ceres CLONE ID no. 1440154
  misc_feature: Ceres CDNA ID no. 40351836
  misc_feature (130)..(219): Pfam Name: EF1_GNE PFAM Desc: EF
MAVFSDLHTADGLKSLEAHLAGKTYVSGDSITKDDIKVFAAVPSKPGAEFPNAARWYETVSAAVASRFPGKAVGVNLPAGSAPAAAAPADEAEDDDDLDLFGDETEEDKKAADERAAAAKASSKKKESGKSSVLMDVKPWDDETDMKKLEEAVRSVQMEGLTWGASKLVPVGYGIKKMTIMLTIVDDLVSIDTLIEDHLTQEPINEYVQSCDIVAFNKI

SEQ ID NO: 8003 - DNA, 559 bp, Zea mays
  misc_feature: Ceres CLONE ID no. 1440239
  misc_feature: Ceres CDNA ID no. 25446113
  CDS (128)..(364): REFERENCED BY SEQ ID NO: 8004
acctcttgtcgtcttggtgtgcgcgctcggtttccattccttttttccctcgcgcgcggccaacctagaaagcgacggcggagccggagagggaaggggaggagggacgaccggtcaagggcggacgatgtgctgcggcggcgacggggagtgccggccgctcgggtggctcctgggcctgcccttcgcgctgctcgccgtcctcgtctctttcgtcggcgccgtcatctggatcatcgggctgcccatctcgtgcatctgcccctgctgcctctgcgtgacggtgctgctggaggtggccgtggagctcgtcaaggcgccgctccatgtcatgacctggttcacctccaagatcccctgctagctgtcccctgctttctgctgtgcggatcatactcatacatacatcttgctttagccggagaggttgctgtactgtactgtactgttgtttcgtttcgtcgtcgcttggttcatcgtcctagtgctactttgggtttctgcgattgatttttcagactagtttgttcttgaattgaatgcaaaaaaaaaaaaaaaa

SEQ ID NO: 8004 - protein, 78 aa, Zea mays
  misc_feature: Ceres CLONE ID no. 1440239
  misc_feature: Ceres CDNA ID no. 25446113
MCCGGDGECRPLGWLLGLPFALLAVLVSFVGAVIWIIGLPISCICPCCLCVTVLLEVAVELVKAPLHVMTWFTSKIPC

SEQ ID NO: 8005 - DNA, 676 bp, Zea mays
  misc_feature: Ceres CLONE ID no. 1440367
  misc_feature: Ceres CDNA ID no. 29191453
  CDS (96)..(530): REFERENCED BY SEQ ID NO: 8006
aaaaaatcgcaattcgcaattcccagccccattccccgtcggccgactccagcgagcgacttcgccccggtcggaagcaccaccagccaccagcgatgtctggcgaggaggaggagaacgccgcggagctcaagatcggcgaagagttcctcaaggccaagtgcctgatgaactgcgaggtggcgatcatcctggagcacaagtacgagcagatccagcagcacgcgtcgtcggagtcggacccgtcgtcgcaggtgtcgcaggtgttcgagaagtcgctgcagtacgtgaagcgcttcagccgctacaagaaccccgacgccgtgcgccaggtccgcgagacgctgagccgctacggcctcgccgagttcgagctctgcacgctcggcaacctctgccccgacaccagcggcgaggccaccgcgctcgtcccctccctcaagtccggcggcaggttcgtcggcgaccccggggacgagaagatcgagaagatgctcaacgacctctccctcatcaagaagttcgagtagagcgggagccctctcttctcttatcttcttttctcttggagtagcgagcatccagagaggaggggaattcaacatcaagacgatgtactgataaaattttacttgccttacactactatcgttgaggttcaaaaaaaaaaaaaaaa

SEQ ID NO: 8006 - protein, 144 aa, Zea mays; identical to SEQ ID NO: 1350
  misc_feature: Ceres CLONE ID no. 1440367
  misc_feature: Ceres CDNA ID no. 29191453
  misc_feature: null
  misc_feature: Useful for making plants with modulated drought sensitivity
  misc_feature (19)..(143): Pfam Name: RNA_pol_Rpb4 PFAM Desc: RNA polymerase Rpb4
  misc_feature: Homolog of GI Number: 50904785 NR Desc: putative 15.9 kDa subunit of RNA polymerase II
  misc_feature: Homolog of GI Number: 72384401 NR Desc: 4D11_3
  misc_feature: Homolog of GI Number: 21554212 NR Desc: 15.9 kDa subunit of RNA polymerase II
  misc_feature: Homolog of GI Number: 72255603 NR Desc: 117M18_2
  misc_feature: Homolog of GI Number: 72384445 NR Desc: 52O08_15
  misc_feature: Homolog of GI Number: 62858949 NR Desc: POLR2D
  misc_feature: Homolog of GI Number: 51873947 NR Desc: MGC85403 protein
  misc_feature: Homolog of GI Number: 50539702 NR Desc: polymerase
  misc_feature: Homolog of GI Number: 62664161 NR Desc:  similar to polymerase
  misc_feature: Homolog of GI Number: 50751915 NR Desc:  similar to RIKEN cDNA 2610028L19

SEQ ID NO: 8007 - DNA, 1466 bp, Zea mays
  misc_feature: Ceres CLONE ID no. 1440385
  misc_feature: Ceres CDNA ID no. 29191716
  CDS (95)..(1279): REFERENCED BY SEQ ID NO: 8008
gccgtgcatacattccgcctcttccctccctcggttcatcggcctcccgatcgagcagtagaagcagcgcaagagcaccgctagcactaaagaaatggcggccgagacgttcctcttcacgtccgagtctgtgaacgagggccatcccgacaagctctgtgaccaggtctccgacgccgtcttggatgcctgcttggcccaggatgccgacagcaaggtcgcctgcgagaccgtcaccaagaccaacatggtcatggtcttgggcgagatcaccaccaaggccaccgtcgactatgagaagatcgtgcgcgacacctgccgcaacatcggtttcatctctgatgacgttggtctcgacgccgaccgttgcaaggtgctcgtcaacatcgagcagcagtcccctgacattgcccagggtgttcacggacacttcaccaagcgtcctgaagaggttggcgccggtgaccagggcatcatgttcggctatgccaccgacgagacccctgagctgatgcccctcagccacgtgcttgccaccaagctcggagctcgcctcaccgaggtccgcaagaatggcacctgcgcctgggtcaggcctgacggaaagacccaggtcacagtcgagtacctaaacgaggatggtgccatggtacctgttcgtgtgcacaccgtcctcatctccacccagcacgacgagaccgtcaccaacgacgagattgctgcggacctcaaggagcatgtcatcaagccggtgatccccgcaaagtacctcgatcagaacaccatcttccacctgaacccgtctggccgcttcgtcatcggcggcccccatggtgacgccggtctcaccggccgcaagatcatcatcgacacctatggtggctggggagcccacggcggcggtgccttctctggcaaggacccaaccaaggtcgaccgcagtggcgcctacattgccaggcaggccgccaagagcatcatcgccagcggcctcgcacgccgctgcattgtgcagatctcatacgccatcggtgtgcctgagcctttgtctgtgttcgtcgactcctacggcaccggcaagatccccgacagggagatcctcaagctcgtgaaggagaactttgacttcaggcccgggatgatcagcatcaacctggacttgaagaaaggtggaaacaggttcatcaagaccgctgcttacggtcactttggccgtgatgatgccgacttcacctgggaggtggtgaagcccctcaagttcgacaaggcatctgcctaagagcatggcattctcttggtctgccgcctctcaagttcgtcaagacgggatcatgttgctcctgggaagtgggaagaagcattagacattgaagcgacgctctacactggtcttgttgtatggtagtcagtgctaagtttcttaatgtcatttcatatatttatcctttccaaaaaaaaaaaaaaaa

SEQ ID NO: 8008 - protein, 394 aa, Zea mays
  misc_feature: Ceres CLONE ID no. 1440385
  misc_feature: Ceres CDNA ID no. 29191716
  misc_feature: The plant flowers significantly earllier than wild-type.
  misc_feature: The plant is abnormally small.
  misc_feature: The plant produces a reduced number of seeds.
  misc_feature: Useful for biocontainment applications
  misc_feature: Useful for making plants with modulated biomass
  misc_feature: Useful for making plants with modulated flowering time
  misc_feature (118)..(240): Pfam Name: S PFAM Desc: S
  misc_feature (242)..(383): Pfam Name: S PFAM Desc: S
  misc_feature (4)..(104): Pfam Name: S PFAM Desc: S
  misc_feature: Homolog of GI Number: 34894718 NR Desc: OSJNBa0011P19.5
  misc_feature: Homolog of GI Number: 497900 NR Desc: S
  misc_feature: Homolog of GI Number: 1655576 NR Desc: S
  misc_feature: Homolog of GI Number: 1655578 NR Desc: S
  misc_feature: Homolog of GI Number: 16226059 NR Desc: S
  misc_feature: Homolog of GI Number: 429104 NR Desc: S
  misc_feature: Homolog of GI Number: 32892065 NR Desc: S
  misc_feature: Homolog of GI Number: 30142157 NR Desc: S
  misc_feature: Homolog of GI Number: 51038250 NR Desc: S
  misc_feature: Homolog of GI Number: 17529621 NR Desc: S
  misc_feature: Useful for delaying flowering time
  misc_feature: Useful for making bigger plants
  misc_feature: Useful for making plants with increased biomass and foliage
  misc_feature: Useful for making smaller plants
MAAETFLFTSESVNEGHPDKLCDQVSDAVLDACLAQDADSKVACETVTKTNMVMVLGEITTKATVDYEKIVRDTCRNIGFISDDVGLDADRCKVLVNIEQQSPDIAQGVHGHFTKRPEEVGAGDQGIMFGYATDETPELMPLSHVLATKLGARLTEVRKNGTCAWVRPDGKTQVTVEYLNEDGAMVPVRVHTVLISTQHDETVTNDEIAADLKEHVIKPVIPAKYLDQNTIFHLNPSGRFVIGGPHGDAGLTGRKIIIDTYGGWGAHGGGAFSGKDPTKVDRSGAYIARQAAKSIIASGLARRCIVQISYAIGVPEPLSVFVDSYGTGKIPDREILKLVKENFDFRPGMISINLDLKKGGNRFIKTAAYGHFGRDDADFTWEVVKPLKFDKASA

SEQ ID NO: 8009 - DNA, 698 bp, Zea mays
  misc_feature: Ceres CLONE ID no. 1440431
  misc_feature: Ceres CDNA ID no. 29191290
  CDS (45)..(545): REFERENCED BY SEQ ID NO: 8010
ctcacactctctcattccacaccaaaacctaacaacaaacaacaatgccgccgaagttggaccctagccagatcgtcgacgtctacgtccgcgtcaccggaggcgaagtcggagccgcgagctccctcgcccccaagatcggacccctcggtctcgccccgaagaagatcggagaagacatcgccaaggagaccgccaaggagtggaaaggcctccgcgtcaccgtcaagctaacggttcagaaccgtcaggcgaaagtcacggtggttccgtccgccgcggcgctcgtcatcaaggcgttgaaggagccggagagggaccgtaagaaggtgaagaacatcaagcacaacgggaacatttcgtttgacgatgtgattgagatcgcgaggatcatgaggccgagatcgattgccaaggagctgagtgggaccgtgagggagattctcgggacgtgtgtgtctgttgggtgtactgttaatgggaaggaccccaaggatctccagcaggagattcaggagggtgagattgacatccctgagaactaagtaaggatcgagaaaagatgttgtctttcttgttttatcttatcgttagatgctttcttgttttcaattacaatgactcgagttttggattattattattattatctccgttgaaatggtttatcattttgcgattgaaaaaaaaaaaaaaaa

SEQ ID NO: 8010 - protein, 166 aa, Zea mays
  misc_feature: Ceres CLONE ID no. 1440431
  misc_feature: Ceres CDNA ID no. 29191290
  misc_feature (12)..(71): Pfam Name: Ribosomal_L11_N PFAM Desc: Ribosomal protein L11
  misc_feature (76)..(144): Pfam Name: Ribosomal_L11 PFAM Desc: Ribosomal protein L11
  misc_feature: Homolog of GI Number: 22655306 NR Desc: 60S ribosomal protein L12
  misc_feature: Homolog of GI Number: 21592414 NR Desc: 60S ribosomal protein L12
  misc_feature: Homolog of GI Number: 21593741 NR Desc: 60S ribosomal protein L12
  misc_feature: Homolog of GI Number: 50911805 NR Desc: putative 60S ribosomal protein L12
  misc_feature: Homolog of GI Number: 40287508 NR Desc: 60S ribosomal protein L12
  misc_feature: Homolog of GI Number: 50900506 NR Desc: OSJNBa0093F12.16
  misc_feature: Homolog of GI Number: 2677830 NR Desc: ribosomal protein L12
  misc_feature: Homolog of GI Number: 3986695 NR Desc: ribosomal protein L12
  misc_feature: Homolog of GI Number: 66564518 NR Desc:  similar to ribosomal protein L12
MPPKLDPSQIVDVYVRVTGGEVGAASSLAPKIGPLGLAPKKIGEDIAKETAKEWKGLRVTVKLTVQNRQAKVTVVPSAAALVIKALKEPERDRKKVKNIKHNGNISFDDVIEIARIMRPRSIAKELSGTVREILGTCVSVGCTVNGKDPKDLQQEIQEGEIDIPEN

SEQ ID NO: 8011 - DNA, 708 bp, Zea mays
  misc_feature: Ceres CLONE ID no. 1440434
  misc_feature: Ceres CDNA ID no. 25401504
  CDS (124)..(465): REFERENCED BY SEQ ID NO: 8012
atcacatcgtctctcacatccccatccctatcgccttgctactacttcgggcccgagcacgaagccatttttgcatctccgcgagcgacttgagagggtgagatcggccttgcggcgtaggggatgaagcggctgctcgttcatggcgggagggcaatcggctgcccctccaggagcgccgtggaagatcccaccgccctggccgcgcttggcaacggcgttctactgcccaggtaccactcgacagagaagcacgacgacagtgacacgctgggcgaaatcggggagaaggcaagaacgacggcggaggagttcctgaagatggccaaggagaagaccgacgacgtcgcggagggcgcaaaggagacggtgcaggagaccaaggaagcggtgctcggcgagtcggacgacgagaaggacaagttcaagcagcgggtcgagcaggggaggtaccatcagaaataagcgggaggtgttccctttgctgtatgctcgcgtgcgtgcagtcatggcctgcccaaagccattagctctgcagtttgtatgtcaaccactaggcttggagtaaggtgctactgtatgcgtaatgtttcttcccccttcagttcagtggccttcagcactgcaatgtgatcttggtgctatacaacttgccacttcccgcagaataaataatattgagcttctgaattaaaaaaaaaaaaaaaa

SEQ ID NO: 8012 - protein, 113 aa, Zea mays
  misc_feature: Ceres CLONE ID no. 1440434
  misc_feature: Ceres CDNA ID no. 25401504
MKRLLVHGGRAIGCPSRSAVEDPTALAALGNGVLLPRYHSTEKHDDSDTLGEIGEKARTTAEEFLKMAKEKTDDVAEGAKETVQETKEAVLGESDDEKDKFKQRVEQGRYHQK

SEQ ID NO: 8013 - DNA, 876 bp, Glycine max
  misc_feature: Ceres CLONE ID no. 1440553
  misc_feature: Ceres CDNA ID no. 36701003
  CDS (95)..(697): REFERENCED BY SEQ ID NO: 8014
atccatcaatccgctgagtgcaaagttctaatctttcgcctattgggttctactcctttctctcttcgtttccgatcgatccaattttcttcccatggctacgatcggacacaacaatctcaatgccaaattggttcttctcggggacatgggtgctgggaaatccagcctcgttttgcgctttgtcaagggtcaatttctcgaatttcaggaatcaacaataggggcagcgttcttttcacagacgctggcagtaaatgacgcgacggtaaagtttgagatatgggacacagcaggacaagagaggtaccatagcttggctcccatgtattacagaggtgctgctgctgctatcattgtctatgacatcactagctcggactcctttacccgagctaagaagtgggtccaagagcttcaaaagcaagggaatcctaatatggtcatggctcttgctggtaacaaagctgatttggaagataagaggaaagtgacagctgaagaagcacgtgtatatgctgaagaaaatggtttgtttttcatggagacctctgccaaaactgcatccaacgttaatgatatattctatgaaatagccaagaggttaccaagggctcagccagctcagaacccagctgggatggtacttgttgatagacccgccgaaggaactagggctgcatcatgttgttcataagtatttgaactgtatttgcactccccaaccctttttaattaatcatgttttctgtggtttgtatgtactacacactttgatatcactgttatgtggagctccaactgcaatttacaaaacacaacttgatctggtgcaaaatatatatcctttggacgtgcaaaaaaaaaaaaaaaaaa

SEQ ID NO: 8014 - protein, 200 aa, Glycine max
  misc_feature: Ceres CLONE ID no. 1440553
  misc_feature: Ceres CDNA ID no. 36701003
  misc_feature (1)..(171): Pfam Name: Arf PFAM Desc: ADP
  misc_feature: Homolog of GI Number: 12311684 NR Desc: GTP binding protein
  misc_feature: Homolog of GI Number: 1370178 NR Desc: RAB5A
  misc_feature: Homolog of GI Number: 547478 NR Desc: guanine nucleotide regulatory protein
  misc_feature: Homolog of GI Number: 12311682 NR Desc: GTP binding protein
  misc_feature: Homolog of GI Number: 6010033 NR Desc: GTP binding protein
  misc_feature: Homolog of GI Number: 6010031 NR Desc: GTP binding protein
  misc_feature: Homolog of GI Number: 12311680 NR Desc: GTP binding protein
  misc_feature: Homolog of GI Number: 12311678 NR Desc: GTP binding protein
  misc_feature: Homolog of GI Number: 19691 NR Desc: small GTP binding protein
  misc_feature: Homolog of GI Number: 19986 NR Desc: Nt
MATIGHNNLNAKLVLLGDMGAGKSSLVLRFVKGQFLEFQESTIGAAFFSQTLAVNDATVKFEIWDTAGQERYHSLAPMYYRGAAAAIIVYDITSSDSFTRAKKWVQELQKQGNPNMVMALAGNKADLEDKRKVTAEEARVYAEENGLFFMETSAKTASNVNDIFYEIAKRLPRAQPAQNPAGMVLVDRPAEGTRAASCCS

SEQ ID NO: 8015 - DNA, 722 bp, Zea mays
  misc_feature: Ceres CLONE ID no. 1440570
  misc_feature: Ceres CDNA ID no. 40351837
  CDS (58)..(417): REFERENCED BY SEQ ID NO: 8016
gaacgagagagagagagagaggcagggaggggtcatccatccatcagaccatcacccatggacaaccttaaggagcagcggggccacgatgccgcgggcgccaacagcggcgtctggatgacggtgccggcgttcggggactgggacacgaagaacggcgcgctgccggactactccatggacttctccaagatccgcgagatgcgcaagcagaacaagaaggagctctcccgcgccagcctcggcggcgacgacgacctcctcgcccacgcccagaagccgcaggccaacagcgcccagcccaagctcggccgcccctgccccgccgccgaccgccgaccgctccacgcccgcgaccactccccaacgggagggaagaagttcctgagctacttccagtgctgtatcaaggcctgaagaggagctgccgcaatgctatgtctgtgtgcctgtgctttgtcgcagcagaacactcgtgagcaactaggtcccggctttgttaagtatccaaaaaatgtgcaatgtatttgccctgatggtcactcgttgggcctgttagcctgtatgaagaacaagtcagtttatgggggtaggcagcggtctatctgtacatggcaccatcgatttgtttgcgactggtggtacaatgttgccctgtaatcattgtattggatgggaatttgcaccgcctccgtatttttgaacgaaaaaaaaaaaaaaaa

SEQ ID NO: 8016 - protein, 119 aa, Zea mays
  misc_feature: Ceres CLONE ID no. 1440570
  misc_feature: Ceres CDNA ID no. 40351837
MDNLKEQRGHDAAGANSGVWMTVPAFGDWDTKNGALPDYSMDFSKIREMRKQNKKELSRASLGGDDDLLAHAQKPQANSAQPKLGRPCPAADRRPLHARDHSPTGGKKFLSYFQCCIKA

SEQ ID NO: 8017 - DNA, 1000 bp, Zea mays
  misc_feature: Ceres CLONE ID no. 1440612
  misc_feature: Ceres CDNA ID no. 29191454
  CDS (185)..(577): REFERENCED BY SEQ ID NO: 8018
actcaccaagactccaagcactcacctcctcagctcattgccagcctttggttccttccagctagcaaccggacggccagcaagccagcagactagtagctcttctcagttctcacacctactgtgtctgtgtgtgctcgcctttagcggcaagcgacccaccccccttcggtagcgagcgacaatgcagtacgcggcggcggagcaggcgtggtacatgccggcgaccacgacgatgatggcggagagcgcggtggcgcgcgtggagcggctggcgtcggagagcgcggtggtggtgttcagcgtgagcagctgctgcatgtgccacgccgtgaagcggctcttctgcggcatgggcgtgcacccgacggtgcacgagctggacctggacccgcgcggacgagagctggagcacgccctcgcccgcctcatcggctacggccccgccggcgcgcccgtcgtccccgtcgtcttcatcggcgggaagctggtcggcgccatggaccgggtcatggccgcgcatatcaacggctccctcgtcccacttctcaaggaggccggcgcgctctggctctgaactgtaggcaggccgcgcgccattgctggtgactcgtgtgccaacaggctacgcagcttcttccgttgtctaagttagttccttgttgctgtagaacctgatgtcacttgctgcaagctaatcaaactacgtactaagctacggtgataggaggatacatccatggacagggccggatggtggtagatcagtgatgcatcggattgggcttaatgtgtgtgagtagtgtgtgcaagagagaagagaggctggtaccgtgtgtgtgcttttttctcactacctactgcctccgtcggtgtttgtgtgtgcgtgcatgtggtgtttgacgcatgcgctggatttgctttgcttggggtgctacactgttaccaccactgttgtttaatttgatatcctttaattttaataaaaaaaaaaaaaaaa

SEQ ID NO: 8018 - protein, 130 aa, Zea mays
  misc_feature: Ceres CLONE ID no. 1440612
  misc_feature: Ceres CDNA ID no. 29191454
  misc_feature (35)..(122): Pfam Name: Glutaredoxin PFAM Desc: Glutaredoxin
  misc_feature: Homolog of GI Number: 50908919 NR Desc: glutaredoxin
  misc_feature: Homolog of GI Number: 50923897 NR Desc: OSJNBa0072K14.2
  misc_feature: Homolog of GI Number: 6513931 NR Desc: putative glutaredoxin
  misc_feature: Homolog of GI Number: 9757788 NR Desc: glutaredoxin
  misc_feature: Homolog of GI Number: 1532163 NR Desc: similar to glutaredoxin encoded by GenBank Accession Number Z49699
  misc_feature: Homolog of GI Number: 21537203 NR Desc: glutaredoxin
  misc_feature: Homolog of GI Number: 34914726 NR Desc: P0560B06.28
  misc_feature: Homolog of GI Number: 77556540 NR Desc: Glutaredoxin
  misc_feature: Homolog of GI Number: 50934249 NR Desc: glutaredoxin
  misc_feature: Homolog of GI Number: 77552325 NR Desc: Glutaredoxin
MQYAAAEQAWYMPATTTMMAESAVARVERLASESAVVVFSVSSCCMCHAVKRLFCGMGVHPTVHELDLDPRGRELEHALARLIGYGPAGAPVVPVVFIGGKLVGAMDRVMAAHINGSLVPLLKEAGALWL

SEQ ID NO: 8019 - DNA, 962 bp, Zea mays
  misc_feature: Ceres CLONE ID no. 1440655
  misc_feature: Ceres CDNA ID no. 35383398
  CDS (172)..(786): REFERENCED BY SEQ ID NO: 8020
acccgaacccgagtcgaccgcttcgagaagcgtcgccaccaaggcacccagaccccagacctcctcctcccgggaatcggaaccgcgtcacattcgtcgctcccctgatccatccggcgacgcggcggagcaaggaaggaaccaaggctcgagcagcgggcggccggagagatggcggagaacccgcagctgttcgggaacgggatgcccgtgcccttccacggcgagatgttcgtcctcgcccgcgacggcgtcgagttccacgtcgacaagatcccctcggcgcccggcggtcacgcaaaaacaaagggcaccatatacctttctaacataaggatggtgtttgtcgccgccaagcctgttgggaacttctttgcctttgatatgcctctgctgtacgtgcacggtgagaagttcaaccaaccgatatttcactgcaacaatatttctggattcgttgagccggttgttccagaaagccagaacagggctctgtactcgacccacaccttcaagatcttgttcaaggaaggtggatgtggtacctttgtgccactcttcctgaacctgatcacatcagtgcggcgctacaatcagtttgaagcccagcccgctactgtgccccgtgtggaccccatgcaggcagcgcaaactcctgtcgacgacatgatgcgccatgcgtacgtcgatccacatgatcctaccaagatcttcctccagcagcccgcagcggaatcccagctgaggaggagaaactaccacggccccgctgagaatgtgtactgatgctttggcctgattgcaaagtgcatgtgttttcggtgatctatgtggcgcacacgagcaatatatctgtttggtgtcaggatgtgatggaagtatagtagtatgattgtgtgttccactgttggattcaatccagatctaagtataataatgtacatacaaaaaaaaaaaaaaaa

SEQ ID NO: 8020 - protein, 204 aa, Zea mays
  misc_feature: Ceres CLONE ID no. 1440655
  misc_feature: Ceres CDNA ID no. 35383398
  misc_feature: Homolog of GI Number: 23479181 NR Desc: arabinogalactan protein
MAENPQLFGNGMPVPFHGEMFVLARDGVEFHVDKIPSAPGGHAKTKGTIYLSNIRMVFVAAKPVGNFFAFDMPLLYVHGEKFNQPIFHCNNISGFVEPVVPESQNRALYSTHTFKILFKEGGCGTFVPLFLNLITSVRRYNQFEAQPATVPRVDPMQAAQTPVDDMMRHAYVDPHDPTKIFLQQPAAESQLRRRNYHGPAENVY

SEQ ID NO: 8021 - DNA, 900 bp, Zea mays
  misc_feature: Ceres CLONE ID no. 1441509
  misc_feature: Ceres CDNA ID no. 35389485
  CDS (615)..(899): REFERENCED BY SEQ ID NO: 8022
gcgcatttccttgaacctggaacgggcacgctgctggaggtttcgatcgactccgtccatggccggctccgctgcttgtttgaggtaagaatgaatgttcagtaccgtggagagtgccacttgcacacttgactccccgactgacgtgtttggtgtgaggcatttttcctccatgtgaacggaggaagccggtgatccactgccttcagctggcagggcctcagagcacatctgtgctgtggtcaacacagattttggggagcagttctcctgctcagacagggactgcgcctgcaactggggcttccgaagctgcttgattgcagcagaggcatccttgcctactgaattacccagcttgcgcgggtacgggtgcgtcggcctcctcttcggcctcggcggcggaatctgaagttgcggtggagcacctacgctgttgttgctgttgtccccagaggattctcggatgacctgcagcatgcaaagcaaaaaggcaatcagaagcacgtcttcggtggcacggcatggagagcacctgctgtccatggttgagctgacttacatcaccttgcaagcaacacaatccatggaatttcaggcagaagggggttttgatgtgtttttttttttcgttctgtgcgaaaggcaggcaacgagaccttggagaagaacttctgggcgtggctcctgatctgcacggcagtcttgctgcctatgtgctctgcagatcgtaccggttgtcagctaggttccgtgcagttctggttacaaagcttgtattgtatatgaccataaacgacagaggcactcaccttgtatacggcgccaggcacggccgtgctgctgcagggcctccaagaagagcttgtgctcgtcctcggtccaaaaaaaaaaaaaaaa

SEQ ID NO: 8022 - protein, 74 aa, Zea mays
  misc_feature: Ceres CLONE ID no. 1441509
  misc_feature: Ceres CDNA ID no. 35389485
MTCSMQSKKAIRSTSSVARHGEHLLSMVELTYITLQATQSMEFQAEGGFDVFFFFVLCERQATRPWRRTSGRGS

SEQ ID NO: 8023 - DNA, 1187 bp, Zea mays
  misc_feature: Ceres CLONE ID no. 1441626
  misc_feature: Ceres CDNA ID no. 25445783
  CDS (103)..(1101): REFERENCED BY SEQ ID NO: 8024
atcccatctgctatccttggttgccgcttcctccaaagccactccaaacccccgcttccagaaccttctcgaaactctccgcctcctcctctactcgctccgatggcgaaggaaccgatgcgcgtgctcgtcactggcgccgcagggcaaattggatatgctcttgttcccatgattgctaggggagttatgcttggtgcagaccagcctgttattctgcacatgcttgatattccgccagcagctgaagcccttaatggtgttaagatggagttggttgatgctgcatttcctcttctgaagggagtcgttgcgacaactgatgttgtggaagcgtgcactggcgtgaatgtggccgtcatggttggtggattccccaggaaggagggaatggaaaggaaagatgttatgtctaaaaatgtttcaatctacaaaacccaagcatctgctcttgaagcccatgcggcccccaactgcaaggttctggtggttgccaacccagcgaacaccaatgctcttatcttgaaagaatttgctccatcaattcctgataggaacgttacttgcctgacccggctggaccacaacagggctcttggccagatttctgaaagacttagtgtccaagttagtgatgtgaagaatgttatcatctggggtaaccactcgtccactcagtaccctgatgttaaccatgccacagtgaagacttccactggggagaagcctgttcgtgagcttgttgctgatgatgaatggctcaatggcgaattcatcacaactgtccaacagcgtggtgctgcaatcatcaaagcgagaaagttctccagcgctctctcagctgctagctctgcttgtgaccatattcgtgattgggttcttggaacccctgaggggacatttgtttccatgggtgtgtactccgatggttcatatggtgttccttccggacttatttactcattcccagtaacatgcagtggcggtgaatggaaaatcgtccaaggcctcccgatcgacgagctctcaaggaagaagatggatgccactgcccaagagctgtcggaagagaagtcgcttgcttactcatgcctcgagtaaattataccacacccagagagcaattgctaccccctgtgttttgaataaaagaaactccagctccgtccataaaaaaaaaaaaaaaa

SEQ ID NO: 8024 - protein, 332 aa, Zea mays
  misc_feature: Ceres CLONE ID no. 1441626
  misc_feature: Ceres CDNA ID no. 25445783
  misc_feature (157)..(331): Pfam Name: Ldh_1_C PFAM Desc: lactate/malate dehydrogenase
  misc_feature (6)..(155): Pfam Name: Ldh_1_N PFAM Desc: lactate/malate dehydrogenase
  misc_feature: Homolog of GI Number: 15982948 NR Desc: NAD
  misc_feature: Homolog of GI Number: 38345463 NR Desc: OSJNBa0010H02.1
  misc_feature: Homolog of GI Number: 31432678 NR Desc: cytoplasmic malate dehydrogenase
  misc_feature: Homolog of GI Number: 2286153 NR Desc: cytoplasmic malate dehydrogenase
  misc_feature: Homolog of GI Number: 21593565 NR Desc: cytosolic malate dehydrogenase
  misc_feature: Homolog of GI Number: 10334493 NR Desc: cytosolic malate dehydrogenase
  misc_feature: Homolog of GI Number: 42521311 NR Desc: cytosolic malate dehydrogenase
  misc_feature: Homolog of GI Number: 10798652 NR Desc: malate dehydrogenase
  misc_feature: Homolog of GI Number: 52851186 NR Desc: malate dehydrogenase
  misc_feature: Homolog of GI Number: 20259605 NR Desc: putative cytosolic malate dehydrogenase
MAKEPMRVLVTGAAGQIGYALVPMIARGVMLGADQPVILHMLDIPPAAEALNGVKMELVDAAFPLLKGVVATTDVVEACTGVNVAVMVGGFPRKEGMERKDVMSKNVSIYKTQASALEAHAAPNCKVLVVANPANTNALILKEFAPSIPDRNVTCLTRLDHNRALGQISERLSVQVSDVKNVIIWGNHSSTQYPDVNHATVKTSTGEKPVRELVADDEWLNGEFITTVQQRGAAIIKARKFSSALSAASSACDHIRDWVLGTPEGTFVSMGVYSDGSYGVPSGLIYSFPVTCSGGEWKIVQGLPIDELSRKKMDATAQELSEEKSLAYSCLE

SEQ ID NO: 8025 - DNA, 960 bp, Zea mays
  misc_feature: Ceres CLONE ID no. 1441721
  misc_feature: Ceres CDNA ID no. 40351838
  CDS (84)..(698): REFERENCED BY SEQ ID NO: 8026
aaccaatcaactgaccaactaccacgagccaagagccaacccacaccactctctgtctgtactcagcgcgagctcacgggcccatgcctcgctccggcgctctccccctcctcgccgcgctggtcctcgccttggcggccgcggcggcggcgtcggcctcgaacgccaagggcgctccggccgccaccgacttcatccgcaagtcgtgccgcgagacgcagtacccgtcggtgtgcatgcagagcctgtcgtcgtacggcaagccgccgccgcgcagcccgcaggagctggcgcgcgcggcgctgtccgtgagcgcggaccgcgcgcggtcggcgtcggcgtacgtcgggcggatctgcgggccgggcctccgcagcggcagcggcgcgaaggcaaagagcagccccgcgcgcgactgcctggagaacatggcggacagcgtgggccacctgcgcgacgcggccaaggagctggacgggagcctgggccgggccgggtcgccggcgttcaggtggcacctgagcaacgtgcagacctggtgcagcgcggcgctcaccgacgagaacacctgcctcgacgggctctcccgcggcgtggacgccggcacgcgcgccgccatccggagcaaggtcgtggaggtcgcccaggtcaccagcaacgccctggcgctcgtcaacaaggtcgggtccgggcactagcctggcccgtcccaggcccatcctcactcggttcgccttgctgcgtactagtgcgcgcgtacgcataacagctcgaatcctggtgctccataagactataatcttgggtcatgtactcgtgttctggtaatctggttgttacttactgctgtattccagtttcaatgtgttcttgctgtgcctgtaaaatgtagctaagacaatcaattaagagtgtaattaatgataaggtggcgaaattaagccaaaaaaaaaaaaaaaa

SEQ ID NO: 8026 - protein, 204 aa, Zea mays
  misc_feature: Ceres CLONE ID no. 1441721
  misc_feature: Ceres CDNA ID no. 40351838
  misc_feature (32)..(196): Pfam Name: PMEI PFAM Desc: Plant invertase/pectin methylesterase inhibitor
MPRSGALPLLAALVLALAAAAAASASNAKGAPAATDFIRKSCRETQYPSVCMQSLSSYGKPPPRSPQELARAALSVSADRARSASAYVGRICGPGLRSGSGAKAKSSPARDCLENMADSVGHLRDAAKELDGSLGRAGSPAFRWHLSNVQTWCSAALTDENTCLDGLSRGVDAGTRAAIRSKVVEVAQVTSNALALVNKVGSGH

SEQ ID NO: 8027 - DNA, 977 bp, Zea mays
  misc_feature: Ceres CLONE ID no. 1441988
  misc_feature: Ceres CDNA ID no. 35383399
  CDS (54)..(824): REFERENCED BY SEQ ID NO: 8028
aattagcatctcagttctctctcaggaataaacagttgctgtggaaatcgaaaatggccccaaagaaaggagtcaaagcggttaccaagaagaagccggagaaagtaacaaacccactctttgagaggcgtccaaagcagtttggaatcggaggagcattgccacccaagaaggatctcacgagatacatcaaatggccaaagtccatccgcctccagaggcagaagcgtattcttaagcagaggcttaaggtcccaccagcactcaaccagttcactaagacccttgacaagaacttagcaacttctctcttgaagattctcctcaagtataggcctgaggacaaagcagccaagaaggaacgtcttctcaaaaaggctcaggccgaggccgagggaaagcctgttgaatcgaagaagcctattgttgtgaagtatggtcttaaccatgttacatatctcattgagcagaacaaggcgcaactggtggtgattgctcatgatgtggatccgattgagttggttgtctggttgcctgctctgtgcaggaaaatggaggttccttactgcattatcaaggggaaatcaagattgggagcgattgttcaccagaaaacagcagcttgcttgtgtttgacaacggtgaagaacgaggacaagatggagttcagcaaagtccttgaggccattaaggcaaactttaatgacaagtatgaagagaaccggaagaagtggggaggagggataatgggatccaaatcacaggccaagactaaggctaaggagagagttctagccaaggaagctgctcagaggatgaattaatctagtttttaatattttgccttaaaaagtcttttgttttagctgttgggacctctctttacaccaccttgagtatcccatatttgacttgggctttacggaatataactttttgaaaagattcatattgcatagtcaaaaaaaaaaaaaaaa

SEQ ID NO: 8028 - protein, 256 aa, Zea mays
  misc_feature: Ceres CLONE ID no. 1441988
  misc_feature: Ceres CDNA ID no. 35383399
  misc_feature (111)..(206): Pfam Name: Ribosomal_L7Ae PFAM Desc: Ribosomal protein L7Ae/L30e/S12e/Gadd45 family
  misc_feature: Homolog of GI Number: 21592470 NR Desc: 60S RIBOSOMAL PROTEIN L7A protein
  misc_feature: Homolog of GI Number: 23308199 NR Desc: At2g47610/T30B22.8
  misc_feature: Homolog of GI Number: 82400140 NR Desc: 60S ribosomal protein L7A
  misc_feature: Homolog of GI Number: 82623429 NR Desc: 60S ribosomal protein L7A
  misc_feature: Homolog of GI Number: 50944205 NR Desc: 60S ribosomal protein L7A
  misc_feature: Homolog of GI Number: 57900205 NR Desc: putative 60S ribosomal protein L7A
  misc_feature: Homolog of GI Number: 50904347 NR Desc: putative 60S ribosomal protein
  misc_feature: Homolog of GI Number: 61654624 NR Desc: L7a
  misc_feature: Homolog of GI Number: 54609203 NR Desc: ribosomal protein L7A
  misc_feature: Homolog of GI Number: 54643704 NR Desc: GA17314
  misc_feature: Useful for making plants with altered leaf shape eg curled leaves
  misc_feature: Useful for making plants with increased biomass and foliage
  misc_feature: Useful for making plants with increased biomass and foliage
  misc_feature: Useful for making shorter plants
MAPKKGVKAVTKKKPEKVTNPLFERRPKQFGIGGALPPKKDLTRYIKWPKSIRLQRQKRILKQRLKVPPALNQFTKTLDKNLATSLLKILLKYRPEDKAAKKERLLKKAQAEAEGKPVESKKPIVVKYGLNHVTYLIEQNKAQLVVIAHDVDPIELVVWLPALCRKMEVPYCIIKGKSRLGAIVHQKTAACLCLTTVKNEDKMEFSKVLEAIKANFNDKYEENRKKWGGGIMGSKSQAKTKAKERVLAKEAAQRMN

SEQ ID NO: 8029 - DNA, 1347 bp, Zea mays
  misc_feature: Ceres CLONE ID no. 1442065
  misc_feature: Ceres CDNA ID no. 25445492
  CDS (47)..(1159): REFERENCED BY SEQ ID NO: 8030
attctctccggagagcttagttcccgttagaaattaacatctgaaaatggagatcacaaacgtaaccgagtatgaagcgattgcaaaggagaaattgcctaagatggtatacgactactatgcctctggtgcagaagaccaatggactcttcaagagaacagaaacgctttcgcaagaatcctctttcgacctcggattctgattgatgtgagcaagattgatatgacaacaaccatcttgggtttcaagatctccatgcccatcatggttgctcctactgccatgcagaagatggctcaccctgaaggagaatatgctacggctagagctgcctctgctgctggaaccatcatgacactatcttcatgggctacttccagtgttgaggaagttgcttccacagggccagggattcgttttttccagctctatgtatacaagaacaggaatgtcgttgagcagctggtgagaagagccgagagggcagggttcaaagccattgctctcacagtagacaccccaaggctaggtcgcagagagtctgatatcaagaacagattcactttgcctccaaacctgacattgaagaactttgaaggtcttgaccttggaaagatggacgaggccaatgactctggcttggcttcatatgttgctggtcaaattgaccgtaccttgagctggaaggatgtccagtggctccagacaatcaccaaaatgccgattcttgtcaagggtgttatcaccggagaggatgcaaggatagcggttcaagctggagcagcagggatcattgtgtcaaaccatggagctcgccagcttgactatgtcccagcaacaatctcagcccttgaagaggttgtcaaggcgacacaaggacgaatccctgtgttcttggatggtggtgttcgccgtggcactgatgttttcaaggcacttgctcttggagcctccgggatatttattggaagaccagtggtgttctcacttgctgctgaaggagaagctggagtgagaaaggtgcttcagatgctacgtgatgagttcgagctgacaatggcactaagtggctgcaggtctctcaaggaaatcacccgtaaccacatcaccaccgaatgggacactccacgccctccacacccttcggccaggttatagagagaccaaaacaaccagcgaacatgtaatgtgatggctacactttctcattgggtctactttgctaccctatctaaagacttgtttctccctatgtcgaatcgcaaactatgcctagtgattcttgtaatattatttggcttcttctacctaccttctattcttcttgcgtaaaaaaaaaaaaaaaa

SEQ ID NO: 8030 - protein, 370 aa, Zea mays
  misc_feature: Ceres CLONE ID no. 1442065
  misc_feature: Ceres CDNA ID no. 25445492
  misc_feature (262)..(309): Pfam Name: IMPDH PFAM Desc: IMP dehydrogenase / GMP reductase domain
  misc_feature: Homolog of GI Number: 7431428 NR Desc:
  misc_feature: Homolog of GI Number: 65974 NR Desc:
  misc_feature: Homolog of GI Number: 16226772 NR Desc: AT3g14420/MOA2_2
  misc_feature: Homolog of GI Number: 999543 NR Desc: Chain B
  misc_feature: Homolog of GI Number: 2554675 NR Desc: Three
  misc_feature: Homolog of GI Number: 228403 NR Desc: glycolate oxidase
  misc_feature: Homolog of GI Number: 22531128 NR Desc: glycolate oxidase
  misc_feature: Homolog of GI Number: 11994212 NR Desc: glycolate oxidase
  misc_feature: Homolog of GI Number: 1773330 NR Desc: glycolate oxidase
  misc_feature: Homolog of GI Number: 27549566 NR Desc: glycolate oxidase
  misc_feature: Useful for making lethal plants for genetic confinement systems
MEITNVTEYEAIAKEKLPKMVYDYYASGAEDQWTLQENRNAFARILFRPRILIDVSKIDMTTTILGFKISMPIMVAPTAMQKMAHPEGEYATARAASAAGTIMTLSSWATSSVEEVASTGPGIRFFQLYVYKNRNVVEQLVRRAERAGFKAIALTVDTPRLGRRESDIKNRFTLPPNLTLKNFEGLDLGKMDEANDSGLASYVAGQIDRTLSWKDVQWLQTITKMPILVKGVITGEDARIAVQAGAAGIIVSNHGARQLDYVPATISALEEVVKATQGRIPVFLDGGVRRGTDVFKALALGASGIFIGRPVVFSLAAEGEAGVRKVLQMLRDEFELTMALSGCRSLKEITRNHITTEWDTPRPPHPSARL

SEQ ID NO: 8031 - DNA, 537 bp, Zea mays
  misc_feature: Ceres CLONE ID no. 1442147
  misc_feature: Ceres CDNA ID no. 35383400
  CDS (89)..(328): REFERENCED BY SEQ ID NO: 8032
atccagcatctggtgcgcacccagtacgatctgacgctcatcccacatcagtagtcgaccaagcacaagcagcagagccggccggaatatgtggacgatcaggaaggtggcgacgccgcaggtggccgtcctcctgctgctcctcatcgtcgttgcgcaggaggcggcgccgttggcggaggcgcgcgtgtgccggcgccggagcgcgggcttcaagggggtctgcatgtccgaccacaactgcgcgcaggtgtgcttgcaggaaggctacggcggcggcaactgcgacggcatcatgcgccagtgcaagtgcatcagggagtgctagctagctagcagctataccggcctttaattaaattaataaggatcgacgtcgcggtcggtcgctaaatatgtactactatacgtctacactacatgcaataatgcaccacatgtacgcgtacgcgcgccgagctgtgtggacgccgcagctagcacggccatcgttcctatacatcgtcgtctgtcgttcgagcaaaaaaaaaaaaaaaa

SEQ ID NO: 8032 - protein, 79 aa, Zea mays
  misc_feature: Ceres CLONE ID no. 1442147
  misc_feature: Ceres CDNA ID no. 35383400
  misc_feature (33)..(79): Pfam Name: Gamma PFAM Desc: Gamma
  misc_feature: Homolog of GI Number: 2501196 NR Desc: Gamma
  misc_feature: Homolog of GI Number: 11387095 NR Desc: Small protein inhibitor of insect alpha
  misc_feature: Homolog of GI Number: 1173437 NR Desc: Small protein inhibitor of insect alpha
  misc_feature: Homolog of GI Number: 134486 NR Desc: Small protein inhibitor of insect alpha
  misc_feature: Homolog of GI Number: 135784 NR Desc: Gamma
  misc_feature: Homolog of GI Number: 100843 NR Desc: gamma
  misc_feature: Homolog of GI Number: 100586 NR Desc: hordothionin gamma
  misc_feature: Homolog of GI Number: 19310811 NR Desc: putative protease inhibitor II
  misc_feature: Homolog of GI Number: 7939581 NR Desc: thionin like protein
  misc_feature: Homolog of GI Number: 10444372 NR Desc: Kunitz trypsin inhibitor protein
MWTIRKVATPQVAVLLLLLIVVAQEAAPLAEARVCRRRSAGFKGVCMSDHNCAQVCLQEGYGGGNCDGIMRQCKCIREC

SEQ ID NO: 8033 - DNA, 1422 bp, Zea mays
  misc_feature: Ceres CLONE ID no. 1442203
  misc_feature: Ceres CDNA ID no. 40351839
  CDS (112)..(1164): REFERENCED BY SEQ ID NO: 8034
aggtacgtccgccccttggtcttcccttcccgcttagcgaaaccgagcactcaaattctaactattcgtggtcggatctgatctaattacaagtgcatatgcatctgaaagatggcgaggataccgtctctgaagagcctcaatgcgtttccacatgcggaagagcacttgttgaagaagacttactctggcgctgttgtgacaatttttgggctacttataatgattacactgtttgtgcatgagctgcagttttatcttaccacctacacggtgcatcagatgtctgtagatctgaaacgaggagaaactctgccaatccatatcaatatgtcatttccttctttgccatgtgaagtattgagtgtggatgcaattgacatgtctgggaaacatgaagttgatttgcatacaaatatttggaagcttcgcttggataagtatggccatatcatcggtacagagtacttgtctgacctagttgaaaaggggcatggggcacatcatgatcatgaccatgatcatgaccatcacgatgaacaaaagaagcatgaacaaaccttcaacgaagaagcagaaaaaatgatcaagagtgtgaaacaagcactcggaaatggtgaaggctgccgagtctatgggatgttggatgtgcagagggtggctggtaacttccatatctcagtgcatggtttgaacatttttgttgctgaaaagatttttgaagggtcaaaccatgtgaacgtcagtcatgttatccacgagctgtcatttggcccaaagtatccaggaattcataacccactggatgaaacttcaaggatacttcatgacacaagtggaaccttcaaatactacattaaggttgttccgactgagtacaaatatctgtcaaagaaagtattgccaacaaatcagttttctgtcacggagtattttcttcccatccgtccaactgacagggcctggccagcggtttacttcctgtatgatctgtcaccaattacagtcaccatcaaagaggaaagaaggaacttccttcattttgtaactcgtctatgtgcagttcttggtggcacatttgccatgacaggaatgcttgaccggtggatgtaccagcttatcaagacagtcaccaactcaaagaccagaagtgtactgcggtaattgcacaagtcatgatggatggaaaaccgttggtagtgtggtaccgtggctaatgaagcctttgcccgaagctaactgatcaagccatgttgatttttgcatgttttattttcttcttacatggttaacttataatacgtcgttgtttttttttccatcaactatgttagattaacacagtccacggactacatggttaactatgttgctagtggaactgaaatgccaagccgatcttgatcaaaaaaaaaaaaaaaa

SEQ ID NO: 8034 - protein, 350 aa, Zea mays
  misc_feature: Ceres CLONE ID no. 1442203
  misc_feature: Ceres CDNA ID no. 40351839
MARIPSLKSLNAFPHAEEHLLKKTYSGAVVTIFGLLIMITLFVHELQFYLTTYTVHQMSVDLKRGETLPIHINMSFPSLPCEVLSVDAIDMSGKHEVDLHTNIWKLRLDKYGHIIGTEYLSDLVEKGHGAHHDHDHDHDHHDEQKKHEQTFNEEAEKMIKSVKQALGNGEGCRVYGMLDVQRVAGNFHISVHGLNIFVAEKIFEGSNHVNVSHVIHELSFGPKYPGIHNPLDETSRILHDTSGTFKYYIKVVPTEYKYLSKKVLPTNQFSVTEYFLPIRPTDRAWPAVYFLYDLSPITVTIKEERRNFLHFVTRLCAVLGGTFAMTGMLDRWMYQLIKTVTNSKTRSVLR

SEQ ID NO: 8035 - DNA, 1000 bp, Zea mays
  misc_feature: Ceres CLONE ID no. 1442461
  misc_feature: Ceres CDNA ID no. 25446794
  CDS (171)..(812): REFERENCED BY SEQ ID NO: 8036
agcaagttttgtggcttgatgcattttagcgaagtcaggtcggcgtatgccaaatgtctcgttaagacaccgctgcagtgcagactgtagagtgcagactcgccgagtacgactcctcacgaactagtccgtttccgtgcgctgctgctgacgagggagtgggagggatcatggtggcgccggacgtgaaggcggagacgatgaagctgatggatcagcggggtgccctagaggcggagatggacgccatcatcgcccgcctcactgcggcaggcggaccgggcatcaccggaggcctcgtcgacgccgagggtttcccaaggtccgacatcgacatcccgaacgtcctcgcccagcgccggaggcttgctgaattgcgaaatgaccacaaggatgttacaaacaaaattggtaaaaatcttgaggttttacactcagcaaagttatcaaggaatgaacaatcaacctcaaggagatctgatacaacagatccttcacactttggatcatctcaaagtgaacctatggaagaggaccatgtgactggacttccttttgccatgattgatgaaatcgctgatggttctcctgcttctgtggatggtttgcaacttggagatgagattgtaaagtttgggaatgtggaagctggtgatcagttgcaggaaaggctcatgtctgaagctctttccaatgaggacagtcaagtatctttagtcatcattcgccagggatcagtggtgaatttaacaattacaccaaggaagtggcatggaagaggacttctggggtgccatttccgaatgctatgaagagcccatcgttcttcagcaggatcgttggtctatcgatgtcatttcagcagcaaagtgaactgatttaaccgaatgtgtgacatcttccaaaatactggttgcgtgtacttaacttgagcgcttgaaacatactggtgtaccaggcggtgttgagacattttacttgtacaaaaaaaaaaaaaaaa

SEQ ID NO: 8036 - protein, 213 aa, Zea mays
  misc_feature: Ceres CLONE ID no. 1442461
  misc_feature: Ceres CDNA ID no. 25446794
  misc_feature: Homolog of GI Number: 50725969 NR Desc: 26S proteasome regulatory subunit
  misc_feature: Homolog of GI Number: 49256369 NR Desc: MGC84770 protein
  misc_feature: Homolog of GI Number: 27371144 NR Desc: MGC53232 protein
  misc_feature: Homolog of GI Number: 72015781 NR Desc:  similar to 26S proteasome non
  misc_feature: Homolog of GI Number: 62857997 NR Desc: LOC549313
  misc_feature: Homolog of GI Number: 73994527 NR Desc:  similar to 26S proteasome non (26S proteasome regulatory subunit p27) isoform 1
  misc_feature: Homolog of GI Number: 30584971 NR Desc: Homo sapiens proteasome
  misc_feature: Homolog of GI Number: 18543329 NR Desc: proteasome 26S non
  misc_feature: Homolog of GI Number: 12230943 NR Desc: 26S proteasome non
  misc_feature: Homolog of GI Number: 18426862 NR Desc: proteasome 26S non
MVAPDVKAETMKLMDQRGALEAEMDAIIARLTAAGGPGITGGLVDAEGFPRSDIDIPNVLAQRRRLAELRNDHKDVTNKIGKNLEVLHSAKLSRNEQSTSRRSDTTDPSHFGSSQSEPMEEDHVTGLPFAMIDEIADGSPASVDGLQLGDEIVKFGNVEAGDQLQERLMSEALSNEDSQVSLVIIRQGSVVNLTITPRKWHGRGLLGCHFRML

SEQ ID NO: 8037 - DNA, 670 bp, Zea mays
  misc_feature: Ceres CLONE ID no. 1442522
  misc_feature: Ceres CDNA ID no. 25447059
  CDS (141)..(518): REFERENCED BY SEQ ID NO: 8038
gattggagctgaagagaggaagcagcgcgtcctcgcctaaagccctcgccgccctctttcggctcctcgcctctcgtccacgcgcgacgacgtgtcggcaaacactcagtccatcactccatcccaagactcgcgaggcgatggtggacgcgtggtggcctctgctgggcgcggcgatcccggcgctggtggcgggtcagtttgtccgcatcaagcgccgccgcgacgaggagcagcgcctcaaggcggcgcgcgggcgggagaagagctccgacgaggtattcgtctgcgagcgcgtgtgcacctccaagcgtatgctcaagaaggtaggggccttctccaaggaccccataccggagacctgcgtcaccgtctgcggcgtctctgaactcgacgcctgcgccgacgcttgcgcgcgcaccgtctgcgtcaaccagcaccaggtgcccaattggaacgacgtctgcctcaagaggtgccagagcgagtgtctcaaactctcctcaaacctcatgtaatgaccatctcgctattgtgctgcgctccttatataccaccccgtcaggttcttctctgcttctatccatatcatggttgaggaacttcagacgtcgataaccgaaatttatatatctcaaggaattggagtgagcgaaaaaaaaaaaaaaaa

SEQ ID NO: 8038 - protein, 125 aa, Zea mays
  misc_feature: Ceres CLONE ID no. 1442522
  misc_feature: Ceres CDNA ID no. 25447059
MVDAWWPLLGAAIPALVAGQFVRIKRRRDEEQRLKAARGREKSSDEVFVCERVCTSKRMLKKVGAFSKDPIPETCVTVCGVSELDACADACARTVCVNQHQVPNWNDVCLKRCQSECLKLSSNLM

SEQ ID NO: 8039 - DNA, 858 bp, Zea mays
  misc_feature: Ceres CLONE ID no. 1442623
  misc_feature: Ceres CDNA ID no. 36593285
  CDS (95)..(484): REFERENCED BY SEQ ID NO: 8040
ttgctcccatccatcacagctagctagcatacagacgaataatctcttcttcacctcactaacaccagctagcaactctttctctcctgcaataatggccgctcgctcctcctcctcccagccgcagctggtcgcggcggcggcggtcctggcagcggcgctgctgctgctggcggcgggggccgggacggcgtcggcggcggtgagctgcggcgaggtgacgtcgtcggtggcgccgtgcctcgggtacgcgatgggcagcgcggcgtcgccctccgcggcgtgctgcagcggggtgcgctcgctcaacagccgcgcgtcgtcgacggcggaccggcaggccacctgcaactgcctcaagagcatgacgggccggctcggcggcggcgtcagcatggccaacgccgccaacatcccctccaagtgcggcgtctccgtcggcgtgcccatcagccccaccgtcgactgcaccaagatcaactgatcgatggaaccatagtggaggtagctcgctcgttggatggcagcgtacgtggccatcagcagcatgcagtcgtcgtcgtagcagagatgtcctagctacgtgtgtgtcatgcatcagactggcacataataaagaagtagatcatgcacccaccccactagtgatcacttcgtctagtgtccctcccgtcgtcgtcgtcgtgtacctcgtacgtgacatgccgtagcacgtactacgctagcagagcagcacctcaatgtccttgggcttgctttgctggctctctgttttcgtctctcgtgttgcttttaatctggtacaggtttctaaattataataatgaatagttttttgtccgaaaaaaaaaaaaaaaa

SEQ ID NO: 8040 - protein, 129 aa, Zea mays
  misc_feature: Ceres CLONE ID no. 1442623
  misc_feature: Ceres CDNA ID no. 36593285
  misc_feature (39)..(125): Pfam Name: Tryp_alpha_amyl PFAM Desc: Protease inhibitor/seed storage/LTP family
  misc_feature: Homolog of GI Number: 25990344 NR Desc: lipid transfer protein
  misc_feature: Homolog of GI Number: 77548420 NR Desc: nonspecific lipid
  misc_feature: Homolog of GI Number: 510337 NR Desc: lipid transfer protein
  misc_feature: Homolog of GI Number: 7438281 NR Desc: probable lipid transfer protein precursor
  misc_feature: Homolog of GI Number: 2407273 NR Desc: lipid transfer protein LPT II
  misc_feature: Homolog of GI Number: 77553487 NR Desc: nonspecific lipid
  misc_feature: Homolog of GI Number: 1498597 NR Desc: phospholipid transfer protein
  misc_feature: Homolog of GI Number: 32966061 NR Desc: lipid transfer protein LPT1
  misc_feature: Homolog of GI Number: 56713105 NR Desc: type 1 non
  misc_feature: Homolog of GI Number: 56713111 NR Desc: type 1 non
MAARSSSSQPQLVAAAAVLAAALLLLAAGAGTASAAVSCGEVTSSVAPCLGYAMGSAASPSAACCSGVRSLNSRASSTADRQATCNCLKSMTGRLGGGVSMANAANIPSKCGVSVGVPISPTVDCTKIN

SEQ ID NO: 8041 - DNA, 634 bp, Zea mays
  misc_feature: Ceres CLONE ID no. 1442673
  misc_feature: Ceres CDNA ID no. 25445705
  CDS (131)..(403): REFERENCED BY SEQ ID NO: 8042
gtggcgccgccgccgccgcatcgcattgcccggacgccaaaacctagctcctgaactctcctcggctcctcgcccacctctcgctagccgttcccgctctgcagtctccgtggccggacgccgcggcgacatggcatcgacctgtttccgcgccgccgcccgcgtggcctccgccgccggccgctcggcggcggccacccgatcggctccctccgcggcccgtgccgccgccgccgcccaccgcgcctcgtccttctccaggatgccggtggagctcgggtgctgcgcgggattgtcgctgctgccgctgcacagcgcggtggcggcggccaggctgacgtcgcggctgagcacggcgtcgagctgccgtgctctctctcagggcactgctgcaggcacatgactttgataaaagatattaccgggagcttgctgttttgcttcatacaatcatgaagaatgagtactttaacactgaaattgtaatggaaggctagtgttatgttatgtacctagcattactagttgcctctgttgaggaataccttgatgcaataatgtagcgtcctttttgaatgttctctacagtaattgatagttcactacttcacttgagtcaaaaaaaaaaaaaaaa

SEQ ID NO: 8042 - protein, 90 aa, Zea mays
  misc_feature: Ceres CLONE ID no. 1442673
  misc_feature: Ceres CDNA ID no. 25445705
MASTCFRAAARVASAAGRSAAATRSAPSAARAAAAAHRASSFSRMPVELGCCAGLSLLPLHSAVAAARLTSRLSTASSCRALSQGTAAGT

SEQ ID NO: 8043 - DNA, 1261 bp, Zea mays
  misc_feature: Ceres CLONE ID no. 1442717
  misc_feature: Ceres CDNA ID no. 25447060
  CDS (103)..(975): REFERENCED BY SEQ ID NO: 8044
agtatctcactcccagtcgccgccgcacatacaaatacgcgacgggaacggccagggccgaaccctaaaaccatcgccctgcccccgcctccgctgcatcccatggcggctgtgcagcgcctcctccgggcagtcgcccccggtggctcggcagcggcggcggtcaggaggcgcatgacgtcgcttgcgccggagcaggcgccgtcttcggccgctgggttcccattcgcggcggagcagagagcaaggcggccggtggcggcggagaggaacgtgcagtgggtgttcctgggctgccccggcgtgggcaagggcacctacgcgagccgcctgtcgcgcctcctcggcgtgccgcacatcgcgacgggggatcttgttcgcgacgagctcgcctccaccgggccacttgctacgcagcttgctgaaattgttaatcaggggaaattagtttctgatgaaattatcatcaatcttttgtccaaaaggcttaagaaaggagaagaccagggagaatcaggatttattcttgatggttttccccgtacagtaaaacaagcggaaattcttgatggcgttacagacattgatatggtggttaatctgaaactaagagaagatgttatagtagagaagtgccttggcagaaggatttgcggccaatgtggaaagaacttcaatttggcctgcattgatgttaagggtgaaaatggactcccaccaatctacatggcaccactgttgcccccaaacaactgcatgtcgaagcttattacccgagctgatgataccgaagaggtggtcagaaatcggcttcagatatataatgacatgagtcaacctgtggaaggtttctaccgagagcaggggaagctcttggaatttgacttgcctggtgggatccctgaatcttggccaaagctgctccaggttctaaacctcgaggaccaagatgagttgaggttagctgcagcgtaggtctctgggagaccgacctacatactgggaaaaagaccataccacatttttttgaataatggagaagaggaaacttactccatagtttagtgcgttatgcagaagtaatggttttcttgtcaaaaagcgatttgttggtttccaccggcgttttgatggtgagccggtactatgtaacttacgatagctgtaagcactaagcagcccattcttgcttgggacacagtttggagcgcatgaagacatgctgtagtgttttttttctaattcaaaaaaaaaaaaaaaa

SEQ ID NO: 8044 - protein, 290 aa, Zea mays
  misc_feature: Ceres CLONE ID no. 1442717
  misc_feature: Ceres CDNA ID no. 25447060
  misc_feature (62)..(256): Pfam Name: ADK PFAM Desc: Adenylate kinase
  misc_feature: Homolog of GI Number: 50948927 NR Desc: ESTs AU065232
  misc_feature: Homolog of GI Number: 50929547 NR Desc: OSJNBa0043A12.38
  misc_feature: Homolog of GI Number: 21553713 NR Desc: putative adenylate kinase
  misc_feature: Homolog of GI Number: 25990718 NR Desc: adenylate kinase
  misc_feature: Homolog of GI Number: 28393969 NR Desc: putative adenylate kinase
  misc_feature: Homolog of GI Number: 76664061 NR Desc: adenylate kinase 2
  misc_feature: Homolog of GI Number: 50940565 NR Desc: putative adenylate kinase
  misc_feature: Homolog of GI Number: 15644227 NR Desc: adenylate kinase
  misc_feature: Homolog of GI Number: 26985214 NR Desc: adenylate kinase
  misc_feature: Homolog of GI Number: 49235646 NR Desc: COG0563: Adenylate kinase and related kinases
MAAVQRLLRAVAPGGSAAAAVRRRMTSLAPEQAPSSAAGFPFAAEQRARRPVAAERNVQWVFLGCPGVGKGTYASRLSRLLGVPHIATGDLVRDELASTGPLATQLAEIVNQGKLVSDEIIINLLSKRLKKGEDQGESGFILDGFPRTVKQAEILDGVTDIDMVVNLKLREDVIVEKCLGRRICGQCGKNFNLACIDVKGENGLPPIYMAPLLPPNNCMSKLITRADDTEEVVRNRLQIYNDMSQPVEGFYREQGKLLEFDLPGGIPESWPKLLQVLNLEDQDELRLAAA

SEQ ID NO: 8045 - DNA, 889 bp, Zea mays
  misc_feature: Ceres CLONE ID no. 1442737
  misc_feature: Ceres CDNA ID no. 25401063
  CDS (38)..(703): REFERENCED BY SEQ ID NO: 8046
agggtttccaaagccgtcaccaacgaacaccaacgcgatggggcgaagacctgcgagatgttaccgtcagatcaaggggaagccataccctaaatcacgatactgccgtggtgtccccgatcccaagatcaggatctacgacgtcgggatgaagaagaaaggagtcgacgagttcccattctgcgtccatctcgtctcatgggagaaagaaaacgtctccagcgaagctctcgaggctgcgcgtatcgcttgcaacaagtacatggtgaaatcagctgggaaagatgcttttcatttgaggattagggttcatcctttccatgttctgaggattaacaagatgctttcgtgcgctggagctgataggcttcagactggtatgagaggtgcttttggtaaggcacttgggacttgtgctagagttgcgattgggcaggtgcttttgtctgtgaggtgtaaggataaccatggagctcatgctcaggaggctctcaggagggctaagtttaagttccctggtcgtcagaagatcattgttagcaggaaatggggattcaccaagttcaaccgtgctgattacactaggctgagacagtccaagaggattgttcctgatggtgtcaatgctaagttcttatcgaaccatggtcgtttggctaaccgtcaacctggaagtgcgttcatatcagccaccagcgattaagaatgaagatgatttgtggttgtagtaccgataatactctagtttccgaagttattcgttttgtttttgttgtaacagttaaaaacaaatcttcgtttccttttttctggacaatcgttttaaggtctgtttctatgttcgttgttcaatcaagttctggttttacttctaaaaaaaaaaaaaaaa

SEQ ID NO: 8046 - protein, 221 aa, Zea mays
  misc_feature: Ceres CLONE ID no. 1442737
  misc_feature: Ceres CDNA ID no. 25401063
  misc_feature (1)..(176): Pfam Name: Ribosomal_L10e PFAM Desc: Ribosomal L10
  misc_feature: Homolog of GI Number: 21593025 NR Desc: 60S ribosomal protein L10
  misc_feature: Homolog of GI Number: 21592869 NR Desc: putative 60s ribosomal protein L10
  misc_feature: Homolog of GI Number: 23397080 NR Desc: putative tumor suppressor
  misc_feature: Homolog of GI Number: 17682 NR Desc: Wilm's tumor suppressor homologue
  misc_feature: Homolog of GI Number: 6984130 NR Desc: 60S ribosomal protein L10
  misc_feature: Homolog of GI Number: 2500354 NR Desc: 60S ribosomal protein L10
  misc_feature: Homolog of GI Number: 68449756 NR Desc: 60S ribosomal protein L10
  misc_feature: Homolog of GI Number: 5917743 NR Desc: 60S ribosomal protein L10
  misc_feature: Homolog of GI Number: 11036950 NR Desc: QM
  misc_feature: Homolog of GI Number: 77999313 NR Desc: 60S ribosomal protein L10
  misc_feature: Useful for making shorter plants
MGRRPARCYRQIKGKPYPKSRYCRGVPDPKIRIYDVGMKKKGVDEFPFCVHLVSWEKENVSSEALEAARIACNKYMVKSAGKDAFHLRIRVHPFHVLRINKMLSCAGADRLQTGMRGAFGKALGTCARVAIGQVLLSVRCKDNHGAHAQEALRRAKFKFPGRQKIIVSRKWGFTKFNRADYTRLRQSKRIVPDGVNAKFLSNHGRLANRQPGSAFISATSD

SEQ ID NO: 8047 - DNA, 866 bp, Zea mays
  misc_feature: Ceres CLONE ID no. 1442742
  misc_feature: Ceres CDNA ID no. 40351840
  CDS (75)..(617): REFERENCED BY SEQ ID NO: 8048
acaagtaagcgctccataccgggaatagccggccgtccgaccgtccgtccgggaggaaagaaacggaaccagccatgggggacggtggtggtggtgatggcgccgccgcctcctcgtcgccgccggccgccgcggccgccccgggcttctcctacctcgccgtcttccacaacttccccctcgtcgccgcgctgctcggcttcgccatcgcgcagtccatcaagttcttcctcaccaggtataaggagaaaagatgggatcctaagcggcttatcggctccggtggcatgccgtcgtcgcattccgcgaccgttacagcattatcggtagccattggcttccaagagggcttcggcagtgccctctttgccacatcaacgatattcgcaagtgtggtgatgtacgatgcttctggtgtcagattgcatgctggaaagcaagcagcggtgttgaaccaaatagtctgtgaactaccggctgaacatcccttggctgaaacaagaccattgcgtgaacttttaggccataccccgacccaggttgtcgccggtgcggtgcttgggtgtatgataggtattgcagggcagattatcattgcagtgacaagtgttgtatgacgctgctgtgtctcaaggtgcaggagaattgctagtgttctcagagacctgagaagaagaagcttctctggtgtttctgtgacttaggtatcggtttgatgtgtaatgatgtgccgtagtgctgttgaagattgaatcaagttttgatagcacctaagtgtatgttcaggtgatgttctcaggcttgatgtacagattatctattcgataacttcattgctatggtgaaagccaaaaaaaaaaaaaaaa

SEQ ID NO: 8048 - protein, 180 aa, Zea mays
  misc_feature: Ceres CLONE ID no. 1442742
  misc_feature: Ceres CDNA ID no. 40351840
  misc_feature (28)..(163): Pfam Name: DUF212 PFAM Desc: Divergent PAP2 family
MGDGGGGDGAAASSSPPAAAAAPGFSYLAVFHNFPLVAALLGFAIAQSIKFFLTRYKEKRWDPKRLIGSGGMPSSHSATVTALSVAIGFQEGFGSALFATSTIFASVVMYDASGVRLHAGKQAAVLNQIVCELPAEHPLAETRPLRELLGHTPTQVVAGAVLGCMIGIAGQIIIAVTSVV

SEQ ID NO: 8049 - DNA, 666 bp, Zea mays
  misc_feature: Ceres CLONE ID no. 1442915
  misc_feature: Ceres CDNA ID no. 29191291
  CDS (80)..(439): REFERENCED BY SEQ ID NO: 8050
tcgtccagggttttagccgccgccgccgccgccgcccccgcccccgcagagagaagcgagcgacagcgaggtcgacaccatggtgcagcgcctgacgtaccggaagcggcacagctacgccaccaagtccaaccagaccagggtcgtcaaaaccccaggagggaggcttgtgtaccagtacaccaagaaaagggcgagcgggccgaaatgtccggtcaccggcaagaagatccaggggatacctcatctaaggcctactgagtacaaaagatcaagattatccaggaacaggagaacagtgaaccgtccttatggtggtgttctatctggtcaggctgttagggagaggatcatccgtgctttccttgtcgaagagcaaaagattgtgaagaaggttttgaagatccagaagaccaaggagaagcagccatcaaagtgaaatggccgaggcctttttttggaggacagatggtgatgagtgttcagtcaagcctgcgcagtatgctaagcccgtggttactgaattaagctagagatttccgtccattttcttgttccgagggtggatctgggtctcgttacccgtatgctattactttgtgtttgacggtttgacctgagtacttggttatattacagttttggatatcaaaaaaaaaaaaaaaa

SEQ ID NO: 8050 - protein, 119 aa, Zea mays; identical to SEQ ID NO: 3134
  misc_feature: Ceres CLONE ID no. 1442915
  misc_feature: Ceres CDNA ID no. 29191291
  misc_feature (5)..(103): Pfam Name: Ribosomal_L34e PFAM Desc: Ribosomal protein L34e
  misc_feature: Homolog of GI Number: 50941301 NR Desc: putative ribosomal protein L34
  misc_feature: Homolog of GI Number: 50946109 NR Desc: putative ribosomal protein
  misc_feature: Homolog of GI Number: 57471712 NR Desc: ribosomal protein l34
  misc_feature: Homolog of GI Number: 2119150 NR Desc: ribosomal protein L34
  misc_feature: Homolog of GI Number: 1076636 NR Desc: ribosomal protein L34
  misc_feature: Homolog of GI Number: 47824936 NR Desc: Ribosomal protein L34e
  misc_feature: Homolog of GI Number: 13194822 NR Desc: putative 60S ribosomal protein L34
  misc_feature: Homolog of GI Number: 21436403 NR Desc: putative 60S ribosomal protein L34
  misc_feature: Homolog of GI Number: 21594659 NR Desc: 60s ribosomal protein L34
  misc_feature: Homolog of GI Number: 20259165 NR Desc: putative 60S ribosomal protein L34

SEQ ID NO: 8051 - DNA, 726 bp, Zea mays
  misc_feature: Ceres CLONE ID no. 1442935
  misc_feature: Ceres CDNA ID no. 29191292
  CDS (108)..(476): REFERENCED BY SEQ ID NO: 8052
gaccaaactccggctcccaacgcccaaagcctccgcatccagagctccaaaccctaggcgaggcgaggcgaggcgaggcgaggaggcggcgcggcgagggagaggccatggatcccgattcggtgtcgaaggcgttcgtgcagcactactaccagacgttcgactccaaccgcgccgcgctggtggggctgtaccaggacggctccatgctcaccttcgagggcgagaagttcggcggccccgccgccatcgccggcaagctcggatctctccccttccagcagtgccagcacaagatcgacaccgtcgactgccagccctcggggccccagggcggcgtcctcgtcttcgtctccggcaccatcaccaccggccccggcgagcaccccctcaagttctcacagatgttccatttgctgccagctggagggagcttctacgtgcagaacgacatgttccgcctgaactatggttaaggaagggcgactctggcagcaaagaacttgttcagggatttatgttgaaacaatgaacatcaaatgatgatgctgcagactctttgtttgttcgccaacctgtgcaatttatcgcaaaaaattgccttgataggcatccaccagatcatcttttgttttgtgtttcccatgtattgtcgttgcttgggtggcactttctttggaatgttgatggaaaccgtccaggtattagttaaaaaaaaaaaaaaaa

SEQ ID NO: 8052 - protein, 122 aa, Zea mays
  misc_feature: Ceres CLONE ID no. 1442935
  misc_feature: Ceres CDNA ID no. 29191292
  misc_feature (6)..(119): Pfam Name: NTF2 PFAM Desc: Nuclear transport factor 2
  misc_feature: Homolog of GI Number: 50947933 NR Desc: nuclear transport factor 2
  misc_feature: Homolog of GI Number: 21555203 NR Desc: nuclear transport factor 2
  misc_feature: Homolog of GI Number: 12323001 NR Desc: nuclear transport factor 2
  misc_feature: Homolog of GI Number: 18377444 NR Desc: similar to nuclear transport factor 2
  misc_feature: Homolog of GI Number: 34908774 NR Desc: putative Nuclear transport factor 2
  misc_feature: Homolog of GI Number: 57228672 NR Desc: nuclear transport factor 2
  misc_feature: Homolog of GI Number: 25402667 NR Desc: protein T23J18.22
  misc_feature: Homolog of GI Number: 46226690 NR Desc: similar to NTF2
  misc_feature: Homolog of GI Number: 62651812 NR Desc:  similar to Chain A
  misc_feature: Homolog of GI Number: 51771618 NR Desc: similar to Nuclear transport factor 2
  misc_feature: Useful for delaying flowering time
  misc_feature: Useful for increasing chlorophyll and photosynthetic capacity
  misc_feature: Useful for making ornamental plants with modified leaves
  misc_feature: Useful for making plants with increased biomass and foliage
  misc_feature: Useful for making plants with increased biomass and foliage
  misc_feature: Useful for making plants with increased biomass and foliage
  misc_feature: Useful for making shorter plants
MDPDSVSKAFVQHYYQTFDSNRAALVGLYQDGSMLTFEGEKFGGPAAIAGKLGSLPFQQCQHKIDTVDCQPSGPQGGVLVFVSGTITTGPGEHPLKFSQMFHLLPAGGSFYVQNDMFRLNYG

SEQ ID NO: 8053 - DNA, 516 bp, Zea mays
  misc_feature: Ceres CLONE ID no. 1442990
  misc_feature: Ceres CDNA ID no. 29191293
  CDS (101)..(277): REFERENCED BY SEQ ID NO: 8054
tctttctctttccccttccccaaacctgctgctccgatctcccccaatccaaccaaattcaatccgccgcggaagaatcgatcgacaggcgctcgcgaggatgatctaccgcaactggtccctgctctcctccacggttgtcatctggggcagcgtcggcgccgccggcctcgccgggatcttcctcttcggcggcaaggagaagttccagggctatctttctcgcgaaggcgagaggctgaggcagcaggacagagccatgatgggcaagaactagtgcagagcacggctcactttcgacgtgtcaacatgtgaactagacatgcatgaaacgacgtatctctgtgctgtagaacaaactttctctgcctgccaatggcaccttttgcttccggcccccatgaataatcttgacgcggatgttcattctgtccccccatgaatattctcgacgccgatgtttgctctgccccctttggtagcctgctctttgtcgacttaaaaaaaaaaaaaaaa

SEQ ID NO: 8054 - protein, 58 aa, Zea mays
  misc_feature: Ceres CLONE ID no. 1442990
  misc_feature: Ceres CDNA ID no. 29191293
MIYRNWSLLSSTVVIWGSVGAAGLAGIFLFGGKEKFQGYLSREGERLRQQDRAMMGKN

SEQ ID NO: 8055 - DNA, 641 bp, Zea mays
  misc_feature: Ceres CLONE ID no. 1443563
  misc_feature: Ceres CDNA ID no. 25891072
  CDS (101)..(472): REFERENCED BY SEQ ID NO: 8056
agttataacctaacatcatctctctccctcaaggttcgtcgcccagtttcttcatcaactcagcggctcgtgtcttctttcttctctgctaaagaaagctatggcgtacgcaccaccgatgaagcaaggaaagacaggatttgaggagcctcaagagcagattcacaagattagaatcactctctcctccaagaacgtcaaaaaccttgagaaggtgtgcaccgacttggtccgtggagccaaagacaagagattgagagttaaaggaccagtgaggatgccaaccaaagttcttaagattaccacaagaaaggctccttgtggtgaaggaaccaacacatgggacagatttgagctccgtgtacacaagcgtgtgatcgatctcttcagctccccagatgtggtgaagcagatcacttccatcaccattgagcctggtgttgaggttgaggtcaccattgctgattcttagatgcatctactttaattttcaagttgtctttgaattgcgacggtttatctcttttttttgctacaaagttcagacttcgtctttacttcttaaatatgttaccctttttgttttaattttgttggacatgttatttgctagtggtgttttattaaaaaaaaaaaaaaaa

SEQ ID NO: 8056 - protein, 117 aa, Zea mays
  misc_feature: Ceres CLONE ID no. 1443563
  misc_feature: Ceres CDNA ID no. 25891072
  misc_feature: The plant flowers significantly late compared to wild-type.
  misc_feature: The plant is abnormally large.
  misc_feature: null
  misc_feature: Useful for making plants with modulated biomass
  misc_feature: Useful for making plants with modulated flowering time
  misc_feature: Useful for making plants with modulated phosphate use efficiency
  misc_feature (17)..(112): Pfam Name: Ribosomal_S10 PFAM Desc: Ribosomal protein S10p/S20e
  misc_feature: Homolog of GI Number: 21281054 NR Desc: putative 40S ribsomomal protein
  misc_feature: Homolog of GI Number: 23198348 NR Desc: 40S ribosomal protein S20
  misc_feature: Homolog of GI Number: 21617905 NR Desc: 40S ribosomal protein S20
  misc_feature: Homolog of GI Number: 55775376 NR Desc: 40S subunit ribosomal protein
  misc_feature: Homolog of GI Number: 31430421 NR Desc: putative ribosomal protein S10p/S20e
  misc_feature: Homolog of GI Number: 50933555 NR Desc: 40S ribosomal protein S20
  misc_feature: Homolog of GI Number: 54208698 NR Desc: ribosomal protein S10p/S20e
  misc_feature: Homolog of GI Number: 55630698 NR Desc:  similar to 40S ribosomal protein S20
  misc_feature: Homolog of GI Number: 20805825 NR Desc: ribosomal protein S20
  misc_feature: Homolog of GI Number: 56789370 NR Desc: Ribosomal protein S20
  misc_feature: Useful for making shorter plants
  misc_feature: Useful for sterility
  misc_feature: Useful for sterility
MKQGKTGFEEPQEQIHKIRITLSSKNVKNLEKVCTDLVRGAKDKRLRVKGPVRMPTKVLKITTRKAPCGEGTNTWDRFELRVHKRVIDLFSSPDVVKQITSITIEPGVEVEVTIADS

SEQ ID NO: 8057 - DNA, 582 bp, Zea mays
  misc_feature: Ceres CLONE ID no. 1443573
  misc_feature: Ceres CDNA ID no. 25445880
  CDS (131)..(349): REFERENCED BY SEQ ID NO: 8058
ataccgaatcctagcccagctgttccgccgagcgaacgacccacaaccagaagccacccattggcgtacgcgaggcgatcggagcatcccgtcccaagaggagaaactccggccggcgacgcgggggaaaatggggaagacgccggtgcggatgaaggcggtggtgtacgcgctgtcgcccttccagcagaaggtgatgccggggctgtggaaggacatcaccaccaagatccaccacaaggtcaccgagaactggatctccgccacgctcctcctcacccccgtcgtcggcacctaccaatacgccatgtggtacaaagagcaggagaagctttcccacagatactaaatgggatgtcctccaagttgctgcggcttgtcgcagttgaattttccatgatgggttgtataatctgtcaatgtcatttctttgctcagttttagttcaacccattttcacctttccatatgcatatacggtatctgtgcctggcaaacatattttgaggctagctaaatatgaaccttttgtctcttaagttgttaaataaagcaaattatctgacaaaaaaaaaaaaaaaa

SEQ ID NO: 8058 - protein, 72 aa, Zea mays; identical to SEQ ID NO: 4918
  misc_feature: Ceres CLONE ID no. 1443573
  misc_feature: Ceres CDNA ID no. 25445880
  misc_feature: Homolog of GI Number: 34898476 NR Desc: EST AU082567
  misc_feature: Homolog of GI Number: 32400883 NR Desc: cytochrome reductase
  misc_feature: Homolog of GI Number: 6630544 NR Desc: putative ubiquinol
  misc_feature: Homolog of GI Number: 34365575 NR Desc: At5g05370
  misc_feature: Homolog of GI Number: 633687 NR Desc: ubiquinol

SEQ ID NO: 8059 - DNA, 1151 bp, Zea mays
  misc_feature: Ceres CLONE ID no. 1443577
  misc_feature: Ceres CDNA ID no. 29191732
  CDS (67)..(849): REFERENCED BY SEQ ID NO: 8060
acagactcattcattgatcctctcggcgataaacatcagatctcagatctccgaaagagaaaagaaatggcggtttccgcgcgtgaggagtacgtgtacatggccaagctcgcggagcaagccgagcgctacgaggagatggtggagttcatggagaaagtctccgcggccgtcgacggcgacgagctcaccgtcgaggagcgaaacctcctctccgtggcgtacaagaacgtgatcggcgcccggcgcgcctcgtggcgaatcatctcctcgatcgagcagaaggaggagagccgcggcaacgacgaccacgtcaaggcgatccgagactacagggggaagatcgagacggagctctcggggatctgcgacgggatcctcaagctgcttgacgataggctcgtccccgccgctggttccggtgattcgaaggtgttttacctgaagatgaagggggattaccataggtacttggcggagtttaagactggtcaggagaggaaagacgccgctgagaatactctctctgcttacaaggctgctcaggatattgcaaatgcagagctagctccaactcacccgatccgtctcggtctggcgttgaacttctctgtgttctactacgagatccttaactctcctgatcgtgcctgcagcctcgccaaacaggcttttgatgaagcgatagcagagttggacactctaggtgaagagtcgtacaaagacagcaccttgatcatgcagcttctccgtgacaacctcactctctggacatccgacatgcaggatgatgatgctggggaggagatcaaggaagcatcagctccaaagccgactgaggaacagtagtaacaatctttttgattgaactgctaagtttctaggggtttgtttcgtctatatgtttccttaagatgtcgttcgttcgcttgccaaattagctttatctccaaaaggcttttttttattcattcatcatatttctggcgggtcgaaccatcaatcatctttttatctctttgcttgattttttttttctttttttgttctgtctttctttttttttgtttgtgtttatccatttcaatgtccgctataaacctgctttgtgttgtcttatcaatttgaagatcataaaaaaaaaaaaaaaa

SEQ ID NO: 8060 - protein, 260 aa, Zea mays
  misc_feature: Ceres CLONE ID no. 1443577
  misc_feature: Ceres CDNA ID no. 29191732
  misc_feature: Useful for making plants with modulated growth and phenotype characteristics
  misc_feature: null
  misc_feature: The sequence is a functional homolog of  SEQ ID NO 1777 in the  11/479,226 US patent application
  misc_feature: The sequence is a functional homolog of  SEQ ID NO 2350 in the  10/374,780 US patent application
  misc_feature: The sequence is a functional homolog of  SEQ ID NO 342 in the  10/412,699 US patent application
  misc_feature: The sequence is a functional homolog of  SEQ ID NO 344 in the  10/412,699 US patent application
  misc_feature: The sequence is a functional homolog of  SEQ ID NO 782 in the  11/479,226 US patent application
  misc_feature: The sequence is a functional homolog of  SEQ ID NO 786 in the  11/479,226 US patent application
  misc_feature: The sequence is a functional homolog of  SEQ ID NO 789 in the  11/479,226 US patent application
  misc_feature: The sequence is a functional homolog of  SEQ ID NO 790 in the  10/225,066 US patent application
  misc_feature: The sequence is a functional homolog of  SEQ ID NO 797 in the  11/479,226 US patent application
  misc_feature: The sequence is a functional homolog of  SEQ ID NO 801 in the  11/479,226 US patent application
  misc_feature: The sequence is a functional homolog of  SEQ ID NO 805 in the  11/479,226 US patent application
  misc_feature: Useful for making plants with modulated drought sensitivity
  misc_feature (6)..(243): Pfam Name: 14 PFAM Desc: 14
  misc_feature: Homolog of GI Number: 13447104 NR Desc: GF14 omega
  misc_feature: Homolog of GI Number: 21618266 NR Desc: 14
  misc_feature: Homolog of GI Number: 487791 NR Desc: GF14omega isoform
  misc_feature: Homolog of GI Number: 21536593 NR Desc: 14
  misc_feature: Homolog of GI Number: 16974511 NR Desc: At1g35160/T32G9_30
  misc_feature: Homolog of GI Number: 47558857 NR Desc: 14
  misc_feature: Homolog of GI Number: 21554273 NR Desc: 14
  misc_feature: Homolog of GI Number: 8099063 NR Desc: 14
  misc_feature: Homolog of GI Number: 20340229 NR Desc: 14
  misc_feature: Homolog of GI Number: 1256534 NR Desc: GF14 chi chain
MAVSAREEYVYMAKLAEQAERYEEMVEFMEKVSAAVDGDELTVEERNLLSVAYKNVIGARRASWRIISSIEQKEESRGNDDHVKAIRDYRGKIETELSGICDGILKLLDDRLVPAAGSGDSKVFYLKMKGDYHRYLAEFKTGQERKDAAENTLSAYKAAQDIANAELAPTHPIRLGLALNFSVFYYEILNSPDRACSLAKQAFDEAIAELDTLGEESYKDSTLIMQLLRDNLTLWTSDMQDDDAGEEIKEASAPKPTEEQ

SEQ ID NO: 8061 - DNA, 668 bp, Zea mays
  misc_feature: Ceres CLONE ID no. 1443609
  misc_feature: Ceres CDNA ID no. 29191455
  CDS (56)..(382): REFERENCED BY SEQ ID NO: 8062
aaaagagaatctgggggtggagaggagagacggaagatagattgaataatatcaaatggcgacatcgaggcttcaagctctgtggaatcaccctgccggacctaaaaccattcatttctgggcgccaacgttcaagtggggaatcagcattgctaacattgcagactttgctaaacctactgacaaaatttcataccctcaacaaattgctgttacatgcactggagttatctggtctcgctacagcatggttatcactcccaaaaactggaacctctttagcgtcaatgttgctatggctgggactggcatgtaccagcttgctcgtaaaatcaaaaacgattttgcatctgatgtggagcctgttgttgctaaagaatgattacgacgaaaaaacaagaagatgaaaacatcaaaggaaagatgggatatcatcatcatcatcatattgcttgtgtttgaaaatctagtttcaagatatttgatttttccttttcatttccggatcttatgggtctgattacaaaataagtgtccttttaatacccagaatgctcctctctgtctttgatgcggtatctatgggaactttgtgtcagtgagctcctcctgcggctgtgataagaaccttttaagctcttcttccctttctaaaaaaaaaaaaaaaa

SEQ ID NO: 8062 - protein, 108 aa, Zea mays
  misc_feature: Ceres CLONE ID no. 1443609
  misc_feature: Ceres CDNA ID no. 29191455
  misc_feature: The plant flowers significantly late compared to wild-type.
  misc_feature: Useful for making plants with modulated flowering time
  misc_feature (1)..(91): Pfam Name: UPF0041 PFAM Desc: Uncharacterised protein family
  misc_feature: Homolog of GI Number: 21593026 NR Desc: light induced protein like
  misc_feature: Homolog of GI Number: 50944531 NR Desc: light induced protein like
  misc_feature: Homolog of GI Number: 50936751 NR Desc: light induced protein like protein
  misc_feature: Homolog of GI Number: 32401369 NR Desc: probable light
  misc_feature: Homolog of GI Number: 7268175 NR Desc: light induced protein like
  misc_feature: Homolog of GI Number: 29841291 NR Desc: similar to XM_082517 CG9399 gene product in Drosophila melanogaster
  misc_feature: Homolog of GI Number: 66504665 NR Desc:  similar to GA21761
  misc_feature: Homolog of GI Number: 65303572 NR Desc: wd40
  misc_feature: Homolog of GI Number: 54639317 NR Desc: GA14151
  misc_feature: Homolog of GI Number: 50729785 NR Desc:  similar to Brain protein 44
MATSRLQALWNHPAGPKTIHFWAPTFKWGISIANIADFAKPTDKISYPQQIAVTCTGVIWSRYSMVITPKNWNLFSVNVAMAGTGMYQLARKIKNDFASDVEPVVAKE

SEQ ID NO: 8063 - DNA, 928 bp, Zea mays
  misc_feature: Ceres CLONE ID no. 1443655
  misc_feature: Ceres CDNA ID no. 40351841
  CDS (76)..(726): REFERENCED BY SEQ ID NO: 8064
ctcttcgttactccctctctctggaccgccgccgccgcctcgccaaaatccggcgtcaactgatcggcggcagccatgagtaagctccaaagtgacgctgttaaggatgccatcacccagattgttggggaggcgagagaaaagaagctcaagttcactgagactgtggagcttcagatcggtctcaaaaactacgacccacaaaaggacaaacgtttcagcggctcagtgaagctgccccatatcccccgcccaaagatgagggtgtgcatgcttggtgatgcccagcatgtcgaccaggctgagaaaatgggacttgactacatggatgttgaaagtctcaagaagatgaacaagaacaagaagcttgttaagaagctagccaagaagtaccatgctttcttggcatcagaggccataatcaagcagatccctcgtctccttggccctggtcttaacaaggcaggcaagtttcccactctggttagtcaccaggaatctcttgaagccaaggtcaacgagacaaaagctacagtcaagttccagctaaagaaggttctttgcatgggtgttgctgtgggcaacttgttgatggacgagaagcagatccaacaaaacatccaaatgagtgtcaacttccttgtgtccctcctgaagaagaattggcagaatgtgaggtgcctgtacgtgaagagcaccatggggaagcgtgtacgggtgttctaagtgtgtgcgctccagtgaagttgataagataccgggctttcctgccgacccctgcttgtctttggattagatctgtttcactgataccaattttgtgtttgcctaagcgaatatcaacaagtatttaatcgtactagtcttatcttgaacagaaatcatgggagcaatggaactgcattttctgtcaaaaaaaaaaaaaaaa

SEQ ID NO: 8064 - protein, 216 aa, Zea mays
  misc_feature: Ceres CLONE ID no. 1443655
  misc_feature: Ceres CDNA ID no. 40351841
  misc_feature (9)..(212): Pfam Name: Ribosomal_L1 PFAM Desc: Ribosomal protein L1p/L10e family
MSKLQSDAVKDAITQIVGEAREKKLKFTETVELQIGLKNYDPQKDKRFSGSVKLPHIPRPKMRVCMLGDAQHVDQAEKMGLDYMDVESLKKMNKNKKLVKKLAKKYHAFLASEAIIKQIPRLLGPGLNKAGKFPTLVSHQESLEAKVNETKATVKFQLKKVLCMGVAVGNLLMDEKQIQQNIQMSVNFLVSLLKKNWQNVRCLYVKSTMGKRVRVF

SEQ ID NO: 8065 - DNA, 625 bp, Zea mays
  misc_feature: Ceres CLONE ID no. 1443706
  misc_feature: Ceres CDNA ID no. 25446115
  CDS (118)..(393): REFERENCED BY SEQ ID NO: 8066
atatagtcgaactctatagatacatcgccttgacgctccatccttgcacaaacgcaactacgagagagaaggacaaggaaaaaaacaggggacaagatcgagtgagaaagaggagatatggcgtccataataacaggagatttcgcggaggcctacgtacggaagaacgcctgcgaagaggagacgaggaaggcagaagcaagcaccgccggcggggtggcggcggcggcgacaccaggagacaagaaggccgacgctagtgcatcatccgagaagaaagtggccaaagaggctgcagctggtagcaacaagggagaaggaggcagtctcttcgggctgctgaagaagaaggttcaccccaaagtcggtggaagttcaggagcttattcttgacctcctgtatgcatctgcgcgtggctacaagcatgctgcatgcatgcaagaaatttcagaattttacccgtgtccatcttgaagtggtttcagttcagatttttggcctttttcgttactttccctttcatcctccttgaataagatgtacctgtttgtttgataaagaggtggaagtaaaatgtttaggggaaaggaaacgaagcagttcttttcaaaaaaaaaaaaaaaa

SEQ ID NO: 8066 - protein, 91 aa, Zea mays
  misc_feature: Ceres CLONE ID no. 1443706
  misc_feature: Ceres CDNA ID no. 25446115
  misc_feature: Homolog of GI Number: 50924754 NR Desc: OSJNBa0036B21.9
MASIITGDFAEAYVRKNACEEETRKAEASTAGGVAAAATPGDKKADASASSEKKVAKEAAAGSNKGEGGSLFGLLKKKVHPKVGGSSGAYS

SEQ ID NO: 8067 - DNA, 809 bp, Zea mays; identical to SEQ ID NO: 4723
  misc_feature: Ceres CLONE ID no. 1443727
  misc_feature: Ceres CDNA ID no. 25445493
  CDS (186)..(566): REFERENCED BY SEQ ID NO: 8068

SEQ ID NO: 8068 - protein, 126 aa, Zea mays; identical to SEQ ID NO: 4724
  misc_feature: Ceres CLONE ID no. 1443727
  misc_feature: Ceres CDNA ID no. 25445493
  misc_feature (16)..(120): Pfam Name: KE2 PFAM Desc: KE2 family protein
  misc_feature: Homolog of GI Number: 13446646 NR Desc: VIP3 protein
  misc_feature: Homolog of GI Number: 13446644 NR Desc: VIP3 protein
  misc_feature: Homolog of GI Number: 6996146 NR Desc: VIP3 protein
  misc_feature: Homolog of GI Number: 28466891 NR Desc: At1g08780
  misc_feature: Homolog of GI Number: 9802572 NR Desc: F22O13.27
  misc_feature: Homolog of GI Number: 21554096 NR Desc: probable prefoldin subunit 4
  misc_feature: Homolog of GI Number: 45198557 NR Desc: AFR039Cp
  misc_feature: Homolog of GI Number: 62660893 NR Desc:  similar to prefoldin 4
  misc_feature: Homolog of GI Number: 48103768 NR Desc: similar to CG8378

SEQ ID NO: 8069 - DNA, 592 bp, Zea mays
  misc_feature: Ceres CLONE ID no. 1443736
  misc_feature: Ceres CDNA ID no. 29191294
  CDS (98)..(343): REFERENCED BY SEQ ID NO: 8070
acaccccaagcacaccagcctcctcactcctcacagtcgcagcatcctctcagtcctcaccttcctcccctcgccaccacccaccaaggaaaggaggatgtcttgctgcggcggcaactgcggatgcggcgccggctgcaagtgcggcaacggctgcggcgggtgcaagatgttccccgacgttgaggccaccgccggcgccgccgccatggtcatgcccaccgcctcccacaaggggagctccggcgggttcgagacggccggcggggagaccggcggctgcgactgcaccacctgcaagtgcggcacggcctgcggctgctcctgctgcagctgcaactgagccggcgcccaggaggccggccggcgaggcgagcacgaggatgaggaggacaactggacaagcaaccaccaccaccaccaccaccatcactagccgctgcatgcgcccgcccgcgcgcgcgctgaataaaataaaaccgtcgtgtgttccttaactctgtacctgtacgcccgtgttttccaccagcagtgtccttgctcatgcctccaactctaatacatggcgcctcctccaaaaaaaaaaaaaaaa

SEQ ID NO: 8070 - protein, 81 aa, Zea mays
  misc_feature: Ceres CLONE ID no. 1443736
  misc_feature: Ceres CDNA ID no. 29191294
  misc_feature (1)..(80): Pfam Name: Metallothio_2 PFAM Desc: Metallothionein
  misc_feature: Homolog of GI Number: 296594 NR Desc: pZE40
  misc_feature: Homolog of GI Number: 234815 NR Desc: B22EL8
  misc_feature: Homolog of GI Number: 52353641 NR Desc: putative type
  misc_feature: Homolog of GI Number: 53148401 NR Desc: metallothionein
  misc_feature: Homolog of GI Number: 23954355 NR Desc: metallothioneine type2
  misc_feature: Homolog of GI Number: 53748919 NR Desc: metallothionein
  misc_feature: Homolog of GI Number: 53748899 NR Desc: metallothionein
  misc_feature: Homolog of GI Number: 57899923 NR Desc: metallothionein
  misc_feature: Homolog of GI Number: 53748911 NR Desc: metallothionein
  misc_feature: Homolog of GI Number: 2407285 NR Desc: metallothionein
MSCCGGNCGCGAGCKCGNGCGGCKMFPDVEATAGAAAMVMPTASHKGSSGGFETAGGETGGCDCTTCKCGTACGCSCCSCN

SEQ ID NO: 8071 - DNA, 739 bp, Zea mays
  misc_feature: Ceres CLONE ID no. 1443747
  misc_feature: Ceres CDNA ID no. 25445861
  CDS (121)..(516): REFERENCED BY SEQ ID NO: 8072
atcgctctcggggttggcttctcctccccttccggttcgggttctggttcggttctggtccgagagtagctagcctagtctagggtttccgtagagaggaagggagagggagatccatccatggcggagacggagtaccgctgcttcgtgggcggcctcgcctgggccaccgacgacaacaacctccagcaggccttcagccagtacggcgagatcctcgacgccaagatcatcaacgaccgcgagacggggaggtcccgcgggttcggcttcgtcacgttcggcagccgacctccgccgtccaccatgccgaagcagatccacgagatcaaggacttcctcctgacggcgcggcggaaggacgcgcggtcggtgcggatcaagaggaccaaggacgccgtcaagttcaaggtgcgctgctccaggtacctctacaccctctgcgtccacgacaccgacaaggccaacaagctcaagcagtccctccccccaggtttgaacgtccaggaggtttaagaagcatcaagccagatcatgcctttaccagtagtgcgaatgttggatttagcagcgtctgtgttcagtaaacgagtttattctgagtatgtactagactgagatgtaatgttgggacctgtgaggattttgtgttatttcacttgctgaagaatggagatatgttactcccttatatcctatataaattgattggattgcacaccgaaaaaaaaaaaaaaaa

SEQ ID NO: 8072 - protein, 69 aa, Zea mays
  misc_feature: Ceres CLONE ID no. 1443747
  misc_feature: Ceres CDNA ID no. 25445861
  misc_feature (2)..(69): Pfam Name: Ribosomal_L38e PFAM Desc: Ribosomal L38e protein family
  misc_feature: Homolog of GI Number: 50931949 NR Desc: putative 60S ribosomal protein L38
  misc_feature: Homolog of GI Number: 50938225 NR Desc: putative 60S ribosomal protein L38
  misc_feature: Homolog of GI Number: 23507773 NR Desc: At3g59540/T16L24_90
  misc_feature: Homolog of GI Number: 974605 NR Desc: single
  misc_feature: Homolog of GI Number: 313027 NR Desc: ribosomal protein L38
  misc_feature: Homolog of GI Number: 728594 NR Desc: glycine rich protein
  misc_feature: Homolog of GI Number: 27497793 NR Desc: 60S ribosomal protein L38
  misc_feature: Homolog of GI Number: 15825507 NR Desc: ribosomal protein L38
  misc_feature: Homolog of GI Number: 7489588 NR Desc: ribosomal protein homolog
  misc_feature: Homolog of GI Number: 62647069 NR Desc:  similar to 60S ribosomal protein L38
MPKQIHEIKDFLLTARRKDARSVRIKRTKDAVKFKVRCSRYLYTLCVHDTDKANKLKQSLPPGLNVQEV

SEQ ID NO: 8073 - DNA, 512 bp, Zea mays
  misc_feature: Ceres CLONE ID no. 1443780
  misc_feature: Ceres CDNA ID no. 40041409
  CDS (94)..(267): REFERENCED BY SEQ ID NO: 8074
ctaattcattttctctcccacttagccgcacttctccaaaaaaaaaaaaaaacgggccgccaggagtggagcagcgcactgcgcgctgcatgcatgcttctcctttttctctgtttgcctacgcatagcatggttctgctcttttcgcatgcgtgttgcatgcacgcttcttctctctgtttctgtttctgttttttttttctttctaccatcttgccgcatggacattgctgcatgcacttggctgcatggccatctctgtcatgattttctcccttttttttattattcgatccccactgcacgtgatgtatgcttgtaagaaatgaataatatgtaatgggaatcgagatttggagggttttgaagcatggatctgattattcgagcttttctgtgatgttattttggtcctgaggctctatggatgcgtgaacagtgctctgcacacttgatctgatttctatacatgttttctgatcacaaatttgaacccaaaaaaaaaaaaaaaa

SEQ ID NO: 8074 - protein, 57 aa, Zea mays
  misc_feature: Ceres CLONE ID no. 1443780
  misc_feature: Ceres CDNA ID no. 40041409
MLLLFLCLPTHSMVLLFSHACCMHASSLCFCFCFFFLSTILPHGHCCMHLAAWPSLS

SEQ ID NO: 8075 - DNA, 837 bp, Zea mays
  misc_feature: Ceres CLONE ID no. 1443834
  misc_feature: Ceres CDNA ID no. 29191456
  CDS (158)..(616): REFERENCED BY SEQ ID NO: 8076
gttttcaccccatttcgtccggccgtctaattcgttggccggcccgttctgttcgtggaagcgctcggatctgctctgtatatgcttgttctcgttcggttttgccggtcggagttgtctcgcgaggcgtagcttgagggagttttgagaagctcaaatggctcctaaagccgctcctgccaagaagggtgatgccaaggcccaggccttgaaggtggccaaggctgtgaagtctggggcaggcaagaagaagaccaagaagattcgcacatctgtaacatttcaccagcccaagaccctgaagaaggccagggacccgaagtacccaagaatcagcactactggaagaaacaagcttgatcagtaccaaattctcaagtaccccctcaccacagaatctgcaatgaagaagattgaagataacaacactctggtctttattgttgacctcaaggcagacaagaaaaagatcaaggctgcggtcaagaagatgtatgacattcaagcaaagaaggtcaacaccctgatcaggcctgatgggaagaagaaggcttatgtgaaactgacacccgactacgatgcccttgatgtggccaacaaaattggcatcatctaagttaataggcaactggattcgacatctgtgtcctactagttctgagcataccaacagatttttctatgttactagtaattttgtttgtcatatttggtttttttgcaactaagtcttgttcgcagttgcagactacatatgcctgtattgagatcctggttgccaaattaaccatcttgaactggcattattccactttacgtataaaaaaaaaaaaaaaa

SEQ ID NO: 8076 - protein, 152 aa, Zea mays
  misc_feature: Ceres CLONE ID no. 1443834
  misc_feature: Ceres CDNA ID no. 29191456
  misc_feature (11)..(64): Pfam Name: Ribosomal_L23eN PFAM Desc: Ribosomal protein L23
  misc_feature (70)..(149): Pfam Name: Ribosomal_L23 PFAM Desc: Ribosomal protein L23
  misc_feature: Homolog of GI Number: 70663909 NR Desc: OSJNBa0029H02.21
  misc_feature: Homolog of GI Number: 50926169 NR Desc: OSJNBa0029H02.16
  misc_feature: Homolog of GI Number: 34895146 NR Desc: putative 60S ribosomal protein L23A
  misc_feature: Homolog of GI Number: 2641201 NR Desc: ribosomal protein L23a
  misc_feature: Homolog of GI Number: 1084424 NR Desc: ribosomal protein L23a
  misc_feature: Homolog of GI Number: 76573339 NR Desc: ribosomal protein L25
  misc_feature: Homolog of GI Number: 7340791 NR Desc: ribosomal protein L23
  misc_feature: Homolog of GI Number: 7711063 NR Desc: ribosomal protein L23
  misc_feature: Homolog of GI Number: 13560777 NR Desc: ribosome protein L23a
  misc_feature: Useful for making bigger plants
  misc_feature: Useful for making plants with increased biomass and foliage
  misc_feature: Useful for sterility
MAPKAAPAKKGDAKAQALKVAKAVKSGAGKKKTKKIRTSVTFHQPKTLKKARDPKYPRISTTGRNKLDQYQILKYPLTTESAMKKIEDNNTLVFIVDLKADKKKIKAAVKKMYDIQAKKVNTLIRPDGKKKAYVKLTPDYDALDVANKIGII

SEQ ID NO: 8077 - DNA, 1008 bp, Zea mays
  misc_feature: Ceres CLONE ID no. 1443869
  misc_feature: Ceres CDNA ID no. 36706853
  CDS (281)..(727): REFERENCED BY SEQ ID NO: 8078
tgaaccctcagccttctccgtcccgcctcggcactcgacggccgccggcacacaccgcgcagtctcgagacaggtaacccgctcccctctccgctgaactcctctcccaacaaggggccagcctcacccccaacgcccatctaagccaagtgcacggtgctgctagatcccgatctcgttctgccaaccgccgagggagggttgcgctcgccggatcccgcccgagtcacgtgcggctttgattcgctgcacctgtcgtgcaggaaccggaggaacgaggatggaggatgactcgccgctgacgaagacgatgaagggtgcggtgacaggactcgccgcggggaccatctggggcaccgtcgtcgccacctggtacgacgtgccccgtgtggagcgccacgtcgcgctccctggccttatccggacgctcaagatgtgcggcacctacggggccaccttcgccaccatcgggggcctctacatcggcgtcgagcagctcgtgcagagccagcgcaagaagcgcgacttcgtcaacggggccgtcggcgcgttcgttgccggagcctctgtctgcggctacagaggaaagagtattcagtcagccctcatcggaggctcctgtctggctttcacatctgctgtgctggacattggcggcaatacgaccagagttgacaacggcaaagagtactatgcctacacaactgagaagaagcctgcaaattgattccaagtctgcacttctagcaaacaatcttgcacgccatcaactcagtgaatttgaagctgatgtgcagttttatgtttgttttgctgatgcaattagttcttaagcaaatccatggcaacttgtttatcgctgatgcttgagggatggaaatgacactcagaataaatctttgatttgctttcttgtgatcgttgatcacattaaacgcagtggcgcgatatactgtgtaattgtctattttcccgtagtaagtattgataggaaaaaaaaaaaaaaaa

SEQ ID NO: 8078 - protein, 148 aa, Zea mays; identical to SEQ ID NO: 7048
  misc_feature: Ceres CLONE ID no. 1443869
  misc_feature: Ceres CDNA ID no. 36706853
  misc_feature (2)..(129): Pfam Name: Tim17 PFAM Desc: Tim17/Tim22/Tim23 family
  misc_feature: Homolog of GI Number: 79324885 NR Desc: protein translocase/ protein transporter

SEQ ID NO: 8079 - DNA, 675 bp, Zea mays
  misc_feature: Ceres CLONE ID no. 1443978
  misc_feature: Ceres CDNA ID no. 25445706
  CDS (91)..(405): REFERENCED BY SEQ ID NO: 8080
acagttcatccctctcgacgcgccgccgccgtctcgccgctgcccacccagtttcgtccgtatgcagattgacggctccaattggcgcccatggcggaagaaaccaacataaaaaaggaggaagaggagttcagcaccggtcctctctcggtgctcatgatgagcgtcaagaataatacccaggttcttatcaactgccggaacaacaagaagttgcttggtcgcgtgcgagccttcgatcggcactgcaacatggttcttgagaacgttcgtgagatgtggaccgaggtaccgaagaccggtaaaggcaagaagaaggctctcccggtgaacaaggacaggttcataagcaagatgttcctccgcggggattcggtcatcatcgtcctcaggaacccgaaatgagtaccctgtacacgtagagagtctgtttgctagcagtacgttgtgctattgggtgtaaggtgtatgccaaatgctcaaagcatgggagtgtaagtcgcggcagaattcgctatgtgtgttgatggtgggggattcagcttaaggcaggatgctagggctggattttgcttcttgtagcagacttgaacaggatgcttctttgatgtatcgacagaccccactgcttgaatcaccggttccgatccgtgtatcgcaaaaaaaaaaaaaaaa

SEQ ID NO: 8080 - protein, 104 aa, Zea mays
  misc_feature: Ceres CLONE ID no. 1443978
  misc_feature: Ceres CDNA ID no. 25445706
  misc_feature (22)..(101): Pfam Name: LSM PFAM Desc: LSM domain
  misc_feature: Homolog of GI Number: 54291778 NR Desc: putative small nuclear ribonucleoprotein D2
  misc_feature: Homolog of GI Number: 28466881 NR Desc: At2g47640
  misc_feature: Homolog of GI Number: 20197310 NR Desc: putative small nuclear ribonucleoprotein D2
  misc_feature: Homolog of GI Number: 21592784 NR Desc: small nuclear ribonucleoprotein
  misc_feature: Homolog of GI Number: 66500455 NR Desc:  similar to CG1249
  misc_feature: Homolog of GI Number: 50417589 NR Desc: MGC89748 protein
  misc_feature: Homolog of GI Number: 60834798 NR Desc: small nuclear ribonucleoprotein D2 polypeptide
  misc_feature: Homolog of GI Number: 31230450 NR Desc: ENSANGP00000002741
  misc_feature: Useful for making shorter plants
  misc_feature: Useful for making stronger plants
MAEETNIKKEEEEFSTGPLSVLMMSVKNNTQVLINCRNNKKLLGRVRAFDRHCNMVLENVREMWTEVPKTGKGKKKALPVNKDRFISKMFLRGDSVIIVLRNPK

SEQ ID NO: 8081 - DNA, 1427 bp, Zea mays
  misc_feature: Ceres CLONE ID no. 1444013
  misc_feature: Ceres CDNA ID no. 40041410
  CDS (62)..(1207): REFERENCED BY SEQ ID NO: 8082
accaccacccaacccgcggccccaaacctctctccccgctttcccggagacagatccagccatgggcgccgcggcgaggagggcgcccgagcaggagcaaagctgcaaggccacggaggacttcgacgccgccaagccgccgcccttccgcatcggcgacgtgcgcgccgccgtgcccgcccactgctggcgcaagagcccactccggtccctctcctacgtcgcccgcgacgtcgccgtcgtggccgcgctggccggggccgcatggtggctcaacagctgggccgtgtggccgctctactgggcagcgcagggcaccatgttctgggcgctcttcgtcctcggccacgactgtggtcacgggagcttctcagacagcgggacgctcaacagcgtcgtcggccacctgctgcacaccttcatccttgtcccatacaacggatggaggatcagccacaggacgcaccatcagaaccatggccacatcgacaaggacgagtcatggcacccgattaccgagaatttgtacaaggagatggagccaagcaccaagaagctacgcttctcactgccatacccgctcctggctttccctgtctacctctggtacagaagcccaggcaagaacggttcgcatttcaacccaagcagcgatttgttcagccccaaggagaggcttgacgtgatcgtatccaccacttgctggttcacgatgatcgcgctgctcattgccatggcgtgtgtgtttgggctggtgcctgtgctcaagctctacggggttccatatgctgtgtttgtgatgtggctcgatttggtgacgtaccttcaccaccatggtcaccaggacctcccttggtatcgcggcgaggaatggagctacctccgtggtggcctgacgaccgtggaccgggactatggatggatcaacaacatccaccatgacattggcactcatgtcatccaccacctcttccctcaaatacctcactaccacctagtagaagcaaccaaggcagcaaggccagtactgggaagatattaccgcgagccagagaagtcaggtccactgccacttcacctcttccatgtcctcctcaggagcttgagagtcgatcacttcgtgagcgatgttggagatgttgtcttctaccaaactgacccaagcttgaatggcgataactggacgaaaaatggcaagcacaagtgatgtaagatggagagatatcatagcctgctggagaaattaccagaacgggcttcctgctaaaatcaaagcatgtcggtctgcaacaacagacaggatgtgttgattggttgatgagattcagaccattcattagaattagcattctccaatcttaccagttttgaatgtggagttatgtaacaaattaatgaaacttcttagaccaaaaaaaaaaaaaaaa

SEQ ID NO: 8082 - protein, 381 aa, Zea mays
  misc_feature: Ceres CLONE ID no. 1444013
  misc_feature: Ceres CDNA ID no. 40041410
  misc_feature (80)..(323): Pfam Name: FA_desaturase PFAM Desc: Fatty acid desaturase
  misc_feature: Homolog of GI Number: 20908084 NR Desc: AT3g11170/F9F8_4
  misc_feature: Homolog of GI Number: 77548260 NR Desc: Fatty acid desaturase
  misc_feature: Homolog of GI Number: 1345970 NR Desc: Omega
  misc_feature: Homolog of GI Number: 51963678 NR Desc: PREDICTED P0034A04.134
  misc_feature: Homolog of GI Number: 45385976 NR Desc: chloroplast omega
  misc_feature: Homolog of GI Number: 45385321 NR Desc: chloroplast omega
  misc_feature: Homolog of GI Number: 7378667 NR Desc: chloroplast omega
  misc_feature: Homolog of GI Number: 46849975 NR Desc: chloroplast omega
  misc_feature: Homolog of GI Number: 699390 NR Desc: delta
  misc_feature: Homolog of GI Number: 2446998 NR Desc: fatty acid desaturase
MGAAARRAPEQEQSCKATEDFDAAKPPPFRIGDVRAAVPAHCWRKSPLRSLSYVARDVAVVAALAGAAWWLNSWAVWPLYWAAQGTMFWALFVLGHDCGHGSFSDSGTLNSVVGHLLHTFILVPYNGWRISHRTHHQNHGHIDKDESWHPITENLYKEMEPSTKKLRFSLPYPLLAFPVYLWYRSPGKNGSHFNPSSDLFSPKERLDVIVSTTCWFTMIALLIAMACVFGLVPVLKLYGVPYAVFVMWLDLVTYLHHHGHQDLPWYRGEEWSYLRGGLTTVDRDYGWINNIHHDIGTHVIHHLFPQIPHYHLVEATKAARPVLGRYYREPEKSGPLPLHLFHVLLRSLRVDHFVSDVGDVVFYQTDPSLNGDNWTKNGKHK

SEQ ID NO: 8083 - DNA, 705 bp, Zea mays
  misc_feature: Ceres CLONE ID no. 1444021
  misc_feature: Ceres CDNA ID no. 25446116
  CDS (111)..(371): REFERENCED BY SEQ ID NO: 8084
ccccggtgtcataaccgggagcgcgaagaggactgactagaaggggagcctccgagggtctggtcttttgtctacggcggtgcaaatctgacgaccgcccgctgccggcgatgggctgctggtgggagcgcctcgtactgccggtgcgcagggcgtggctcggcgtcgcctcccgcttcggtgtgcgccagtccgggctgtggaggctccggcaggaggtgagcacgtgcgagtacgaggacgtgcgcgtgatgtgggagatgctgagccgcaccgcgtccgcgccgccgccgccgccggcaaggcgccacagcaggttccggcagccgcggccgtgggccgacaggctccgcctctgccgggacatctaggctaggaccgtcgaccgggggccgccgcgcgcttgcttgcggcttactgcttggtcttgatgtcctggttaattagcttcttgatctgtattgaccttcccttccatggctctcgatctttttcctctgctactgccactgtatgtatgctgctgcttggggctctgaggtgtactccattcctccccgtgtatccggtcgatctgcatgtagatgggtgatacctctggggtatgtgaatgaacagagctgtttcgttcgaataaaaaaaaaaaaaaaaaaaaaaaaaaaaaaaaaaaaaaaaaaaaaaaaaaaaagaaaaaaaaaaaaaaaa

SEQ ID NO: 8084 - protein, 86 aa, Zea mays
  misc_feature: Ceres CLONE ID no. 1444021
  misc_feature: Ceres CDNA ID no. 25446116
  misc_feature: Homolog of GI Number: 42565375 NR Desc: OSJNBa0011F23.6
MGCWWERLVLPVRRAWLGVASRFGVRQSGLWRLRQEVSTCEYEDVRVMWEMLSRTASAPPPPPARRHSRFRQPRPWADRLRLCRDI

SEQ ID NO: 8085 - DNA, 577 bp, Zea mays
  misc_feature: Ceres CLONE ID no. 1444070
  misc_feature: Ceres CDNA ID no. 29191457
  CDS (101)..(343): REFERENCED BY SEQ ID NO: 8086
acaacccggaaacgcgcaaagcgaaggggggatatctgaaaaaaacgcaaggtaccagcagcgcaaagagccgggtgttggcacagatcaggcggccgccatggcggatcagttcgcggattcggcgaacaacgtgatcatcgaggaggtgaacaagggcctgaacccaggaatggtggttctgctcgtggttgccagcttcctgctgctcttcttcgccgggaactacgcgctgtatgtgtacgcgcagaagacgctcccgcccaagaagaagaagccggtctccaagaagaagctgaagagggaaaagctgaagcagggggtctccgctccaggggagtgaacagacagggatgccgccgatcggcccgtcctgagcccgccccctatttacatgattgtcgaagaaaaaagatacacctgctggagccgcggtgttcgtagtaattttgttctgtagatgccttttgttgtcttcgatggtagtgcatttgtattggacaccttgtttcagcaactgatgaatctttagcctaaaccaagctactcttttgttcctgtaaaaaaaaaaaaaaaa

SEQ ID NO: 8086 - protein, 80 aa, Zea mays; identical to SEQ ID NO: 994
  misc_feature: Ceres CLONE ID no. 1444070
  misc_feature: Ceres CDNA ID no. 29191457
  misc_feature: Useful for making plants with modulated growth and phenotype characteristics
  misc_feature: The sequence is a functional homolog of  SEQ ID NO 1769 in the  11/479,226 US patent application
  misc_feature: The sequence is a functional homolog of  SEQ ID NO 2604 in the  10/374,780 US patent application
  misc_feature: The sequence is a functional homolog of  SEQ ID NO 960 in the  10/225,066 US patent application
  misc_feature (10)..(80): Pfam Name: S1FA PFAM Desc: DNA binding protein S1FA
  misc_feature: Homolog of GI Number: 38347601 NR Desc: OSJNBa0042I15.14
  misc_feature: Homolog of GI Number: 38347600 NR Desc: OSJNBa0042I15.13
  misc_feature: Homolog of GI Number: 1173349 NR Desc: DNA
  misc_feature: Homolog of GI Number: 498705 NR Desc: s1Fa

SEQ ID NO: 8087 - DNA, 1383 bp, Zea mays
  misc_feature: Ceres CLONE ID no. 1444156
  misc_feature: Ceres CDNA ID no. 35383401
  CDS (228)..(1244): REFERENCED BY SEQ ID NO: 8088
agcacagcacgaccccatcggcgtcaccccggcgacttctgcgtcctctgccctccacgctcccccgctctgccaggcttcccagaagatttggttgatttccccccaatccagtgattccatccctgttctccacttccaccggaacctcccagagacttccagaaggctctagcgacccccgccgctttagagctacccgcggcgagattcaggagctgcctgccatggtgaaggacagcgcctactacgatgtcctggggctcagcgtcgacgcgtcccccgccgagatcaagaaggcgtattacattaaggcgaagctggtgcatccggacaagaatcccgggaaccctgacgcggcactcaagttccaggaacttggagaggcttatcaagtcctaagtgatcctgggaaaaaggaggcgtatgataattatggaaaggagggtattccccaggataacatggtggatcctgctgctgtctttgggatgctttttggaagtgactattttgaagattacgttggccagcttgctctagcatctatagcttcagtggaggttgaggaaaactcaaatagtcaagaggcaagagcaaaagttcaagaaaagataaaagaattacaaagagaaagagaacaaaagcttactcagagtctgaaggaccgacttcaatcatatgtagatgggagaaatgatgaatttgtgagctatgcaagcgcagaagctaggcgtttatccgaagcagcatttggcgaggctatgcttcacaccattggttatatttatgtccggcaagcagcaagagatctcgggaaaagtagaatttacatgggtgtaccttttatagctgaatgggttagagacaaaggacaccacattaaatcacaggttaatgctgcttcaggtgctatttctctaatacaacttcaagaagggatgaaaaagatggaggggagtgaggacagcgaggagcaacttatgaagagttttgaggagaaaaaagatgccatgctcagctcgctttggaaaatcaatgtggttgatatcgagtccacgctctcacgtgtctgccaagcagttctgagagatagcatggtctccaaagatgtcctgaagctgcgagccaaagcgttgaaaaagctcggaacgatattccaaggcgcagagtctatgtaccgtcgtgaaaacagcctgcgcgttgaaacgagcacagaccaacaagccgcttcgtcacactgaagccacctgtggaccaccgtgtaggaatggatttggtgttttgtgtgtgtgtgtggctttcttctttgtttgtaattgtgtatgctatattaattttcttgtagaagatgtgaaacatttaacaaaaaaaaaaaaaaaa

SEQ ID NO: 8088 - protein, 338 aa, Zea mays
  misc_feature: Ceres CLONE ID no. 1444156
  misc_feature: Ceres CDNA ID no. 35383401
  misc_feature (6)..(71): Pfam Name: DnaJ PFAM Desc: DnaJ domain
  misc_feature: Homolog of GI Number: 52353433 NR Desc: putative DnaJ protein
  misc_feature: Homolog of GI Number: 4680190 NR Desc: putative dnaJ
  misc_feature: Homolog of GI Number: 20147307 NR Desc: AT4g39150/T22F8_50
  misc_feature: Homolog of GI Number: 62318614 NR Desc: putative DnaJ protein
  misc_feature: Homolog of GI Number: 50947725 NR Desc: DnaJ protein family
  misc_feature: Homolog of GI Number: 6143904 NR Desc: putative DnaJ protein
  misc_feature: Homolog of GI Number: 28950981 NR Desc: At1g76700
  misc_feature: Homolog of GI Number: 30699227 NR Desc: DNAJ heat shock N
  misc_feature: Homolog of GI Number: 2230757 NR Desc: dnaJ
  misc_feature: Homolog of GI Number: 50909427 NR Desc: putative DNA J domain protein
MVKDSAYYDVLGLSVDASPAEIKKAYYIKAKLVHPDKNPGNPDAALKFQELGEAYQVLSDPGKKEAYDNYGKEGIPQDNMVDPAAVFGMLFGSDYFEDYVGQLALASIASVEVEENSNSQEARAKVQEKIKELQREREQKLTQSLKDRLQSYVDGRNDEFVSYASAEARRLSEAAFGEAMLHTIGYIYVRQAARDLGKSRIYMGVPFIAEWVRDKGHHIKSQVNAASGAISLIQLQEGMKKMEGSEDSEEQLMKSFEEKKDAMLSSLWKINVVDIESTLSRVCQAVLRDSMVSKDVLKLRAKALKKLGTIFQGAESMYRRENSLRVETSTDQQAASSH

SEQ ID NO: 8089 - DNA, 898 bp, Zea mays
  misc_feature: Ceres CLONE ID no. 1444158
  misc_feature: Ceres CDNA ID no. 25445862
  CDS (54)..(575): REFERENCED BY SEQ ID NO: 8090
atagatccaattgttccaaaaaaaaaaaaaaaatcccaatatccgcaacggcaatgtctccgctgccccgcatcgtgctcctcgccgtcgccgccgccgccgccgccgccgccgcagcggtcacggcgtcagccacgtcgctcagcggcgcggcgaacgacctactccccaagtacggcctcccgaaggggctcatcccggactccgtcgcctcctacagcttcgacgaggccacgggcgccttcgagatccacctcgccggcacctgctacgtccacttcggctcccacctcgtctactacgagaggaccataaccggcaagctctccaagggcgccatctcggacctctccggcgtccaggccaagaagctcttcctctgggtctacgtcacggggatggtcgcgcaccccgaccagggcaccatcgagttccaggccggcttcatctcggagtcgctatcggcctcgatgtttgacgaggtgcccacctgcggttccagcgttggcgcgcagctgcgcggcgcggctggggtgatcggcgagcttgggctgctccccgttgcacaggcctgaacgtgggtttgagagtccacatacagtcccagagaaccgcaggaccttaccgtctgctgtcgcgtgtcgcgtgagcccagagccctagacagccgtggtgtgttctgcacttctgcttctgcctgtacgtaccagtgtctggttgttgctcccggtgtcaaatggacatggatgatatgtagaaatgtatgtctataatatgctgttactgaacatgcgtaggatgtaggcaaattaagccttcctcagtctcttgtagtcccggactatatcgtgtcatcgtgtgtggaaccatgaacttcccaacaaaaaaaaaaaaaaaa

SEQ ID NO: 8090 - protein, 173 aa, Zea mays
  misc_feature: Ceres CLONE ID no. 1444158
  misc_feature: Ceres CDNA ID no. 25445862
  misc_feature: Homolog of GI Number: 34906900 NR Desc: P0470A12.30
  misc_feature: Homolog of GI Number: 55239156 NR Desc: ENSANGP00000028192
  misc_feature: Homolog of GI Number: 50924540 NR Desc: P0041A24.4
  misc_feature: Homolog of GI Number: 2429362 NR Desc: proline rich protein
  misc_feature: Homolog of GI Number: 11359723 NR Desc: proteophosphoglycan
  misc_feature: Homolog of GI Number: 34872074 NR Desc: similar to Ser/Arg
  misc_feature: Homolog of GI Number: 13592175 NR Desc: ppg3
  misc_feature: Homolog of GI Number: 5420387 NR Desc: proteophosphoglycan
MSPLPRIVLLAVAAAAAAAAAAVTASATSLSGAANDLLPKYGLPKGLIPDSVASYSFDEATGAFEIHLAGTCYVHFGSHLVYYERTITGKLSKGAISDLSGVQAKKLFLWVYVTGMVAHPDQGTIEFQAGFISESLSASMFDEVPTCGSSVGAQLRGAAGVIGELGLLPVAQA

SEQ ID NO: 8091 - DNA, 909 bp, Zea mays
  misc_feature: Ceres CLONE ID no. 1444216
  misc_feature: Ceres CDNA ID no. 29191295
  CDS (1)..(738): REFERENCED BY SEQ ID NO: 8092
acgcttctgattaaggctagctcctcatacctttcttttcctttcttcttcctcctcctccttcgtcttcctctcctctcctctgcgcttcctttcttgctctgggactgggcaacaatgtctcccgtgccgagcccaaatcaatcacaccttctaggccatggatcaaggaaagagaagcgcatgaggaaggtggatacctttgcgccgcacaacgacggccaccaatggaggaagtacggcgagaagaagatcaacaactgcaactttcccaggtactactacagatgcacctacaaagacaacatgaactgcccggccaccaaacagattcagcagaaggatcacagcgaccccccattgtaccaagtcacatactacaacgagcattcatgcaacagcgccttccttgccctcacccccacagagttccagctgcagaccgcatctggaaaggcagtctccatctgctttgattcatccggggctcaggagcccggagccaatgccagctcgccatcttcgagtgcggcgccacgcggcacgccttcagagtgcaagaacaagccccttgcgctgcgttcagaggcgctttcttcctgggcccccggcgttgtggagcaaaagacggcctgtgctgatctccagtcctgcagcaccgagtgccaagatgcatacatttcagaagacatagatgcagggagattcggttctatcagattcttccattttttgtaaatggatcagtggaagacaattgatcttacctcaaagaactaatatgatacacatgttttttccatctacacgcatgctagagcaccagatacttgcatgtgagatgtggccaagattttcttagttcaattgaaatgaaataccactgctaattcaaaaaaaaaaaaaaaa

SEQ ID NO: 8092 - protein, 206 aa, Zea mays
  misc_feature: Ceres CLONE ID no. 1444216
  misc_feature: Ceres CDNA ID no. 29191295
  misc_feature (32)..(95): Pfam Name: WRKY PFAM Desc: WRKY DNA
  misc_feature: Homolog of GI Number: 77552841 NR Desc: DNA
  misc_feature: Homolog of GI Number: 77552842 NR Desc: DNA
  misc_feature: Homolog of GI Number: 46394346 NR Desc: TPA: WRKY transcription factor 46
  misc_feature: Homolog of GI Number: 46394290 NR Desc: TPA: WRKY transcription factor 18
  misc_feature: Homolog of GI Number: 77553498 NR Desc: WRKY DNA binding domain
  misc_feature: Homolog of GI Number: 56201706 NR Desc: WRKY transcription factor 18
  misc_feature: Homolog of GI Number: 77548440 NR Desc: WRKY DNA binding domain
  misc_feature: Homolog of GI Number: 31431184 NR Desc: putative DNA
  misc_feature: Homolog of GI Number: 46394382 NR Desc: TPA: WRKY transcription factor 64
  misc_feature: Homolog of GI Number: 77552845 NR Desc: WRKY DNA binding domain
MSPVPSPNQSHLLGHGSRKEKRMRKVDTFAPHNDGHQWRKYGEKKINNCNFPRYYYRCTYKDNMNCPATKQIQQKDHSDPPLYQVTYYNEHSCNSAFLALTPTEFQLQTASGKAVSICFDSSGAQEPGANASSPSSSAAPRGTPSECKNKPLALRSEALSSWAPGVVEQKTACADLQSCSTECQDAYISEDIDAGRFGSIRFFHFL

SEQ ID NO: 8093 - DNA, 660 bp, Zea mays
  misc_feature: Ceres CLONE ID no. 1444359
  misc_feature: Ceres CDNA ID no. 40351842
  CDS (223)..(513): REFERENCED BY SEQ ID NO: 8094
agaaaaaaaaggttccggtcttcatcccttccatttccaaaggacgacgctctcaccattcacgaacggcgactgcggatcgatcgtgcgtcgtctcctgcgccggcctcccttccagtcaggttcaaacaagggacgatacgcatcggacaagaaatggacatcaaatcctccgagaactaaagtttcactcagatcttcgtcgaccttttgagttgcacaatgtctattttgcaacatatgtcgatgtctgagcacagagctcggaagatgtgcgtatcaaccaataggctgtggctgtgcctgcaagatgccctgaaggacgcgcttcttgaaaagtcagaactgcaaaggtgtatgggcgtggaaggtttgcatccatcggatgtgttggaccagcatgttgtagttttgattcgtgctgcgtgcatcgagccatcaggagatctctgcatcggaatcatatctgcacaaagccgtcggaaagatgcaggattcccactgatattttgaaccatcatccaggaggctaggtattagattttatatatacgtggtctgtattttgattaattaaatcaaatcaatcttatacctggtctgtgttttgtttaattaaatcaaataaatcttaagtttatattaaaaaaaaaaaaaaaa

SEQ ID NO: 8094 - protein, 96 aa, Zea mays
  misc_feature: Ceres CLONE ID no. 1444359
  misc_feature: Ceres CDNA ID no. 40351842
MSILQHMSMSEHRARKMCVSTNRLWLCLQDALKDALLEKSELQRCMGVEGLHPSDVLDQHVVVLIRAACIEPSGDLCIGIISAQSRRKDAGFPLIF

SEQ ID NO: 8095 - DNA, 521 bp, Zea mays
  misc_feature: Ceres CLONE ID no. 1444461
  misc_feature: Ceres CDNA ID no. 36707111
  CDS (74)..(322): REFERENCED BY SEQ ID NO: 8096
attgattgatcggacggacgcgcgtctccggtcccgtccgtaataacactgatccgatccacgccggccggcgatggagctcatcaagtccagggcgaccgtgtgcgcgctcctcctggcgctgctcctgctctcacactacgacggcgggacgacgacgacgatggtggcggaggcccgggtgtgcatgggcaagagccagcaccactcgttcccctgcatctccgaccgcctctgcagcaacgagtgcgtcaaggaggacggcgggtggaccgccggctactgccacctccgctactgcaggtgccagaaggcgtgctaagcaaagctcttgaaacacccttggcttgccagaactgaactgtggtagtactaagtaacacccttggctagctgtgcacaacctacgtaccgtgcatgcatgtaatgtggtgtcatgtaacgtgacagcaataaatattaataacaataataacacggcatgtagcctttgcatgcttctagcaaaaaaaaaaaaaaaa

SEQ ID NO: 8096 - protein, 82 aa, Zea mays; identical to SEQ ID NO: 4784
  misc_feature: Ceres CLONE ID no. 1444461
  misc_feature: Ceres CDNA ID no. 36707111
  misc_feature (36)..(82): Pfam Name: Gamma PFAM Desc: Gamma
  misc_feature: Homolog of GI Number: 2130034 NR Desc: gamma
  misc_feature: Homolog of GI Number: 2501197 NR Desc: Gamma
  misc_feature: Homolog of GI Number: 1173436 NR Desc: Small protein inhibitor of insect alpha
  misc_feature: Homolog of GI Number: 7451437 NR Desc: gamma
  misc_feature: Homolog of GI Number: 7451438 NR Desc: omega
  misc_feature: Homolog of GI Number: 533692 NR Desc: protease inhibitor

SEQ ID NO: 8097 - DNA, 761 bp, Zea mays
  misc_feature: Ceres CLONE ID no. 1444469
  misc_feature: Ceres CDNA ID no. 29191296
  CDS (59)..(607): REFERENCED BY SEQ ID NO: 8098
ctctttcgattccagctttcccttcccggccggagttttctcgcagcccgaatcccaaatggcgtcggagaagaagctatcgaacccaatgagggacatcaaagtgcagaagctggtcctcaacatctccgtcggtgagagtggagatcgtctcaccagagcctccaaggtcttggaacagttgagtggccagactcctgtcttctccaaagcgagatacactgttcgttctttcggtatcagacgtaacgagaagatcgcttgctacgtcaccgtcaggggagacaaggcaatgcaactccttgaaagtggactcaaggttaaagagtatgagctcttgagaaggaactttagcgacactggttgcttcggttttggtattcaggagcacattgatttgggtatcaagtatgatccttcgactggaatctacggtatggacttctatgttgttcttgagcgtcctggttaccgtgtggcgcgtcgcagaagatgcaaggctcgtgttggtatccagcacagagtcaccaaagatgatgccatgaaatggttccaagttaagtacgaaggagtcatcctcaacaagtctcagaatattactggttgaaaccatctgtctcgaacagagatctataaactgtgtttttgtttgtcccctcggtttcgaatcgtgttttgttttgcttttatgttctcttctatacatttgaatatcattattgcctatctacaatgctttcatggcaaaaaaaaaaaaaaaa

SEQ ID NO: 8098 - protein, 182 aa, Zea mays
  misc_feature: Ceres CLONE ID no. 1444469
  misc_feature: Ceres CDNA ID no. 29191296
  misc_feature (66)..(165): Pfam Name: Ribosomal_L5_C PFAM Desc: ribosomal L5P family C
  misc_feature (9)..(62): Pfam Name: Ribosomal_L5 PFAM Desc: Ribosomal protein L5
  misc_feature: Homolog of GI Number: 21542441 NR Desc: 60S ribosomal protein L11
  misc_feature: Homolog of GI Number: 624938 NR Desc: ribosomal protein L16
  misc_feature: Homolog of GI Number: 12642874 NR Desc: putative ribosomal protein L11
  misc_feature: Homolog of GI Number: 550544 NR Desc: ribosomal protein L16
  misc_feature: Homolog of GI Number: 7268667 NR Desc: ribosomal protein L11
  misc_feature: Homolog of GI Number: 24817256 NR Desc: ribosomal protein RL5
  misc_feature: Homolog of GI Number: 47027024 NR Desc: 60S ribosomal protein L11
  misc_feature: Homolog of GI Number: 463252 NR Desc: RL5 ribosomal protein
  misc_feature: Homolog of GI Number: 10799832 NR Desc: ribosomal protein L11
  misc_feature: Homolog of GI Number: 78191444 NR Desc: ribosomal protein L11
MASEKKLSNPMRDIKVQKLVLNISVGESGDRLTRASKVLEQLSGQTPVFSKARYTVRSFGIRRNEKIACYVTVRGDKAMQLLESGLKVKEYELLRRNFSDTGCFGFGIQEHIDLGIKYDPSTGIYGMDFYVVLERPGYRVARRRRCKARVGIQHRVTKDDAMKWFQVKYEGVILNKSQNITG

SEQ ID NO: 8099 - DNA, 910 bp, Zea mays
  misc_feature: Ceres CLONE ID no. 1444480
  misc_feature: Ceres CDNA ID no. 40351843
  CDS (45)..(758): REFERENCED BY SEQ ID NO: 8100
cctcactgcagaaacaccacacgatctgaaaaaaccgacagaacatgtcgtcggggaagcaggagacggcggcggtgcgcgtgctgggcaggtggccgagcccgttcgtgatccgggtgctgatagctcttgggctcaagggcgtggaccacgagctcgtggaggaggcggcgggcaacaagagcgagctgctgctcgcctccaaccccgtgcacaagaagatccccgtgctcctgcaccacggcaggcccgtctccgagtccctcatcatcgtccagtacgtcgacgaggcctgggcctcccaagccccggcgctcatcccgtccgacccctacgcccgcgcggccgagcggttctgggcccagtacgtcgacgacaagtttcctacggcgatccgggtcctgaggggaaggctggacggagacaaggaagaagcggcggctcaggtgtgcgccgctctgcagcacctggaggtggccttcgtcgagtgcggccaagggaaggattacttcggcggcgacggcgtcggttacctggacattgctctcgggtcgcacctcggatgggtcagggcggtagagaggatcgctgaaatcaggctgctcgacgcggccaaggttcctaagctggcggcgtgggcggatcggttctgcgcccacccggcggtggcgaacgccatgcctaacgtggacaggttcgtggagttcagcgtcaagaatgacggcgttctgaaggcggctagtgctaattccaagtgagcgaactgttgtgggcactagacagcgctcgatggcatagccagaataagtaacctgctggctgttggtgtaaaccctcttttattatatggcaattgataaatctcgaatgtttggattttaaaaaaaaaaaaaaaaaaaaaaaaaaaaaa

SEQ ID NO: 8100 - protein, 237 aa, Zea mays
  misc_feature: Ceres CLONE ID no. 1444480
  misc_feature: Ceres CDNA ID no. 40351843
  misc_feature (11)..(82): Pfam Name: GST_N PFAM Desc: Glutathione S
  misc_feature (92)..(206): Pfam Name: GST_C PFAM Desc: Glutathione S
MSSGKQETAAVRVLGRWPSPFVIRVLIALGLKGVDHELVEEAAGNKSELLLASNPVHKKIPVLLHHGRPVSESLIIVQYVDEAWASQAPALIPSDPYARAAERFWAQYVDDKFPTAIRVLRGRLDGDKEEAAAQVCAALQHLEVAFVECGQGKDYFGGDGVGYLDIALGSHLGWVRAVERIAEIRLLDAAKVPKLAAWADRFCAHPAVANAMPNVDRFVEFSVKNDGVLKAASANSK

SEQ ID NO: 8101 - DNA, 636 bp, Zea mays
  misc_feature: Ceres CLONE ID no. 1444517
  misc_feature: Ceres CDNA ID no. 40351844
  CDS (72)..(416): REFERENCED BY SEQ ID NO: 8102
gagccaccgccctcgcgaagcacctcggacacggcgactgccgactgacccggtcagcttgattaggcaatatggttatccctccaccagctagggctcctgcaatcaccaagttcctcaagccgtatattttgaagatgcatttcacaaacagttttgtgagcgctcaggtcatccacacaccgacagccacggtcgcatgctctgcaagctctcaggagaaactcctgaggccaagcatggagtcgacacgggatgttgctgcggctgcaaagattgggaagttgcttggagagcgcttgctgttcaagggtatccctgcagtatctgtctccatgtcaagagaccagaagtaccatggcaaggtcaaggccgtgatagattctctaagaggtgttggtgtgaaattgctgtagggaaaactgactgttttatgagaggttatgttggggcctcatgtttacctccgaagctgcttggcggtccattagtttcgtgactgaattttcttatgggtgctgctgaacaatatcttgaaccatgtaagtccttgttcggttgttcctatacatcatggattggaaaagaaaatatgaaagattttgacttggaatggattgaaaaaaaaaaaaaaaa

SEQ ID NO: 8102 - protein, 114 aa, Zea mays
  misc_feature: Ceres CLONE ID no. 1444517
  misc_feature: Ceres CDNA ID no. 40351844
  misc_feature (24)..(113): Pfam Name: Ribosomal_L18p PFAM Desc: Ribosomal L18p/L5e family
MVIPPPARAPAITKFLKPYILKMHFTNSFVSAQVIHTPTATVACSASSQEKLLRPSMESTRDVAAAAKIGKLLGERLLFKGIPAVSVSMSRDQKYHGKVKAVIDSLRGVGVKLL

SEQ ID NO: 8103 - DNA, 672 bp, Zea mays
  misc_feature: Ceres CLONE ID no. 1444531
  misc_feature: Ceres CDNA ID no. 40351845
  CDS (84)..(218): REFERENCED BY SEQ ID NO: 8104
acaaacctaacgcggagcggcgcgggccggccgccgggcgaggtgcgcgtacctgccgtcgatcgtcgccggatccatccaccatgggcggtggcaacggccagaagtccaagatggcccgcgagcgcaacttggagaagaacaagggggccaaggggagccagctcgagaccaacaagaaggccatgagcatccagatttttttgcagcattgctgacgagaaaggtaaaggtggcaccacagttggggtgcgacggcggtggctggcgaggccagcaggatgtcctactcgatgtcgttgatgcggtagaatctgggtgagagaggcgtgacggggaaaaagatgggaagttggaggatgattatatgatattattttatggcaacaacgagaaagaggagaaaacacttgcgttatgtatacaagagataagacttatcttatctggttggtagttgttaggtgagacgtatgggaaacaagtctacacgcttccacgtggcatatacgatgcaaggcgacccaaatgctatggttgctccaggaggtgagcccatgtgatcctccagccttatacagcccggtagttgagggcttgaggcccatgtcaagcaattgtttttggacatctagcttgaagacaaaggtttcttcaaaaaaaaaaaaaaaa

SEQ ID NO: 8104 - protein, 44 aa, Zea mays
  misc_feature: Ceres CLONE ID no. 1444531
  misc_feature: Ceres CDNA ID no. 40351845
MGGGNGQKSKMARERNLEKNKGAKGSQLETNKKAMSIQIFLQHC

SEQ ID NO: 8105 - DNA, 954 bp, Zea mays
  misc_feature: Ceres CLONE ID no. 1444564
  misc_feature: Ceres CDNA ID no. 40041411
  CDS (219)..(848): REFERENCED BY SEQ ID NO: 8106
aaaacgctcgaagaggggagaggagacagcggtcctatgtccgtgtggtcgtgcggactgcggacttctcttcctcattccatccccgctgccccatccggccatcccacagcgaatctcccaaaccccggctccctcgattcccaatcccacccctgccacgaagagatcagatgacggcgagctgctgctgatcgagtgcagtggaatcggaggcgatgcgggctagccggccggcggtgcaccctgtggaagcggcccctccgccgccggccgcggcggcggaggggccggaggcccaggtggagggtgccgcgcacccgcgcggggtgcggatgaaggatccgcctggggcaccagggacacctgcggggcttggtctacgccttgcgcaggccttcttcgcagccgctgcgctcgccgtcatggcgtccaccaacgacttcccgtccgtctctgccttcagggtggagtttgaaatagaggatgagatagcagatctgctggagatggccttaatatgctaccttgtcgcagcagccattttgcagtgcttgtggagccttttgctagcctttgtcgacatttatgcacttcttgtcaagcgatcgttgagaaatgcccgagctgtatgtatatttactatcggagatgggatcacaggtacaataaccttgggcgcggcatgtgcttcagcaggaatcactgttctcatcggtaatgatctcaacatatgtgcagagaatcactgtgcaagtttcgagaccgccacagcattggcttttataagctggtttgcgctggcgccatcctgtatcttgaatttctggtcgatggcctccagatgataaatataggatgttataaaacatagtatttttgaatggtttctggacaaggtcgctgcttatggtagcagcaaagcaacgcggtgccgtaaaaaaaaaaaaaaaa

SEQ ID NO: 8106 - protein, 209 aa, Zea mays
  misc_feature: Ceres CLONE ID no. 1444564
  misc_feature: Ceres CDNA ID no. 40041411
  misc_feature: Homolog of GI Number: 38604002 NR Desc: At2g37200
MRASRPAVHPVEAAPPPPAAAAEGPEAQVEGAAHPRGVRMKDPPGAPGTPAGLGLRLAQAFFAAAALAVMASTNDFPSVSAFRVEFEIEDEIADLLEMALICYLVAAAILQCLWSLLLAFVDIYALLVKRSLRNARAVCIFTIGDGITGTITLGAACASAGITVLIGNDLNICAENHCASFETATALAFISWFALAPSCILNFWSMASR

SEQ ID NO: 8107 - DNA, 1826 bp, Zea mays
  misc_feature: Ceres CLONE ID no. 1444565
  misc_feature: Ceres CDNA ID no. 25446795
  CDS (92)..(1573): REFERENCED BY SEQ ID NO: 8108
acacccctctgccctcgcactccggcgcgtcactgtgcggtgccttcgtccgctttgttgggtgcggttttgatataatttgggtctgcagatgagtgcggacgcgagcgccgcgatggagaagatccgcgccgcgggtctgctcaagacgcaggggctcatcgccggacagtgggtcgacgcatacgatggcaagaccatcgaggtgcaaaatccagcaactggtgaggtccttgcaaacgtgtcctttatgggcagcagagaaacatctgatgctattgcttctgctcacagtacattctattcttggagtaaactcactgcaagtgagagaggcaaggcactaagaaaatggtacgatctaattatttcacacaaggaagagcttgcacttctcatgacactggagcaggggaaacctatgaaagaagcccttggtgaggtcaattatggtgcaagtttcatagaatattttgcagaggaagcaaagcgcatatatggtgatataattcctccaactttatctgatcgtagattgttggttctgaagcagcctgttggggtagttggagctattacaccatggaattttccattagcaatgataacccgaaaggttggaccagctttggcctgtggctgcactgttgttgtcaagccatcagagttcacacctctgacatcattagctgcagcagatcttgctcttcaagctggaataccagcgggtgcactaaatgttgtgatgggcaatgctcctgagataggtgatgcattactgcagagtacacaggtcagaaagattacgttcactggatcaacagctgttggcaaaaaactgatggctgaatctgcaaatactgtgaaaaaggtctctttggaacttggtgggaatgcaccttgcattgtttttgatgatgcagacattgatgttgctgttaaaggcagtcttgctgccaagttccgtaacagtggacagacatgtgtttgtgcaaacaggatattggtgcaagaaggtatctacgagaagtttgcatctgcattcatcaaggctgttcagagtttgaaggttgggaatgggctagaagagagtacatctcagggtcctctgattaacgaagctgctgttcaaaaggtggagaagttcataaatgacgcgacttcaaagggagcaaatgtcatgctaggtggtaaaagacacagcctggggatgtcattttatgagccaactgtagtagggaatgtcagcaatgatatgcttcttttcagagaagaagtttttggtccagttgcaccccttataccattcaaaactgaggaagaagcagtccatatggccaacgatacaaacgcaggcttagctgcatacatatttaccaagagcatacctcgttcatggcgtgtatccgaatctcttgaatacggcttagttggggtaaacgaggggattatttcaacagaggtggcaccatttggcggagtaaagcagtctggtcttgggagagaaggatcgaagtacggcgtcgacgaatacttggagctcaagtacatctgcatgggcaacttgggttgagtcatgaaatcggcctcaggctagaaacgcatggaagagatgatgaaccgagagaccaagaaggcaggcgtctagctacaagaccggaggaacatggctgaaaggggccggccactggttgtgggggagcagttttcgaataaagcgaataagccgcggaacatgaacaaaagaagccgaaatgagttgtaaatgacgtgaactataaagtatggcttcgcctccggacttttgtataaaaaaaaaaaaaaaa

SEQ ID NO: 8108 - protein, 485 aa, Zea mays
  misc_feature: Ceres CLONE ID no. 1444565
  misc_feature: Ceres CDNA ID no. 25446795
  misc_feature (20)..(479): Pfam Name: Aldedh PFAM Desc: Aldehyde dehydrogenase family
  misc_feature: Homolog of GI Number: 23106028 NR Desc: COG1012: NAD
  misc_feature: Homolog of GI Number: 53613039 NR Desc: COG1012: NAD
  misc_feature: Homolog of GI Number: 46313682 NR Desc: COG1012: NAD
  misc_feature: Homolog of GI Number: 48846344 NR Desc: COG1012: NAD
  misc_feature: Homolog of GI Number: 23014760 NR Desc: COG1012: NAD
  misc_feature: Homolog of GI Number: 54028778 NR Desc: COG1012: NAD
  misc_feature: Homolog of GI Number: 27479656 NR Desc: Orf17
  misc_feature: Homolog of GI Number: 50733559 NR Desc:  similar to aldehyde dehydrogenase 5A1 precursor isoform 2
  misc_feature: Homolog of GI Number: 57110383 NR Desc:  similar to succinic semialdehyde dehydrogenase precursor
  misc_feature: Homolog of GI Number: 56477124 NR Desc: succinate
MEKIRAAGLLKTQGLIAGQWVDAYDGKTIEVQNPATGEVLANVSFMGSRETSDAIASAHSTFYSWSKLTASERGKALRKWYDLIISHKEELALLMTLEQGKPMKEALGEVNYGASFIEYFAEEAKRIYGDIIPPTLSDRRLLVLKQPVGVVGAITPWNFPLAMITRKVGPALACGCTVVVKPSEFTPLTSLAAADLALQAGIPAGALNVVMGNAPEIGDALLQSTQVRKITFTGSTAVGKKLMAESANTVKKVSLELGGNAPCIVFDDADIDVAVKGSLAAKFRNSGQTCVCANRILVQEGIYEKFASAFIKAVQSLKVGNGLEESTSQGPLINEAAVQKVEKFINDATSKGANVMLGGKRHSLGMSFYEPTVVGNVSNDMLLFREEVFGPVAPLIPFKTEEEAVHMANDTNAGLAAYIFTKSIPRSWRVSESLEYGLVGVNEGIISTEVAPFGGVKQSGLGREGSKYGVDEYLELKYICMGNLG

SEQ ID NO: 8109 - DNA, 764 bp, Zea mays
  misc_feature: Ceres CLONE ID no. 1444601
  misc_feature: Ceres CDNA ID no. 40351846
  CDS (1)..(546): REFERENCED BY SEQ ID NO: 8110
accaaaactaacctcttcagttgctgtgctgtgcgtgcgttcaggtacctggcggcgaagagcgaggctgaccactacaaccgggagctgcagcgcgagcaggacgagatcgacaccgtccccgacgtcgaggccgccgagatcgccgacatcctgtcgcagtacgggctgggcccggaggagtacggccccgtggtgacctccctccgcaacaaccccaaggcgtggctggagttcatgatgaagttcgagctcgggctggagaggcccgagccccggcgcgcgctggtgagcgccgccaccatcgcgctgtcctacgtcgcgggcgggctggtgccgctgctcccctacatgttcgtgccggaggccgcgcgcgccatggccgtgtccgtcgccgtgacgctcgcggcgctgctcttcttcggcttcgtcaagggccgcttcacgggcgaccgccccttcttcagcgccgtccagaccaccatcgtcggcgctctcgcctccgccgccgccttcgccatggccagggccgtgcagtccatatgaagactggtgtgatgcagctaaaatagtgaagcaggccggtcgccgcatgccccatatcaatcatcaccggccggctaggttggcgagggaaaataagtgcagctatatatgcatacgtggctacggtcactgcttctttgtttgatggctgcgtggtgtactattgtcagatgtggattattatttaggtcaagtcgattccaaaaaaaaaaaaaaaa

SEQ ID NO: 8110 - protein, 102 aa, Zea mays
  misc_feature: Ceres CLONE ID no. 1444601
  misc_feature: Ceres CDNA ID no. 40351846
  misc_feature (1)..(98): Pfam Name: DUF125 PFAM Desc: Integral membrane protein DUF125
MMKFELGLERPEPRRALVSAATIALSYVAGGLVPLLPYMFVPEAARAMAVSVAVTLAALLFFGFVKGRFTGDRPFFSAVQTTIVGALASAAAFAMARAVQSI

SEQ ID NO: 8111 - DNA, 877 bp, Zea mays
  misc_feature: Ceres CLONE ID no. 1444620
  misc_feature: Ceres CDNA ID no. 25445881
  CDS (98)..(619): REFERENCED BY SEQ ID NO: 8112
aaactcgaaggggagaggacagaagagggagatacagatagttagctcattagctagcctatatgtgtagggctccttgtcaggaaatggttacgagatgaaacattcaggccataaagtttgcgataggcattcatcatcggagtctgatcggtctcaccaagaagcatcagcagcaagtgaaagcagtccaaatgaacacacatcaactcaatcagacaatgatgaagatcatgggaaagataatcaggacacaatgaagccagtattgtccttggggaaggaaggctctgcctttttggccccaaaattacattacagcccatcttttgcttgtattccttatactgttgatgcttattatagtggggttggggtcttgacaggatatgctccacatgccattgtccatccccagcaaaatgatacaacgaacactccgggtatgttacctgtggaacctgcagaagaaccaatatatgttaatgcaaaacaataccatgcaatccttaggaggaggcaaacacgtgctaaattggaggcccagaacaagatggtgaaaaatcggaaggtaatacatagtaattttccaattcctgatgctgatttggtaagatgattttcattgttcttcagcatttgaagcatacagagctttgattatcaatacagtagatttttcttgggtcttgaccatattcagagggaggtccctctggctacaatttcagtgggtttgtcataggcttaaattttttattagcaaattgttctggacttgtatcaccaagcatttttgtaagagtaaggttaataattattttgtaactagctaacatcaagcattttcttggcttctccaaaaaaaaaaaaaaaa

SEQ ID NO: 8112 - protein, 173 aa, Zea mays
  misc_feature: Ceres CLONE ID no. 1444620
  misc_feature: Ceres CDNA ID no. 25445881
  misc_feature (124)..(158): Pfam Name: CBFB_NFYA PFAM Desc: CCAAT
  misc_feature: Homolog of GI Number: 50939151 NR Desc: putative transcription factor
  misc_feature: Homolog of GI Number: 57222442 NR Desc: putative CCAAT
  misc_feature: Homolog of GI Number: 50916485 NR Desc: putative CCAAT
  misc_feature: Homolog of GI Number: 2826786 NR Desc: RAPB protein
  misc_feature: Homolog of GI Number: 45861211 NR Desc: CCAAT
  misc_feature: Homolog of GI Number: 45861201 NR Desc: CCAAT
  misc_feature: Homolog of GI Number: 45861203 NR Desc: CCAAT
  misc_feature: Homolog of GI Number: 45861205 NR Desc: CCAAT
  misc_feature: Homolog of GI Number: 45861207 NR Desc: CCAAT
  misc_feature: Homolog of GI Number: 45861221 NR Desc: CCAAT
MKHSGHKVCDRHSSSESDRSHQEASAASESSPNEHTSTQSDNDEDHGKDNQDTMKPVLSLGKEGSAFLAPKLHYSPSFACIPYTVDAYYSGVGVLTGYAPHAIVHPQQNDTTNTPGMLPVEPAEEPIYVNAKQYHAILRRRQTRAKLEAQNKMVKNRKVIHSNFPIPDADLVR

SEQ ID NO: 8113 - DNA, 1221 bp, Zea mays
  misc_feature: Ceres CLONE ID no. 1444639
  misc_feature: Ceres CDNA ID no. 40041412
  CDS (159)..(1076): REFERENCED BY SEQ ID NO: 8114
cactgtctggtcttccccgatcgccgcgaaagcagtaaagagtccgcaatctttgccgcccccaccctcatcctctgctctcgtatcgtctcctctccacttcctctttctctcctctacaagggtatccactatccagaatcacctctatcatcaggatgcgggaggcacagttgggctcccacacgattcagacgcacggagtgagactggccagaaagcacacacacgactgggttgttctgattcttctggctgcactggtggttgccgtgcattacgctcccccgttcagtcgatttgtcgggaaggatatgatgactgatattaggtacccggtgaaaccaagcacagtaccagcatgggctgtccctatgatctctatactctgtccctggctcgtcttcatatccatatatgttgccaggagagacgtttatgatctgcatcacgctgcactaggtgttcttttcgctgtgctgataactgcagtttttaccgatgtgataaagactgcagtagggagaccgaggccagacttcttctggcgatgctttcctgatggaaagcagttatacgatcaggtgattggcgatgtgatttgccatggtgataaaaacttcttaaaagatgggcgcaagagctttcctagtggccacacttcgtggtcttttgctggtcttggatttttgtcactctacctgtcaggcaaaattaaggccttcaatcgccaaggtcacgtggccaaactttgcatagtgatccttccgcttcttcttgcttcactcgttggggtttcaagagtagatgattatcgacaccactgggaggatgtgtttgttggcggtcttattggatttatcatggcagtgctatgttacctgcatttctttcctcctccataccatgatcaaggttgtagaccgtatgcatacttccatatgctggaagaacttcaagcggcaaattcaaacaacgcacaaaaccaacagtccacaggtgatcatcgcattggcatgtccgagcagcagcataacaggacatcaagaaacgatttggaatctggaaccgtgtaacatgcctcctgcacttttactgaagtagcagcagcgatgtacattggacagtaagtgcaacctaacctagtatgcgtgtactcgacatgtgttacaatctatataattagaggtatatagtttctccttaaaaaaaaaaaaaaaa

SEQ ID NO: 8114 - protein, 253 aa, Zea mays
  misc_feature: Ceres CLONE ID no. 1444639
  misc_feature: Ceres CDNA ID no. 40041412
  misc_feature (47)..(197): Pfam Name: PAP2 PFAM Desc: PAP2 superfamily
  misc_feature: Homolog of GI Number: 34895654 NR Desc: putative phosphatidic acid phosphatase alpha
  misc_feature: Homolog of GI Number: 55770167 NR Desc: phosphatidic acid phosphata
  misc_feature: Homolog of GI Number: 9621903 NR Desc: phosphatidic acid phosphatase alpha
  misc_feature: Homolog of GI Number: 21537136 NR Desc: putative phosphatidate phosphohydrolase
  misc_feature: Homolog of GI Number: 6957723 NR Desc: putative phosphatidate phosphohydrolase
  misc_feature: Homolog of GI Number: 23505931 NR Desc: At2g01180/F10A8.6
  misc_feature: Homolog of GI Number: 20197584 NR Desc: putative phosphatidic acid phosphatase
  misc_feature: Homolog of GI Number: 26005743 NR Desc: prenyl diphosphate phosphatase
  misc_feature: Homolog of GI Number: 21554001 NR Desc: putative phosphatidic acid phosphatase
  misc_feature: Homolog of GI Number: 50932647 NR Desc: putative phosphatidic acid phosphatase
  misc_feature: Useful for making plants with increased biomass and foliage
  misc_feature: Useful for making smaller plants
MMTDIRYPVKPSTVPAWAVPMISILCPWLVFISIYVARRDVYDLHHAALGVLFAVLITAVFTDVIKTAVGRPRPDFFWRCFPDGKQLYDQVIGDVICHGDKNFLKDGRKSFPSGHTSWSFAGLGFLSLYLSGKIKAFNRQGHVAKLCIVILPLLLASLVGVSRVDDYRHHWEDVFVGGLIGFIMAVLCYLHFFPPPYHDQGCRPYAYFHMLEELQAANSNNAQNQQSTGDHRIGMSEQQHNRTSRNDLESGTV

SEQ ID NO: 8115 - DNA, 672 bp, Zea mays
  misc_feature: Ceres CLONE ID no. 1444670
  misc_feature: Ceres CDNA ID no. 29191297
  CDS (57)..(458): REFERENCED BY SEQ ID NO: 8116
agagtctccgtcgcattgagatcaatcttagtgaagcagcaaaaaaaaaaaaaaaaatggcggtcccgttgcttacgaagaaggttgtgaagaagaggtctgccaagttcatcagaccccagagcgaccgtagaatcacagtcaaggaaagctggaggaggccaaagggtattgactccagggttagaagaaagttcaagggtgtgactttgatgcccaatgtgggttacggatctgacaagaagacgcgccactacctccccaatgggttcaagaagtttgttgtgcacaacacgagtgacctcgagttgttgatgatgcacaacaggacctactgcgctgagattgctcacaacgtttctaccaagaagaggaaggctattgtagagagagcttctcagttggatattgttgttaccaacaggcttgctaggctccgtagccaagaagacgagtgaagaaacaagcaagccacttgggattgattacttggttgtttttttgggtttgttgcatttccttttgttagacgattttgtttactgtttgtgtttgcaatcaacaaaacatgagttttggttttaggcagactttgttaagacctgtttctaaactatcgcagttcagtttatctcaaagatttattagagttaaagaaaaaaaaaaaaaaaa

SEQ ID NO: 8116 - protein, 133 aa, Zea mays; identical to SEQ ID NO: 6048
  misc_feature: Ceres CLONE ID no. 1444670
  misc_feature: Ceres CDNA ID no. 29191297
  misc_feature (14)..(123): Pfam Name: Ribosomal_L32e PFAM Desc: Ribosomal protein L32
  misc_feature: Homolog of GI Number: 23198054 NR Desc: ribosomal protein L32
  misc_feature: Homolog of GI Number: 21555143 NR Desc: ribosomal protein L32
  misc_feature: Homolog of GI Number: 10177580 NR Desc: ribosomal protein L32
  misc_feature: Homolog of GI Number: 40287540 NR Desc: ly200 protein
  misc_feature: Homolog of GI Number: 71534997 NR Desc: ribosomal protein L32
  misc_feature: Homolog of GI Number: 77745481 NR Desc: ly200
  misc_feature: Homolog of GI Number: 13899057 NR Desc: ribosomal protein L32
  misc_feature: Homolog of GI Number: 50947773 NR Desc: putative ribosomal protein L32
  misc_feature: Homolog of GI Number: 76057835 NR Desc: ribosomal L32
  misc_feature: Homolog of GI Number: 50754636 NR Desc:  similar to 60S ribosomal protein L32

SEQ ID NO: 8117 - DNA, 694 bp, Zea mays
  misc_feature: Ceres CLONE ID no. 1444721
  misc_feature: Ceres CDNA ID no. 40351847
  CDS (113)..(445): REFERENCED BY SEQ ID NO: 8118
cttttttctttcttagttggttgatctttggcgctctggaaatttctcgtcgcaacactctcttgatttgctcaagtttcatctcccgttaactgtcactgtttcactagccatggcaaagcatcaccccgatctcatcatgtgccggaaacaaccaggcattgccatcggacgactctgcgaaaaatgcgacggcaaatgcgtggtttgtgattcttatgtgcgtccctgcactctggtgcgtatctgtgacgagtgcaactacgggtcattccaaggccgctgtgttatctgcggaggtgttgggatctcggatgcttactactgcaaggagtgtacgcagcaggagaaagacagagatggctgccccaagatcgtcaaccttgggagtgccaagactgatctcttctatgaacgtaagaaatatggtttcaaaaaacgatgatgatgatgatgtattttccgatttatccgatcctatgcttgcttgaagtacttggatctcttatgctatgtatgtgtaaacttgtgtgttgcctatgttccagagaatcttaagttgatggggtacaaaaccagacatgatgctttcttgttcttgataatctagactcgagtggtctgtatcagacttgtttttatgttatgattatatcctaattgaatgttgtgataagtaaaaaaaaaaaaaaaa

SEQ ID NO: 8118 - protein, 110 aa, Zea mays; identical to SEQ ID NO: 5992
  misc_feature: Ceres CLONE ID no. 1444721
  misc_feature: Ceres CDNA ID no. 40351847
  misc_feature (1)..(106): Pfam Name: PHF5 PFAM Desc: PHF5

SEQ ID NO: 8119 - DNA, 709 bp, Zea mays
  misc_feature: Ceres CLONE ID no. 1444736
  misc_feature: Ceres CDNA ID no. 25445882
  CDS (77)..(400): REFERENCED BY SEQ ID NO: 8120
aaaaacataactatctctctctctctccttccatacaaaaccaaaagcttttctctctcaagaacacaaaccccaaatggctataatgaagaaatctttaaaactcactcaaacagcaatgctgaagcagattcttaagagatgctcgagcttaggaaagaagaacggaggagggtacgacgacgattacctcccgctcgatgttccaaagggacactttcctgtctatgtcggagaaaacagaagcagatacattgtcccagtctccttcttgactcaccctgagttccagtttctcttaagacgagctgaggaagagtttggattcgaccacgacatgggtctcaccattccttgtgatgaagtcgtttttcaaagcctaacctccatgattagatgaggtttaagctaaaacgtttgaagaagaagcagaaggagatggttgaagaagaagtagaagcttctctttacaaaaaatagcatctcttcgcttttctaaaaagtttttcttttccttctattttatgcccatctagggttttttcacgagttaactaatttactcgtctaacaagaaacaagcccgtatgagatagatattctatgggtttagatctgtaaaaaagttgtaatgttttcctcgcagatcttgattctgtgagagaagttgagtaatgccagaaagtattccctaaaaaaaaaaaaaaaa

SEQ ID NO: 8120 - protein, 107 aa, Zea mays
  misc_feature: Ceres CLONE ID no. 1444736
  misc_feature: Ceres CDNA ID no. 25445882
  misc_feature: null
  misc_feature: Useful for making plants with modulated cold sensitivity
  misc_feature (6)..(107): Pfam Name: Auxin_inducible PFAM Desc: Auxin responsive protein
  misc_feature: Homolog of GI Number: 21536599 NR Desc: putative auxin
  misc_feature: Homolog of GI Number: 23198300 NR Desc: Putative auxin
  misc_feature: Homolog of GI Number: 4589972 NR Desc: putative auxin
  misc_feature: Homolog of GI Number: 7270869 NR Desc: putative auxin
  misc_feature: Homolog of GI Number: 28973279 NR Desc: putative auxin
  misc_feature: Homolog of GI Number: 15222294 NR Desc: auxin
  misc_feature: Homolog of GI Number: 10185820 NR Desc: auxin
  misc_feature: Homolog of GI Number: 10185818 NR Desc: auxin
  misc_feature: Homolog of GI Number: 4406817 NR Desc: putative auxin
  misc_feature: Homolog of GI Number: 53792744 NR Desc: auxin
MAIMKKSLKLTQTAMLKQILKRCSSLGKKNGGGYDDDYLPLDVPKGHFPVYVGENRSRYIVPVSFLTHPEFQFLLRRAEEEFGFDHDMGLTIPCDEVVFQSLTSMIR

SEQ ID NO: 8121 - DNA, 615 bp, Zea mays
  misc_feature: Ceres CLONE ID no. 1444779
  misc_feature: Ceres CDNA ID no. 29191328
  CDS (81)..(353): REFERENCED BY SEQ ID NO: 8122
acaaaaaagaaaaatccccatcaataagcatcccgccgcggcgccaagatccaagaagcatcacaggaagaagcggcgccatgaaccttgggcacgtcgaggaggaggtcgggaagctccgggaggagatccagaggctcggccagcagcagcccgacggctcctacaaggtcaagtttggtgtcatcttcaatgacgaccgatgcgcaaacatatttgaagcattagttggcaccttgcgggccgccaagaagaggaaagttgtcacctacgacggtgaaatgcttctgcagggtgttcatgacaatgtggagataaccctgttccctccccccacggtcgctgccacttgaagtttgcaacaccggcaagtctcccacattattgtgtcaatctgcttgtaatttgttgtgcttaaattcccatgaactgtttggtgctcagaagagtactattgtgagtgaactcatgatctatgcaattgctttgctctattgcttgcatggttgttgaaactcagtgctgatgtactgtgttgtgaaacatagagcgacaagctccaactctgaagtaaatggccaccgtgttattgagagtgcaaaaaaaaaaaaaaaa

SEQ ID NO: 8122 - protein, 90 aa, Zea mays
  misc_feature: Ceres CLONE ID no. 1444779
  misc_feature: Ceres CDNA ID no. 29191328
  misc_feature: Homolog of GI Number: 50838962 NR Desc: striated muscle activator
  misc_feature: Homolog of GI Number: 73946059 NR Desc:  similar to Protein C6orf115
  misc_feature: Homolog of GI Number: 76668284 NR Desc:  similar to Protein C6orf115
  misc_feature: Homolog of GI Number: 82932044 NR Desc:  similar to Protein C6orf115
  misc_feature: Homolog of GI Number: 82915954 NR Desc:  similar to Protein C6orf115
  misc_feature: Homolog of GI Number: 24980968 NR Desc: 3110003A17Rik protein
  misc_feature: Homolog of GI Number: 6841210 NR Desc: HSPC280
  misc_feature: Homolog of GI Number: 51465305 NR Desc:  chromosome 6 open reading frame 115
  misc_feature: Homolog of GI Number: 72010182 NR Desc:  similar to Protein C6orf115
MNLGHVEEEVGKLREEIQRLGQQQPDGSYKVKFGVIFNDDRCANIFEALVGTLRAAKKRKVVTYDGEMLLQGVHDNVEITLFPPPTVAAT

SEQ ID NO: 8123 - DNA, 607 bp, Zea mays
  misc_feature: Ceres CLONE ID no. 1444867
  misc_feature: Ceres CDNA ID no. 29191329
  CDS (67)..(393): REFERENCED BY SEQ ID NO: 8124
gtcgtctccgtgagcctcacatcttctttcgctctctagtatacacgacgattgttactcaacatcatggcgccaaagaaggacaaggttccaccaccatcatcgaagccggccaaatccggtggtggaaaacagaagaagaagaagtggagcaagggaaagcaaaaggagaaggtgaacaacatggtgttgtttgatcaggctacttacgacaagcttctcactgaagctcccaagttcaagctcatcaccccttccattctctccgaccgtatgaggatcaatgggtctctagcaaggaaggctattagggagctaatggccaaaggtgtgatcaggatggtcgctgcccactcgagccagcagatctacactcgtgccaccaacacctaaacacattgacttttgtcaatggtttggttctccagtctctttttgctttttgctgtatacattaatcttcagagctcttttttatttggtttttctttactactttgtactcgagaaactctttttttgggattatgtctacttaattcagaatcattttctatttttgctctctatcataatttcattcagatatccaaaaaaaaaaaaaaaa

SEQ ID NO: 8124 - protein, 108 aa, Zea mays; identical to SEQ ID NO: 7812
  misc_feature: Ceres CLONE ID no. 1444867
  misc_feature: Ceres CDNA ID no. 29191329
  misc_feature (1)..(106): Pfam Name: Ribosomal_S25 PFAM Desc: S25 ribosomal protein
  misc_feature: Homolog of GI Number: 21553704 NR Desc: ribosomal protein S25
  misc_feature: Homolog of GI Number: 4567232 NR Desc: 40S ribosomal protein S25
  misc_feature: Homolog of GI Number: 21617899 NR Desc: ribosomal protein S25
  misc_feature: Homolog of GI Number: 79322680 NR Desc: structural constituent of ribosome
  misc_feature: Homolog of GI Number: 435679 NR Desc: ribosomal protein S25
  misc_feature: Homolog of GI Number: 51979721 NR Desc: PREDICTED P0562A06.14 gene product
  misc_feature: Homolog of GI Number: 52077174 NR Desc: putative 40S ribosomal protein 25S
  misc_feature: Homolog of GI Number: 62701664 NR Desc: S25 ribosomal protein
  misc_feature: Homolog of GI Number: 33590374 NR Desc: 40S ribosomal protein S25
  misc_feature: Homolog of GI Number: 14276683 NR Desc: ribosomal protein S25

SEQ ID NO: 8125 - DNA, 589 bp, Zea mays
  misc_feature: Ceres CLONE ID no. 1444916
  misc_feature: Ceres CDNA ID no. 29191330
  CDS (55)..(381): REFERENCED BY SEQ ID NO: 8126
atctttcgcctctagcctacccgccgatcgttacccgtctccgtcgataacaccatggcgccgaagaaggataaggttccaccgccgtcgtcaaagccggctaaatccggaggtggaaaacagaagaagaagaagtggagcaagggaaagcaaaaggagaaggtgaacaacatggtgttgtttgatcaggctacttacgacaagcttctcactgaagctcccaagttcaagctcatcactccttccattctctccgaccgtatgaggattaacggatctctagcaaggagggcgattagggagctgatggcgaaaggtgtgatcaggatggttgctgctcactctagccagcagatctacactggtgccaccaacacctaaacagatttacttttgttaatggtttggttctcgaacctcaactcttttgatgtagacattaatcatcagagctcttatagttcctttatgtttcttttcgttaactcctttgtatctcaagaaactctttagtaagctgttttgagatattttgtctacttaattcagaattggtttttatatttgctccctaaaaaaaaaaaaaaaa

SEQ ID NO: 8126 - protein, 108 aa, Zea mays
  misc_feature: Ceres CLONE ID no. 1444916
  misc_feature: Ceres CDNA ID no. 29191330
  misc_feature (1)..(106): Pfam Name: Ribosomal_S25 PFAM Desc: S25 ribosomal protein
  misc_feature: Homolog of GI Number: 21553704 NR Desc: ribosomal protein S25
  misc_feature: Homolog of GI Number: 4567232 NR Desc: 40S ribosomal protein S25
  misc_feature: Homolog of GI Number: 21617899 NR Desc: ribosomal protein S25
  misc_feature: Homolog of GI Number: 79322680 NR Desc: structural constituent of ribosome
  misc_feature: Homolog of GI Number: 51979721 NR Desc: PREDICTED P0562A06.14 gene product
  misc_feature: Homolog of GI Number: 435679 NR Desc: ribosomal protein S25
  misc_feature: Homolog of GI Number: 52077174 NR Desc: putative 40S ribosomal protein 25S
  misc_feature: Homolog of GI Number: 62701664 NR Desc: S25 ribosomal protein
  misc_feature: Homolog of GI Number: 33590374 NR Desc: 40S ribosomal protein S25
  misc_feature: Homolog of GI Number: 14276683 NR Desc: ribosomal protein S25
MAPKKDKVPPPSSKPAKSGGGKQKKKKWSKGKQKEKVNNMVLFDQATYDKLLTEAPKFKLITPSILSDRMRINGSLARRAIRELMAKGVIRMVAAHSSQQIYTGATNT

SEQ ID NO: 8127 - DNA, 997 bp, Zea mays
  misc_feature: Ceres CLONE ID no. 1444928
  misc_feature: Ceres CDNA ID no. 35389490
  CDS (454)..(792): REFERENCED BY SEQ ID NO: 8128
aacccaatcttttcagctattttccgtcacgggaggcatgggaaacaaggcgcagaagctggttttttttttctttctaagtcaagagatctagttactcgatcacttgtttagctccaaatcagttagcgatttgccacctactgtttgcagaccaatgagtaattgagtactagtcgtcaatggaaggaattgggtagaaatggctttggtcagtggagcactcaaagctgcacaagaacattgctcgctgaacaactgcaacttacaacaacaatgggaagagaaatcctcactgaactgtgaaccaatcatcaatcgaaacaatgccgggcaagcccctttggccgccgctagcccaaggcccaagcacgctagttcttccaggcgtagacgaggagggagaagccgtcgccgctctgcagctcggcctcctcggggctgccccagtccatgacggtggagccgctcgcccacgacgcggaggaggaagccactgacgccgacgaggaggagctcgcctttgccagcctgctcgcctggcccctcgtcctccgcttctcaccgctgctgctgctctcgctccagtcccctctcccccacctcctaccgtcgacgtaccccgccaagccgcctccgacttggaccacctccttctccctggcgtcggccgggtcacgctcctcgccgtcgcggccggcgagctcgaagcggaagacgaagacggcgcgcgcgggcggagccgtggcggcgggtggcgaggcgtcgcgcgcggggaagagccagtcgtgaaggtcccaggagacgaggacgcggtcgccggcgccgaggtccagcttctcggtgccgcggaacttccagcgcaggcggcggacgtggagcacgcgatcgccgtcgacggagaccgacatgccgacctcggccctgtcccgctcccgcccctggccctggccctgcgcgcgcgagacgagaaaaaaaaacaaaaaaaaaaaaaaaa

SEQ ID NO: 8128 - protein, 112 aa, Zea mays
  misc_feature: Ceres CLONE ID no. 1444928
  misc_feature: Ceres CDNA ID no. 35389490
  misc_feature: Homolog of GI Number: 3980411 NR Desc: putative proline
  misc_feature: Homolog of GI Number: 23308459 NR Desc: At2g29210/F16P2.41
  misc_feature: Homolog of GI Number: 9843651 NR Desc: SRM102
  misc_feature: Homolog of GI Number: 76818066 NR Desc: 200 kDa antigen p200
  misc_feature: Homolog of GI Number: 71368905 NR Desc: similar to ATPase involved in DNA repair
  misc_feature: Homolog of GI Number: 66778899 NR Desc: UvrD/REP helicase
  misc_feature: Homolog of GI Number: 72086012 NR Desc:  similar to Ser/Arg
  misc_feature: Homolog of GI Number: 57900284 NR Desc: putative Ser/Arg
  misc_feature: Homolog of GI Number: 67987177 NR Desc: 4Fe
  misc_feature: Homolog of GI Number: 66775827 NR Desc: OsmC
MTVEPLAHDAEEEATDADEEELAFASLLAWPLVLRFSPLLLLSLQSPLPHLLPSTYPAKPPPTWTTSFSLASAGSRSSPSRPASSKRKTKTARAGGAVAAGGEASRAGKSQS

SEQ ID NO: 8129 - DNA, 770 bp, Zea mays
  misc_feature: Ceres CLONE ID no. 1444950
  misc_feature: Ceres CDNA ID no. 36593542
  CDS (152)..(439): REFERENCED BY SEQ ID NO: 8130
aaggcgaaccgatccggtttaaaagatccgctactagtgtcaccggcaacgtgtcgacgcggtcgtgtggggaggaagcgaaccctgcttggtgcttgcttgccggacaagaagtgagaacagcgtgggtgcggaagcgaccggaccgaggatggctacaagaaggaccgtggcggcgagcgttactgcccaccagcctgcgtgggcggccgtggcgaggaggatggagggcgtgtcgcgctacttcagcgacaaggcctccggcagggtgctcagcgaggaggagcgcgccgccgagaacgtctacatacagaagatggagcgggagaagctggagaaactgaggaaggaggacaaggccaaggccgaggcggccaagagggccgccgtcgccgccagaggcgacacgaagaatggtgaggaggctcatccgagctgatcatcgccaaaatcggaccagtgctcccgtgaatcgtgtgatgctgtactactgatgacacgtagatgcaaatagacgccgtcgtactactctgctttgcaactctgctcgtcgtgtcgtgtgtgatcccatccctgtcactgttgtgaacttcgcttgtagctagcgacggttttgccttgtccctcgtcggtgcaaatggagtggagtggaggcgtccttgagcctctttcatgtacataataatgaataaatgtagtcccctcgtcgaaaacaaaaaaaaaggtcccagaagagtggatatctcgctttggcaaaaaaaaaaaaaaaa

SEQ ID NO: 8130 - protein, 95 aa, Zea mays
  misc_feature: Ceres CLONE ID no. 1444950
  misc_feature: Ceres CDNA ID no. 36593542
  misc_feature: Homolog of GI Number: 50948469 NR Desc: putative F1F0
  misc_feature: Homolog of GI Number: 5106371 NR Desc: F1F0
  misc_feature: Homolog of GI Number: 28416549 NR Desc: At5g04750
  misc_feature: Homolog of GI Number: 9758450 NR Desc: F1F0
  misc_feature: Homolog of GI Number: 1096930 NR Desc: H ATPase inhibitor
  misc_feature: Homolog of GI Number: 21592886 NR Desc: F1F0
  misc_feature: Homolog of GI Number: 52077175 NR Desc: F1F0
MATRRTVAASVTAHQPAWAAVARRMEGVSRYFSDKASGRVLSEEERAAENVYIQKMEREKLEKLRKEDKAKAEAAKRAAVAARGDTKNGEEAHPS

SEQ ID NO: 8131 - DNA, 619 bp, Zea mays
  misc_feature: Ceres CLONE ID no. 1444998
  misc_feature: Ceres CDNA ID no. 25401509
  CDS (95)..(406): REFERENCED BY SEQ ID NO: 8132
atctcatctcatctcacacaccactactcatcttacctgacgcagttcactgctagccaattcacttctcgtaccaccaacctccctcgccaagatgtcgacggtgacccgcgcctacctcgaccagaggctcgccgccgccaagcgctgctccaaagaggctgccatggcgggagccaaggccgcggccgtcgccaccgtcgctgccgcagtccccacactggcgagcgtgaggatgctgccgtgggccaaggcgcacctgaaccccaccgggcaggccctcatcatctccactgtcgctgggatggcctacttcatcgtcgccgacaagaccatcctctccatggccaggaggcactccttcgaggacgcgccggagcacctcaagaacacctccttccactagttagatccattattagtaatgcccaatgaaccgtgtatgccaaagtgcatagcgtacagtgatcagcaaagggaggtcataatataattttcatcatgcaagtagccatgtacagcatcttttgagctagcaatactgaaagatgtaccagcatttgttaaccaatattttccagctaccggctattttgatgagccaaaaaaaaaaaaaaaa

SEQ ID NO: 8132 - protein, 103 aa, Zea mays
  misc_feature: Ceres CLONE ID no. 1444998
  misc_feature: Ceres CDNA ID no. 25401509
  misc_feature (11)..(89): Pfam Name: ENOD93 PFAM Desc: Early nodulin 93 ENOD93 protein
  misc_feature: Homolog of GI Number: 50948739 NR Desc: putative early nodulin
  misc_feature: Homolog of GI Number: 50948751 NR Desc: putative early nodulin
  misc_feature: Homolog of GI Number: 50948749 NR Desc: putative early nodulin
  misc_feature: Homolog of GI Number: 50948755 NR Desc: putative early nodulin
  misc_feature: Homolog of GI Number: 50948737 NR Desc: putative early nodulin
  misc_feature: Homolog of GI Number: 50948753 NR Desc: putative early nodulin
  misc_feature: Homolog of GI Number: 4809191 NR Desc: early nodulin
  misc_feature: Homolog of GI Number: 218262 NR Desc: early nodulin
  misc_feature: Homolog of GI Number: 4731119 NR Desc: root
  misc_feature: Homolog of GI Number: 50948733 NR Desc: Similar to OsENOD93a gene for early nodulin
MSTVTRAYLDQRLAAAKRCSKEAAMAGAKAAAVATVAAAVPTLASVRMLPWAKAHLNPTGQALIISTVAGMAYFIVADKTILSMARRHSFEDAPEHLKNTSFH

SEQ ID NO: 8133 - DNA, 843 bp, Zea mays
  misc_feature: Ceres CLONE ID no. 1445013
  misc_feature: Ceres CDNA ID no. 29191331
  CDS (62)..(559): REFERENCED BY SEQ ID NO: 8134
aataccaaaggataacacacacgaaaaaaactttcactaagataaaccaagaatcttcatcatggcttcagtaacctcagccaccgtcgcaatcccatcgttcaccggcctaaaatccaccatctccaaaacctccgccgtcgtcagactccccaccacaacatcacggaacctcaccgtgaagtcatctctaaaggacttcggagtcgctgtcgttgcggctgcagcttccatcgctttggctggaaacgctatggccattgatgttctcttgggatcaggagatggagcgttggctttcgttcccaacgagttcacaatagcgaaaggagagaagattgtgttcaagaacaacgctggattcccacacaacgtcgtgttcgatgaggacgagatcccaagtggtgttgaagcgagcaagatctccatggacgagcaagatctactcaacgctgctggagagacgtacgaggttgctttgactgagcctgggacttacagcttctactgtgcgccgcatcagggtgctggtatggtcggtaaagtcaccgttaactaataaaattgtgagtgtaaaagcggaagagtgtctctgatccgagtagaggcttttctttcagtcttgcttacataaggtgttttgtacttctaaagagtgttggaatcaaatggacattgatttgttataatgagagtactggttccatccatgaatggtttgtcttggtttataaattacttgtagatttatgtctggctctgaagctttttaagattatgataaactaagttggaaaaataaatgctaaagatatggagttggtgttaaaaaaaaaaaaaaaa

SEQ ID NO: 8134 - protein, 165 aa, Zea mays
  misc_feature: Ceres CLONE ID no. 1445013
  misc_feature: Ceres CDNA ID no. 29191331
  misc_feature (67)..(165): Pfam Name: Copper PFAM Desc: Copper binding proteins
  misc_feature: Homolog of GI Number: 24111321 NR Desc: At1g20340/F14O10_4
  misc_feature: Homolog of GI Number: 21592405 NR Desc: plastocyanin
  misc_feature: Homolog of GI Number: 6723444 NR Desc: putative plastocyanin
  misc_feature: Homolog of GI Number: 166696 NR Desc: DRT112
  misc_feature: Homolog of GI Number: 62867621 NR Desc: At1g76100
  misc_feature: Homolog of GI Number: 6573730 NR Desc: T23E18.3
  misc_feature: Homolog of GI Number: 166790 NR Desc: plastocyanin
  misc_feature: Homolog of GI Number: 929813 NR Desc: plastocyanin a
  misc_feature: Homolog of GI Number: 55377285 NR Desc: copper
  misc_feature: Utility: MSX Useful for making plants tolerant to low nitrogen
MASVTSATVAIPSFTGLKSTISKTSAVVRLPTTTSRNLTVKSSLKDFGVAVVAAAASIALAGNAMAIDVLLGSGDGALAFVPNEFTIAKGEKIVFKNNAGFPHNVVFDEDEIPSGVEASKISMDEQDLLNAAGETYEVALTEPGTYSFYCAPHQGAGMVGKVTVN

SEQ ID NO: 8135 - DNA, 722 bp, Zea mays
  misc_feature: Ceres CLONE ID no. 1445039
  misc_feature: Ceres CDNA ID no. 29191458
  CDS (38)..(553): REFERENCED BY SEQ ID NO: 8136
aaaaccctaatctctcaaaccttctctcaaacacaaaatggttaaccctaaagtttatttcgacatgaccgttggcgacaaagccgccggccgcatcgtgatggagctttacgccgacacagtccccgagacggccgagaacttccgtgctctctgcaccggcgagagaggaatcggcaaatccggaaagccactccactacaagggctcggctttccaccgcgtgatccccaagttcatgtgccaaggaggagatttcaccgccgggaacggaacgggaggagagtcgatctacggcatgaagttcaaagacgagaactttgtcaagaagcacaccggtccgggtattctctccatggctaacgctggttcgaacacgaacggatctcagtttttcatttgcactgagaagacatcgtggctcgacgggaagcatgttgtgttcggtcaagttgtcgaagggatggatgtcgttagagacattgagaaggttggatctgacagtggaaggacttctaagaaggttgtgatcgctgactgtggtcagctttagatctgatgaggggaaaaagagagaggttgttgatccaatggtagctttgtgttttttctctgttgtgttttgttttttgttctggttttcttgggttttctctgtatttctatggctaccattgaataataatgataatgattaatcttagttaaaaaaaaaaaaaaaa

SEQ ID NO: 8136 - protein, 171 aa, Zea mays
  misc_feature: Ceres CLONE ID no. 1445039
  misc_feature: Ceres CDNA ID no. 29191458
  misc_feature (5)..(171): Pfam Name: Pro_isomerase PFAM Desc: Cyclophilin type peptidyl
  misc_feature: Homolog of GI Number: 1345921 NR Desc: Peptidyl
  misc_feature: Homolog of GI Number: 68407 NR Desc: peptidylprolyl isomerase
  misc_feature: Homolog of GI Number: 167138 NR Desc: cyclophilin
  misc_feature: Homolog of GI Number: 21592448 NR Desc: cytosolic cyclophilin ROC3
  misc_feature: Homolog of GI Number: 38708272 NR Desc: cyclophilin
  misc_feature: Homolog of GI Number: 1563719 NR Desc: cyclophylin
  misc_feature: Homolog of GI Number: 62728587 NR Desc: cyclophilin
  misc_feature: Homolog of GI Number: 17981611 NR Desc: cyclophilin
  misc_feature: Homolog of GI Number: 1561575 NR Desc: cyclophilin
  misc_feature: Homolog of GI Number: 1220142 NR Desc: cyclophilin
MVNPKVYFDMTVGDKAAGRIVMELYADTVPETAENFRALCTGERGIGKSGKPLHYKGSAFHRVIPKFMCQGGDFTAGNGTGGESIYGMKFKDENFVKKHTGPGILSMANAGSNTNGSQFFICTEKTSWLDGKHVVFGQVVEGMDVVRDIEKVGSDSGRTSKKVVIADCGQL

SEQ ID NO: 8137 - DNA, 1098 bp, Zea mays
  misc_feature: Ceres CLONE ID no. 1445059
  misc_feature: Ceres CDNA ID no. 40351848
  CDS (78)..(950): REFERENCED BY SEQ ID NO: 8138
accacagagagctaagcgcattcgcatcttgagcacagacacccaccctagcttgtcgatcagtcgaggcagcgacgatggccaaggacatcgaggcggcgccccccggaggggagtacggagccaaggactactctgacccgccgccggcgccgctcttcgacgccgaggagctgactaaatggtccctgtaccgcgcggtcatcgccgagttcgtggccacgctgctcttcctctacatcaccgtggccactgtcatcgggtacaagcaccaggcggaccccgccggccccaatgctgccgacgcggcctgcagcggcgtcggcatcctcggcatcgcctgggcgttcggcggcatgatcttcgtgctcgtctactgcactgccggggtttccggtggccacatcaacccggcggtgacgttcgggctgttcctggcgcggaaggtgtcgctggtgcgcgcgctgctctacatcatcgcgcagtgcctgggcgccatctgcggcgtcgggctcgtcaaggggttccagagcgccttctacgtgcgctacggcggcggcgccaacgagctcagctccggcttctccaagggcaccggcctcgccgccgagatcatcggcaccttcgtgctcgtctacaccgtcttctccgccaccgaccccaagcgcagcgcccgtgactcccacgtcccggtgctggctcctctgccaatcggcttcgcggtgttcatggtgcacctggccactatcccgatcaccggcaccggcatcaacccggcaaggagctttggagctgccgtgatctacaacaacgagaaggcctgggatgaccactggatcttctgggtggggccattcatcggggccgccatcgccgccgcctaccaccagtacgtcctgagggccagcgccaccaagctcggctcgtctgcctccttcggcaggaactagatcggccgactgcagtatggatgatcggaagcacggacagtagatatatcagtgtgatactgttcgggtgatgtattgtgcacgcgtctgtattttcttagacgcgtttgggtgtcttcaaaatttctctacaaaaaaaaaaaaaaaa

SEQ ID NO: 8138 - protein, 290 aa, Zea mays; identical to SEQ ID NO: 5008
  misc_feature: Ceres CLONE ID no. 1445059
  misc_feature: Ceres CDNA ID no. 40351848
  misc_feature (32)..(270): Pfam Name: MIP PFAM Desc: Major intrinsic protein

SEQ ID NO: 8139 - DNA, 989 bp, Zea mays
  misc_feature: Ceres CLONE ID no. 1445162
  misc_feature: Ceres CDNA ID no. 36707429
  CDS (39)..(815): REFERENCED BY SEQ ID NO: 8140
cgccgtaaactcaagaagaaggaagatcatcatcatccatgggtcgtgtcatcagagctcaacgtaagggagcaggctccgtcttcaagtcccacactcaccaccgcaagggccccgccaagttcaggagcctcgacttcggcgagagaaatggttacctcaagggtgtcgtcaccgagatcatccacgacccgggacgtggtgctccgttagctcgcgtctccttccgtcatcctttccgttacaagaagcagaaggagctcttcgtcgccgccgaaggtatgtacaccgggcagttcttgtactgcggtaagaaggccactctcgttgtcggaaatgttctgcctctcagatctatccccgagggagctgttgtgtgcaacgtcgagcaccatgttggtgatcgtggtgtgctcgctagggcttctggtgattacgctatcgtcatctctcacaatcccgacaacgacacgaccagggttaagttgccatctggttcgaagaagattgtcccaagtggatgcagggccatgattggtcaagtcgctggtggtgggagaactgagaagccgatgctcaaggcgggtaacgcgtaccacaagtaccgtgtgaagaggaactgctggcctaaggttcgtggtgtggctatgaaccctgttgagcatccccacggaggaggtaaccatcaacatattggtcacgccagtaccgttcgtcgtgatgcaccacctgggcaaaaggttggtcttattgctgcaaggaggactggtcgtctcagaggtcaagctgctgctcttgcctccaagcaagaataaggagataaatcttcaagatgatgaagttgtttacttttgttggatttttgctgagaccttgtgttgaatcctttagtttttctataatctttcttgagacctttgtcctgagaattaaacctccatattatcagtttaaatttcgttattcagtttcgaaaaaaaaaaaaaaaa

SEQ ID NO: 8140 - protein, 258 aa, Zea mays
  misc_feature: Ceres CLONE ID no. 1445162
  misc_feature: Ceres CDNA ID no. 36707429
  misc_feature (11)..(90): Pfam Name: Ribosomal_L2 PFAM Desc: Ribosomal Proteins L2
  misc_feature (96)..(231): Pfam Name: Ribosomal_L2_C PFAM Desc: Ribosomal Proteins L2
  misc_feature: Homolog of GI Number: 22135870 NR Desc: 60S ribosomal protein L2
  misc_feature: Homolog of GI Number: 13605569 NR Desc: AT4g36130/F23E13_20
  misc_feature: Homolog of GI Number: 19343 NR Desc: ribosomal protein L2
  misc_feature: Homolog of GI Number: 81074776 NR Desc: ribosomal protein L2
  misc_feature: Homolog of GI Number: 77556802 NR Desc: 60s ribosomal protein l2
  misc_feature: Homolog of GI Number: 12054507 NR Desc: ribosomal protein L2
  misc_feature: Homolog of GI Number: 20001 NR Desc: 60S ribosomal protein L2
  misc_feature: Homolog of GI Number: 798818 NR Desc: 60S ribosomal protein L2
  misc_feature: Homolog of GI Number: 67633686 NR Desc: 60S ribosomal protein L8
  misc_feature: Homolog of GI Number: 6562271 NR Desc: ribosomal protein L8 homolog
MGRVIRAQRKGAGSVFKSHTHHRKGPAKFRSLDFGERNGYLKGVVTEIIHDPGRGAPLARVSFRHPFRYKKQKELFVAAEGMYTGQFLYCGKKATLVVGNVLPLRSIPEGAVVCNVEHHVGDRGVLARASGDYAIVISHNPDNDTTRVKLPSGSKKIVPSGCRAMIGQVAGGGRTEKPMLKAGNAYHKYRVKRNCWPKVRGVAMNPVEHPHGGGNHQHIGHASTVRRDAPPGQKVGLIAARRTGRLRGQAAALASKQE

SEQ ID NO: 8141 - DNA, 969 bp, Zea mays
  misc_feature: Ceres CLONE ID no. 1445177
  misc_feature: Ceres CDNA ID no. 40351849
  CDS (87)..(788): REFERENCED BY SEQ ID NO: 8142
aaaaatcagcgactggattttcctggcccgaaacagcaaggtctctctcgcgctcgcctctctcctcctcgtcttcggcggcggcgatgctgtccggcgacgttcccccgaaccagaccgtctacttcaggaacctcaacgagaaggtcaagaaagaagagttgaagagatcactttatgcattgtgctctcagtatggaaggatagtggatgtcgtggccttaaaaactcataaactgagggggcaagcctgggtggcattcagtgaaattacagcggctaccaacgctttccggggcctacaggacttcgatttttacggcaaaaaaatgcgggtacaatatgcaaaaacaaagtctgactgttttgcaaaagcagatgggtcttatgctcctaaagagaaaaggaagaagcaagaggagaaagctgctgagaaaaaacggcgaactgaagatggacaacaacctggcgctaatgctcctgttgccccaagcaatggaactggtcatcaaccttctcgttttgccaagcctccgcaagagccagctgctccgccgaacaacatcctcttcctccagaacatgccggatcagaccacgagcatgatgctccagatcctgttccagcaataccctggtttccgggaggtgcggatgattgaagccaagccaggcattgcttttgtggagtacgaggatgagaaccagtccatggttgcaatggaagccctccagggtttcaagatcagcccagagaacccaatggccatctcatacgccaaaaagtgaaacgatccatgtgatctccaaaccggccaaaagaaatctgtaactgtaagattttccaccctaagctttcaagctgctgtgctgtgctggctttctaaccctgtatttcttggaagtgacttgcttgttgtttaagaagttaaaagtatgtgctactttaaatcgaaaaaaaaaaaaaaaa

SEQ ID NO: 8142 - protein, 233 aa, Zea mays
  misc_feature: Ceres CLONE ID no. 1445177
  misc_feature: Ceres CDNA ID no. 40351849
  misc_feature (12)..(84): Pfam Name: RRM_1 PFAM Desc: RNA recognition motif.
MLSGDVPPNQTVYFRNLNEKVKKEELKRSLYALCSQYGRIVDVVALKTHKLRGQAWVAFSEITAATNAFRGLQDFDFYGKKMRVQYAKTKSDCFAKADGSYAPKEKRKKQEEKAAEKKRRTEDGQQPGANAPVAPSNGTGHQPSRFAKPPQEPAAPPNNILFLQNMPDQTTSMMLQILFQQYPGFREVRMIEAKPGIAFVEYEDENQSMVAMEALQGFKISPENPMAISYAKK

SEQ ID NO: 8143 - DNA, 1465 bp, Zea mays
  misc_feature: Ceres CLONE ID no. 1445208
  misc_feature: Ceres CDNA ID no. 40041413
  CDS (103)..(1236): REFERENCED BY SEQ ID NO: 8144
ataattcttgttctccatcgaagaacagacgacatactctctctctctctctctctctctctctctttgtctctctctagacagtcgattaaaggtgcacaaatgtgcggaaagatgaagcacatccacatggaacacaagggcttacttggtggagaatttaaagatggaatctgcgcctcagttcccagcccccttcctggcacatcaagcaggccgaacagcatggttgtgaagaaggtttgcccgcgggagttcatcccggcgcacatcatcgcggaggcgatctcgacgctgcacgggctggacctgcggtggtcggggcccatcacgcccagcgagcggcagtacgtggagcagtacgtgctggccatgtacccgcagtactcgcacggcctcatcgaggacggcggctgcgacaaggacgacctctactccacctactacatgtcgccggaggccggcggcgagcggcagcgttcgtcgccggcggggtcgccgtcgtcgtcggccggcacgaggcccgactcggcggacacggtccggctggagccgtcgcggctgctggacatgctcaccaagaagtcgtccttcccggggagctttatctcgatcccggagatccaggccaggaaccgcgtgctcagccactgcggcctcaccgacgacgagtacctcgtcctcttcgcgcccacgccgagggacgccatgatgctgattggcgagagctacccgttcttccggagcagctactacatgtcgatcctggacgaggagagcgacagcatccgcgccttcgcggcgtacaaggaggcgaaggtgatcgcggcgccggagtcgtggctggacctgcgcatcaaggggtcgcagctgagccagtacttccggcgcaagtccaagcacgcgcccaagggcctgttcgcgtacccggccgtcgtctcgccctcgtcttcgtcgtcgccgtccgcctccgccgccgccgcctcgcggtactcgctgcactgggtgtccgaggcgcaccgcaacgcgtggcacgtggtcctggacgccaccgcgctggccgtcggcgaggaccgcctcccgctctcgctgcaccgcccggacttcgtgctgtgcacgctcggcgacgccacgcggcagcagcagcagcagcagccagctgcgagggtcacctgcctcctcgtcaggaggcggtccttcgatacctccctctcctcccagccgcagaggcagtagccagtagccactagccacagcgaattggtgtttgcgagagaaatcgaaatcgaagcaggcgcgcgtgttgcaagattgctgcttcttgcctgctgtgagccgtttgcctgcttgtgactgctgcaagcaaattggtgtttagccgattccgttatcgtgtgatgcttggtgaaacattacaataataaataaatacataaacaccattttgacaaaaaaaaaaaaaaaa

SEQ ID NO: 8144 - protein, 377 aa, Zea mays
  misc_feature: Ceres CLONE ID no. 1445208
  misc_feature: Ceres CDNA ID no. 40041413
  misc_feature: Homolog of GI Number: 5821151 NR Desc: RNA binding protein
  misc_feature: Homolog of GI Number: 28972153 NR Desc: mKIAA0324 protein
  misc_feature: Homolog of GI Number: 62655768 NR Desc:  similar to serine/arginine repetitive matrix 2
  misc_feature: Homolog of GI Number: 2996650 NR Desc: KIAA0324
  misc_feature: Homolog of GI Number: 19923466 NR Desc: splicing coactivator subunit SRm300
  misc_feature: Homolog of GI Number: 71891780 NR Desc: KIAA0324 protein
  misc_feature: Homolog of GI Number: 6649242 NR Desc: splicing coactivator subunit SRm300
  misc_feature: Homolog of GI Number: 5821145 NR Desc: RNA binding protein
  misc_feature: Homolog of GI Number: 47124032 NR Desc: SRRM2 protein
  misc_feature: Homolog of GI Number: 5821143 NR Desc: RNA binding protein
MCGKMKHIHMEHKGLLGGEFKDGICASVPSPLPGTSSRPNSMVVKKVCPREFIPAHIIAEAISTLHGLDLRWSGPITPSERQYVEQYVLAMYPQYSHGLIEDGGCDKDDLYSTYYMSPEAGGERQRSSPAGSPSSSAGTRPDSADTVRLEPSRLLDMLTKKSSFPGSFISIPEIQARNRVLSHCGLTDDEYLVLFAPTPRDAMMLIGESYPFFRSSYYMSILDEESDSIRAFAAYKEAKVIAAPESWLDLRIKGSQLSQYFRRKSKHAPKGLFAYPAVVSPSSSSSPSASAAAASRYSLHWVSEAHRNAWHVVLDATALAVGEDRLPLSLHRPDFVLCTLGDATRQQQQQQPAARVTCLLVRRRSFDTSLSSQPQRQ

SEQ ID NO: 8145 - DNA, 711 bp, Zea mays
  misc_feature: Ceres CLONE ID no. 1445232
  misc_feature: Ceres CDNA ID no. 29191332
  CDS (124)..(483): REFERENCED BY SEQ ID NO: 8146
ctaccccgcgacttccctccggttgcttccgccgagcgacttccaatccagtctccctcgattccgccggcccgatcgcctcgatcaatctcgtcccccgctgcgcccttccgtcggttggagatggccaagacttgcttcaagaccgagcaccccctggaaaggaggcaagctgaatctgctaggatccttgagaagtatgctgacagaattccggtgatcgttgagaaggctgataagtctgatgtcccggaaattgataagaagaagtaccttgtccctgccgacctcactgttggccagtttgtctacgtggtgcggaagaggatcaagctgagcccagaaaaggccatcttcgtctttgtgaatagcaccttgccaccgactgcttcgttgatgtcagcgatctatgaagaaaacaaggacgaggacggcttcctgtacatgacttacagtggcgagaacactttcggctccgcctaatccatgtgcgctgccactgtaaataaatgaaggatgttcaggttgcgacgtctgtgtacatactatcactagtatgctggtggattgccctcatggtttaatgcttttaagtgtggtattttatcatctgaatgttagaacggcctgtaaaactcttatctattactctcgtctggtttatgttcctcatgctctgggatgatttcaatcgcaaaaaaaaaaaaaaaa

SEQ ID NO: 8146 - protein, 119 aa, Zea mays
  misc_feature: Ceres CLONE ID no. 1445232
  misc_feature: Ceres CDNA ID no. 29191332
  misc_feature (14)..(117): Pfam Name: MAP1_LC3 PFAM Desc: Microtubule associated protein 1A/1B
  misc_feature: Homolog of GI Number: 32401365 NR Desc: autophagy
  misc_feature: Homolog of GI Number: 50937683 NR Desc: putative microtubule associated protein
  misc_feature: Homolog of GI Number: 37776903 NR Desc: putative microtubule
  misc_feature: Homolog of GI Number: 34595981 NR Desc: microtubule
  misc_feature: Homolog of GI Number: 50928837 NR Desc: OSJNBa0053K19.12
  misc_feature: Homolog of GI Number: 50941899 NR Desc: putative microtubial binding protein
  misc_feature: Homolog of GI Number: 21592920 NR Desc: putative microtubule
  misc_feature: Homolog of GI Number: 4581162 NR Desc: putative microtubule
  misc_feature: Homolog of GI Number: 30102824 NR Desc: At4g21980
  misc_feature: Homolog of GI Number: 3024687 NR Desc: SYMBIOSIS
  misc_feature: Useful for accelerating flowering time
  misc_feature: Useful for making ornamental plants with modified flowers
  misc_feature: Useful for making plants with increased biomass and foliage
  misc_feature: Useful for making shorter plants
  misc_feature: Useful for making shorter plants and plants with modified flowers
  misc_feature: Useful for making smaller plants
  misc_feature: Useful for modifying plant structure
  misc_feature: Useful for sterility
MAKTCFKTEHPLERRQAESARILEKYADRIPVIVEKADKSDVPEIDKKKYLVPADLTVGQFVYVVRKRIKLSPEKAIFVFVNSTLPPTASLMSAIYEENKDEDGFLYMTYSGENTFGSA

SEQ ID NO: 8147 - DNA, 734 bp, Zea mays
  misc_feature: Ceres CLONE ID no. 1445239
  misc_feature: Ceres CDNA ID no. 29191333
  CDS (50)..(577): REFERENCED BY SEQ ID NO: 8148
aaaagtctcgaatcgcttctgcagccgtttccttccgtcagccgcagccatggtgaagtactcgcaagagcctgacaatcagaccaagtcttgcaaggctagaggatccgatcttagggttcacttcaagaacactcgggaaacagcgcacgctatcaggaagctaccattgctcaaggccaagaggtaccttgaggatgtgatagctcacaagcaggctattcccttcacccgtttctgcagaggtgttggaaggactgctcaagccaagaacaggcactccaatggtcagggacgttggcctgctaagtctgctcagtttgttcttgatttgctcaagaatgctgagagcaatgctgaggtgaaaggtttggatgttgatgcgctctttatttcgcacattcaagtgaaccaggctgcaaagcagaggagaaggacttaccgtgctcatggaagaatcaacccttacatgtccaacccatgtcacattgagctgattttgtctgagaaggaagagtctgtcaagaaagagccggagactcagttggcagccaagtcgaagaaatcatctgcctaagctttctttgttttttagtttctactttttgtgttcttgaaagagattttgatcccttgtctctcctgtctttgcaagacaatggatagattttcttggattattcaatgttatgaaactatttgtctttgtgctggcagtaaaaaaaaaaaaaaaa

SEQ ID NO: 8148 - protein, 175 aa, Zea mays; identical to SEQ ID NO: 7614
  misc_feature: Ceres CLONE ID no. 1445239
  misc_feature: Ceres CDNA ID no. 29191333
  misc_feature (17)..(153): Pfam Name: Ribosomal_L22 PFAM Desc: Ribosomal protein L22p/L17e
  misc_feature: Homolog of GI Number: 21594923 NR Desc: putative 60S ribosomal protein L17
  misc_feature: Homolog of GI Number: 15824574 NR Desc: ribosomal protein
  misc_feature: Homolog of GI Number: 78191466 NR Desc: ribosomal protein PETRP
  misc_feature: Homolog of GI Number: 9802532 NR Desc: F17L21.19
  misc_feature: Homolog of GI Number: 40287468 NR Desc: ribosomal protein PETRP
  misc_feature: Homolog of GI Number: 50899126 NR Desc: putative ribosomal protein L17
  misc_feature: Homolog of GI Number: 12240036 NR Desc: ribosomal protein L17
  misc_feature: Homolog of GI Number: 421985 NR Desc: ribosomal protein L17.1
  misc_feature: Homolog of GI Number: 19102 NR Desc: ribosomal protein L17
  misc_feature: Homolog of GI Number: 2668748 NR Desc: ribosomal protein L17

SEQ ID NO: 8149 - DNA, 731 bp, Zea mays
  misc_feature: Ceres CLONE ID no. 1445258
  misc_feature: Ceres CDNA ID no. 40351850
  CDS (155)..(493): REFERENCED BY SEQ ID NO: 8150
aaggaaaccgaggcaggcggcggcagcggcagcggcagcggtagcagcagcgcagggcgcacgcgcttctcgtttcgtgtcgccaggggaaggaggaggagcgagtgggttgggggatcggctggcggccgagggtccgggagctgcgggcggcatggggagggacgagatgctacggcgtagcctcgtggcgctggcggcggccgtggcgctcacggggctggccacggcgttgctgcgcaaggcggcggtcacgtacggcttcggcatcctcgccatcgccggcgtcctgctcccggactgggagttcttcgaccgcgactactcccagtggctaacccccatgcccgcctcccgccgcacggccgccgccgcggctgccgaccgggagcacgacgtctggaaattcaagccgtatcctctccgggtggccatgctgacgacgatctacgggttcggtctttacaagtggtggatgtacgtatctagctagtgtgggtcgtccactcgtcctctccccccttgccgttcctcattgtgagcagatgcgatagatggagtatattgcctggctaatatgctgctgatagcctgatatgaagaaccaccctcaagacaggttgatgtatgtaatgtaacgagcgggtttttgtgatgcgcaaacgccacgccaatcattcttatctggaaacatgaatctaggttttattctttcaaaaaaaaaaaaaaaa

SEQ ID NO: 8150 - protein, 112 aa, Zea mays
  misc_feature: Ceres CLONE ID no. 1445258
  misc_feature: Ceres CDNA ID no. 40351850
MGRDEMLRRSLVALAAAVALTGLATALLRKAAVTYGFGILAIAGVLLPDWEFFDRDYSQWLTPMPASRRTAAAAAADREHDVWKFKPYPLRVAMLTTIYGFGLYKWWMYVSS

SEQ ID NO: 8151 - DNA, 879 bp, Zea mays
  misc_feature: Ceres CLONE ID no. 1445264
  misc_feature: Ceres CDNA ID no. 25445964
  CDS (84)..(617): REFERENCED BY SEQ ID NO: 8152
acccatagctaagcttccatcagcaaattcttctacccagtaacatactacgtgcagacaagtccgactaaaccatcgaatcaatggcgggcgtgagccggagcatggtggcgccgctgctggtgctgaacctggtgatgtacatcgtcgtcatcggcctcgccagctggaacctcaaccacttcatcaacggcaccaccaactacgccggcgtggccggcaacggcgccaccttctacttcctcctcttcgccatcctcgccggcgtggtcggcgccgcctccaagctggccggcgtgcaccacgtcaggacctggcgcggggacagcctctccaccagcgcctcctcggccctcgtcgcctgggccatcacggcgctcgccttcgggctcgcgtgcaaggagatccacgtcggcgggcaccgcggctggcggctccgggtgctcgaggccttcatcatcatactcgccttcacccagctgctttacgtcatggcgctccacgccgggctcttcggcaaccagttcggcgacgggtacggcggcgcggagcaccagtatggcgaccaccaccatcacaagggcatgggcaccgccgccgccacagccagggtctgaccgtcttgagctttaattactctgcttaatttcgtgatgggcgcagatgaacaagatgtatgtacgtatcaatgtatgcgtgtgtgtgtgtgtgtgtgtgtggtgtgagtgtgatgtagctagcatgtatgcatacatggtgcttgtgcatgtactgcagttgttttttcaaggactgtagtgtaggtacacgtactagttctggtcctgtttaatttccatctacgtagtatctactccctgtgcaaaaaaaaaaaaaaaa

SEQ ID NO: 8152 - protein, 177 aa, Zea mays
  misc_feature: Ceres CLONE ID no. 1445264
  misc_feature: Ceres CDNA ID no. 25445964
  misc_feature (14)..(143): Pfam Name: AWPM PFAM Desc: AWPM
  misc_feature: Homolog of GI Number: 6851373 NR Desc: plasma membrane associated protein
  misc_feature: Homolog of GI Number: 1724112 NR Desc: ABA induced plasma membrane protein PM 19
  misc_feature: Homolog of GI Number: 50936401 NR Desc: putative plasma membrane associated protein
  misc_feature: Homolog of GI Number: 50931285 NR Desc: putative plasma membrane associated protein
  misc_feature: Homolog of GI Number: 310570 NR Desc: a Lea protein with hydrophobic domain
  misc_feature: Homolog of GI Number: 50912431 NR Desc: putative ABA
  misc_feature: Homolog of GI Number: 34911480 NR Desc: putative plasma membrane associated protein
  misc_feature: Homolog of GI Number: 20465529 NR Desc: putative plasma membrane associated protein
  misc_feature: Homolog of GI Number: 5420387 NR Desc: proteophosphoglycan
  misc_feature: Homolog of GI Number: 13592175 NR Desc: ppg3
MAGVSRSMVAPLLVLNLVMYIVVIGLASWNLNHFINGTTNYAGVAGNGATFYFLLFAILAGVVGAASKLAGVHHVRTWRGDSLSTSASSALVAWAITALAFGLACKEIHVGGHRGWRLRVLEAFIIILAFTQLLYVMALHAGLFGNQFGDGYGGAEHQYGDHHHHKGMGTAAATARV

SEQ ID NO: 8153 - DNA, 725 bp, Zea mays
  misc_feature: Ceres CLONE ID no. 1445265
  misc_feature: Ceres CDNA ID no. 36699006
  CDS (110)..(355): REFERENCED BY SEQ ID NO: 8154
agagcaggtttgccttcgccttcacaattcgcaccacattattgtcttgtgttgcccgcaacccaaagcggatcaaaccctagatctcgtccccgttcctccgatcctcatggattcctcctcctcctcgtccagcctgagccagcagcccgagttcgattacctcttcaagctgctgcttatcggcgactccggcgtcggcaagagcagcctcctcctccgtttcaccgccgactccttcgaggacctttcccccaccataggtgttgacttcaaggtgaagatggttaccattggtggcaaaaaactcaagcttgccatctgggacacaggaggagagcacagtggcgcgtaggaggagagcaccacaagtgaaacgaaacatcatgagcatgaaactatggcgccagcaccacggcgacctccttgatgaacttggtgccgaggcattagatagcaacctgagacctcatgaagtccaggggtttcaccgccatctcgcaagtcaataagtcatcatcctatataatgaatagaagtgttgtagtgcagcagcgagagtccttaaacttagcagctcatgcagtgtgaagtcattggagatgtcgaaggcaccattgttgtagaagaacagtcgccgcaccgcggcaagtcgatgtcgaatttaagaatgtgaatggcatgccgttagtgctcatggttgcctgccaaaaaaaaaaaaaaaa

SEQ ID NO: 8154 - protein, 81 aa, Zea mays
  misc_feature: Ceres CLONE ID no. 1445265
  misc_feature: Ceres CDNA ID no. 36699006
  misc_feature (21)..(81): Pfam Name: Ras PFAM Desc: Ras family
  misc_feature: Homolog of GI Number: 17104731 NR Desc: putative GTP
  misc_feature: Homolog of GI Number: 1370174 NR Desc: RAB1Y
  misc_feature: Homolog of GI Number: 8778652 NR Desc: F9C16.3
  misc_feature: Homolog of GI Number: 1370172 NR Desc: RAB1X
  misc_feature: Homolog of GI Number: 5902803 NR Desc: Ras
  misc_feature: Homolog of GI Number: 6681328 NR Desc: putative Ras
  misc_feature: Homolog of GI Number: 61365844 NR Desc: RAB1A member RAS oncogene family
  misc_feature: Homolog of GI Number: 55741705 NR Desc: RAB1A
  misc_feature: Homolog of GI Number: 27924279 NR Desc: Rab1
  misc_feature: Homolog of GI Number: 72535190 NR Desc: Ras
MDSSSSSSSLSQQPEFDYLFKLLLIGDSGVGKSSLLLRFTADSFEDLSPTIGVDFKVKMVTIGGKKLKLAIWDTGGEHSGA

SEQ ID NO: 8155 - DNA, 578 bp, Zea mays
  misc_feature: Ceres CLONE ID no. 1445268
  misc_feature: Ceres CDNA ID no. 40351851
  CDS (152)..(484): REFERENCED BY SEQ ID NO: 8156
attataaaataaaatctgagggatgcctcagttgcatgctctccagcgaaccatttgttgacatcatgcatgatctgtatctgctggtttcctggaaatctccatctcggtcgctgctgttgctgaggtcggcggcgcagatcgtcgcaacatgagcatggaggggctcatcccgttcgtttgcggcgcgatcagcaagcggagggcggcgaaaagggctgtggactacgagcgcctctcctccgccggcgctccgccaacgcggggatggggacacgagcgcctccccggcggcgcctacgaccatcctcggagccagagctgccggttcgccgcgcgctcgtcgcccgacgagcgcggtttctcccgtgacgagggtgtccgggacgagccgtctccgccgggcggcgacgggtggcgtggtctgtccaagtcccggaggttcagtagcatgcgcttgtttggatgcgtcagtggcgcgtaggaagagaagaatctgtttggatgtctggtatcgtgtgccgcgagcacagctctgtacagaagaaacgatttgacgagtaaaaaaaaaaaaaaaa

SEQ ID NO: 8156 - protein, 110 aa, Zea mays
  misc_feature: Ceres CLONE ID no. 1445268
  misc_feature: Ceres CDNA ID no. 40351851
MSMEGLIPFVCGAISKRRAAKRAVDYERLSSAGAPPTRGWGHERLPGGAYDHPRSQSCRFAARSSPDERGFSRDEGVRDEPSPPGGDGWRGLSKSRRFSSMRLFGCVSGA

SEQ ID NO: 8157 - DNA, 766 bp, Zea mays
  misc_feature: Ceres CLONE ID no. 1445340
  misc_feature: Ceres CDNA ID no. 36705481
  CDS (48)..(560): REFERENCED BY SEQ ID NO: 8158
ctcgctctcgccgccgccgctgccttctctcccgcgccgccgcagccatggtgaagtactcgacggatcccgccaatcccaccaagtccgccaaggccatgggccgggacctgcgtgttcatttcaagaacactagggaaacagcgcttgccctgaggaagatgtcgctcaacaaggccaagaggtaccttgaggatgtgttggcacacaagcaagccatccccttccggaggtactgccgtggtgttggacgcacagcccaggtgaagaaccgtcagcccaatggtcagggacgctggcctgccaagtctgctaagttcgttctggatcttctaaagaacgctgagagcaatgctgaggtgaaaggtcttgatgttgatgctctctacatttcacacatccaagtgaaccaggcccagaagcagcggcgccggacctaccgtgcccatggacgcatcaacccctacatgtccaacccatgccacattgagctgatcttgtcggagaaggaagagccggtgaagaaggaggctgagtcccagatcgccaggaaggcctagagaaggaagctctacataacctatccgcctattcgttagagcagtttgtagcatctggtttggctgagtggaaatttttggcctgttatctgtgtcgtctaaatactgctagctcatactttgtgaaacccatgatcgtctcatgtactggattcaatattgttgtgttttggaatatttttcatcgtataaaaaaaaaaaaaaaa

SEQ ID NO: 8158 - protein, 170 aa, Zea mays
  misc_feature: Ceres CLONE ID no. 1445340
  misc_feature: Ceres CDNA ID no. 36705481
  misc_feature (17)..(153): Pfam Name: Ribosomal_L22 PFAM Desc: Ribosomal protein L22p/L17e
  misc_feature: Homolog of GI Number: 421985 NR Desc: ribosomal protein L17.1
  misc_feature: Homolog of GI Number: 19102 NR Desc: ribosomal protein L17
  misc_feature: Homolog of GI Number: 12240036 NR Desc: ribosomal protein L17
  misc_feature: Homolog of GI Number: 19104 NR Desc: ribosomal protein L17
  misc_feature: Homolog of GI Number: 421987 NR Desc: ribosomal protein L17.2
  misc_feature: Homolog of GI Number: 50899126 NR Desc: putative ribosomal protein L17
  misc_feature: Homolog of GI Number: 2668748 NR Desc: ribosomal protein L17
  misc_feature: Homolog of GI Number: 50947889 NR Desc: putative ribosomal protein L17
  misc_feature: Homolog of GI Number: 21594923 NR Desc: putative 60S ribosomal protein L17
  misc_feature: Homolog of GI Number: 15824574 NR Desc: ribosomal protein
MVKYSTDPANPTKSAKAMGRDLRVHFKNTRETALALRKMSLNKAKRYLEDVLAHKQAIPFRRYCRGVGRTAQVKNRQPNGQGRWPAKSAKFVLDLLKNAESNAEVKGLDVDALYISHIQVNQAQKQRRRTYRAHGRINPYMSNPCHIELILSEKEEPVKKEAESQIARKA

SEQ ID NO: 8159 - DNA, 1048 bp, Zea mays
  misc_feature: Ceres CLONE ID no. 1445393
  misc_feature: Ceres CDNA ID no. 25400943
  CDS (283)..(699): REFERENCED BY SEQ ID NO: 8160
ctctctcgcactcgcacacaacgcactcttttgtcttctctcctgctcccctgcctccctgtcaagcttacaaccagctgcagctctccccgcttccgcacctctcctgcacagagatttgctgctcctcttgtcggcaggctcgattcctggttgcattccgcagcagcacctcgatctgctcctctgccagtgccagtcgagagattcgattgatgtggtgtgctcttggagccaggggctatttggcactagctttccgtgcttccacccccgaccttgatgaggctctcccattgcgagagccactgcgccggtcccttccgcctcatcccctgcctcccccaatccaaagatgcgagccgcgacgctgccgccgcctctccgccggctccgcgcccagccgctgtcgccgaggaggagccgcctccggttcagaaggtagaggcgccggtagccgccggaagggacgacgacgctgagaagcgcgaggatgtggagaaggcgccggcgctgggtaagagttgcctgaagaaaaccagctgcggcgatgacgagtgcgccgacaaaggcaatgtaaagtggctggatttgatcgggaaagatctggcagagattaaggagtacgagccaagcgaaggcggagacttgcttgacgacggagacggcatctcgacatgtgtttgcgctatccaatgagtcaagaaggaccccgctcattctcgaccatggtgtgttctttcccgtggagggccagggtgtcttcttgtttattatcctccatgagatccaccggaatcacttgctgggtgtaaaccagtctcatcagcagtacatgccgctacagatgcttcgtagcctagccgtagatttgtagtatcagtttgtcagatctgtgtgcagctggttttcagagttgtgttagtgcaggcaggatgttgcctttctgtaaagctttcatactagtaggagaaaattagcttagttcaatctcatctcgagatataaattggaaacaaatcatcttatttgaaaaaaaaaaaaaaaa

SEQ ID NO: 8160 - protein, 138 aa, Zea mays
  misc_feature: Ceres CLONE ID no. 1445393
  misc_feature: Ceres CDNA ID no. 25400943
MRLSHCESHCAGPFRLIPCLPQSKDASRDAAAASPPAPRPAAVAEEEPPPVQKVEAPVAAGRDDDAEKREDVEKAPALGKSCLKKTSCGDDECADKGNVKWLDLIGKDLAEIKEYEPSEGGDLLDDGDGISTCVCAIQ

SEQ ID NO: 8161 - DNA, 753 bp, Zea mays
  misc_feature: Ceres CLONE ID no. 1445523
  misc_feature: Ceres CDNA ID no. 40351852
  CDS (2)..(280): REFERENCED BY SEQ ID NO: 8162
aaaacctccgcccgcccgcgacccaaaagccgaaagcccgaaaccagaggcgggtagggttctagctgcaggcgacggccatggccgcctccgccgccgccccggcgctgcttcgacgcctcttctgcagctctattccagcctcctcctccgtactgcgcgctaccttttgctcctccgccggcttcggctcgtcttctccgtcctccatattcggcgacgccaccgaggtcgccaacgtgccaccgctcaccacgcccaacctcttcgtcagtggtaacgtctctccgcttcgccccgtcccaccaaactcgtcgcactaatacaaaacaggcctttcaaggttaacgacagatgagaagctccagggtgcatttgctcctttcgggaggctccttgaagcaaaagtggtgacggatagagtttctgggaggtcaaagggtttcggtttcgtgagatatgccaccatagaagaggccgagagagcgcggcaggagatgaacgccaagttcctggatggatgggtcatcttcgttgaccctgccaagccaaggcagccaaagcccgctcctcagcaggacactggttcatcgcatgctggcttcacgacgaacaagactgtaggatggtgcggctaggctcattgatctgtcgcgatatttcacggcacaaaacttggattgcaggggtggatctaggggtgttagtcacccggataaaatttataaattctttagaaaaaaaaaaaaaaaa

SEQ ID NO: 8162 - protein, 80 aa, Zea mays
  misc_feature: Ceres CLONE ID no. 1445523
  misc_feature: Ceres CDNA ID no. 40351852
MAASAAAPALLRRLFCSSIPASSSVLRATFCSSAGFGSSSPSSIFGDATEVANVPPLTTPNLFVSGNVSPLRPVPPNSSH

SEQ ID NO: 8163 - DNA, 939 bp, Zea mays
  misc_feature: Ceres CLONE ID no. 1445529
  misc_feature: Ceres CDNA ID no. 36593553
  CDS (232)..(681): REFERENCED BY SEQ ID NO: 8164
gtaccaccgttttttccttctctatgaaagtctgaaaatagctagtgcggagcgtgcctctgcggtccgataggcgggttcgcatccggccatccgatactgtgccagtgcggccgcgcggcggcggagcaaccacgcgcgcagaccgccgtcgccacctcctccctccctccgctccccggcgtgcgtccgatccaccaggaatcgaaggctcccacacgccccaacgcgatgctgcgcaacttcccgcaggcccggaggctcctcaggcggatggggttcgagaaggaggacgcctacttctggaagcagatgggcaaggccatgctctgcacgtacacgctcttcggcgtcgtctggctctggaacgagacgtcgccgctcgggtggtggacgctgaagccgcgccccaaggaagaaagagagatggcacacctctatgagcgcaggaagttcccgtaccctggcgatgatgaggcggtcgaggagtttgtaaagagcggaggtgctcttggaaccacaattggacccaggggattcgctgacgccaatatggattctgaaaacatgcagaagcagctgcagtctaagaagttcgagcaggaagcacagaaactgtggattcggatgaggaatgaggtcgtacaggagctccaggagaaggggtttgatatcgagtgaatttgaaaacctgcagtatggtcggcgctgaggatgttaaaacttaaaaccacttgccatctaaattggagaactgtataacttaggaataaaagagtttgtagctatctttttaactaactatctggtgcattcttggtgctgctagattgtaccgaaaataatttttgctgtcttgtggagaacagaggatctcatttgaatatttgatcctcttttaatgtttcttattgcctgatcaaaaaaaaaaaaaaaaaa

SEQ ID NO: 8164 - protein, 149 aa, Zea mays
  misc_feature: Ceres CLONE ID no. 1445529
  misc_feature: Ceres CDNA ID no. 36593553
  misc_feature: Homolog of GI Number: 50900870 NR Desc: P0460H02.16
MLRNFPQARRLLRRMGFEKEDAYFWKQMGKAMLCTYTLFGVVWLWNETSPLGWWTLKPRPKEEREMAHLYERRKFPYPGDDEAVEEFVKSGGALGTTIGPRGFADANMDSENMQKQLQSKKFEQEAQKLWIRMRNEVVQELQEKGFDIE

SEQ ID NO: 8165 - DNA, 664 bp, Zea mays
  misc_feature: Ceres CLONE ID no. 1445564
  misc_feature: Ceres CDNA ID no. 25891135
  CDS (55)..(492): REFERENCED BY SEQ ID NO: 8166
gtgattagctaaaaatttggtccatccatccatccgtagttcgatacagacaccatgccgaagaacaagggaaaaggaggaaagaacaggaagagaggaaagaatgaagctgatgacgagaagcgtgagcttatcttcaaggaagatggccaagagtacgctcaagtcctccgcatgctcggcaatggccgatgcgaagccatgtgcattgacggcaccaaacgtctctgccatatccgtggtaagatgcacaagaaggtctggatcgcagccggtgacatcgtccttgttggcctgagggactaccaagatgacaaagctgacgtcatcctcaagtacatgtctgacgaggccaggcttctcaaggcctatggtgagcttcctgagaatacccgtcttaacgaagacattgtcggtgatctcgatgaagatgacgataatgcggctgatgattacgttgagtttgaggacgaggatatcgataggatctaagtttgttttgcttggccttgtaatatcaaagtttgatgatgcacatcttctgagaaactggagagaaaccatgaatgttaaaataaagaatattgttatgtgtttcggtatcactattatcatttgattccccaaataatttacagaacgttcttcaaaaaaaaaaaaaaaa

SEQ ID NO: 8166 - protein, 145 aa, Zea mays
  misc_feature: Ceres CLONE ID no. 1445564
  misc_feature: Ceres CDNA ID no. 25891135
  misc_feature (13)..(113): Pfam Name: eIF PFAM Desc: Eukaryotic initiation factor 1A
  misc_feature: Homolog of GI Number: 21618180 NR Desc: putative translation initiation factor eIF
  misc_feature: Homolog of GI Number: 15450561 NR Desc: At2g04520/T1O3.7
  misc_feature: Homolog of GI Number: 81076307 NR Desc: putative translation initiation factor eIF
  misc_feature: Homolog of GI Number: 17977975 NR Desc: translation initiation factor
  misc_feature: Homolog of GI Number: 3024017 NR Desc: Eukaryotic translation initiation factor 1A
  misc_feature: Homolog of GI Number: 50907237 NR Desc: eukaryotic translation initiation factor 1A
  misc_feature: Homolog of GI Number: 31043871 NR Desc: eukaryotic translation initiation factor 1A
  misc_feature: Homolog of GI Number: 1352427 NR Desc: Eukaryotic translation initiation factor 1A
  misc_feature: Homolog of GI Number: 626041 NR Desc: translation initiation factor eIF
  misc_feature: Homolog of GI Number: 76659720 NR Desc:  eukaryotic translation initiation factor 1A
MPKNKGKGGKNRKRGKNEADDEKRELIFKEDGQEYAQVLRMLGNGRCEAMCIDGTKRLCHIRGKMHKKVWIAAGDIVLVGLRDYQDDKADVILKYMSDEARLLKAYGELPENTRLNEDIVGDLDEDDDNAADDYVEFEDEDIDRI

SEQ ID NO: 8167 - DNA, 1183 bp, Zea mays
  misc_feature: Ceres CLONE ID no. 1445658
  misc_feature: Ceres CDNA ID no. 25447061
  CDS (281)..(802): REFERENCED BY SEQ ID NO: 8168
attttaacaattcggattacgactttcatccctgcccggcggccacgggccgtgacagactcgagcccgtccgccgccttcgccgcgccgcctccgcctcctccatcgcacgccggctccgctgcctccatccgcgcacgtccgcctccactgtctccatccgctcgggagccgccgccctccgcgctaggcctcgcctccgtctggtctggattcttcgacacctgggcgctccgcgtcgccgacttctcgcaggcggagagcatccttgatagacctgatggctatcgcagagagctgtgttgatgcggtggtcatggagatggtagcagtctactgcggtggcctctacaccgccaaaccagagcttgctgcccgccgcatcgaggccatcggcttccaagtcgggcaccagctctctgagagatataccatggagcgccctcgatttagtgatcatcttgaagcaatcaagtttatctgcaaagatttttggtcagagctgttcaagaagcagattgacaatctgaaaacaaatcacaggggtacctttgtccttcaagataaccgttttcggtggcttactcgtgtttctctagatccacgtatagagaacacagattcaactgaaaatgattctgcagcattgggtgatactgcagcccaaacgactaccatgcttctgtatttcccatgcgggttgataagaggtgccttgaccaacttaggaatttcgtgttctgtctctgctgacatgtcaaaccttccagcatgttcgtttgtggtgcgcataaagacatgaactgtgaggaatgatacaagtacagtacgaagattcgacagtatctgcttgtggttcaagccgggttgaacattgaagatagcagagtttgggcatgcattagatgtattgtggtactgcagaaatattctgtgtagctgttggtttctgtttccgttacttccagcagttacctgttttcactacctcaattgtttccccacctcttcgtgaccgtattccagagtttaggttggccattcctgcactctaggtagccgccactggcaccatttgtgagagttaaactatggttgttggttgcattatctctgtggcctgtgatagcacccttaaagcatgattcttgccatgattcgtgtgctaaaaaaaaaaaaaaaa

SEQ ID NO: 8168 - protein, 173 aa, Zea mays
  misc_feature: Ceres CLONE ID no. 1445658
  misc_feature: Ceres CDNA ID no. 25447061
  misc_feature (7)..(173): Pfam Name: TRAPP_Bet3 PFAM Desc: Transport protein particle
  misc_feature: Homolog of GI Number: 51963712 NR Desc: PREDICTED OSJNBa0069P02.11
  misc_feature: Homolog of GI Number: 51963714 NR Desc: PREDICTED OSJNBa0069P02.11
  misc_feature: Homolog of GI Number: 72100686 NR Desc:  similar to trafficking protein particle complex 6b
  misc_feature: Homolog of GI Number: 53733879 NR Desc: Zgc:103464
  misc_feature: Homolog of GI Number: 50748454 NR Desc:  similar to Trafficking protein particle complex subunit 6B
  misc_feature: Homolog of GI Number: 66845182 NR Desc: BET3 family protein
  misc_feature: Homolog of GI Number: 55640645 NR Desc:  similar to Trafficking protein particle complex subunit 6B
  misc_feature: Homolog of GI Number: 68402675 NR Desc:  similar to Trafficking protein particle complex 6b
  misc_feature: Homolog of GI Number: 57227169 NR Desc: ER to Golgi transport
  misc_feature: Homolog of GI Number: 57037887 NR Desc:  similar to NTPase
MAIAESCVDAVVMEMVAVYCGGLYTAKPELAARRIEAIGFQVGHQLSERYTMERPRFSDHLEAIKFICKDFWSELFKKQIDNLKTNHRGTFVLQDNRFRWLTRVSLDPRIENTDSTENDSAALGDTAAQTTTMLLYFPCGLIRGALTNLGISCSVSADMSNLPACSFVVRIKT

SEQ ID NO: 8169 - DNA, 1109 bp, Zea mays
  misc_feature: Ceres CLONE ID no. 1445796
  misc_feature: Ceres CDNA ID no. 25447010
  CDS (170)..(535): REFERENCED BY SEQ ID NO: 8170
acctagaaaatcctaatcgaaaaaccacacccaaggcagccagtgagccagaaagaagaagaggccattcgaagctgccacgcacgccacgcggaaaccattcgagtccacgaggacgaggagcagcagcagaagaaagggcaaggaacatcctccggtggccgccgccatggccggctgctgcgtgttcctccggtggccgtcggcctcgccgtcgcgcatcggctaccgctccctcgtccacacggcggccgacgacggcgccccgccgtcgacggtgacggtcgtggtcgggaaggagcggcgggcgttcgcggtggaccgcctcgtgctcgactcctacccgctccggctgctcctggagacggcggcgcgcagggaggagcgcagggccgggggcggcgccatcttcgtggacgtcgacgccatcctcttcgagcacatcctctggctcgcctgcgacgcccgctccgtctcccagatcctgcacctcgacctcaaggagatcatcgacttctacgctcaggacgcgtgactggtccaccactctcagctgcgcggctccggctccggctcctcctcctccctggacacgtactcctcaccacctgcgcgtttcttccatggatggatattcttttttttttctttcttcctttcgtcctctcttacgctaatgcgcgtattgatgcgcgtgatactattggaaattaatacagaacagaaacgattaggaagttctcttgcgatccggacaagtaattcggttccggtcattgtcactccataagaggtgtctgaaccctgaacatccaccaactcgaaactcttgaccgtttcgttctcgcgatctggtgacccgtcgactacctgacaaagaaaaaggctgagacacaggaaaacgatggggctgttccttctaggcaatcgcgtccttttgtgtgtatataccggacaccagctacccgattactgtacgcgtttgcatccttttattttatactacaagatccatttaccacatgtttggaatacaggattttcattaagctttgcgtttttcttgtggaactgaatggattaagaagtcattaaaaaaaaaaaaaaaa

SEQ ID NO: 8170 - protein, 121 aa, Zea mays
  misc_feature: Ceres CLONE ID no. 1445796
  misc_feature: Ceres CDNA ID no. 25447010
  misc_feature: Homolog of GI Number: 67987177 NR Desc: 4Fe
  misc_feature: Homolog of GI Number: 58381251 NR Desc: ENSANGP00000017440
  misc_feature: Homolog of GI Number: 7407131 NR Desc: SanE
MAGCCVFLRWPSASPSRIGYRSLVHTAADDGAPPSTVTVVVGKERRAFAVDRLVLDSYPLRLLLETAARREERRAGGGAIFVDVDAILFEHILWLACDARSVSQILHLDLKEIIDFYAQDA

SEQ ID NO: 8171 - DNA, 784 bp, Zea mays
  misc_feature: Ceres CLONE ID no. 1445871
  misc_feature: Ceres CDNA ID no. 40351853
  CDS (3)..(335): REFERENCED BY SEQ ID NO: 8172
gacccgtcactacggccgaccccgactcggcggctgcaccgcaatccgaccgaccgccgtccgtccctctccacgccgtctgccgccgcatcaatccagcaggcagcgacctaggggctgtccgtgtccggttgggaggcgccgggcgcactggggtgggcggctgcccgcctggccggccagccgtaagcgccgagcggcgtgccggcatctccgttgcggtgtgggcaaggcaccagcggccaggtccgcaggagctcgggatcgggcttgtgctgagcattgtgggcgcaactgttagagatccgactttattcctgaaggcatttgtctgaactttttcggaaatgagtgccggtggtgcttttggtggaaatagggggctgaggcctgtaccccctgaaaaaggtgtattcccattggaccacttacatgagtgcgacttggagaagaaagactatcttgcctgcctgaaatctacagggtttcaatctgaaaaatgtcgacagttctcaaagaagtatctggaatgtcgaatggagagaaacttgatggcgaagcaagacatgtcagagcttgggttcagaaatgtggacaaagcgtatacatctcctgacacgaacagccaactggagagccctcctaatgagcaaaaggagaacaaaatagccgtttgattttgatgtagcttttgtatgtttcttcgtccaggagatctgtatgagaacgaataagggtataatgagaaggaaacgctagtgagtaaccaaaaaaaaaaaaaaaa

SEQ ID NO: 8172 - protein, 109 aa, Zea mays
  misc_feature: Ceres CLONE ID no. 1445871
  misc_feature: Ceres CDNA ID no. 40351853
  misc_feature (24)..(65): Pfam Name: CHCH PFAM Desc: CHCH domain
MSAGGAFGGNRGLRPVPPEKGVFPLDHLHECDLEKKDYLACLKSTGFQSEKCRQFSKKYLECRMERNLMAKQDMSELGFRNVDKAYTSPDTNSQLESPPNEQKENKIAV

SEQ ID NO: 8173 - DNA, 997 bp, Zea mays
  misc_feature: Ceres CLONE ID no. 1445883
  misc_feature: Ceres CDNA ID no. 35383402
  CDS (120)..(809): REFERENCED BY SEQ ID NO: 8174
accctattttcgtttgccgtctcttctcacttcgcaccctgcattccaaaacctctcaaaaccctcgttctccccactccctgcctccgccgccgccgccgccgccggtgcctagcaagatgagtcggcaccctgaagtcaggtgggctcagaggattgacaaggtgtatatcacagtacaattgcctgacgcaaaggatgccaaggtcaacctggaacctgatggtgtattctctttctttgccactgctggaactgatgggaactcctatgaatcgaaactggatttgaatgacaaagtgaatgttgaggcaagcaaagtaagtgttggtgtcaggtccatattctgtattttggaaaaagccgacgccaaatggtggaataagcttgttcgagatgatcagaaggcaccacacttcgtgaaagttgattgggacaaatgggtcgatgaagatgatgatggtgctgatgttaatgttgatgggatggacttttcgaatatgggtggcatgggcggtatgcctggcatggaaggtttgggcggcatgggtggcatgggtggtatgcccggcatggaaggtttgggtggtatgggtggtttggctggtatgatgggtggtatgggcggtatgggtggtatgggcatgccgcctggtatggaaggtttgggtggtatggggatggatgattttgaggatgagagtgacgacgaaggagaagtgtcgaaacctcaagacgcagggaagtctgatgctgcggaaatctctgaggtggaaggcaaagctggcacagcagctcagagcaactgaaggctttctactcaataatccctactcgattgtatcctaccgtttctttatcaacgtgctgaactgaaggacacgttctgctcgctggttgggaatggtgtctcatgtaagatgatgacttatacttgtgtcgaactaagcttcgtaccgtctgttggcatattacgagtccaaaaaaaaaaaaaaaa

SEQ ID NO: 8174 - protein, 229 aa, Zea mays
  misc_feature: Ceres CLONE ID no. 1445883
  misc_feature: Ceres CDNA ID no. 35383402
  misc_feature: Homolog of GI Number: 50944819 NR Desc: putative p23 co
  misc_feature: Homolog of GI Number: 23308253 NR Desc: At4g02450/T14P8_5
  misc_feature: Homolog of GI Number: 11229591 NR Desc: p23 co
  misc_feature: Homolog of GI Number: 23482571 NR Desc: 34 kDa phosphoprotein
  misc_feature: Homolog of GI Number: 76904112 NR Desc: p23
  misc_feature: Homolog of GI Number: 11934654 NR Desc: p23
  misc_feature: Homolog of GI Number: 50920807 NR Desc: putative ripening regulated protein
  misc_feature: Homolog of GI Number: 45185173 NR Desc: ABL057Wp
  misc_feature: Homolog of GI Number: 886764 NR Desc: p23
  misc_feature: Homolog of GI Number: 309692 NR Desc: heat shock related protein
MSRHPEVRWAQRIDKVYITVQLPDAKDAKVNLEPDGVFSFFATAGTDGNSYESKLDLNDKVNVEASKVSVGVRSIFCILEKADAKWWNKLVRDDQKAPHFVKVDWDKWVDEDDDGADVNVDGMDFSNMGGMGGMPGMEGLGGMGGMGGMPGMEGLGGMGGLAGMMGGMGGMGGMGMPPGMEGLGGMGMDDFEDESDDEGEVSKPQDAGKSDAAEISEVEGKAGTAAQSN

SEQ ID NO: 8175 - DNA, 509 bp, Zea mays
  misc_feature: Ceres CLONE ID no. 1445884
  misc_feature: Ceres CDNA ID no. 36707112
  CDS (74)..(322): REFERENCED BY SEQ ID NO: 8176
attgattgattggacggacgcgcgtctccggtcccgtccgtaataacactgatccgatccacgccggccggcgatggagctcatcaagtccagggcgaccgtgtgcgcgctcctcctggcgctgctcctgctctcacactacgacggcgggacgacgacgacgatggtggcggaggcccgggtgtgcatgggcaagagccagcaccactcgttcccctgcatctccgaccgcctctgcagcaacgagtgcgtcaaggaggacggcgggtggaccgccggctactgccacctccgctactgcaggtgccagaaggcgtgctaagcaaagctcttcaaacacccttggcttgccagaactgaactctagtagtactaagtaacacccttggctagctgtgcacaacctacgtaccgtgcatgcatgtaatgtggtgtcatgtaacgtgacagcaataaatagtattaataataataacacggcatgtagccaagcaaaaaaaaaaaaaaaa

SEQ ID NO: 8176 - protein, 82 aa, Zea mays; identical to SEQ ID NO: 4784
  misc_feature: Ceres CLONE ID no. 1445884
  misc_feature: Ceres CDNA ID no. 36707112
  misc_feature (36)..(82): Pfam Name: Gamma PFAM Desc: Gamma
  misc_feature: Homolog of GI Number: 2130034 NR Desc: gamma
  misc_feature: Homolog of GI Number: 2501197 NR Desc: Gamma
  misc_feature: Homolog of GI Number: 1173436 NR Desc: Small protein inhibitor of insect alpha
  misc_feature: Homolog of GI Number: 7451437 NR Desc: gamma
  misc_feature: Homolog of GI Number: 7451438 NR Desc: omega
  misc_feature: Homolog of GI Number: 533692 NR Desc: protease inhibitor

SEQ ID NO: 8177 - DNA, 637 bp, Zea mays
  misc_feature: Ceres CLONE ID no. 1445930
  misc_feature: Ceres CDNA ID no. 25446117
  CDS (127)..(423): REFERENCED BY SEQ ID NO: 8178
acttcacccctctcaatctcgctcatcactctctccctcctcatcctcacgtcgccactagcgtacctgctctctctgttctcgagctagctcacatcagggggaggaaccagcacctgcctcgccatgtcgtcctccatggtgtccaagaacgcgccgccgccggccgggtacggcgacggcgaaggcagcgtcgtcgaggccgcgccggtgacgagctgcctgtacctgcgccccggggcgggggcgctggacagggacgccgtgctgcgccgcatccgccaccggaggcgccacgaccgcctccacgacacgctgcgctccatggtgcaggcgccgccgcggtccgctgagccggacggcatggacggcaccgaacggcacctcccgtggccgctcgacgacgccttctcggcgccgtagcttttgtaatatagaattagtctcttgtgcagattaagcaaatgcacatggaacatgatccagttcgcctcttcttgtgtagactgtcaagaacagatgcaagttaaataatcgcccatgtagtgctagtgcagtagatgtatgtatgcaagttactgcaaggatggagccatggatatatgcaaggattgttttgggaaaaaaaaaaaaaaaa

SEQ ID NO: 8178 - protein, 98 aa, Zea mays
  misc_feature: Ceres CLONE ID no. 1445930
  misc_feature: Ceres CDNA ID no. 25446117
MSSSMVSKNAPPPAGYGDGEGSVVEAAPVTSCLYLRPGAGALDRDAVLRRIRHRRRHDRLHDTLRSMVQAPPRSAEPDGMDGTERHLPWPLDDAFSAP

SEQ ID NO: 8179 - DNA, 819 bp, Zea mays
  misc_feature: Ceres CLONE ID no. 1445966
  misc_feature: Ceres CDNA ID no. 40351854
  CDS (1)..(633): REFERENCED BY SEQ ID NO: 8180
attttctcttcccactcgacgcagcttcgcttccgcaactctctttgcttcctctctctccgctcgattgtcgatctccttcaaatggcgtcggagaagaagctgtcaaacccaatgagggacattaaggtccagaaacttgttctgaacatctccgttggtgagagtggtgatcgcctcactcgtgcctccaaggttttggaacagctaagcggacaaacccctgttttctcaaaggcgaggtacacagtgaggtcttttggtatcaggcgtaacgaaaagattgcctgctatgtcactgtgagaggtgacaaggcaatgcagcttcttgaaagtggtttgaaagttaaggagtatgagcttcttaggaagaactttagtgacactggttgctttggtttcggtatccaagaacacattgatcttggtatcaagtatgatccatctaccggtatctatggaatggacttctatgtagttcttgaacgtccaggataccgtgttgctcgtcgccgtagatgcaaggctcgtgttggtatccaacacagagtgactaaggatgatgcaatgaaatggttccaagttaagtatgaaggagttatcctcaacaagtctcagaacatcactggctaaattgtacttgaatcttcatagatttttgttgattctagcttttgtttttcaagttatcatctttactttttctggatattgaagccagtgtggtagaaactaaatttccaagttgtatgagttactgtttttgtttttttacaattatcaaaaccttggacttcaatgttaaaaaaaaaaaaaaaa

SEQ ID NO: 8180 - protein, 182 aa, Zea mays
  misc_feature: Ceres CLONE ID no. 1445966
  misc_feature: Ceres CDNA ID no. 40351854
  misc_feature (66)..(165): Pfam Name: Ribosomal_L5_C PFAM Desc: ribosomal L5P family C
  misc_feature (9)..(62): Pfam Name: Ribosomal_L5 PFAM Desc: Ribosomal protein L5
MASEKKLSNPMRDIKVQKLVLNISVGESGDRLTRASKVLEQLSGQTPVFSKARYTVRSFGIRRNEKIACYVTVRGDKAMQLLESGLKVKEYELLRKNFSDTGCFGFGIQEHIDLGIKYDPSTGIYGMDFYVVLERPGYRVARRRRCKARVGIQHRVTKDDAMKWFQVKYEGVILNKSQNITG

SEQ ID NO: 8181 - DNA, 775 bp, Zea mays
  misc_feature: Ceres CLONE ID no. 1445989
  misc_feature: Ceres CDNA ID no. 25891048
  CDS (56)..(613): REFERENCED BY SEQ ID NO: 8182
ctcccgattctttggtgttaataacagtagcaaagttagtctggacagtgaaaccatggcaaccaaagaagatgtgcaagatcccagaatccccaagatcgcatcttccattagagtcatccccgacttccctaaaccagggatcatgtttcaagacataacgacgctgcttctggacactgaggcctttaaggacaccgttgatatttttgttgaaagatacaaaggcaaaggcatctctgttgttgctggtgtggaagcaagaggtttcatttttggacctcccattgcgttggctattggtgccaaatttgttcccatgaggaagcccaagaagcttcctgggaaggtgatctcggaggagtattctttggagtatggaacagataagatagagatgcatgtaggtgctgttgagcctggtgagcgtgctatcatcattgatgacctcattgccactggtggcactctcgctgctgctatccgtctccttgagcgagtaggagtgacgattgctgagtgtgcttgcgtcattgagttacctgtgctcaagggaagggagaagctaggagagacgccactttttattcttgtcacctctgatgctgcttaacaagaagtaaccaccctataaggacataatggggttttattattggaatcatatcaaacatgttatttttcattgtattgcttttgggatttgatcctttgttattctcaactttatcataattgcctcagacaagaaactcgagcaaaaaaaaaaaaaaaa

SEQ ID NO: 8182 - protein, 185 aa, Zea mays
  misc_feature: Ceres CLONE ID no. 1445989
  misc_feature: Ceres CDNA ID no. 25891048
  misc_feature (34)..(170): Pfam Name: Pribosyltran PFAM Desc: Phosphoribosyl transferase domain
  misc_feature: Homolog of GI Number: 32492063 NR Desc: adenine phosphoribosyltransferase
  misc_feature: Homolog of GI Number: 21536559 NR Desc: adenine phosphoribosyltransferase 1
  misc_feature: Homolog of GI Number: 23198324 NR Desc: adenine phosphoribosyltransferase 1
  misc_feature: Homolog of GI Number: 9802535 NR Desc: F17L21.24
  misc_feature: Homolog of GI Number: 82621166 NR Desc: adenine phosphoribosyltransferase
  misc_feature: Homolog of GI Number: 77556961 NR Desc: adenine phosphoribosyltransferase
  misc_feature: Homolog of GI Number: 9711921 NR Desc: Adenine phosphoribosyltransferase
  misc_feature: Homolog of GI Number: 726305 NR Desc: adenine phosphoribosyltransferase form 1
  misc_feature: Homolog of GI Number: 50937177 NR Desc: putative adenine phosphoribosyl transferase
  misc_feature: Homolog of GI Number: 28393997 NR Desc: putative adenine phosphoribosyltransferase
MATKEDVQDPRIPKIASSIRVIPDFPKPGIMFQDITTLLLDTEAFKDTVDIFVERYKGKGISVVAGVEARGFIFGPPIALAIGAKFVPMRKPKKLPGKVISEEYSLEYGTDKIEMHVGAVEPGERAIIIDDLIATGGTLAAAIRLLERVGVTIAECACVIELPVLKGREKLGETPLFILVTSDAA

SEQ ID NO: 8183 - DNA, 774 bp, Zea mays
  misc_feature: Ceres CLONE ID no. 1446074
  misc_feature: Ceres CDNA ID no. 25446118
  CDS (137)..(625): REFERENCED BY SEQ ID NO: 8184
ctcaacctctagccacttcccagggttaaccgcaaaagccaaaatccggtcgcccgctcactccaatccacgttcttcattcctctccctccatagggttttgtgaactctcctgtttgggcaccaccgtcggcccatggcgaccacgaccttccccacctcgaccccattctttgcggcccatcacggcccccgccggagccgaccctccatctccgccgcggtctacagccgcagccgccggtggcgcccgctgcgggtggcgtgcgagaaggtggtaggcatcgacctggggaccacaaattccgcggtggcagctatggagggcggcaagcccacgatcgttaccaacgccgagggggcgcggaccacgccctcggtggtggcgtacaccaagtccggcgacctcctcgttggccagatcgccaagcgccaggccgtcgtcaacccggagaacaccttcttctccgtgaagcgcttcatcggccgcaagatgaacgaggtagacgaggagtccaagcaggtctcgtatcgcgtcatcagggacgacaacggcaacgtcaagctcgattgcccggcgattggcaagcagttcgcagctgaggagatttccgcacaggtttaacactaacttcgaatgtatctccacttctccgagagatttgccattatggatgtcctcagaagcggcttcgacgttttggaggcgtaggcgggggattctctattatggaaaacaaggggacaacccacactccaaaaaaaaaaaaaaaa

SEQ ID NO: 8184 - protein, 162 aa, Zea mays
  misc_feature: Ceres CLONE ID no. 1446074
  misc_feature: Ceres CDNA ID no. 25446118
  misc_feature (47)..(162): Pfam Name: HSP70 PFAM Desc: Hsp70 protein
  misc_feature: Homolog of GI Number: 871515 NR Desc: Psst70
  misc_feature: Homolog of GI Number: 445605 NR Desc: heat shock protein hsp70
  misc_feature: Homolog of GI Number: 18175969 NR Desc: putative hsp 70 protein
  misc_feature: Homolog of GI Number: 77554415 NR Desc: chaperone protein DnaK
  misc_feature: Homolog of GI Number: 1143427 NR Desc: heat shock protein 70
  misc_feature: Homolog of GI Number: 6746592 NR Desc: heat shock protein 70
  misc_feature: Homolog of GI Number: 30725578 NR Desc: At5g49910
  misc_feature: Homolog of GI Number: 24030296 NR Desc: putative heat shock protein 70
  misc_feature: Homolog of GI Number: 1928991 NR Desc: heat shock protein 70 precursor
  misc_feature: Homolog of GI Number: 2654208 NR Desc: heat shock 70 protein
MATTTFPTSTPFFAAHHGPRRSRPSISAAVYSRSRRWRPLRVACEKVVGIDLGTTNSAVAAMEGGKPTIVTNAEGARTTPSVVAYTKSGDLLVGQIAKRQAVVNPENTFFSVKRFIGRKMNEVDEESKQVSYRVIRDDNGNVKLDCPAIGKQFAAEEISAQV

SEQ ID NO: 8185 - DNA, 809 bp, Zea mays; identical to SEQ ID NO: 4723
  misc_feature: Ceres CLONE ID no. 1446090
  misc_feature: Ceres CDNA ID no. 25445493
  CDS (186)..(566): REFERENCED BY SEQ ID NO: 8186

SEQ ID NO: 8186 - protein, 126 aa, Zea mays; identical to SEQ ID NO: 4724
  misc_feature: Ceres CLONE ID no. 1446090
  misc_feature: Ceres CDNA ID no. 25445493
  misc_feature (16)..(120): Pfam Name: KE2 PFAM Desc: KE2 family protein
  misc_feature: Homolog of GI Number: 13446646 NR Desc: VIP3 protein
  misc_feature: Homolog of GI Number: 13446644 NR Desc: VIP3 protein
  misc_feature: Homolog of GI Number: 6996146 NR Desc: VIP3 protein
  misc_feature: Homolog of GI Number: 28466891 NR Desc: At1g08780
  misc_feature: Homolog of GI Number: 9802572 NR Desc: F22O13.27
  misc_feature: Homolog of GI Number: 21554096 NR Desc: probable prefoldin subunit 4
  misc_feature: Homolog of GI Number: 45198557 NR Desc: AFR039Cp
  misc_feature: Homolog of GI Number: 62660893 NR Desc:  similar to prefoldin 4
  misc_feature: Homolog of GI Number: 48103768 NR Desc: similar to CG8378

SEQ ID NO: 8187 - DNA, 793 bp, Zea mays
  misc_feature: Ceres CLONE ID no. 1446200
  misc_feature: Ceres CDNA ID no. 25445707
  CDS (4)..(411): REFERENCED BY SEQ ID NO: 8188
agaatgttcccctccagctccgccaccggcccccgcttccttcgccccttcaccgccaccgcaccccgccgtgccatggcggcatgcacgggcgccccaagcgacccgccgatgcagcagtcttctcccaccaaggcggtgcgcgtggtggtgaaggggcgcgtgcagggcgtcttcttccgggactggaccgtggagatggcgcgctccctggggctcgccgggtgggtccgcaaccgccgcgacggcaccgtggaggcgctactctccggggacccggacaaggtggacgagatggtgtcccggcggatccccgtcggcccgcccgccgccgtcgtcaccgctgttgtaccctcccccgctgaaccggtctcccccgacgagggcttccaccgcaagcccaccgcctgatttatggctggttcgtcggccatccgtggggcgtggtcattggccagcggcgccacgcgcctgtggtaatcaatctactgaagaacactgaagaacacgtacattcttttcctggagattgctagcgctaatttatggtgttgaatcaataatctcaatcttgacgatgagctgcttcgatgagtggacaaggattgtgactgctcgatacactcggttcttgtgatcatgtcttatgcagccctgtgaactgtggtgtttctgacaactatgccgtgcctgtaattattatctactatgttccgagagaaacggttatgtatggcttatttgcgcttagtttgctttatttctatggattgtttcaaaaaaaaaaaaaaaa

SEQ ID NO: 8188 - protein, 111 aa, Zea mays
  misc_feature: Ceres CLONE ID no. 1446200
  misc_feature: Ceres CDNA ID no. 25445707
  misc_feature (18)..(84): Pfam Name: Acylphosphatase PFAM Desc: Acylphosphatase
  misc_feature: Homolog of GI Number: 29028786 NR Desc: At5g03370
  misc_feature: Homolog of GI Number: 46200875 NR Desc: COG1254: Acylphosphatases
  misc_feature: Homolog of GI Number: 69930730 NR Desc: Acylphosphatase
  misc_feature: Homolog of GI Number: 48765710 NR Desc: COG1254: Acylphosphatases
  misc_feature: Homolog of GI Number: 46106504 NR Desc: COG1254: Acylphosphatases
  misc_feature: Homolog of GI Number: 68561608 NR Desc: Acylphosphatase
  misc_feature: Homolog of GI Number: 68549903 NR Desc: Acylphosphatase
  misc_feature: Homolog of GI Number: 61841937 NR Desc:  similar to Acylphosphatase
  misc_feature: Homolog of GI Number: 57092933 NR Desc:  similar to acylphosphatase
MAACTGAPSDPPMQQSSPTKAVRVVVKGRVQGVFFRDWTVEMARSLGLAGWVRNRRDGTVEALLSGDPDKVDEMVSRRIPVGPPAAVVTAVVPSPAEPVSPDEGFHRKPTA

SEQ ID NO: 8189 - DNA, 1803 bp, Zea mays
  misc_feature: Ceres CLONE ID no. 1446204
  misc_feature: Ceres CDNA ID no. 35383403
  CDS (295)..(1500): REFERENCED BY SEQ ID NO: 8190
aaggaatgccatcagccacatcgccctctccagctctcattaaaaaacctcttgcctgggggcggagctttcgaagctcgcccattgcctcccagtctcccaccctcgcaaccatcaccgccgcccaccgttcccaccgccgcggcctttatttctcccccttccatgccccgctcgcctccgccacctccccctcctcccgcccctaggtgactgtgactccctccggcgcctgaatctccatctcgctccccacccgccgcctccgccgcgagatctccggctgcccgcgccatggtcgccgcctccggccttgcgctgccgcgggtggccgcaccctgcccggcgcgcccgcggggtggtctccgccccgccttgctccgattcgcgccgcccgtggcactgccaccgcaccagctccggtgctgcgcgtccaccgtcgatgacggcttggtgtccgcagcggcctccaagccccgcctccccagggtggttggtatgggttcaaagcttgtcggatgtggatcagccatcccaacacttggcgtttcaaatgatgacctttcaaaaatagttgagacgtcagatgaatggattgcagctcgaactgggattcgtaacaggcgagttctttcaggagatgaaacattgcgggggctctcaataaaagcagctcaaagggcacttgaaatggccaaagtaaaagctgaagatgttgaccttgttctcctttgtacatctactccagatgatttgtttggaggtgccactcaggtgctgacggacgtggggtgcacaaaggcttttggatttgatattacagctgcttgcagtgggtttatagttggcttaatcacagctactcgttttatcaaaggtggaggttttcagaatatcttagtagttggtgctgatgctctttcaaaatatgtggattggacagacagaggtacatgcatcctttttggtgatgctgctggtgctgtgttggtacaggcatgcagcgctgatgaagatggcttgctaggtttttgtgttcaaagtgatggcaatgggcaaaaacacctaaatgccgcaacggcaaacgatgagtcaatcttgtccaataccaatggtgttcctggatttccgccaaagaaggcaacctactcatgcattcagatgaacggaaaggaagttttccgctttgctgtccgatgtgtgccacagtccattgagaaggcactccaagaagctggtttgcccgcctccagtatagactggttgttgctacatcaagctaatcagcggattattgatgcggctgccagtcgattagatatcccgtctgacaaggtcatttcaaatcttgccaactatggcaataccagcgcggcatccatcccgttagctttggatgaggctgttcgcagtggcaaggtgaaggctggcgatattattgcggcgtcaggttttggtgctggacttacctggggttcagctattgtcaagtggggctaattatttgacgtgaaccgtaaacatatcaatgagatagcttcaagccttcgaaggcctcgggaggcctacatctgttggttcgtttccgtgtttttctgtgcaacatttttctttcgcatgtaccagttttccttgcacatgaaaatgcagtgccattttaccgtaatccatctgttccttaggctcattacacagttgagagagattgtaatgtagttggcagtagtttgagtggtggatgtaatgtaagttcttgaattttgcatggagataaatttggtggggttaaaaaaaaaaaaaaaa

SEQ ID NO: 8190 - protein, 401 aa, Zea mays
  misc_feature: Ceres CLONE ID no. 1446204
  misc_feature: Ceres CDNA ID no. 35383403
  misc_feature: Homolog of GI Number: 1143069 NR Desc: 3
  misc_feature: Homolog of GI Number: 50929109 NR Desc: OSJNBa0063C18.19
  misc_feature: Homolog of GI Number: 7862174 NR Desc: beta
  misc_feature: Homolog of GI Number: 10120315 NR Desc: beta
  misc_feature: Homolog of GI Number: 20258997 NR Desc: putative 3
  misc_feature: Homolog of GI Number: 311686 NR Desc: 3
  misc_feature: Homolog of GI Number: 2921213 NR Desc: beta
  misc_feature: Homolog of GI Number: 5454206 NR Desc: T3P18.20
  misc_feature: Homolog of GI Number: 7381101 NR Desc: acyl
  misc_feature: Homolog of GI Number: 1345947 NR Desc: 3
MVAASGLALPRVAAPCPARPRGGLRPALLRFAPPVALPPHQLRCCASTVDDGLVSAAASKPRLPRVVGMGSKLVGCGSAIPTLGVSNDDLSKIVETSDEWIAARTGIRNRRVLSGDETLRGLSIKAAQRALEMAKVKAEDVDLVLLCTSTPDDLFGGATQVLTDVGCTKAFGFDITAACSGFIVGLITATRFIKGGGFQNILVVGADALSKYVDWTDRGTCILFGDAAGAVLVQACSADEDGLLGFCVQSDGNGQKHLNAATANDESILSNTNGVPGFPPKKATYSCIQMNGKEVFRFAVRCVPQSIEKALQEAGLPASSIDWLLLHQANQRIIDAAASRLDIPSDKVISNLANYGNTSAASIPLALDEAVRSGKVKAGDIIAASGFGAGLTWGSAIVKWG

SEQ ID NO: 8191 - DNA, 885 bp, Zea mays
  misc_feature: Ceres CLONE ID no. 1446262
  misc_feature: Ceres CDNA ID no. 40351855
  CDS (93)..(626): REFERENCED BY SEQ ID NO: 8192
ccctgaataatttatcctcctacggagagagagacaagggaaacagatcgtatcatcgcaataagcgagagaactagagagagagagagagaatgtctggaatggtagatgcgagctcgtggggcgcagcgttggtaaggatctcgccgtacacattctcggcaatcggaatcgccatctcgatcggcgtctctgtcctcggcgccgcctgggggatttacatcaccgggagtagtttgatcggtgctgctattgaagctcctcgtatcacttccaagaatctcatcagtgtaattttttgcgaagctgtagctatatatggcgttattgttgcaatcattctgcaaaccaagttggagagtgtcccatcttcaaagatgtatgacgccgagtctcttagagctggatatgcaatcttcgcatctggaatcatagttgggttcgccaaccttgtatgcgggttatgtgtagggatcattggaagcagttgcgcattgtcagatgctcagaactccacgctctttgtgaagattcttgtgattgagatcttcggaagcgctcttggtttgtttggagttattgtggggatcattatgtccgcacaagcaacatggccgaccaaatagacacaacccatccagtatgaaactctgggaagaagatggtttcttgattatcttcattgttatatggatactctcatgtctaaagaaaaaccagtgtgagaactgaagaacctcttttgtatccctgattttttttttgtttttgtattttttttaaaactttggaataagccactttggagaacatcttcttgtttgtattctctttttggttggtaaatttgtttttgtggttttgataggaaaaaaaaaaaaaaaa

SEQ ID NO: 8192 - protein, 177 aa, Zea mays
  misc_feature: Ceres CLONE ID no. 1446262
  misc_feature: Ceres CDNA ID no. 40351855
  misc_feature (106)..(171): Pfam Name: ATP PFAM Desc: ATP synthase subunit C
MSGMVDASSWGAALVRISPYTFSAIGIAISIGVSVLGAAWGIYITGSSLIGAAIEAPRITSKNLISVIFCEAVAIYGVIVAIILQTKLESVPSSKMYDAESLRAGYAIFASGIIVGFANLVCGLCVGIIGSSCALSDAQNSTLFVKILVIEIFGSALGLFGVIVGIIMSAQATWPTK

SEQ ID NO: 8193 - DNA, 1106 bp, Zea mays
  misc_feature: Ceres CLONE ID no. 1446271
  misc_feature: Ceres CDNA ID no. 40351856
  CDS (107)..(892): REFERENCED BY SEQ ID NO: 8194
acacgacacaacaagtacccaaccactccttgattcccctttcctccctctcgcattcgtctccaccagccggtcggacttcttgcgctccaagaactcggcgaggatggaaatgttttttggcagctttctcagtgaatcagtatcaccgcagaaccttttcggacacccggatgttgagaaatgcccattcctgaggaatatcaatggagctacaaccttttccctcgcttctgctttgccagtagctcaaaaaggagtcaacccaccatcacatgaggcattcagcgatgagtggttggaaaatggccagtgcccacttgcgcggtcttaccgggcaatgagtggtgttttgcccctcgttgccaaggccttacagccaccagctggtatgaagctgaagtgcccacctgctgtggttgctgtccgagctgcccttgcgcgaactgcgcttgtgaaatccctccgaccacagcccctgccctcaaagatggtagccattgcactactggggatggcagcaaacatccctcttggggtgtggcgggagcacaccaagaagttctctcctcagtggtttgcagctgtccatgccgctgttccgttcattgcaatgctgaggaagtctgttgtgatgcccaggactgcgatggcattcaccatagcagcctccattgttggccagacaattgggtcaagggctgagcgcatccgtctaaggaatcaggcggcaaatggtactggtgattcttcaacgcacactgctatgtatccaaacaagaatgggcattgcagcgacactgaaggcaaggcatgggaccctcttgcgacgaagataacaggctcaactgctaggggttctcctgcaccaaccccaagcgtgtgcttctgattgtgttaagcatgtgattcacgcacacctgtgaagagattatacatgaaccagtttatcttatagtgccatgtaattgccttgtgtgtcccagaaaactgagctgcccgtgtgcgataagtagaataagaggtgctaccccactgtttgctgtgttgctatggtcgagattgatgtattgatgctgctgcatttcttaaaaaaaaaaaaaaaa

SEQ ID NO: 8194 - protein, 261 aa, Zea mays
  misc_feature: Ceres CLONE ID no. 1446271
  misc_feature: Ceres CDNA ID no. 40351856
MEMFFGSFLSESVSPQNLFGHPDVEKCPFLRNINGATTFSLASALPVAQKGVNPPSHEAFSDEWLENGQCPLARSYRAMSGVLPLVAKALQPPAGMKLKCPPAVVAVRAALARTALVKSLRPQPLPSKMVAIALLGMAANIPLGVWREHTKKFSPQWFAAVHAAVPFIAMLRKSVVMPRTAMAFTIAASIVGQTIGSRAERIRLRNQAANGTGDSSTHTAMYPNKNGHCSDTEGKAWDPLATKITGSTARGSPAPTPSVCF

SEQ ID NO: 8195 - DNA, 863 bp, Zea mays
  misc_feature: Ceres CLONE ID no. 1446281
  misc_feature: Ceres CDNA ID no. 40351857
  CDS (3)..(734): REFERENCED BY SEQ ID NO: 8196
acgcccaccgtcccacgggcttgcggccagctcccctcgccgatcgtttccaccaaatccaccggtatgacggccccatcttccgctccgacgatcccggggactttccaaggttgtggatggtggaggagctatctgtgtacaatggaaccaacgaggagttgcccatattactcgcgattttgggctcagtgtttgatgtcacgaaagggaggtcacattatggtcctggaggaggttatcatcactttgctgggagggatgcatcacgagcatttgtttctggaaattttacaggtgatggtctgactgattccttacagggtttatcaagtagtgaggtaaacagcgtagttgattggaggaaattttacttcgaaagatacatatttgctggtaaacttattggacgttactacgacagtgaaggaaatcctacgaaataccttaagggtgtagaagtgaaggcaaagagaggtgcacagcttcttgaaaaacagaagagtgatgaagctaaaatacctggctgcaattcaaaatggagccagcaagaaggtggtgaagtttggtgcgacgcgggctacccaagactggtgaggaggccaggcgacatagctctgaccggacaagttagccaaaggtgcgcttgtttccaggaaaacgagctcgacaaagccgggctagtggtgtacgaagggtgtgattacttgagccagtcttgcaaagtaaactaggctgtatatatctcccttcccttggtccacgaacctgttgctttgggggtgtacatgtactcagcgcaaccagccacgcatcatgatgggctgggccttctgttccgtcccgcaaaaaaaaaaaaaaaa

SEQ ID NO: 8196 - protein, 204 aa, Zea mays
  misc_feature: Ceres CLONE ID no. 1446281
  misc_feature: Ceres CDNA ID no. 40351857
  misc_feature (2)..(96): Pfam Name: Cyt PFAM Desc: Cytochrome b5
MVEELSVYNGTNEELPILLAILGSVFDVTKGRSHYGPGGGYHHFAGRDASRAFVSGNFTGDGLTDSLQGLSSSEVNSVVDWRKFYFERYIFAGKLIGRYYDSEGNPTKYLKGVEVKAKRGAQLLEKQKSDEAKIPGCNSKWSQQEGGEVWCDAGYPRLVRRPGDIALTGQVSQRCACFQENELDKAGLVVYEGCDYLSQSCKVN

SEQ ID NO: 8197 - DNA, 601 bp, Zea mays
  misc_feature: Ceres CLONE ID no. 1446353
  misc_feature: Ceres CDNA ID no. 29191242
  CDS (68)..(406): REFERENCED BY SEQ ID NO: 8198
ctgggacgcaggcggcggcttagggttttaactcgcatccattctcaaggttagcaggaggcgggccatggcgccgtcgcagcccaagtcagggctcttcgtgggcatcaacaagggccacgtcgtcaccaagcgcgagctgccgccacgcccgtccgaccgcaaggggaaaggtaccaagagggtgctgtttgtcaggaacttgattagggaggttgctggatttgctccctatgagaagcgtatcactgagcttcttaaggttggaaaggacaagcgtgcactcaaggtcgccaagaggaagcttggtactcacaagagagcaaagaagaagagggaggagatgtcaagtgtcctcaggaagatgaggtctggtggtggtggtgccgcggacaagaagaaatagattttgcatgttggtgaaattctatttatctcaacgctttgccccgtatttccatattatgccaagtttgtagcctgtggcaattggatacgaatgtagcacattgcacttcaagttcagagtaaaactatgaatttttgacactatatttgcaattggattgacatggtagtacattgaaaaaaaaaaaaaaaa

SEQ ID NO: 8198 - protein, 112 aa, Zea mays; identical to SEQ ID NO: 5538
  misc_feature: Ceres CLONE ID no. 1446353
  misc_feature: Ceres CDNA ID no. 29191242
  misc_feature (5)..(103): Pfam Name: Ribosomal_L36e PFAM Desc: Ribosomal protein L36e
  misc_feature: Homolog of GI Number: 57471698 NR Desc: ribosomal protein L36
  misc_feature: Homolog of GI Number: 50931673 NR Desc: putative 60S ribosomal protein L36
  misc_feature: Homolog of GI Number: 34908154 NR Desc: putative 60S RIBOSOMAL PROTEIN L36
  misc_feature: Homolog of GI Number: 56182368 NR Desc: putative 60S ribosomal protein L36
  misc_feature: Homolog of GI Number: 20148501 NR Desc: 60S ribosomal protein L36
  misc_feature: Homolog of GI Number: 12642884 NR Desc: putative 60S ribosomal protein
  misc_feature: Homolog of GI Number: 21592383 NR Desc: 60S ribosomal protein L36
  misc_feature: Homolog of GI Number: 21554932 NR Desc: 60S RIBOSOMAL PROTEIN L36 homolog
  misc_feature: Homolog of GI Number: 1276967 NR Desc: putative ribosomal protein
  misc_feature: Homolog of GI Number: 17865758 NR Desc: 60S ribosomal protein L36
  misc_feature: Useful for sterility

SEQ ID NO: 8199 - DNA, 773 bp, Zea mays
  misc_feature: Ceres CLONE ID no. 1446356
  misc_feature: Ceres CDNA ID no. 29191243
  CDS (85)..(543): REFERENCED BY SEQ ID NO: 8200
atatcaagcaaatcgtaaaccgctacaaaaccgtcaaataggaaaaagtaatttgtgtttgtttagtttgttaagaagaatccgatggagtcgtcaccagcagcagcagcgaagccggcgagaggcgcaggaggaaggaaaggaggtgatcggaagaagagtgtttccaagtccgtcaaggctggtcttcagtttcccgtcggtcgtatctctcgttacttgaagaaaggtcgttacgcgatcaggtacggcgccggtgctcccgtctacctcgccgccgtcctcgagtacctcgccgccgaggttctggagcttgctgggaacgcagcgagggacaacaagaagaacaggataaacccgaggcatctctgcttggcgataaggaacgatgaagaattggggaagttgctccacggagtcaccatcgcgagcggtggagttcttcctaacatcaacccggttcttcttcccaagagatccgcatctcaaactgagaagcctgagaaagctgctaaagctgccaaatctcccaagaaggcttaaaatgcttactgttgtttcctttgttatatcaaatctagaagaacttgtttttttagggattgtgtagtttactttctatgtttactctccgtttggtttgttttatggatctccaatggctgattatgcgttttgtaatgaatgaactaataatttctgggtatcttctcagtttctcagtcatctcaaataaataaaaatttctttctggattaaaaaaaaaaaaaaaa

SEQ ID NO: 8200 - protein, 152 aa, Zea mays
  misc_feature: Ceres CLONE ID no. 1446356
  misc_feature: Ceres CDNA ID no. 29191243
  misc_feature (29)..(104): Pfam Name: Histone PFAM Desc: Core histone H2A/H2B/H3/H4
  misc_feature: Homolog of GI Number: 5777792 NR Desc: histone H2A
  misc_feature: Homolog of GI Number: 18700220 NR Desc: AT5g27670/F15A18_130
  misc_feature: Homolog of GI Number: 122003 NR Desc: Histone H2A
  misc_feature: Homolog of GI Number: 27529852 NR Desc: H2A histone
  misc_feature: Homolog of GI Number: 47026912 NR Desc: histone H2A
  misc_feature: Homolog of GI Number: 47026919 NR Desc: histone H2A
  misc_feature: Homolog of GI Number: 729669 NR Desc: Histone H2A
  misc_feature: Homolog of GI Number: 122006 NR Desc: Histone H2A
  misc_feature: Homolog of GI Number: 34914498 NR Desc: putative histone H2A
  misc_feature: Homolog of GI Number: 73955042 NR Desc:  similar to Histone H2A.x
MESSPAAAAKPARGAGGRKGGDRKKSVSKSVKAGLQFPVGRISRYLKKGRYAIRYGAGAPVYLAAVLEYLAAEVLELAGNAARDNKKNRINPRHLCLAIRNDEELGKLLHGVTIASGGVLPNINPVLLPKRSASQTEKPEKAAKAAKSPKKA

SEQ ID NO: 8201 - DNA, 1294 bp, Zea mays
  misc_feature: Ceres CLONE ID no. 1446366
  misc_feature: Ceres CDNA ID no. 35383404
  CDS (132)..(1001): REFERENCED BY SEQ ID NO: 8202
catcaaccagccaagagcagccagccattccaatccatcacaccatccaccaagctcagctcagctcagctcagctaccaacacttgactaggtagcagctagtgagaaagaaagatcgttggagcgcaagatgagggcggcggcgctcggcattgtggccatggcctgcctcgtggcggtggcgcggggcggcaacttcatccaggactccgagatgacctggggggacggccgcgggaaggtcgtcgacggcggccgcgggctcgacctcacgctcgacaagacctccggctccggcttccagtccaagagcgagtacctgttcggcaagattgacatgcagatcaagctcgtccccggcaactccgccggcaccgtcaccaccttctacctgtcgtcgcaggggacggcgcacgacgagatcgacttcgagttcctgggcaacgtgaccggcgagccctacacgctgcacaccaacgtgttcgcgcaggggcaggggcagcgggagcagcagttccgcctctggttcgaccccaccaaggccttccacacctactccatcatctggaacccgcagcacgtcatattcgcggtggacggcacggcgatcagggacttcaagaaccacgaggcgcgcggcgtgtcgttccccaagagccagccgatgcggctgtacgcgagcctgtggaacgccgacgactgggccacgcagggcggccgggtcaagaccgactggagcaaggcgccgttcgtcgcctccttccgcaacttcaacgccgacgcctgcgtcatgtcgggcggcgcgcagcgctgccccgcgggcaccatggaggcctcggccgccggcgccaacggcagcggcagctggtggaaccaggagctgagcggcatggggtaccggcgcatgcggtgggtgcagaggaagttcatgatctacaactactgcaccgaccccaagcgggtggcgcagggcgtgcccgccgagtgcaagctccgctgatgagatcccagctcccgcagctcacaagaacaacaacccaggaacccgtcggtcgtctgagatgtgtctggtttcggctttcgatccgtgagaacgaacgaaggaaggaagggaaagtgcgcgcgcatcgaagctctgtgggatggtgtaaatgtagtaccgtagtatgcatatcgcattctttcatttgtttcgttgtcacacggggtcgatccatgtacttatgcaagttctataattagcctgttccgtttagccttgaaaaaaaaaaaaaaacaaaaaaaaaaaaaaaa

SEQ ID NO: 8202 - protein, 289 aa, Zea mays
  misc_feature: Ceres CLONE ID no. 1446366
  misc_feature: Ceres CDNA ID no. 35383404
  misc_feature: null
  misc_feature: Useful for making plants with altered cell wall content and/or composition
  misc_feature (228)..(286): Pfam Name: XET_C PFAM Desc: Xyloglucan endo
  misc_feature (23)..(204): Pfam Name: Glyco_hydro_16 PFAM Desc: Glycosyl hydrolases family 16
  misc_feature: Homolog of GI Number: 51039064 NR Desc: endotransglucosylase/hydrolase XTH5
  misc_feature: Homolog of GI Number: 53793221 NR Desc: putative xyloglucan endotransglycosylase
  misc_feature: Homolog of GI Number: 1890577 NR Desc: xyloglucan endotransglycosylase
  misc_feature: Homolog of GI Number: 14330332 NR Desc: Xet1 protein
  misc_feature: Homolog of GI Number: 53793227 NR Desc: putative xyloglucan endotransglycosylase
  misc_feature: Homolog of GI Number: 1890575 NR Desc: xyloglucan endotransglycosylase
  misc_feature: Homolog of GI Number: 8886867 NR Desc: xyloglucan endotransglycosylase XET2
  misc_feature: Homolog of GI Number: 68532877 NR Desc: xyloglucan endotransglucosylase/hydrolase
  misc_feature: Homolog of GI Number: 8886865 NR Desc: xyloglucan endotransglycosylase XET1
  misc_feature: Homolog of GI Number: 22947852 NR Desc: xyloglucan endotransglycosylase
  misc_feature: Useful for delaying flowering time
  misc_feature: Useful for increasing chlorophyll and photosynthetic capacity
MRAAALGIVAMACLVAVARGGNFIQDSEMTWGDGRGKVVDGGRGLDLTLDKTSGSGFQSKSEYLFGKIDMQIKLVPGNSAGTVTTFYLSSQGTAHDEIDFEFLGNVTGEPYTLHTNVFAQGQGQREQQFRLWFDPTKAFHTYSIIWNPQHVIFAVDGTAIRDFKNHEARGVSFPKSQPMRLYASLWNADDWATQGGRVKTDWSKAPFVASFRNFNADACVMSGGAQRCPAGTMEASAAGANGSGSWWNQELSGMGYRRMRWVQRKFMIYNYCTDPKRVAQGVPAECKLR

SEQ ID NO: 8203 - DNA, 743 bp, Zea mays
  misc_feature: Ceres CLONE ID no. 1446379
  misc_feature: Ceres CDNA ID no. 35383405
  CDS (71)..(547): REFERENCED BY SEQ ID NO: 8204
acaaacagcctggtagcatatctgtctcgtggggcatcgtgtcaaccagacaccaccgtgcgtgtcagccatgtcgctcatgccttggttcggcggtggccggggagggatggaccccttctcctccgacctctgggaccccttcggctctccttggcccttggaccgcagccgccgcgaaggcggcagccgggacgacgcaaccgccatggctcgcaccaacgtcgactggcatgagaacgacaaagagcacattttctccgcagagatccccggggtgaggaaggaggacgtgaaggtggaggtggaggacggcaacgtgctcaagatcagcggggagaagacgcgggaggaggagcacaagggcgacgcctggaaccgcgtggagcgcagcttcgggtccttcatgcgccggttccgcctgccggagaacgccaaggcggacagcatccggtgcaccatgctggacggcgtgctcagggtcgtcgttcccaaggacgaggaggcacagaagcagcgcaacgtccgctccatcgacatagcataaaggctaaaagcaccgcgccgtgacaatgccatctcctcttttattagcgtgtactcgtggtagtaatctgtatcgtgtgttctactttagcagtaatgctaggttattctgtacggtagtttagaagtgtgctttatgcgccatatagctgctacggcatatggcacttttaatcgtgtcaaaaaaaaaaaaaaaa

SEQ ID NO: 8204 - protein, 158 aa, Zea mays
  misc_feature: Ceres CLONE ID no. 1446379
  misc_feature: Ceres CDNA ID no. 35383405
  misc_feature (53)..(158): Pfam Name: HSP20 PFAM Desc: Hsp20/alpha crystallin family
  misc_feature: Homolog of GI Number: 21689719 NR Desc: putative heat shock protein 18
  misc_feature: Homolog of GI Number: 21618106 NR Desc: heat shock protein 18
  misc_feature: Homolog of GI Number: 56606538 NR Desc: heat shock protein 18
  misc_feature: Homolog of GI Number: 18216 NR Desc: heat
  misc_feature: Homolog of GI Number: 82941445 NR Desc: heat shock protein 18
  misc_feature: Homolog of GI Number: 46359518 NR Desc: cytosolic class I small heat
  misc_feature: Homolog of GI Number: 71495 NR Desc: heat shock protein
  misc_feature: Homolog of GI Number: 4456758 NR Desc: heat shock protein 17.4
  misc_feature: Homolog of GI Number: 19618 NR Desc: heat shock protein
  misc_feature: Homolog of GI Number: 23505765 NR Desc: At3g46230/F12M12_200
  misc_feature: Useful for delaying flowering time
  misc_feature: Useful for increasing chlorophyll and photosynthetic capacity
  misc_feature: Useful for making ornamental plants with modified flowers
  misc_feature: Useful for making ornamental plants with modified leaves
  misc_feature: Useful for making plants with increased biomass
  misc_feature: Useful for making plants with increased biomass and foliage
  misc_feature: Useful for making plants with increased biomass and foliage
  misc_feature: Useful for making plants with increased biomass and foliage
  misc_feature: Useful for making shorter plants
  misc_feature: Useful for making stronger plants
MSLMPWFGGGRGGMDPFSSDLWDPFGSPWPLDRSRREGGSRDDATAMARTNVDWHENDKEHIFSAEIPGVRKEDVKVEVEDGNVLKISGEKTREEEHKGDAWNRVERSFGSFMRRFRLPENAKADSIRCTMLDGVLRVVVPKDEEAQKQRNVRSIDIA

SEQ ID NO: 8205 - DNA, 827 bp, Zea mays
  misc_feature: Ceres CLONE ID no. 1446393
  misc_feature: Ceres CDNA ID no. 36593630
  CDS (65)..(685): REFERENCED BY SEQ ID NO: 8206
attccgcctccaccccccgaactccaaaccctagtagcgccgccgccgccaggtaagaggcgagatggtgtccggctccggcgtgtgcgccaagcgcgtggtggtggacgcccgccaccacatgctcggccgcctggcctcgatcgtcgccaaggagctgctcaacgggcagcgcgtggtggtggtccgatgcgaggagatctgcatgtccggcggcctcgtccgccagaagatgaagtacctccgcttcctccgcaagaggatgaacaccaagccctcccacggccccatccacttccgcgccccggccaagatcctctggcgcaccatccgcggtatgattccgcacaagaccgcgaggggcgaggccgcgctcgccaggctcaaggcgtacgagggcgtgccgccgccgtacgacaggaccaagcgcatggtcatccccgacgcgctcaaggttctgaggctgcagcctgggcacaggtactgcctcctcggccagctctccaaggaggtcggatggaactacgccgacaccatcagggagctggaggaaaagaggaaggagaaggccaagatctcctacgacaggagaaagcaactggcgaagctccgcgtcaaggccgagaaggcagccgaggagaagttgggaactcagctggagatcctggcccctatcaaatactaagagatatcagagctttcgtgcgccatcagttttgggaaacctctgtcgtattttaagtagtttggtaactctgatagtacaatctggttggtaaacctttgttatgcatgcagttctgcgacacccaaaaaaaaaaaaaaaa

SEQ ID NO: 8206 - protein, 206 aa, Zea mays
  misc_feature: Ceres CLONE ID no. 1446393
  misc_feature: Ceres CDNA ID no. 36593630
  misc_feature (11)..(127): Pfam Name: Ribosomal_L13 PFAM Desc: Ribosomal protein L13
  misc_feature: Homolog of GI Number: 57471706 NR Desc: ribosomal protein L13a
  misc_feature: Homolog of GI Number: 37718812 NR Desc: putative ribosomal protein L13a
  misc_feature: Homolog of GI Number: 21326116 NR Desc: putative 60S ribosomal protein
  misc_feature: Homolog of GI Number: 50933743 NR Desc: putative 60S ribosomal protein
  misc_feature: Homolog of GI Number: 76573371 NR Desc: 60S ribosomal protein L13a
  misc_feature: Homolog of GI Number: 21593767 NR Desc: 60S ribosomal protein L13a
  misc_feature: Homolog of GI Number: 6642654 NR Desc: putative 60S ribosomal protein L13A
  misc_feature: Homolog of GI Number: 4753651 NR Desc: ribosomal protein L13a like protein
  misc_feature: Homolog of GI Number: 2982259 NR Desc: probable 60s ribosomal protein L13a
  misc_feature: Homolog of GI Number: 23297306 NR Desc: putative 60S ribosomal protein
MVSGSGVCAKRVVVDARHHMLGRLASIVAKELLNGQRVVVVRCEEICMSGGLVRQKMKYLRFLRKRMNTKPSHGPIHFRAPAKILWRTIRGMIPHKTARGEAALARLKAYEGVPPPYDRTKRMVIPDALKVLRLQPGHRYCLLGQLSKEVGWNYADTIRELEEKRKEKAKISYDRRKQLAKLRVKAEKAAEEKLGTQLEILAPIKY

SEQ ID NO: 8207 - DNA, 804 bp, Zea mays
  misc_feature: Ceres CLONE ID no. 1446412
  misc_feature: Ceres CDNA ID no. 29191244
  CDS (96)..(587): REFERENCED BY SEQ ID NO: 8208
acaaagcgaaacagaagaagcactcacccagagaaatccaaaccacactcagatcgtcgccactctctgctgatatcgcccccaggctagcagccatgatggcttcacgagccgccgctgctctccgcacggccgccctgcagggccacttccggaggtcggcctccaccgcggcggcgcacgccgagaggcccaaggccaagcccatgggcgactacgtgccggtgtacgtggcgctggggatgatcggcctggcgggggcgctggggctgcacacggcgcggcagcagctggcgcacgcgcccaacgtctgggtcgacaagcgcaagcgcgaggcggtgcccgaggtggcggacccggacctcgccctcgacgaggccgagcgcttcgtcggcggctccgtgttccgcaaggtcgcccacgtccaggacgaccgctccctcaccgccggcgtcgccgaccccgtcgccgactacccggccaggaaggcggtgacgctcaaggacgtcggcgtagacccgccggggatccccgagcagagcagggagggcgtcctcgacaggatcttcaagaaggacaccgcttaatttcgagaggagcaggcaacagcacgcttcagcttcagtccctttattgcgttaactagctacgagtacatttgtgtttcaatagtctgatcggctgcactttttctggaagctggtcggtgtatcgcgaacgtgacacgtgatggggttgtacatatgtatccactcatatcaagaactctagtttgttctggacattagaaaaaaaaaaaaaaaa

SEQ ID NO: 8208 - protein, 162 aa, Zea mays
  misc_feature: Ceres CLONE ID no. 1446412
  misc_feature: Ceres CDNA ID no. 29191244
  misc_feature: Homolog of GI Number: 67987371 NR Desc: Aldehyde dehydrogenase
  misc_feature: Homolog of GI Number: 53769716 NR Desc: COG0454: Histone acetyltransferase HPA2 and related acetyltransferases
  misc_feature: Homolog of GI Number: 66780099 NR Desc: PE
  misc_feature: Homolog of GI Number: 66776365 NR Desc: PE
  misc_feature: Homolog of GI Number: 66778673 NR Desc: Helix
  misc_feature: Homolog of GI Number: 66778899 NR Desc: UvrD/REP helicase
  misc_feature: Homolog of GI Number: 18652965 NR Desc: putative 1
  misc_feature: Homolog of GI Number: 53768995 NR Desc: COG1409: Predicted phosphohydrolases
  misc_feature: Homolog of GI Number: 67984658 NR Desc: type II secretion system protein E
MASRAAAALRTAALQGHFRRSASTAAAHAERPKAKPMGDYVPVYVALGMIGLAGALGLHTARQQLAHAPNVWVDKRKREAVPEVADPDLALDEAERFVGGSVFRKVAHVQDDRSLTAGVADPVADYPARKAVTLKDVGVDPPGIPEQSREGVLDRIFKKDTA

SEQ ID NO: 8209 - DNA, 799 bp, Zea mays
  misc_feature: Ceres CLONE ID no. 1446553
  misc_feature: Ceres CDNA ID no. 29191245
  CDS (70)..(654): REFERENCED BY SEQ ID NO: 8210
ctctcccccgctgccctctcgccaaaaccctagctaacccctcgtcccgaaaccgtagtagcagcgccgatgggagggtcgcggcgcaagttcaagcgaacccgcaccaaggtgcgcgtggggttgccgcgcaagaagccgcgcgagttcaagccggccttcgacctgcccgaggcgctcgccgccgccgccgccgcagaggccggcggccacgtgccgagctgggacgcggaaggcagcgtcgtgaagaactactccgctttcggggtcgtggccaaccccaacctgctcggcgcccactcccgcggcacgcgaggcctcgtccagagcgcctcgctgcaggcgcccgacgtcgacgccttgcgcgcccccgtcgacgagttcggccccgtcgacaccggcagtgatctcgagtgcgatgatctaaaatctgcacttgggaagaaaaggagggatggcaaatctgcacctttggagccactgactaaaattcaacgactatgtattggcagattaatagagaagtatggcgacaactacaaggccatgttcatggataccaaactgaactcaatgcagcactcagtgggtacattgaaaaagctctgtgaaagataccatgttggtggcaagaccatcctctatccgatgtagtgtcgtatgaatctagatttcactttcagtctgtatcctatttctcccactaaatgggacatgcactgcaaattttgcctgtgaacaatgtaacttctgatgactacaatataagaatgagtttgttttaaaaaaaaaaaaaaaa

SEQ ID NO: 8210 - protein, 194 aa, Zea mays
  misc_feature: Ceres CLONE ID no. 1446553
  misc_feature: Ceres CDNA ID no. 29191245
MGGSRRKFKRTRTKVRVGLPRKKPREFKPAFDLPEALAAAAAAEAGGHVPSWDAEGSVVKNYSAFGVVANPNLLGAHSRGTRGLVQSASLQAPDVDALRAPVDEFGPVDTGSDLECDDLKSALGKKRRDGKSAPLEPLTKIQRLCIGRLIEKYGDNYKAMFMDTKLNSMQHSVGTLKKLCERYHVGGKTILYPM

SEQ ID NO: 8211 - DNA, 947 bp, Zea mays
  misc_feature: Ceres CLONE ID no. 1446748
  misc_feature: Ceres CDNA ID no. 25445708
  CDS (372)..(884): REFERENCED BY SEQ ID NO: 8212
accaaacaaaccgcgtccgcgtcgagtctctactctctcggctgtccggtccggcgcggctctcgcgtctccaacctacccatgctgcagctcctccaactccaaggctcacaccaccccgcgacgggcgacgctaattaagtagagctgcaacacctgggttggaggctagagcttgcaaacaccaccagcgaaaacgtcgtggccagccatcccggtgtcgtcccgcgttctacagccaccgctgtcgtcgccgtcctagactcctagatccgtcagcttaacgagctccattccttcgaggccagccatcccggtgtctcagcagcggcggcggcggcgtcgagctcttgctttctgtgggaggacgcatggcgatgtctgcggggcgtgggctcttggtcctcttcttctctgccgccgtagtggctgagctcgcctctgccgcgaacggtcctttcctgtccgatagcgtcttccagtcgagcgccggatctacagggaggagcttgctgcaggccaagaatagttgccctgtgaactttgagttccaaaactacacaatcatcacaagcaagtgcaaaggaccgaagtttccagccagccaatgctgtgccgcactcaaggaattcgcgtgcccttttaacaattacctcaatgacgagagcaatgaatgtgcatcgacaatgttcagctacatcaacctctatggcaagtatccaccaggtctgttttccagcgagtgcaaagaaggcaagatggggctttcttgcgcagatgtcccccggaaggacagttccactgcaaacagtggttatcgcgcccaaagcagcttgcttgcgttgattactgtcttgagcgtggtagcagcgttgttctactgaactacagctccattcatttcccacaaagatggtgtgttacaactgttaaaaaaaaaaaaaaaa

SEQ ID NO: 8212 - protein, 168 aa, Zea mays
  misc_feature: Ceres CLONE ID no. 1446748
  misc_feature: Ceres CDNA ID no. 25445708
  misc_feature: Homolog of GI Number: 3868853 NR Desc: GPI
  misc_feature: Homolog of GI Number: 50725513 NR Desc: putative GPI
  misc_feature: Homolog of GI Number: 38603910 NR Desc: At4g28280
  misc_feature: Homolog of GI Number: 54291507 NR Desc: putative GPI
  misc_feature: Homolog of GI Number: 54291508 NR Desc: putative GPI
MSAGRGLLVLFFSAAVVAELASAANGPFLSDSVFQSSAGSTGRSLLQAKNSCPVNFEFQNYTIITSKCKGPKFPASQCCAALKEFACPFNNYLNDESNECASTMFSYINLYGKYPPGLFSSECKEGKMGLSCADVPRKDSSTANSGYRAQSSLLALITVLSVVAALFY

SEQ ID NO: 8213 - DNA, 714 bp, Zea mays
  misc_feature: Ceres CLONE ID no. 1446781
  misc_feature: Ceres CDNA ID no. 40351858
  CDS (2)..(622): REFERENCED BY SEQ ID NO: 8214
tttcgcccccgccgcatcacgcagaatttgcttactgcctgctctgctcgccattgctgactccctccctccctccctccctcgccaccgaaaagctagcccgcccggccgttgcttgcaagcctcgctccgcattattgccacctgccgccggcagccagcgcgcgcggcgcaacacgcaagcagaacaacggtgtctgttcggttgttgttgttgttggagagagcgcgcgatccaatccaaggaaccagggaggaggagcgtgcagtgcagtggcagtgcaggagcgatggtgttcttctgcttcctggtggaccagcggcggacggtgcggagcagcaagccggcggcggggatctgctcgcgctgcggcgggtgcgccagcgtggcggacatggagaccgccaccagggtctgctacctgctcaccgtgcaccggagcacctggcgcgccatcatctgcaccttctgcggcgccatgctcaagtcctaccgccactacaggctatagcactggtagcggtacggcactacctaccggtagacgatggagtcggtcggtggatcgcgcgcctttttccgcggcttccgatcccgggttttttttttgttcctgcttgatcatgctggggtttgcaggttattgtaatggtactatggcagcttgccggtgcataaatatggaatgggagtcatcaaaaaaaaaaaaaaaa

SEQ ID NO: 8214 - protein, 73 aa, Zea mays
  misc_feature: Ceres CLONE ID no. 1446781
  misc_feature: Ceres CDNA ID no. 40351858
MVFFCFLVDQRRTVRSSKPAAGICSRCGGCASVADMETATRVCYLLTVHRSTWRAIICTFCGAMLKSYRHYRL

SEQ ID NO: 8215 - DNA, 517 bp, Zea mays
  misc_feature: Ceres CLONE ID no. 1446941
  misc_feature: Ceres CDNA ID no. 35383406
  CDS (87)..(353): REFERENCED BY SEQ ID NO: 8216
catttttggcagggaagaggaaagagcagcgtctttcatcagagtttagatcaatcgcgaagcgcaacgctaggccaggcgacgacatgggccgttggttgaagccagatgtttacccgctgatcggcgcgatgtcgctggtgacggggatgtgcgtcttccagctcacccggaacgtcttcctcaacccagacgtcagggtgagcaagagcaaccggcagagcgcggtgctggagaacgcggaggagggcgagaggtacagccagcacgccttccgccgcttcgtcagcgcgcaccgcccggaggtcttccctgccatcaaccgcttcttctcagggttcagcgccaagtgatgatgggttccatcgaaccggccggccgggtgcagtgcttctgtgtgtacgtgtgtcgcgtgtggatatgttagtgattgtgtcattagcgtggaggcgtcccatggatatgtaccagacatgcctcaagtgaataaatggtttgggcaaaaaaaaaaaaaaaa

SEQ ID NO: 8216 - protein, 88 aa, Zea mays
  misc_feature: Ceres CLONE ID no. 1446941
  misc_feature: Ceres CDNA ID no. 35383406
  misc_feature (1)..(87): Pfam Name: B12D PFAM Desc: B12D protein
  misc_feature: Homolog of GI Number: 38194922 NR Desc: B12D
  misc_feature: Homolog of GI Number: 4530585 NR Desc: B12D protein
  misc_feature: Homolog of GI Number: 50935787 NR Desc: putative B12D protein
  misc_feature: Homolog of GI Number: 18644696 NR Desc: putative G
  misc_feature: Homolog of GI Number: 3445292 NR Desc: B12Dg1
MGRWLKPDVYPLIGAMSLVTGMCVFQLTRNVFLNPDVRVSKSNRQSAVLENAEEGERYSQHAFRRFVSAHRPEVFPAINRFFSGFSAK

SEQ ID NO: 8217 - DNA, 1020 bp, Zea mays
  misc_feature: Ceres CLONE ID no. 1446948
  misc_feature: Ceres CDNA ID no. 40351859
  CDS (450)..(692): REFERENCED BY SEQ ID NO: 8218
aacagcccaccacgtgaccacagacagccagacggctgagagcctgagacgggcgatgaccgcacgcccgcacaagctgctccgggctccgctgctaggctagggtttggactttggattggagccgcaccgccgcaccggcaccgcagccgccgcagtgccgcacagccaccactcccatcttggtcttgcggctagtcgccctcggacctcggccatcgaccccttgcccgcttgccgagacgccgagtaagcgtcgaccgtcgtcgctgtcgtcaccgaggtccagcgcccaacagcccggcttcaagcctccagccatcggcgcccgccctcctccgccgagacgccgagtgccaagcgcccaagcaccccagtccccagcgcccaacaggctagcaggctgcaggtatgcactctttgttgatgcgtccaaggagttgagctcaatgcccagcaggctgcagaaactgaaggaaaaggcggcattcaggaacccggatgagttctattttaaaatgatcaacagtaggactgttggtggaattcatagacctaagcctgaagataataagtatactgaagatgaacttcttctgttgaaaaataaatatatgggatatatccttcagagcgctcaaagtgaaaaaaggttactgaattggaacggggaaaaatccataaagtgctgaagactaagtggatcgagcgcgcgcgagggttgtcgtaaaatgtccaccgttattaagagggctaatgaattcccggtcgattagagctacatgcatggaggagtgcacacacatgcctatgttgtttgaattaatcaaattgttgtttgttagtaattattaccgcctccaactatgctctttacgtccacaggttcgtcagctatttcatgcaagcatccgcacaagtgtcctactgttatatgttattgtgttctgatacttgagacttttattatgactatgtatgagatattgtctcttattagtactaaaaaaaaaaaaaaaa

SEQ ID NO: 8218 - protein, 80 aa, Zea mays
  misc_feature: Ceres CLONE ID no. 1446948
  misc_feature: Ceres CDNA ID no. 40351859
  misc_feature (3)..(67): Pfam Name: Utp11 PFAM Desc: Utp11 protein
MPSRLQKLKEKAAFRNPDEFYFKMINSRTVGGIHRPKPEDNKYTEDELLLLKNKYMGYILQSAQSEKRLLNWNGEKSIKC

SEQ ID NO: 8219 - DNA, 734 bp, Zea mays
  misc_feature: Ceres CLONE ID no. 1446962
  misc_feature: Ceres CDNA ID no. 25446119
  CDS (2)..(337): REFERENCED BY SEQ ID NO: 8220
agttattacaaggattcttttgaaaaccactgctggtttgatcggaggttctcgacgaccggctgtcgccgacgccgcgttggtcggtcgggtaggcctactcgccgctgggctcgccgggcacggcgacggtgaaggcgggcgcggtgctggagcacccggccgtcgtctcggcggcggagacgctggggaagacgccggcgcaggtggcgctgcgctggggcgtccagatggggcacagcgtgctcccgaagagcaccgacgaggggaggatcagggcgaatctcgacgtcttcggctggtccttgccggaggacctgctcgccaagttctctgagatcgagcaggaacggctgattcgtgcgggcttctttgttgatcccgacggcgtgttcaaatccatcgaggagttttgggatggcgagatctgaacaactgtcctgactgggaggagctgagtgacggaatttggccactggcaaggcgtactgtgcctgtggaagaataaatttatgcgtatgaactctgaaaggcagcgtagttttcaggtagtttgtgctcggcactccaataattcctcgatgctcaagtggtctatctatcctctaaactctaaaggccatgccgctcaagcggtcttttaagccagcatatgcacaatgggaaaataggtgctaagactctctccagcaagatccggtaaaaggtccggtactctaaaaaaaaaaaaaaaa

SEQ ID NO: 8220 - protein, 66 aa, Zea mays
  misc_feature: Ceres CLONE ID no. 1446962
  misc_feature: Ceres CDNA ID no. 25446119
  misc_feature (2)..(39): Pfam Name: Aldo_ket_red PFAM Desc: Aldo/keto reductase family
  misc_feature: Homolog of GI Number: 53749361 NR Desc: putative aldose reductase
  misc_feature: Homolog of GI Number: 34908280 NR Desc: putative aldose reductase
  misc_feature: Homolog of GI Number: 3378650 NR Desc: orf
  misc_feature: Homolog of GI Number: 34908276 NR Desc: putative aldose reductase
  misc_feature: Homolog of GI Number: 29028836 NR Desc: At2g37790
  misc_feature: Homolog of GI Number: 28393400 NR Desc: putative aldo/keto reductase
  misc_feature: Homolog of GI Number: 79324628 NR Desc: oxidoreductase
  misc_feature: Homolog of GI Number: 21537087 NR Desc: reductase
  misc_feature: Homolog of GI Number: 4895205 NR Desc: putative alcohol dehydrogenase
  misc_feature: Homolog of GI Number: 13160397 NR Desc: aldose reductase
MGHSVLPKSTDEGRIRANLDVFGWSLPEDLLAKFSEIEQERLIRAGFFVDPDGVFKSIEEFWDGEI

SEQ ID NO: 8221 - DNA, 922 bp, Zea mays
  misc_feature: Ceres CLONE ID no. 1446975
  misc_feature: Ceres CDNA ID no. 24726513
  CDS (196)..(645): REFERENCED BY SEQ ID NO: 8222
aattcattccaaccaaacggcaaacgcaaccctaggaagcaagcccacaggacctctctgcttctgcggtttcggcattgggatatagtccctaccagacagaatcgattccagtccaggcttccagcgcgagagggatccatctccgttgagtcgaggcggctccaactccggctcgtggcctcgcggaccaacatggccgccccttcgccctcgccggtggaggctacccttccgcctgaggccgcggccgccgccgaggaagaccagtgggatgctgatggatatgttattcctaatttgcccactcaagataatgatgtggctgagcctagtgtccccaaagaaaaagatcctgagcctctacaggcaaacgatgagaaaatatatctgggacctcatggagctccaccatctcaagcaaagcagcaggagctgaacaccgttggccgcaagcagcggttccggaacaagctgaaggaagcagataggaaattccccggcaatgctcaggagaacaaggtggagaacctaagggagctgatgggtgctagaggtggtaccagcctgcctaagagctctcctcgtgattggctcgatccgcactgccatgaatctgaattcgacagaaaaccaactagatgaccggcaaacgatgcagcgtgcgtttacctgaaggttgattacgctgtagcactggtgcgaggtgttattcgccaataacagatacttatggttgactaatagatgaagcaaagcaaaagggtttcttgtggtgtaatttatcggagctctactgttctccatgtcgcgtaaatactcttaattctcggttgtgcgcgtgtgtcgttgcatttgctatttacattggaaaaatatatggaaacaagttgctgttgcgtaactaaaaaaaaaaaaaaaa

SEQ ID NO: 8222 - protein, 149 aa, Zea mays
  misc_feature: Ceres CLONE ID no. 1446975
  misc_feature: Ceres CDNA ID no. 24726513
MAAPSPSPVEATLPPEAAAAAEEDQWDADGYVIPNLPTQDNDVAEPSVPKEKDPEPLQANDEKIYLGPHGAPPSQAKQQELNTVGRKQRFRNKLKEADRKFPGNAQENKVENLRELMGARGGTSLPKSSPRDWLDPHCHESEFDRKPTR

SEQ ID NO: 8223 - DNA, 932 bp, Zea mays
  misc_feature: Ceres CLONE ID no. 1446990
  misc_feature: Ceres CDNA ID no. 25891043
  CDS (94)..(753): REFERENCED BY SEQ ID NO: 8224
aaatgagcgaccaaaaccctagtccattcttccccaccgccgccttgccccctctcgccgaattgccgctccgcgtccaccgaaggatcaccaatggctccgacgtcgaagatggcgctcggcataaagcgggcgtcgagatcgcacacctaccaccgccgcgggctttgggccatcaaggccaagcacggcggcgccttccccaaggccgagaagccggccgccgtcgccgagcccaagttctatcccgctgatgatgtcaagccacgcaccgtcagcacacgcaagccccatcccaccaagctcagatcgaccatcacaccgggcacggtgctgatcctgctcgcggggaggtacattggaaagcgcgtgctgttcctcaagcagctcaagtccggccttctcctcatcactggacctttcaagatcaatggcgtgccaatccgcagagtgagccaggcttacgtcattgccacatccacaaaggtcgacatctctaaggttaatgtgcagaagtttgatgacaagtactttgctagggagaagaagactagggcaaagaagactgagggcgagctatttgagtcggagaaggaggcaaccaagaatttgcccgacttcaagaaggatgatcagaaggccattgatgccgagttgatgaaggctatcgatgctgtcccagaccttaaaaattatcttggtgcccggttctccctcagggatggtgacaagccgcatgagatgaccttctaagttacctggtacaagtttcaagatctgtggaagtcttttttgtctagtgtgtgtgctggttctgtacttctgatttcttttgcccggttggtgaatctttgatttccactgaagtctgcctgtcaaatattttgagaagattactagaagtaccatccccttcaaaaaaaaaaaaaaaa

SEQ ID NO: 8224 - protein, 219 aa, Zea mays
  misc_feature: Ceres CLONE ID no. 1446990
  misc_feature: Ceres CDNA ID no. 25891043
  misc_feature: null
  misc_feature: Useful for making plants with modulated nitrogen use efficiency
  misc_feature (10)..(49): Pfam Name: Ribosomal_L6e_N PFAM Desc: Ribosomal protein L6
  misc_feature (112)..(219): Pfam Name: Ribosomal_L6e PFAM Desc: Ribosomal protein L6e
  misc_feature: Homolog of GI Number: 57471700 NR Desc: ribosomal protein L6
  misc_feature: Homolog of GI Number: 50909993 NR Desc: putative 60S ribosomal protein L6
  misc_feature: Homolog of GI Number: 50925014 NR Desc: OSJNBb0022F23.11
  misc_feature: Homolog of GI Number: 19539 NR Desc: ribosomal protein YL16
  misc_feature: Homolog of GI Number: 9795602 NR Desc: Putative  60S ribosomal protein L6
  misc_feature: Homolog of GI Number: 21592925 NR Desc: putative 60S ribosomal protein L6
  misc_feature: Homolog of GI Number: 21593910 NR Desc: 60S ribosomal protein L6
  misc_feature: Homolog of GI Number: 7208784 NR Desc: 60S ribosomal protein L6
  misc_feature: Homolog of GI Number: 27311965 NR Desc: putative 60S ribosomal protein L6
  misc_feature: Homolog of GI Number: 57999636 NR Desc: 60S ribosomal protein L6 CgRPL6
MAPTSKMALGIKRASRSHTYHRRGLWAIKAKHGGAFPKAEKPAAVAEPKFYPADDVKPRTVSTRKPHPTKLRSTITPGTVLILLAGRYIGKRVLFLKQLKSGLLLITGPFKINGVPIRRVSQAYVIATSTKVDISKVNVQKFDDKYFAREKKTRAKKTEGELFESEKEATKNLPDFKKDDQKAIDAELMKAIDAVPDLKNYLGARFSLRDGDKPHEMTF

SEQ ID NO: 8225 - DNA, 605 bp, Zea mays
  misc_feature: Ceres CLONE ID no. 1447025
  misc_feature: Ceres CDNA ID no. 29191843
  CDS (59)..(310): REFERENCED BY SEQ ID NO: 8226
acagaggcgcagacccagacgagcgcgagaccggaccgagaagaggcggacggcggcgatgggcggcggaggcgcgcacggcggcacgacgtacaagggctacaccatcccccacaacaagcgctggcacaccatcgccggcaagggcctctgcgccaccatgtggttttggattttctacagggctaagcaggacggcgctgtgctcttgggtatgcgtcatccttgggatggccatgatgatcacgcgcatggtcatggacatgcacacgagcatgaggcttcatcgtcgtcatcgccgtcccattgagctcaacgctgaaagcggctgacagagaccctgacacgtcgcatgtttcgacgcaagtctctgctaataaaaaacaatcacaactatcattgttcacccctgttgtttgcgagtatattttttttttggcacacaaactggctttgttatgtattttggtttggagctgtggcgtcggtgggaatgctccggcgtgcatgtgttgttgctgcagctgttgtcgcacgctctgagaaatcctctgacaatatatgcatcccgttcgagtagcgcattgctaaaaaaaaaaaaaaaa

SEQ ID NO: 8226 - protein, 83 aa, Zea mays
  misc_feature: Ceres CLONE ID no. 1447025
  misc_feature: Ceres CDNA ID no. 29191843
  misc_feature: Homolog of GI Number: 19912029 NR Desc: BLE1 protein
  misc_feature: Homolog of GI Number: 54291023 NR Desc: putative BLE1 protein
MGGGGAHGGTTYKGYTIPHNKRWHTIAGKGLCATMWFWIFYRAKQDGAVLLGMRHPWDGHDDHAHGHGHAHEHEASSSSSPSH

SEQ ID NO: 8227 - DNA, 625 bp, Zea mays
  misc_feature: Ceres CLONE ID no. 1447059
  misc_feature: Ceres CDNA ID no. 40351860
  CDS (29)..(460): REFERENCED BY SEQ ID NO: 8228
agcaaggcaaagaatgccacacccacccatggcgctcctcctctccccgaccgtttccttcctggtctccccgtctgctccacgccctcgagctctctccgctgccgccaatgtatcctaccccgcctcaaggctgcaatgcaagaacctgtcctcccaacagagccctctgaatgtgactgctacttgtgcttctttcgctgagaagaggctggttcttgtccatgccacggcagagggttctgaggctggtgcggagcagccagaagagccgaaaccagcgaccaagatcgaggaaatgccactcgagtcgaagcagaagatgatcatggagcaaagagcgcggatgaagcttgccaagaaactgaggcagcggcgcaagcggcttctccgcaagaggaagcttaggaagaagggcaggtggccaccgtccaagatgaagaagctcaagaatgtatgaacaacgtcaacgttgactgccactctgccttggttttatgtgttgtgattgtgattgcccagcttacgaattttgctgttcagaatctgagacacggtacctacaaaatgtaactctgttttcacgtaatttgaatcttcttacagtctaaaaaaaaaaaaaaaa

SEQ ID NO: 8228 - protein, 143 aa, Zea mays
  misc_feature: Ceres CLONE ID no. 1447059
  misc_feature: Ceres CDNA ID no. 40351860
MALLLSPTVSFLVSPSAPRPRALSAAANVSYPASRLQCKNLSSQQSPLNVTATCASFAEKRLVLVHATAEGSEAGAEQPEEPKPATKIEEMPLESKQKMIMEQRARMKLAKKLRQRRKRLLRKRKLRKKGRWPPSKMKKLKNV

SEQ ID NO: 8229 - DNA, 720 bp, Zea mays
  misc_feature: Ceres CLONE ID no. 1447070
  misc_feature: Ceres CDNA ID no. 29191238
  CDS (64)..(516): REFERENCED BY SEQ ID NO: 8230
gggggttaaacaaagaaaaaaagaaaaaaacggggggacagaagagaaatcgggagagaaggcatggcggcggaagaaggaaacgagttctacctgcggtactatgtcgggcacaaggggaaatttggacacgagttcctggagttcgagtttagaccggacggtaagctccgatacgccaataactcaaactacaagaacgatacgatgatccggaaggaagtgtttctcacccccgccgttctcaaggaatgcaagcgtatagtctccgagagcgagataatgaaagaagatgattttaagtggccggaacctgaccgtgttgggaggcaagagcttgagatcgttatgggaaatgagcacatctccttcgctacatctaagattggttctctcgttgatgtccagagcagtgatgatcctgaaggtcttcgcatcttttactatcttgttcaggacttgaaatgtcttgttttttcgctcatctcactgcacttcaagatcaagcctatttagagaagaaacctgttgagttaccgggagggagcatgtgcctgaagtttggttgctatttgcgttgtcttgtgttgttaccttgaaaaccctgagtttcattcgtatgctgttttatttcttcttcttcttttttgttgcaatgaatcttaaatgagcgttggtattggaaatggacacatcggtttggtaaaaaaaaaaaaaaaa

SEQ ID NO: 8230 - protein, 150 aa, Zea mays
  misc_feature: Ceres CLONE ID no. 1447070
  misc_feature: Ceres CDNA ID no. 29191238
  misc_feature (8)..(150): Pfam Name: Mago_nashi PFAM Desc: Mago nashi protein
  misc_feature: Homolog of GI Number: 42565403 NR Desc: mago nashi
  misc_feature: Homolog of GI Number: 3123515 NR Desc: Mago Nashi
  misc_feature: Homolog of GI Number: 58465200 NR Desc: mago nashi
  misc_feature: Homolog of GI Number: 12802873 NR Desc: mago nashi
  misc_feature: Homolog of GI Number: 13195558 NR Desc: mago nashi
  misc_feature: Homolog of GI Number: 32450349 NR Desc: Magoh protein
  misc_feature: Homolog of GI Number: 33358223 NR Desc: Chain D
  misc_feature: Homolog of GI Number: 57087953 NR Desc:  similar to Conserved oligomeric Golgi complex component 7
  misc_feature: Useful for making shorter plants
  misc_feature: Useful for making stronger plants
MAAEEGNEFYLRYYVGHKGKFGHEFLEFEFRPDGKLRYANNSNYKNDTMIRKEVFLTPAVLKECKRIVSESEIMKEDDFKWPEPDRVGRQELEIVMGNEHISFATSKIGSLVDVQSSDDPEGLRIFYYLVQDLKCLVFSLISLHFKIKPI

SEQ ID NO: 8231 - DNA, 556 bp, Zea mays
  misc_feature: Ceres CLONE ID no. 1447090
  misc_feature: Ceres CDNA ID no. 35383407
  CDS (3)..(281): REFERENCED BY SEQ ID NO: 8232
gaatcgcttcagctcggcgtcttcacaaacgccggcgcaaactctcgcccgagcccgacagatctctaattccccataccgtccaccggtcgaccttcacgccagtctcggtctcttccgaaggcgtcgcgcgcggttgtttgagaggagaggaggaagatgagggagtgcatctccgtccacatcgggcaggccggcatccaagtcggcaacgcgtgctgggaactttactgcctcgagcacggcatccaggtgcgaccggctcgtattctcttccttgaaaagcatcaccatcttcgatcgttttctgatctgttgtcgaggagtgctgcaatttgcagttgcagggcgttagtactcgaatcgggatgaagtactgaagtggtttaggctagggttttttttcgtcagatctgttgatagtactactaggatctgaaatttcctgcacgatttaagctgccaccatcctgtgttttaggtgtatcgtggatttcgtctgttaatactttgcggcagaaataacaagatgttccgatcgaaaaaaaaaaaaaaa

SEQ ID NO: 8232 - protein, 70 aa, Zea mays
  misc_feature: Ceres CLONE ID no. 1447090
  misc_feature: Ceres CDNA ID no. 35383407
  misc_feature: Homolog of GI Number: 61877037 NR Desc:  similar to alpha tubulin
  misc_feature: Homolog of GI Number: 13959103 NR Desc: alpha tubulin
  misc_feature: Homolog of GI Number: 50428725 NR Desc: alpha tubulin
  misc_feature: Homolog of GI Number: 50428727 NR Desc: alpha tubulin
  misc_feature: Homolog of GI Number: 54399256 NR Desc: alpha tubulin
  misc_feature: Homolog of GI Number: 22152 NR Desc: alpha
  misc_feature: Homolog of GI Number: 25264668 NR Desc: tubulin alpha
  misc_feature: Homolog of GI Number: 25264675 NR Desc: tubulin alpha
  misc_feature: Homolog of GI Number: 478753 NR Desc: tubulin alpha
  misc_feature: Homolog of GI Number: 76573359 NR Desc: alpha
MRECISVHIGQAGIQVGNACWELYCLEHGIQVRPARILFLEKHHHLRSFSDLLSRSAAICSCRALVLESG

SEQ ID NO: 8233 - DNA, 767 bp, Zea mays
  misc_feature: Ceres CLONE ID no. 1447110
  misc_feature: Ceres CDNA ID no. 36704595
  CDS (111)..(542): REFERENCED BY SEQ ID NO: 8234
actaaccctagcgacatctgcgcccccaatcgctcggcctcccgccggagctccagatctgcggccgcttcgtcccgcgctggtggtgaccttcccggatcggagccaagatgacggagtcgatggtgcgcaacaagccggggatggcgagcgtcaaggacatgccggtgctgcaggacgggccgccgccgggcgggttcgcgcccgtgcgctacgcgcgccgcatccccaacaagggccccagcgccatcgccctcttcctcaccaccttcggcgccttctcctggggcatgtaccaggtcgggcaggggaacaaggtccgccgtgcactgaaggaggagaaaattgctgcccgtagtgctatactgccgatgctccaagctgaagaggatgaaagatttgtcaaagaatggaagaagtaccttgaggaggaagcgaggatcatgaaaaatgttcctggatggaaagttggtgagagcgtgtacaattctgggaaatggatgcctcctgcaactggtgagctgcgtccggaggtttggtaaggtccaatgtcttgcttcagcccatcgccgatggcatcgtgccttgagggcatgaataaggctttcagacctggacaccccgaaatttgctacgaggaatacatacttgagcattcgtcgtgtatttcttctgttgacggaatttgaatggctaataattggacagagcaagccggctttggtctttatatgaacaatctccttttgttaaaaaaaaaaaaaaaa

SEQ ID NO: 8234 - protein, 143 aa, Zea mays
  misc_feature: Ceres CLONE ID no. 1447110
  misc_feature: Ceres CDNA ID no. 36704595
  misc_feature (16)..(141): Pfam Name: GRIM PFAM Desc: GRIM
  misc_feature: Homolog of GI Number: 16973316 NR Desc: F6
  misc_feature: Homolog of GI Number: 34334020 NR Desc: NADH:ubiquinone oxidoreductase B16.6 subunit
  misc_feature: Homolog of GI Number: 35187443 NR Desc: fiber protein Fb20
  misc_feature: Homolog of GI Number: 27668839 NR Desc: similar to novel cell death
  misc_feature: Homolog of GI Number: 34809544 NR Desc: GRIM19 protein
  misc_feature: Homolog of GI Number: 21361822 NR Desc: cell death
  misc_feature: Homolog of GI Number: 55648697 NR Desc:  similar to cell death
MTESMVRNKPGMASVKDMPVLQDGPPPGGFAPVRYARRIPNKGPSAIALFLTTFGAFSWGMYQVGQGNKVRRALKEEKIAARSAILPMLQAEEDERFVKEWKKYLEEEARIMKNVPGWKVGESVYNSGKWMPPATGELRPEVW

SEQ ID NO: 8235 - DNA, 638 bp, Zea mays
  misc_feature: Ceres CLONE ID no. 1447122
  misc_feature: Ceres CDNA ID no. 29191239
  CDS (40)..(441): REFERENCED BY SEQ ID NO: 8236
attttcacaaccggagagctctgaggaatcgcagcagccatggcggagaaagcagtcactatcaggaccaggaagttcatgaccaacaggcttctctccaggaagcagtttgttattgatgttcttcacccaggaagagctaatgtctcaaaggctgagctcaaggagaagttggcaaggatgtacgaggttaaggacccaaatgcaatcttcgttttcaaattcagaacccactttggaggtggcaaatcatctgggtttggtttgatctacgacaatgtcgagagtgccaagaagttcgagcccaagtacaggctcatcaggaatggacttgacaccaagattgagaaatcaaggaaacagattaaggagaggaagaacagggccaagaaaatccgtggtgttaagaagaccaaggctggtgaccccaagaagaagtgaggagatgttgaagagccaaggcgcattttgggtttttattccgcatcatcccttcttttatgcccatatttgcttctcattgtcacactcgttctatcttgttttggattatgctttaagcgatagagaaaccttgtgctaaagattttgctgaatacatttttattttaaaactcccctcaaaaaaaaaaaaaaaa

SEQ ID NO: 8236 - protein, 133 aa, Zea mays; identical to SEQ ID NO: 5352
  misc_feature: Ceres CLONE ID no. 1447122
  misc_feature: Ceres CDNA ID no. 29191239
  misc_feature (24)..(107): Pfam Name: Ribosomal_S24e PFAM Desc: Ribosomal protein S24e
  misc_feature: Homolog of GI Number: 21554374 NR Desc: putative ribosomal protein s19 or s24
  misc_feature: Homolog of GI Number: 21555157 NR Desc: 40S ribosomal protein S19
  misc_feature: Homolog of GI Number: 445612 NR Desc: ribosomal protein S19
  misc_feature: Homolog of GI Number: 10803047 NR Desc: 40S ribosomal protein S24
  misc_feature: Homolog of GI Number: 53792560 NR Desc: putative 40S ribosomal protein S24
  misc_feature: Homolog of GI Number: 50906559 NR Desc: putative 40S ribosomal protein S24
  misc_feature: Homolog of GI Number: 34910730 NR Desc: putative 40S ribosomal protein S24
  misc_feature: Homolog of GI Number: 6687297 NR Desc: 40S ribosomal protein S19
  misc_feature: Homolog of GI Number: 48095625 NR Desc: similar to ribosomal protein S24
  misc_feature: Homolog of GI Number: 61876498 NR Desc:  similar to ribosomal protein S24
  misc_feature: Useful for making ornamental plants with modified flowers
  misc_feature: Useful for making ornamental plants with modified leaves
  misc_feature: Useful for making plants with altered leaf shape eg curled leaves
  misc_feature: Useful for making plants with altered leaf shape eg curled leaves
  misc_feature: Useful for making shorter plants
  misc_feature: Useful for making taller plants and plants with longer inflorescences
  misc_feature: Useful for sterility

SEQ ID NO: 8237 - DNA, 833 bp, Zea mays
  misc_feature: Ceres CLONE ID no. 1447162
  misc_feature: Ceres CDNA ID no. 36698149
  CDS (117)..(695): REFERENCED BY SEQ ID NO: 8238
aaccaccactacaactcgacaccgagaaaagcgcagcaaagcaacgcaaagcccacgccgctacagtgctctcttgcctgccgctacgagccaacgactcgaacgcatacactccaatggcagcgacggtgatggcctccatgagccccctcgcctccgccacccccggcgcgcgtcgcgctttccctgtacggctgctccaggcttctacactcgcgccgcgccggcgcgccttggccgtgagggcccagagcgacgacgccgagccaaaagaggaggtggcctcctcctcgccttctccgtccgccaccccggcgccaaagtccaaggcggcggcgacggcgagccccgggctgtgggacgcgctggcgttcagcggcccggctcccgagcgcatcaacggccggctcgccatggtgggcttcgtgtccgcgctcgccgtcgaggcgtcccgcggcgggggcctcctctcgcaggccggcagcgggtccgggctcgcctggttcgcggccacggctgccgtgctgtccgtggcgtcgctagtgccgctgctcaggggcgacagcgccgaggccaggagcggcgccgtcatgagcgccgacgccgagctctggaacggccgcttcgccatgctcggcctcgtcgcgctcgccttcactgagtacctcaccggcgcaccgttcatcaacgcgtagaggcggttcagtccaagccagtgcttatatattttggaactgtgtatgctagcgggctagcggcaccatgcgcgtagtaggagcctagctacagttgaacgagctactttttattgggatttaaaaaaaaaaaaaaaa

SEQ ID NO: 8238 - protein, 192 aa, Zea mays
  misc_feature: Ceres CLONE ID no. 1447162
  misc_feature: Ceres CDNA ID no. 36698149
  misc_feature (163)..(190): Pfam Name: Chloroa_b PFAM Desc: Chlorophyll A
  misc_feature: Homolog of GI Number: 34904610 NR Desc: putative early light
  misc_feature: Homolog of GI Number: 50934633 NR Desc: putative low molecular mass early light
  misc_feature: Homolog of GI Number: 50934635 NR Desc: putative low molecular mass early light
  misc_feature: Homolog of GI Number: 14029814 NR Desc: early light
  misc_feature: Homolog of GI Number: 4521272 NR Desc: early light
  misc_feature: Homolog of GI Number: 28194659 NR Desc: putative early light induced protein
  misc_feature: Homolog of GI Number: 1778823 NR Desc: early light
  misc_feature: Homolog of GI Number: 7268175 NR Desc: light induced protein like
  misc_feature: Homolog of GI Number: 50251956 NR Desc: putative early light
  misc_feature: Homolog of GI Number: 50916623 NR Desc: putative low molecular mass early light
MAATVMASMSPLASATPGARRAFPVRLLQASTLAPRRRALAVRAQSDDAEPKEEVASSSPSPSATPAPKSKAAATASPGLWDALAFSGPAPERINGRLAMVGFVSALAVEASRGGGLLSQAGSGSGLAWFAATAAVLSVASLVPLLRGDSAEARSGAVMSADAELWNGRFAMLGLVALAFTEYLTGAPFINA

SEQ ID NO: 8239 - DNA, 988 bp, Zea mays
  misc_feature: Ceres CLONE ID no. 1447427
  misc_feature: Ceres CDNA ID no. 40041414
  CDS (129)..(629): REFERENCED BY SEQ ID NO: 8240
ctcatcgctctcggggttggcttctcctccccttccggttcgggttctggttcggttcgggttcggttcgagagagaggccgagtagctagcctagtctagggtttcggtagagaggaagggagatccatggcggagacggagtaccgctgcttcgtgggcggcctcgcctgggccaccgacgacaacaacctccagcaggccttcagccagtacggcgagatcctcgacgccaagatcatcaacgaccgcgagacggggaggtcccgtgggttcggcttcgtcacgttcggcagcgaggagtcgatgcgccaggccatcgaggagatgaacggcaaggagctcgacgggcgcaacatcaccgtcaacgaggcccagtcccgccgctccggcggtgggggcggcggcggcggctacggcggccagcgcggcggtggcggaggctacggcggcggcggtggcggctacggcggccagggcggcggcggctacggccagggcggcggtggcggctacggccagggcggcggtggctacggcggccagcgtggtggcggcggctacggcggcggcggcggtggctacggcggccagcgcggcggcgactccggcggccagtggaggaactgagcggcggggccctccagttatcgatctatctaccatctcgtcgtcttcgtcatcaagttatcttcagtgtcgtcgtcgtcgtgttcctgtgtcagtcagtcttgagtcgtgtgtgtcgttcggtcctgtggtgtttttgatcgcgagctcgagtgtcgctctgtccggggttaattagagctggttacgcgaggaagaaacaacatgtgttatctttctcggtcggtcggtcgtgttcgtcggtgatgcagcaatcccttctgtcatggattgggatgtgatgttggaatcctatgtttgaactcagtttaaatggatgaagaaaatgcaagtgatagctgcgaaaaaaaaaaaaaaaa

SEQ ID NO: 8240 - protein, 166 aa, Zea mays
  misc_feature: Ceres CLONE ID no. 1447427
  misc_feature: Ceres CDNA ID no. 40041414
  misc_feature: The plant is abnormally small.
  misc_feature: Useful for making plants with modulated growth and phenotype characteristics
  misc_feature: null
  misc_feature: The sequence is a functional homolog of  SEQ ID NO 1016 in the  11/435,388 US patent application
  misc_feature: Useful for making plants with altered Lignin content
  misc_feature: Useful for making plants with altered alkaloid content
  misc_feature: Useful for making plants with modulated biomass
  misc_feature: Useful for making plants with modulated nitrogen use efficiency
  misc_feature (8)..(79): Pfam Name: RRM_1 PFAM Desc: RNA recognition motif.
  misc_feature: Homolog of GI Number: 974605 NR Desc: single
  misc_feature: Homolog of GI Number: 728594 NR Desc: glycine rich protein
  misc_feature: Homolog of GI Number: 77557139 NR Desc: glycine
  misc_feature: Homolog of GI Number: 21625 NR Desc: glycine
  misc_feature: Homolog of GI Number: 2267593 NR Desc: glycine
  misc_feature: Homolog of GI Number: 50881454 NR Desc: glycine
  misc_feature: Homolog of GI Number: 2331133 NR Desc: glycine
  misc_feature: Homolog of GI Number: 10799202 NR Desc: glycine
  misc_feature: Homolog of GI Number: 17819 NR Desc: glycine
  misc_feature: Homolog of GI Number: 2331131 NR Desc: glycine
  misc_feature: Useful for delaying flowering time
  misc_feature: Useful for increasing chlorophyll and photosynthetic capacity
  misc_feature: Useful for making ornamental plants with modified leaves
  misc_feature: Useful for making plants with altered leaf shape eg curled leaves
  misc_feature: Useful for making plants with altered leaf shape eg curled leaves
  misc_feature: Useful for making plants with altered leaf shape eg curled leaves
  misc_feature: Useful for making plants with increased biomass and foliage
  misc_feature: Useful for making plants with increased biomass and foliage
  misc_feature: Useful for making shorter plants
  misc_feature: Useful for sterility
MAETEYRCFVGGLAWATDDNNLQQAFSQYGEILDAKIINDRETGRSRGFGFVTFGSEESMRQAIEEMNGKELDGRNITVNEAQSRRSGGGGGGGGYGGQRGGGGGYGGGGGGYGGQGGGGYGQGGGGGYGQGGGGYGGQRGGGGYGGGGGGYGGQRGGDSGGQWRN

SEQ ID NO: 8241 - DNA, 625 bp, Zea mays
  misc_feature: Ceres CLONE ID no. 1447473
  misc_feature: Ceres CDNA ID no. 25445884
  CDS (47)..(439): REFERENCED BY SEQ ID NO: 8242
aaccaaaaccttctcttccaccccgctgcgaaccaagtgcgaagccatggccaccatcaccaccatggccttcatggccacctttcgggctcccagaaccgttgcgcagcccccggccacgctgccatctcgcccggacgtcgtgtcgttcgcggcccgggcgatgcgcgcgcacggccggcggctggtggccgtggcgggctcgccgtccacgcccccggagctggcgcagaaggtgacggagagcatcaagcaggcggaggagacgtgcgcgggggacccggagggcggcgagtgcgtggcggcgtgggacgaggtggaggagctcagcgcggcggccagccacgcgcgcgaccgcaagaaggagcacagcgacccgctggaggagttctgcgaggacaaccccgagaccgacgagtgccgcacctacgacagctagccgtgcgtgcctgctcctgccgtcttctgccattgccggccgtcattcgagcttagcttgcgtggcacattggcatcttgggcgtgttaagtttggtttgttgctttattttgtttggcttagaataaagcgagcaaagatttgtttgtaaaattacaagatactactataaaaaaaaaaaaaaaa

SEQ ID NO: 8242 - protein, 130 aa, Zea mays
  misc_feature: Ceres CLONE ID no. 1447473
  misc_feature: Ceres CDNA ID no. 25445884
  misc_feature (60)..(130): Pfam Name: CP12 PFAM Desc: CP12 domain
  misc_feature: Homolog of GI Number: 1617206 NR Desc: CP12
  misc_feature: Homolog of GI Number: 21387021 NR Desc: putative chloroplast protein CP12
  misc_feature: Homolog of GI Number: 21281032 NR Desc: putative CP12 protein precursor
  misc_feature: Homolog of GI Number: 21555170 NR Desc: CP12 protein precursor
  misc_feature: Homolog of GI Number: 1617213 NR Desc: CP12
  misc_feature: Homolog of GI Number: 25990286 NR Desc: chloroplast protein 12
  misc_feature: Homolog of GI Number: 23505751 NR Desc: At2g47400/T8I13.24
  misc_feature: Homolog of GI Number: 55736085 NR Desc: auxin
  misc_feature: Homolog of GI Number: 66780099 NR Desc: PE
MATITTMAFMATFRAPRTVAQPPATLPSRPDVVSFAARAMRAHGRRLVAVAGSPSTPPELAQKVTESIKQAEETCAGDPEGGECVAAWDEVEELSAAASHARDRKKEHSDPLEEFCEDNPETDECRTYDS

SEQ ID NO: 8243 - DNA, 1153 bp, Zea mays
  misc_feature: Ceres CLONE ID no. 1447474
  misc_feature: Ceres CDNA ID no. 40351861
  CDS (1)..(1095): REFERENCED BY SEQ ID NO: 8244
atgctgggtcttgtcccctcctcatcctcctcccacctcctctgccgcagcctcgccgccgccaggacgctctctgtcgccgccgccggatcctcctcctcctcctctcccgtcaagatggcgcgctcggcgctggacgaggtcaccgacaccggcgccttcgaccggacgccgtccaccttccggagcttcgtgttcagggacgcctccgcccgcttccccgcggtggcgggtaggtaccacctctacgtctcctacgcctgcccctgggcgtcccgctgcctcgcctacctcaagctcaagggcctcgaccacgccatcagcttctcgtccgtgaagcccatcttcgagcggaccagggagtccgacgaccacctggggtgggtgttcccggccaccgccgacgaggtgcccggcgccggccccgaccccttcaacggcgccaagagcgtcagggatctgtacgagatcgcgagcaccaactacaccggcaagccaactgttcccgtgctgtgggacaagcagctgaagacggtggtgaacaacgagagcagcgagatcatccggatgctcaacgccgagttcaacgacatcgcggagaaccccgggctggacctcaacccggcgcacctccaggtctccatcgacgaggtcaacggcctggtctacgacgccatcaacaacggcgtctacaagtgcggcttcgccaagaagcaggggccatacgacgaggccgtcacgacgctgtacgaggctctggacaagtgcgaggagatcctgggcaagcagcggtacatgtgcggcaaccagctcacggaggccgacgtccgcctcttcgtcacgctcataagatttgacgaggtttacgccgttcacttcaagtgcaacaagaagctcctgagagagtaccctaacctgttcaactacaccaaggacatctaccagatccccgggatcaacagcacggtgaacatggagcacatcaggaagcactactacgggagccacccctccatcaacccctacgggatcatccctcaaggccccaacatcgactacaatgccccacatgacagagagaggctgttcctgtaaaaagaaccaccgtttgcttgtgtacttgggatgctgtgatgtaaaaaaaaaaaaaaaa

SEQ ID NO: 8244 - protein, 325 aa, Zea mays
  misc_feature: Ceres CLONE ID no. 1447474
  misc_feature: Ceres CDNA ID no. 40351861
  misc_feature (144)..(278): Pfam Name: GST_C PFAM Desc: Glutathione S
MARSALDEVTDTGAFDRTPSTFRSFVFRDASARFPAVAGRYHLYVSYACPWASRCLAYLKLKGLDHAISFSSVKPIFERTRESDDHLGWVFPATADEVPGAGPDPFNGAKSVRDLYEIASTNYTGKPTVPVLWDKQLKTVVNNESSEIIRMLNAEFNDIAENPGLDLNPAHLQVSIDEVNGLVYDAINNGVYKCGFAKKQGPYDEAVTTLYEALDKCEEILGKQRYMCGNQLTEADVRLFVTLIRFDEVYAVHFKCNKKLLREYPNLFNYTKDIYQIPGINSTVNMEHIRKHYYGSHPSINPYGIIPQGPNIDYNAPHDRERLFL

SEQ ID NO: 8245 - DNA, 661 bp, Zea mays
  misc_feature: Ceres CLONE ID no. 1447508
  misc_feature: Ceres CDNA ID no. 36706812
  CDS (93)..(521): REFERENCED BY SEQ ID NO: 8246
ttagggttttcgcagccgctttaaaagtacctcctcttccttgcagagctctttgctgttgatcctctctctctctccttccatcgacaaacatgggtaagacaagaggaatgggagctgggcgcaagctcaaaaggcttaggattaatcagaggtgggctgacaaacagtacaagaagtcccatcagggtaacgagtggaagaagccttttgctggttcttcccacgccaaaggaatcgttcttgagaaaattggtattgaggctaagcagcccaactctgctatccgtaagtgtgctagagtccagctcatcaagaacggcaagaagattgccgcttttgtccccaacgatggttgcttgaactacattgaggaaaatgacgaggtgttgatcgctgggtttggtcgtaagggtcatgctgtgggagatattcccggagtcaggttcaaggttgtcaaggtttctggtgtctcacttttggccctattcaaggagaagaaggagaagccaagatcttaatcaatgccgcaaagcttttgagtttgatgttataatcactttttgctagttcagtttttttaaaaaatactctcttctgttctaatggtgtgttaaaacattttcttaatgaatctttgagttcaaaaaaaaaaaaaaaa

SEQ ID NO: 8246 - protein, 142 aa, Zea mays; identical to SEQ ID NO: 5580
  misc_feature: Ceres CLONE ID no. 1447508
  misc_feature: Ceres CDNA ID no. 36706812
  misc_feature (9)..(141): Pfam Name: Ribosomal_S12 PFAM Desc: Ribosomal protein S12
  misc_feature: Homolog of GI Number: 21536723 NR Desc: putative 40S ribosomal protein S23
  misc_feature: Homolog of GI Number: 50919443 NR Desc: 40S ribosomal protein S23
  misc_feature: Homolog of GI Number: 1362041 NR Desc: ribosomal protein S23.e
  misc_feature: Homolog of GI Number: 62287478 NR Desc: 40S ribosomal protein S23
  misc_feature: Homolog of GI Number: 6682246 NR Desc: putative 40S ribosomal protein S23
  misc_feature: Homolog of GI Number: 58395907 NR Desc: ENSANGP00000012229
  misc_feature: Homolog of GI Number: 11121260 NR Desc: 40S ribosomal protein S23
  misc_feature: Homolog of GI Number: 30025641 NR Desc: 40S ribosomal protein S23
  misc_feature: Homolog of GI Number: 50344514 NR Desc: S23e ribosomal protein

SEQ ID NO: 8247 - DNA, 872 bp, Zea mays
  misc_feature: Ceres CLONE ID no. 1447514
  misc_feature: Ceres CDNA ID no. 25446018
  CDS (206)..(757): REFERENCED BY SEQ ID NO: 8248
aaaagccattgcttgctcagcctctctgcactgcagggcgatgatgaggcaacggcaaactggcagcagcaagtactactagcgcttgctaaaggccaggagcccaggacccggaggtgctcgctgtcgctgatcaaccgcgcgccgtcgcaggcagcacagcaaccagcaacagccaacagctaggcaggtagtagtagtatacatgagcaggttcgcggggcagacgtccaccaggccgtgggtggggatggcgggctctggcgccaccgcgtccgagcctgccgccgccgacgtcgcgagggacgacgccacggcggccatgaggggcgccggcgccggcgccggcaccaacgccagcgccatctccttcggcttcgcggccacggcggtcctcgtctccatgttcctcctcatggccatcttcgagcacctcatcaagcccggcctggcttcctcctcctcccgcggcgcatcgggctcccatgaagacgccgccgacgatgatggcgaaggccgcggccaccgccaccgcatggggggatcacccccggctcgactgcgcgagcgcgacgacgcggcgccggacaagctctgtcacctgccaaaggtggaggccgtggtggacttgacggtgctgatgccggggcagcggtacccgacgttcctggcgcagccggcgccgctcgcgccgtgccacagggaaggcgtgctctggccttcccacgaccgtcgccgctcgtttgtgccaccgtgattttttccccccaccacatcgttctttctgtacagaggttattgtaaatggcagcgccctggcttattcgaggctgatatatcatatggctgttgtcacaaaaaaaaaaaaaaaa

SEQ ID NO: 8248 - protein, 183 aa, Zea mays
  misc_feature: Ceres CLONE ID no. 1447514
  misc_feature: Ceres CDNA ID no. 25446018
  misc_feature: Homolog of GI Number: 34907352 NR Desc: P0471B04.10
  misc_feature: Homolog of GI Number: 50924618 NR Desc: OSJNBa0086B14.8
MSRFAGQTSTRPWVGMAGSGATASEPAAADVARDDATAAMRGAGAGAGTNASAISFGFAATAVLVSMFLLMAIFEHLIKPGLASSSSRGASGSHEDAADDDGEGRGHRHRMGGSPPARLRERDDAAPDKLCHLPKVEAVVDLTVLMPGQRYPTFLAQPAPLAPCHREGVLWPSHDRRRSFVPP

SEQ ID NO: 8249 - DNA, 661 bp, Zea mays
  misc_feature: Ceres CLONE ID no. 1447568
  misc_feature: Ceres CDNA ID no. 36705358
  CDS (42)..(311): REFERENCED BY SEQ ID NO: 8250
ctctgaccttatccccttgcggcaaaaccttgcgcgcaacaatggccgcctccctcccgaccaccgccgcgcgcctcgcggccccggccttcgcctacatcgacgtgaagaacaaggactacggaggtgacaagtacgtgaacggcgagataatcccctgcacgtacccgacgtaccagccgaaggagcggaggacgtccaagtacgagagcaggcggtacgagaggcggagagatgggccaccggcggccagcaggaaaccgaggcagcaggcaccagctcagactcagaccgagtcggcgtcttcgtgacgagctctgcaggcattttgtccacgtacctacctacctagaagtagaacaagagaggaggacgcctaaaattctgtcgcattgggcaccgcgtactggactggacaggcgggtcgggatccatcatccatcgtcagccagaaaattgtcgctgtccaagcagcctgggcagcttgtgtgtgactgtgtgtgctgatatcttgagctagctgtggcagaaactggaaaccctactgtgtgtgtgctgatatcttgtcatagcgagctgtgtgatgccgactggtgtagagctgtatcgctgattgcgtgaaaccgaaatgctgtggctttatttaaaaaaaaaaaaaaaa

SEQ ID NO: 8250 - protein, 89 aa, Zea mays
  misc_feature: Ceres CLONE ID no. 1447568
  misc_feature: Ceres CDNA ID no. 36705358
  misc_feature: Homolog of GI Number: 51979643 NR Desc: PREDICTED OJ1119_D01.18 gene product
  misc_feature: Homolog of GI Number: 21593052 NR Desc: DAG protein
  misc_feature: Homolog of GI Number: 1200205 NR Desc: DAG
MAASLPTTAARLAAPAFAYIDVKNKDYGGDKYVNGEIIPCTYPTYQPKERRTSKYESRRYERRRDGPPAASRKPRQQAPAQTQTESASS

SEQ ID NO: 8251 - DNA, 949 bp, Zea mays
  misc_feature: Ceres CLONE ID no. 1447672
  misc_feature: Ceres CDNA ID no. 40351862
  CDS (254)..(577): REFERENCED BY SEQ ID NO: 8252
acaataaccaggagcgagctacctgcgaagccacatctctccttcctcttcatcgatagtacttctccatattcaggtaaataacatctgcatgccgcgcgcccctaatagcatctcgatcacatttttgtgttcttgacttctcctggaagccttcttgtttaacaaacttatattagtcgttggtcgatctttggacccatgtaaatcttggttcgcgtccgccgtgcagtgcagaggcacaagctaagccatgagcaacggtggtaaccgcagcaggggcggcgcgaggttcgagctgcagctgcacctgtcgccgccgccgccggctaggagggtagaggtggacggcggaggcgacggcagcgactcgtcgtcgtccccgagctcgtgcgtgtcgtcggacggcagcccagggagcaagtcgccgatggtgatcggcgcctgcacgcggtgcatgatgtactgcatggtggccaagaaggacttccccacctgcatcaactgcaagcagccctgcctcgtggacctcctccactgctctggcgccggcggcagcggcggcaaggccaagtgaaaggacggtcagcgtgtcgtaccgtaccccggccgtcggtccagttgatgctcatacggatggttagctcagaccttagcttgtgggctttgtgcgctcatctcgaggcgcggtgggggagtgaccgccgttggatcatccactggatggacatggcctacttggtttagtaataggctagtgtagtactccccctattagcttatcttcgtttatgatgttgttgcttctttaaccgcggcatcggtatgtgatcgccggcgtggttcactgcctattattgttgctggcaatggtttttagctgcaacaatgctatgtttaaatggagaatgtcatctttcgatggttgtttctaaaaaaaaaaaaaaaa

SEQ ID NO: 8252 - protein, 107 aa, Zea mays
  misc_feature: Ceres CLONE ID no. 1447672
  misc_feature: Ceres CDNA ID no. 40351862
MSNGGNRSRGGARFELQLHLSPPPPARRVEVDGGGDGSDSSSSPSSCVSSDGSPGSKSPMVIGACTRCMMYCMVAKKDFPTCINCKQPCLVDLLHCSGAGGSGGKAK

SEQ ID NO: 8253 - DNA, 1068 bp, Zea mays
  misc_feature: Ceres CLONE ID no. 1447790
  misc_feature: Ceres CDNA ID no. 40351863
  CDS (138)..(677): REFERENCED BY SEQ ID NO: 8254
gtcgatctgttgtgtacggactggcgccgccacttagtcaccacccaccaaacttgggcacgctgctgcagcggtgggtgctcggctatcttcttcaagagacaagagtggagggcgaagagcagagctggggggagatgaacagcggcgtggacacgcaggcgcgggcgttcgcgggcgaggtgcgcggtagtttggagacgaagaactggatgctggacctcggccacccgctcctgaaccgcgtcgccgagagcttcgccaaggccgcggggatcggcgcagtgcaggcggtcgccagggaatcgtacttcatggcgactgaaggcgagggaggaggatctgtgtccggcacgaccggcgcaaggaaacgctcgttcccggagctcaatgggacgaacagtagcagcatcaagtcggcagaggccatggtgaaaagcgtgagcaaagagtcgttacagtgggggctcgcggctggggtgcactccggcctcacctacggcctcgcgggggtgcgcgggacgcacgactggaggaacagcgccgtggctggcgccatcacgggcgccgcggtcgcgctcacgtcggagcacgcgtcgcacgagcaggtcgtgcagtgcgccatcaccggcgccgcgctctccacggccgccaacgtgctctccggcatattctgagccgccggccgtgccgtgccgcttgatttccgaggattggcttatagttctgtcacccaatcattcgggtaccgtcgctcttacgcttcagtacgataacttgggagcgttgcattcatgctttcacttgcattgtcattacaacttgggagcgttgcattcatgctttaaactaatgctatcgtgtaacgtacggtgtacgatcttgcattgtcattacaacttattatggcctactttactgttagccgtataacggttttactataatttatacgctgcttagtcatgtctcatggtgggccgcgtaatcaccgaggcattctataaactttcaacatgatgatggggaagttatctgtgacatacccctataaaaaaaaaaaaaaaa

SEQ ID NO: 8254 - protein, 179 aa, Zea mays
  misc_feature: Ceres CLONE ID no. 1447790
  misc_feature: Ceres CDNA ID no. 40351863
  misc_feature (26)..(179): Pfam Name: Tim17 PFAM Desc: Tim17/Tim22/Tim23 family
MNSGVDTQARAFAGEVRGSLETKNWMLDLGHPLLNRVAESFAKAAGIGAVQAVARESYFMATEGEGGGSVSGTTGARKRSFPELNGTNSSSIKSAEAMVKSVSKESLQWGLAAGVHSGLTYGLAGVRGTHDWRNSAVAGAITGAAVALTSEHASHEQVVQCAITGAALSTAANVLSGIF

SEQ ID NO: 8255 - DNA, 1322 bp, Zea mays
  misc_feature: Ceres CLONE ID no. 1447793
  misc_feature: Ceres CDNA ID no. 40351864
  CDS (84)..(1151): REFERENCED BY SEQ ID NO: 8256
acagaaacagaattccgctccctccccgtgtcctcctcccgcgcccgcgcatcgtgaggtggagttcccaccccgaggccgcaatggcgacggtggaggtggtggtggccaacggcttgggtggcgccgacaccaagaccgtgtttaaggaaacatacagcaagctcaaggaggagatgctagacgaccccgccttcgagttcaccgacgagtcgctacagtggatcgaccgcatgttggactacaatgtgctcggaggaaagtgcaatcgcgggctctctgtcattgatagctacaggatattgaagggtgttgatgttctgagcaaggaggagacatttcttgcttgcacccttggctggtgcattgaatggcttcaagcttattttcttgtgcttgatgatattatggacaactcccagacacggcgtggccaaccttgctggtttagagtgccacaggttggcctcattgctgtaaatgatgggattatccttcgcaatcatatttcacgaatccttcaacgccacttcaaggggaagccatattatgttgatgtaattgacctattcaatgaggttgagttcaagacagcttcagggcaaatgttggatcttatcactacccacgagggtgaaaaggatctaactaaatataacttgacagttcgccgccacatcgttcagtacaagacagcttattattcattttaccttcctgttgcatgtgcattgctgctggctggtgagaacttggataactttggcgatgtaaagaacattcttgtcgaaatgggaacatactttcaagttcaggatgattatttagattgtttcggtgatcttaaattcattggcaagatcggaactgacattgaagactacaagtgttcctggctagtcgtgcaagctcttgaacgcgctgatgagaaacaaaagagcattctgtttgaaagttatggaaagtctgatccagcgtgtgttgcaaaggtgaaggacttgtacaaagagcttaaactggaggaggttttccaggcgtacgagagggagagttacaacaagctgattgccgacatcgaggcccagcccagcaaggcagtccagagtgttttgaagtccttccttcacaagatctacaagagggacaagtaaaaacccagatcgtgaagaagctgctccgtcgacgcttgcatcaaattagtagacttgattgatgcagatgagtaatttgtactatgttgtttcatgttttcattctcctgttgcgtgtactcctgaattataataaaacagagtgctattagggcaaaaaaaaaaaaaaaa

SEQ ID NO: 8256 - protein, 355 aa, Zea mays
  misc_feature: Ceres CLONE ID no. 1447793
  misc_feature: Ceres CDNA ID no. 40351864
  misc_feature: null
  misc_feature: Useful for making plants with modulated salt sensitivity
  misc_feature (47)..(318): Pfam Name: polyprenyl_synt PFAM Desc: Polyprenyl synthetase
MATVEVVVANGLGGADTKTVFKETYSKLKEEMLDDPAFEFTDESLQWIDRMLDYNVLGGKCNRGLSVIDSYRILKGVDVLSKEETFLACTLGWCIEWLQAYFLVLDDIMDNSQTRRGQPCWFRVPQVGLIAVNDGIILRNHISRILQRHFKGKPYYVDVIDLFNEVEFKTASGQMLDLITTHEGEKDLTKYNLTVRRHIVQYKTAYYSFYLPVACALLLAGENLDNFGDVKNILVEMGTYFQVQDDYLDCFGDLKFIGKIGTDIEDYKCSWLVVQALERADEKQKSILFESYGKSDPACVAKVKDLYKELKLEEVFQAYERESYNKLIADIEAQPSKAVQSVLKSFLHKIYKRDK

SEQ ID NO: 8257 - DNA, 666 bp, Zea mays
  misc_feature: Ceres CLONE ID no. 1447842
  misc_feature: Ceres CDNA ID no. 25891045
  CDS (95)..(469): REFERENCED BY SEQ ID NO: 8258
aacctaacatcatctctttgccaaaatcttcttcgcccagtttcttcatcaactcagcggctcgtgtcttctttcttctctgcttaagaaagctatggcgtacgcaccaccaccgatgaagcaaggaaaggcaggatttgaagagacacaagagcagattcacaagatcagaatcactctctcctccaagaacgtcaaaaaccttgagaaggtgtgcactgacttggtccgtggagcgaaagacaagaggttgagagttaaaggaccggtgaggatgccaactaaagttctcaagattaccacaagaaaagctccttgtggtgaaggaaccaacacatgggacagatttgagctccgtgtacacaaacgtgtgatcgatctcttcagctctccggatgtggtgaagcagatcacttccatcaccattgagcctggtgttgaggtcgaggtcaccattgctgattcttagatgcatgtggtttaatttacagcttcgtattccaacgactcttatgtcttttatgtaacagggttcaaatttcgtctttgcttcctaaatatgttatccttttgattttatttttgttggacattttgtttgctggatgcctgttcttcgtcggtgtttcaatggataaatgagacactttaaaaaaaaaaaaaaaa

SEQ ID NO: 8258 - protein, 124 aa, Zea mays
  misc_feature: Ceres CLONE ID no. 1447842
  misc_feature: Ceres CDNA ID no. 25891045
  misc_feature: The plant flowers significantly late compared to wild-type.
  misc_feature: The plant is abnormally large.
  misc_feature: null
  misc_feature: Useful for making plants with modulated biomass
  misc_feature: Useful for making plants with modulated flowering time
  misc_feature: Useful for making plants with modulated phosphate use efficiency
  misc_feature (24)..(119): Pfam Name: Ribosomal_S10 PFAM Desc: Ribosomal protein S10p/S20e
  misc_feature: Homolog of GI Number: 21281054 NR Desc: putative 40S ribsomomal protein
  misc_feature: Homolog of GI Number: 23198348 NR Desc: 40S ribosomal protein S20
  misc_feature: Homolog of GI Number: 21617905 NR Desc: 40S ribosomal protein S20
  misc_feature: Homolog of GI Number: 55775376 NR Desc: 40S subunit ribosomal protein
  misc_feature: Homolog of GI Number: 31430421 NR Desc: putative ribosomal protein S10p/S20e
  misc_feature: Homolog of GI Number: 50933555 NR Desc: 40S ribosomal protein S20
  misc_feature: Homolog of GI Number: 54208698 NR Desc: ribosomal protein S10p/S20e
  misc_feature: Homolog of GI Number: 20805825 NR Desc: ribosomal protein S20
  misc_feature: Homolog of GI Number: 22203726 NR Desc: ribosomal protein S20
  misc_feature: Homolog of GI Number: 50801483 NR Desc:  similar to putative 40S ribosomal protein 20S protein
  misc_feature: Useful for making shorter plants
  misc_feature: Useful for sterility
  misc_feature: Useful for sterility
MAYAPPPMKQGKAGFEETQEQIHKIRITLSSKNVKNLEKVCTDLVRGAKDKRLRVKGPVRMPTKVLKITTRKAPCGEGTNTWDRFELRVHKRVIDLFSSPDVVKQITSITIEPGVEVEVTIADS

SEQ ID NO: 8259 - DNA, 795 bp, Zea mays
  misc_feature: Ceres CLONE ID no. 1447897
  misc_feature: Ceres CDNA ID no. 25446120
  CDS (63)..(272): REFERENCED BY SEQ ID NO: 8260
acgagagtacgagacgaggcacggaacggagcgagccagactacccacctaggcccagcggcatgaggggcagcgagatgttgaccgccgcggggggcgccggcacggccccgtccacggtctcctcgggggcggccgcggccgcggacctggttgctggagccgggggcacgggcgctatcggcgcgggcggaggaggcggcaacttccccctcgccgtcgccctcctcgccttcgccttcgcaaacttcgttaacctcgtctccatctgacgttgcaggttaaaagagaagaggtgggatgcaaggaaatttcttacttcagctggagtcatgtcatctctttctgcaactgtggggagcttggccgttgctgtgggtcaacaagaaggcgcagatagctctgcatttgcccttgcattgatttttgctgccgttgtaatgtatgatgcatcaggaattagatggcacacaggtcgccaagctgcgttgttgaatcaaatagtctgtgatttcccaccagaacatccaatcatttcaacctttcggccactacgggaacctcttggacacagcccacttcaggtagctctactacatacttctatcttctattcatggatgcaagtttttgcaggagcacttgttggttgtgcagctgcttatttcatgggaaaatctgtataaggaataggaatgtatagggtttggcttgtacacgaattccattgacttatttttgtaaaaaaatatcattgatcaaccgcttcattttcctctaaaaaaaaaaaaaaaa

SEQ ID NO: 8260 - protein, 69 aa, Zea mays
  misc_feature: Ceres CLONE ID no. 1447897
  misc_feature: Ceres CDNA ID no. 25446120
MRGSEMLTAAGGAGTAPSTVSSGAAAAADLVAGAGGTGAIGAGGGGGNFPLAVALLAFAFANFVNLVSI

SEQ ID NO: 8261 - DNA, 597 bp, Zea mays
  misc_feature: Ceres CLONE ID no. 1447927
  misc_feature: Ceres CDNA ID no. 29191240
  CDS (49)..(417): REFERENCED BY SEQ ID NO: 8262
aaaaggcctccgcaaaccctaacctcaccggcggcggcggcggcagagatggaccccgactcagtggcgaaggcgttcgtcgagcactactaccgcacgttcgacaccaaccgggcggcgctggtggggctgtaccaggagggctccatgctctccttcgagggcgagaagttccagggagccgccgccatcgccaccaagctcacctccctccccttcaccaagtgcgtccacaccgtcgtcactgtcgactgccagcccgccggccccacgggcggtatgctcgtcttcgtctccggatccctccaagtcgacggcgagcaccacatcaagttctcccagatgttccacttgatgccactcggaccagggaacttctatgtgcacaacgacatgttccgcctgaactatggctaagaatcttaccagaggtcgtgcttccccatggaagacagaatgttctgcaaaacaaacaattcggttgtggtttttgtgtttgatggtgaaaaactttgtggtgctttcatgccaacagcttatgagatccaccggggatgaaacataacaaaacgccccgtactaaaaaaaaaaaaaaaa

SEQ ID NO: 8262 - protein, 122 aa, Zea mays
  misc_feature: Ceres CLONE ID no. 1447927
  misc_feature: Ceres CDNA ID no. 29191240
  misc_feature (6)..(119): Pfam Name: NTF2 PFAM Desc: Nuclear transport factor 2
  misc_feature: Homolog of GI Number: 50947933 NR Desc: nuclear transport factor 2
  misc_feature: Homolog of GI Number: 12323001 NR Desc: nuclear transport factor 2
  misc_feature: Homolog of GI Number: 21555203 NR Desc: nuclear transport factor 2
  misc_feature: Homolog of GI Number: 18377444 NR Desc: similar to nuclear transport factor 2
  misc_feature: Homolog of GI Number: 34908774 NR Desc: putative Nuclear transport factor 2
  misc_feature: Homolog of GI Number: 25402667 NR Desc: protein T23J18.22
  misc_feature: Homolog of GI Number: 57228672 NR Desc: nuclear transport factor 2
  misc_feature: Homolog of GI Number: 45187886 NR Desc: ADR013Wp
  misc_feature: Homolog of GI Number: 46226690 NR Desc: similar to NTF2
  misc_feature: Homolog of GI Number: 62651812 NR Desc:  similar to Chain A
  misc_feature: Useful for delaying flowering time
  misc_feature: Useful for increasing chlorophyll and photosynthetic capacity
  misc_feature: Useful for making ornamental plants with modified leaves
  misc_feature: Useful for making plants with increased biomass and foliage
  misc_feature: Useful for making plants with increased biomass and foliage
  misc_feature: Useful for making plants with increased biomass and foliage
  misc_feature: Useful for making shorter plants
MDPDSVAKAFVEHYYRTFDTNRAALVGLYQEGSMLSFEGEKFQGAAAIATKLTSLPFTKCVHTVVTVDCQPAGPTGGMLVFVSGSLQVDGEHHIKFSQMFHLMPLGPGNFYVHNDMFRLNYG

SEQ ID NO: 8263 - DNA, 1165 bp, Zea mays
  misc_feature: Ceres CLONE ID no. 1447962
  misc_feature: Ceres CDNA ID no. 40351865
  CDS (316)..(801): REFERENCED BY SEQ ID NO: 8264
agcagcaactagcaaggccgccaagcggcccaggacccaggccagctccaagcgaacagcctacggctgcaggccatctgggctccggcttccggcatccaccaggcgtcaatacggtgcagcgagcagcgagcagcaagtcaccgagcagccgagcgaccgccgagcacagggcaccaccgagcagccgagccaccgccgagcaccgagtcttctctgttcttctgcggcgaacaaggtcaatccagggccgtggtgcgggtgctggttttttttttccaacaagtttatgttggtcgctcgaccgctgcagcaatgaagatacagaaagcaaatgcaggtgtccttacaaacttcgaagtccttgacttcttgcggtcaagaggtgccaaaattgacccaatgggatgtttgggggctgttgctgtatcagagtgtaaggtgtatgagtatatcttaaaaacccctgcttgcaaccagacaagggaatccatttatgaatttgtgaagagaagtgagggtttcaggcttgcagaggctgataagttaaatgtcatcaactggagaccatcctcagctgccgatgcctatgcgatgatagaagaatgtgggaaacgattttccagggatgaacgaggagaagcatgtgatgaagatgaacgagtccaggagtttcttgatatggtgaaggaggttttgccagcccctccgaaagcagaggtggagacagcagaggcagaggcagaggcagaggccgaggcggtggaggcagaggccgaggtagaggcaatgcaagagtgaatgtggtgtaagttaacatatttgagggccagattgcattagacactagtgctaagtgctgcaaggaaacttagaacactcaggtcggctgttagttctggaagctttccccctaatgcttcgtttgaatattatcgtattcatctcaatccatgtatattgaggtggattgaggcgtaaattaaactattttacactccaatctgcctcaatacacatggattaaggtgaatataggagtatccaaacaagccctaaagttttttactcttaaccatattctacactcggctgtgtttattgtgatatgctgtgatctgcattctgggcagtgcttcatcatttaacaaaaaaaaaaaaaaaa

SEQ ID NO: 8264 - protein, 161 aa, Zea mays
  misc_feature: Ceres CLONE ID no. 1447962
  misc_feature: Ceres CDNA ID no. 40351865
MKIQKANAGVLTNFEVLDFLRSRGAKIDPMGCLGAVAVSECKVYEYILKTPACNQTRESIYEFVKRSEGFRLAEADKLNVINWRPSSAADAYAMIEECGKRFSRDERGEACDEDERVQEFLDMVKEVLPAPPKAEVETAEAEAEAEAEAVEAEAEVEAMQE

SEQ ID NO: 8265 - DNA, 1116 bp, Zea mays
  misc_feature: Ceres CLONE ID no. 1448019
  misc_feature: Ceres CDNA ID no. 25447062
  CDS (225)..(866): REFERENCED BY SEQ ID NO: 8266
ataatatttttctaaaaccgcatattcgtctcttcgatactatttttctaagatcggatattttaatggtacagatctaattatcccaagcacgcttcctcgacttcctatctcgactctcccaagtcacaaccctcgacctcccccctactccaactactggaagcgccgatccatcaggttctgatcgattcttctgccccgatccgcagcggcaagcggagatgaactgcgagacctgtcagctgaaagaactggagctggaactgacggagatcagggatgttctgcgctgtattttgcacaccatattcttccatagaaccctcagcctggttcgccccaaagatgttgactgtgatttcctcgatattacttatgtacaatgtggtctaccggaactagaaaaggaagttgacgaaaagatagaccagttcagtgcatgggtggagaaacacccaaaccgcagaagccagatctgcctctcctttttcgacgagaaacacagacaccctggttggtttgtcaacaaaacagagcgcatctattgggagcaatggttcatcaatttgcaagtcatgttccccaaaagatacagcaagtcaaacagctccaaagggctgacaaacatccaagcaaatgccgtggaggagaccagcacaaggcgtgctgcattggaggcgtcgattaacgaagtgctgttccagatcataaagttcgccaacgagaaaaaggaccacattcctgctatccctgacaggattttcaatcacgagatcatgatcccaagctcggattctgtatttggatggaacacggacgtcattcgcagagttctgaatagcgggcacccatactcgctttaactgaagacgacatctcagtgggcgcccgtattcagtttattagcgtgctgccgccctgtttggaagacggctctgttaaccatcgtggtgaaccatataatatgcctaaggaaaaacctagttctgtgtacatcaccctgctcatctggcatgtacatactgtgttgggatcttgctcatcggtcaaacattcttaagttcgattaagtttataaataacaatattatgattctaaaaaaaaaaaaaaaa

SEQ ID NO: 8266 - protein, 213 aa, Zea mays
  misc_feature: Ceres CLONE ID no. 1448019
  misc_feature: Ceres CDNA ID no. 25447062
  misc_feature: Homolog of GI Number: 77555173 NR Desc: endo
  misc_feature: Useful for increasing chlorophyll and photosynthetic capacity
  misc_feature: Useful for making lethal plants for genetic confinement systems
  misc_feature: Useful for making plants with increased biomass and foliage
MNCETCQLKELELELTEIRDVLRCILHTIFFHRTLSLVRPKDVDCDFLDITYVQCGLPELEKEVDEKIDQFSAWVEKHPNRRSQICLSFFDEKHRHPGWFVNKTERIYWEQWFINLQVMFPKRYSKSNSSKGLTNIQANAVEETSTRRAALEASINEVLFQIIKFANEKKDHIPAIPDRIFNHEIMIPSSDSVFGWNTDVIRRVLNSGHPYSL

SEQ ID NO: 8267 - DNA, 736 bp, Zea mays
  misc_feature: Ceres CLONE ID no. 1448045
  misc_feature: Ceres CDNA ID no. 25445679
  CDS (31)..(567): REFERENCED BY SEQ ID NO: 8268
aaatttttgtttagctttctaccgacgaaaatgggcgctttcaggtttcaccagtaccaggttgtcggaagagctctcccgacagagaaagatgtgcagcctaagatctacaggatgaagctttgggccacgaacgaggttcgtgccaagtccaagttctggtatttcttgaggaagctgaagaaggttaagaagagtaacggtcagatgctcgccatcaacgagatctttgagaagaacccaacaaccatcaagaactttggaatctggttgaggtaccagagcaggactggataccacaacatgtacaaggagtaccgtgacaccaccttgaacggagccgtggagcagatgtacaccgagatggcgtcacgacaccgcgtcaggttcccttgcatccagatcatcaagacagcaactgtcccggccaagctttgcaagagggagagcaccaagcagttccacaacagcaaaatcaagttcccattggtgttccgcaaggtcagaccaccaaccaggaagctcaagaccacctacaaggcctccaaacccaacttgttcatgtgataagagtctctggttgactcttcaatcttttttgtttggggatagaatcgtgatgaagttgtgctttctgctgttttgtctttttaatttcaaggatatttttgtttatcaacgttttagccttattcatggaactaaactcgactttgtccgaaaaaaaaaaaaaaaa

SEQ ID NO: 8268 - protein, 178 aa, Zea mays; identical to SEQ ID NO: 6004
  misc_feature: Ceres CLONE ID no. 1448045
  misc_feature: Ceres CDNA ID no. 25445679
  misc_feature (5)..(178): Pfam Name: Ribosomal_L18ae PFAM Desc: Ribosomal L18ae protein family
  misc_feature: Homolog of GI Number: 30102898 NR Desc: At2g34480
  misc_feature: Homolog of GI Number: 20453309 NR Desc: AT3g14600/MIE1_10
  misc_feature: Homolog of GI Number: 23197702 NR Desc: 60S ribosomal protein L18A
  misc_feature: Homolog of GI Number: 21593925 NR Desc: putative 60S ribosomal protein L18A
  misc_feature: Homolog of GI Number: 34909590 NR Desc: putative ribosomal protein L18a
  misc_feature: Homolog of GI Number: 50511482 NR Desc: putative 60S ribosomal protein L18a
  misc_feature: Homolog of GI Number: 13430184 NR Desc: ribosomal protein L18a
  misc_feature: Useful for making ornamental plants with modified flowers
  misc_feature: Useful for making ornamental plants with modified leaves
  misc_feature: Useful for making plants with altered leaf shape eg curled leaves
  misc_feature: Useful for making shorter plants

SEQ ID NO: 8269 - DNA, 714 bp, Zea mays
  misc_feature: Ceres CLONE ID no. 1448050
  misc_feature: Ceres CDNA ID no. 40041415
  CDS (140)..(520): REFERENCED BY SEQ ID NO: 8270
agaagacttcacaagaatctactcgtcgagtcaccaaagataaggctctatcggactcggagtctcggacagcacagcaaagcaagagccgctactcaagtatagtctgacaccggccgaccctgccccaacccaagccatggcggacaacaacaaccggcggaaccacgggcagaccttgctcgccggcgcgggcctgggcctgctcgccgtgaactcgggcctcgccatctaccgcgcgaggggcgacacggccgccgtcctcttcgtcgcggggtcctgcgccaccctgctcctcctcttcgcctgcctccgcgcctacgagcgggcggcgcccgggtcgccggcccgggaccgggcgcggcgcgccgtgtggccgctcgccacgctgctcacgctctcgttcgcctggaaggtggcggcggccatgccttccgccgccgcggccgccctcgtatggggcctggccgtggccaccaccgccggcggcttcgtggccctgtacgtgcagcaggcatgaacacgtgggcgcgggacggactaggcaagcagctgcagacttgcagctcgttcagggatctagatctgggcgccgcgcgcctgtgtagaaatgtacagtgtatttggctagcttttcgattttgtgcatatgtatgtagctgactggctgatactataaaacagagtggcctctgtgtaaaaaaaaaaaaaaaa

SEQ ID NO: 8270 - protein, 126 aa, Zea mays
  misc_feature: Ceres CLONE ID no. 1448050
  misc_feature: Ceres CDNA ID no. 40041415
  misc_feature: Homolog of GI Number: 34904462 NR Desc: OSJNBa0086P08.10
MADNNNRRNHGQTLLAGAGLGLLAVNSGLAIYRARGDTAAVLFVAGSCATLLLLFACLRAYERAAPGSPARDRARRAVWPLATLLTLSFAWKVAAAMPSAAAAALVWGLAVATTAGGFVALYVQQA

SEQ ID NO: 8271 - DNA, 726 bp, Zea mays
  misc_feature: Ceres CLONE ID no. 1448092
  misc_feature: Ceres CDNA ID no. 29191241
  CDS (109)..(504): REFERENCED BY SEQ ID NO: 8272
aaggaaacaccctgcggaccagcacacgctagccaagcaagacccgagcaagccacactctccagcaccagcagaggccggcggcaaagcagcgcagcacagcaacaaatggccatcatcagcgccgccgcggcgaccaccgtcgtcgcccgtgccgcgatcgccaggccacaggccctaggtctgccccagctgaggacgaggagcgagagggtgaggtgcagctactccaaggacgccaaggaggcgacccctgccgccaccgtccgcggggccagcgcgtccctgctcgccgcggcgggcgcggtgaccgcgtccgcggggccggcgctcgctctggtcgacgagcggatgtcgacggagggcaccgggctgagcctggggctgagcaacaacctgctggggtggatcctcctgggcgtcttcggcctcatctggtcgctctacaccgtctacacctccggcctcgacgaggacgaggagtccggcggcctctccctctaagctacacatagtttctcccgtcgtctcatgtaatccgctcgcgagcatcgccatgatcggtgtaatgtaattccagagatggatatttgtatctaagcgtttccattctgagagatgtttcgcggtcagatggattgcttgccccgccttgaagaccgtgcgtcccgcgatttgaatgaataaaacatccaaggaaaatttcacgcaaaaaaaaaaaaaaaa

SEQ ID NO: 8272 - protein, 131 aa, Zea mays
  misc_feature: Ceres CLONE ID no. 1448092
  misc_feature: Ceres CDNA ID no. 29191241
  misc_feature (1)..(131): Pfam Name: PsbW_2 PFAM Desc: Photosystem II reaction centre W protein
  misc_feature: Homolog of GI Number: 53793363 NR Desc: putative photosystem II reaction center W protein
  misc_feature: Homolog of GI Number: 728716 NR Desc: protein of photosystem II
  misc_feature: Homolog of GI Number: 34909974 NR Desc: P0490D09.11
  misc_feature: Homolog of GI Number: 23506075 NR Desc: At2g30570/T6B20.8
  misc_feature: Homolog of GI Number: 950023 NR Desc: component of 6. 1 kDa polypeptide of photosystem II reaction center
  misc_feature: Homolog of GI Number: 16930765 NR Desc: photosystem II reaction center
  misc_feature: Homolog of GI Number: 16226722 NR Desc: At2g30570/T6B20.8
  misc_feature: Homolog of GI Number: 12584906 NR Desc: PSII subunit PsbW
  misc_feature: Homolog of GI Number: 12584904 NR Desc: PSII subunit PsbW
  misc_feature: Homolog of GI Number: 12584902 NR Desc: PSII subunit PsbW
MAIISAAAATTVVARAAIARPQALGLPQLRTRSERVRCSYSKDAKEATPAATVRGASASLLAAAGAVTASAGPALALVDERMSTEGTGLSLGLSNNLLGWILLGVFGLIWSLYTVYTSGLDEDEESGGLSL

SEQ ID NO: 8273 - DNA, 1469 bp, Zea mays
  misc_feature: Ceres CLONE ID no. 1448127
  misc_feature: Ceres CDNA ID no. 25445916
  CDS (264)..(1112): REFERENCED BY SEQ ID NO: 8274
attgcgaatgccaacccgcgacaagcttattgctcctttcgatccttcccctgcgcgccgcgagtgaattccgcaaccccaatcaatccgacgccagagagagagtgggcgactggcgacgcggtctccccgcccccccaattcccaacggccggcggcgcgacaccccgatccggatcccatcgcctgcccggagcctcgattcgggcgcggcggggacgacgattcgaccgcgtcggtaaccaggcaggggaaaggaggggatgagcttccaggacctggaggcgggccacgtccgtggggcgccgcccggcggcggccggaggagcggccgggcggggggcgccggcgccggcgccggcgcgtcgcaggccgtggcgtcgggcgtcttccagatcaacaccgccgtcgccacgttccagcgccttgtcaacacgctcggcacgcccaaggacacccccgacctccgcgacaggatacataaaacacggcaacacataacacagctagtgaaggatacatcagacaagcttaaacaagccagcgaggcggatcatcgcgttgaagtcagcgctaccaagaagattgctgatgcaaagctagctaaagatttccaagcagtcctaaaagaattccagaaagcccaacgattagcagcagagagagaagctgcatatgcaccttttatttctcaagcgggcttgccacagagctacaactcaagtgaagtgaataatggtgctgataggttggcagagcagcgcacacagcttctagaatctagaaggcaggagttggtcttcttggataatgaaatcgtgttcaatgaggccatcattgaggagagggatcagggaatacaagagattcagcaccaaatcactgaagtaaatgaaatcttcaaagatctcgctgtgctagtccatgatcaaggagcaatgatagatgacattgattcccatatagagaacgccgttgtagcgacttcgcaggctaaaggccagctttcaaaggctgctaaaactcagaagtcgaactcttctctgatatgcttgttgctcgttattttcggagtggtcctgctcatagtgataatagtacttgcagcctaaaagcttggaaggcagctggggttccgaaatctgatcgagagcttattgcgacaaattccttcataagttatttttgctgtgctgctaggaatgattcctggtacccaggcggtgattggcgctctgcttgtggtgtggcggtatatgtggtgatgatgaaatctgatacataaaagtactctttcctgcaagtgtagtgcctcatgcacgtttttgtttatatattgtgatgtatgagtgcgtgctgtagaacaaggttggattatccgtggcatgaagtttctcgatctcatgagaaacgcttttctatatttcatctcgcactacgcttctctatcagtaaaaaaaaaaaaaaaa

SEQ ID NO: 8274 - protein, 282 aa, Zea mays
  misc_feature: Ceres CLONE ID no. 1448127
  misc_feature: Ceres CDNA ID no. 25445916
  misc_feature (194)..(256): Pfam Name: SNARE PFAM Desc: SNARE domain
  misc_feature (22)..(125): Pfam Name: Syntaxin PFAM Desc: Syntaxin
  misc_feature: Homolog of GI Number: 22597174 NR Desc: syntaxin
  misc_feature: Homolog of GI Number: 76573305 NR Desc: syntaxin
  misc_feature: Homolog of GI Number: 21537334 NR Desc: syntaxin
  misc_feature: Homolog of GI Number: 7488213 NR Desc: probable syntaxin
  misc_feature: Homolog of GI Number: 9755735 NR Desc: syntaxin homologue
  misc_feature: Homolog of GI Number: 21595750 NR Desc: syntaxin homologue
  misc_feature: Homolog of GI Number: 30793783 NR Desc: putative syntaxin SYP23
  misc_feature: Homolog of GI Number: 50911877 NR Desc: putative syntaxin
  misc_feature: Homolog of GI Number: 12597869 NR Desc: syntaxin
  misc_feature: Homolog of GI Number: 51536048 NR Desc: putative syntaxin
MSFQDLEAGHVRGAPPGGGRRSGRAGGAGAGAGASQAVASGVFQINTAVATFQRLVNTLGTPKDTPDLRDRIHKTRQHITQLVKDTSDKLKQASEADHRVEVSATKKIADAKLAKDFQAVLKEFQKAQRLAAEREAAYAPFISQAGLPQSYNSSEVNNGADRLAEQRTQLLESRRQELVFLDNEIVFNEAIIEERDQGIQEIQHQITEVNEIFKDLAVLVHDQGAMIDDIDSHIENAVVATSQAKGQLSKAAKTQKSNSSLICLLLVIFGVVLLIVIIVLAA

SEQ ID NO: 8275 - DNA, 603 bp, Zea mays
  misc_feature: Ceres CLONE ID no. 1448164
  misc_feature: Ceres CDNA ID no. 29191321
  CDS (114)..(353): REFERENCED BY SEQ ID NO: 8276
attccagaatctttctcccctctcgctctctccaccaaccaagaacagcaggaactcgacctcggagcagcaacgaatccgccgccgcccggcaaaagggatccaaagctccaatggctggcaagtacatcgtcgccggcctcgtcggctcctgtgtcatctcgtatgcctgtgactacatcgtttctcagaagaagatcttcggtggcaccatcccagggactgtgtccgacaaggagtggttgaaggcgacggagcagaggttccaggcctggccccgggtcgctgggccgccggtcatcatgaaccccatcagccgccagaacttcatcgtcaaggacctcaacccctgaggctcaagatcttaaggtttgcggtcggttggaacctttaccctgatggcgatgcctgttgctaaatctacctatgtgtgctggctgtactctcgaggctattttgtctgtcgcaataattaaaacaacactattgtgtagggcatcgtggttatatttcttctgaagaacagaagagaacctaaagcatgctttttgtcatcttttgtttgtataaacatctgtttacttttcaaaaaaaaaaaaaaaa

SEQ ID NO: 8276 - protein, 79 aa, Zea mays; identical to SEQ ID NO: 2798
  misc_feature: Ceres CLONE ID no. 1448164
  misc_feature: Ceres CDNA ID no. 29191321
  misc_feature: Homolog of GI Number: 34897932 NR Desc: ozone
  misc_feature: Homolog of GI Number: 21387039 NR Desc: stress
  misc_feature: Homolog of GI Number: 34897944 NR Desc: ozone
  misc_feature: Homolog of GI Number: 15223334 NR Desc: ozone
  misc_feature: Homolog of GI Number: 6715639 NR Desc: T25K16.16
  misc_feature: Homolog of GI Number: 50925981 NR Desc: OSJNBa0067K08.15
  misc_feature: Homolog of GI Number: 7739775 NR Desc: stress
  misc_feature: Homolog of GI Number: 50910341 NR Desc: putative stress

SEQ ID NO: 8277 - DNA, 641 bp, Zea mays
  misc_feature: Ceres CLONE ID no. 1448181
  misc_feature: Ceres CDNA ID no. 40351866
  CDS (173)..(457): REFERENCED BY SEQ ID NO: 8278
aggcacgactccatccacggatccaccccctctctcttcgacgactccgccgttgttttccactcgggggctgcctccatctgttcgggggccgccgtccctgtcgtcttccacccatcactgtctcctccgctccgccatagccgccgtctcgcacttgggaaacgcagcgatggatggccagccaggtgctgcggcgtcgtctagtcctggtcggagagtaaaagcaagcctggtcctaggatccgaatcgttcactatcaactccgagtccggtaccctgtcggagcagctggccacggtgaaggagaagagcatggcggtcctcaaggaacacatcgccaggcacaatgctccgaacgaggtccccgacgaggccgccgagggcgagtctgacagcgaggacgaagcggcgcttgtcgacaacccgccgaagaaacctaagaagcagaagtgaccgtctctagttatgcacttgagttgttgtttttgtttttttttttttttgccatgcgttgcttgtataacgccagactgttgtcagtcacaatagcaatatgcaggtgttagcactcacttgctgttcgtaccactatcattagttctgcttctctgtcatgtgttcaaaaaaaaaaaaaaaa

SEQ ID NO: 8278 - protein, 94 aa, Zea mays
  misc_feature: Ceres CLONE ID no. 1448181
  misc_feature: Ceres CDNA ID no. 40351866
MDGQPGAAASSSPGRRVKASLVLGSESFTINSESGTLSEQLATVKEKSMAVLKEHIARHNAPNEVPDEAAEGESDSEDEAALVDNPPKKPKKQK

SEQ ID NO: 8279 - DNA, 700 bp, Zea mays
  misc_feature: Ceres CLONE ID no. 1448225
  misc_feature: Ceres CDNA ID no. 40351867
  CDS (205)..(414): REFERENCED BY SEQ ID NO: 8280
attatcaacaattcctgataaaaacagacccacttcctctgatcctcttcaacccacccaccgtgggttcgtccagccttccggccttcccccccggtggtcatcacatctcccccaattcgccgccccctccgacctcgccgtactcctctcgctccgttgaagtagcctcttcatctgctcgccgcagttcgtccgttgcccatggcggatgaggaggtaactgatccaaaggcgttcctagaggaacgttcaaaggctaagtgtgtgtcgcagtggtatgaatatcagaaatgtgttaagaggattgagaatgacgagactgggcacaaacactgtaccggccagtactttgattactggaaatgtgttgacaagaatgttgcagaaaaactctttgagatgttaaaatgacaagaaaagttttccctacttcagttatccacccaaagttggtaataattgtatcacttgtgtggcctatagactattaaggcgctcaatatttgttagagaagttttgccacttgggtaacacaaattttccactgccagtttgcatttcatttctgctactagtattgaaccagcaggtttcctcctgcattgttggataaaaaatccatcgaatatttacaagattgtggctgattattaaatgctgtaatacaccttaattgctttaaaaaaaaaaaaaaaa

SEQ ID NO: 8280 - protein, 69 aa, Zea mays; identical to SEQ ID NO: 852
  misc_feature: Ceres CLONE ID no. 1448225
  misc_feature: Ceres CDNA ID no. 40351867
  misc_feature (7)..(69): Pfam Name: UCR_hinge PFAM Desc: Ubiquinol

SEQ ID NO: 8281 - DNA, 646 bp, Zea mays
  misc_feature: Ceres CLONE ID no. 1448260
  misc_feature: Ceres CDNA ID no. 40041416
  CDS (75)..(536): REFERENCED BY SEQ ID NO: 8282
aacgcactcccgccttctcaaatctcccatcgcgccaaatctctccgcacctcctcctaccagatctcgccgccatggacgcctcgcccaccggcgccgtctccaaggcgaagaagtacgtggtggggcgcaagctcggcggcggcctcaggaagaaggcggtggcgcggtccgtcaaggccgggctgcagttccccgtcggccgcatcggccgcttcctcaagaagggccgctacgcgcagcgcgtcggcatgggcgcccccgtctacctcgcctccgtcctcgagtacctcgccgctgagctgcttgagctggccgggaacgccgccaaggacaacaagaagtcccgcatcatcccgcgccacctgctgctcgccatccggaacgaccaggagctcggcaagctgctcgccggcgtcaccatcgcgcacggcggcgtgctgcccaacatcaaccccctgctgctccccaagaagaccgccgagaaggagcccaagtcgcccaagaaggcccccaagtcccccaagaaggcttagtctcgattactgtctagtgcttcctaatagaattagtgttcgctgttcatgtcgatgtcgttatgttctgttctgctttgaaaaaaaaatgtccaaaaaaaaaaaaaaaa

SEQ ID NO: 8282 - protein, 153 aa, Zea mays
  misc_feature: Ceres CLONE ID no. 1448260
  misc_feature: Ceres CDNA ID no. 40041416
  misc_feature (32)..(107): Pfam Name: Histone PFAM Desc: Core histone H2A/H2B/H3/H4
  misc_feature: Homolog of GI Number: 729671 NR Desc: Histone H2A
  misc_feature: Homolog of GI Number: 34914498 NR Desc: putative histone H2A
  misc_feature: Homolog of GI Number: 121982 NR Desc: Histone H2A.2.2
  misc_feature: Homolog of GI Number: 47026912 NR Desc: histone H2A
  misc_feature: Homolog of GI Number: 7649159 NR Desc: histone H2A
  misc_feature: Homolog of GI Number: 121974 NR Desc: Histone H2A.2.1
  misc_feature: Homolog of GI Number: 47026919 NR Desc: histone H2A
  misc_feature: Homolog of GI Number: 729669 NR Desc: Histone H2A
  misc_feature: Homolog of GI Number: 122006 NR Desc: Histone H2A
  misc_feature: Homolog of GI Number: 68438139 NR Desc:  similar to replication
MDASPTGAVSKAKKYVVGRKLGGGLRKKAVARSVKAGLQFPVGRIGRFLKKGRYAQRVGMGAPVYLASVLEYLAAELLELAGNAAKDNKKSRIIPRHLLLAIRNDQELGKLLAGVTIAHGGVLPNINPLLLPKKTAEKEPKSPKKAPKSPKKA

SEQ ID NO: 8283 - DNA, 633 bp, Zea mays
  misc_feature: Ceres CLONE ID no. 1448292
  misc_feature: Ceres CDNA ID no. 35383408
  CDS (63)..(458): REFERENCED BY SEQ ID NO: 8284
atcgactcaggcgcagccaccaccgaagcagactccggagagcaggcaaggcgaggaccgagatggcgcgcggcgtggcggcggctaccaagggcggcgcgggcgccgggaagaagaaggggtcggtcaccttcgtgatcgactgcaccaagcccgtcgacgacaagatcatggagatcgcgtcgctcgagaagttcctgcaggagcgcatcaaggtcgccgggggcaaggccggcaacctcggggactccgtcaccgtcgcccgcgacaagagcaaggtcaccgtcacctccgacggagccttctcgaagaggtacttgaagtacttgacgaagaagtacctgaagaagcacaatgtgcgtgactggcttcgggtgatttcatccaacaaggaccgcagcgtctacgagctccggtacttcaacattgctgagaacgagggcgaggaggaggactaatatgcactgccatgcttctgtgtcgtgtgaaactttgaacttgttggagcactcctgcagtagagttttgatgtttatttttttcacccatgttttgaattgtggccaggacgacatgtgatggatgcttagataaccaagctgaagaattgtccgttcaaaaaaaaaaaaaaaa

SEQ ID NO: 8284 - protein, 131 aa, Zea mays; identical to SEQ ID NO: 5394
  misc_feature: Ceres CLONE ID no. 1448292
  misc_feature: Ceres CDNA ID no. 35383408
  misc_feature (17)..(131): Pfam Name: Ribosomal_L22e PFAM Desc: Ribosomal L22e protein family
  misc_feature: Homolog of GI Number: 42733478 NR Desc: BRI1
  misc_feature: Homolog of GI Number: 50939919 NR Desc: putative 60S ribosomal protein L22
  misc_feature: Homolog of GI Number: 6714454 NR Desc: putative 60S ribosomal protein  L22
  misc_feature: Homolog of GI Number: 12642842 NR Desc: putative 60S ribosomal protein L22
  misc_feature: Homolog of GI Number: 6056419 NR Desc: 60S ribosomal protein  L22
  misc_feature: Homolog of GI Number: 33150766 NR Desc: heparin
  misc_feature: Homolog of GI Number: 73956651 NR Desc:  similar to 60S ribosomal protein L22
  misc_feature: Homolog of GI Number: 45383834 NR Desc: ribosomal protein L22
  misc_feature: Homolog of GI Number: 13592059 NR Desc: ribosomal protein L22
  misc_feature: Homolog of GI Number: 6677775 NR Desc: ribosomal protein L22

SEQ ID NO: 8285 - DNA, 726 bp, Zea mays
  misc_feature: Ceres CLONE ID no. 1448306
  misc_feature: Ceres CDNA ID no. 40041417
  CDS (73)..(447): REFERENCED BY SEQ ID NO: 8286
aaactccactcctcctagtcttcacttcctctgctcctgcacctcccttcccgagctgctcagtagctagccatggcgcagggaagcggcggtgcgaccgccgtgctcgcgctgctcctcctctgcgtgctcctccacggcgacttcgccgagtccaaggtgtacaccgtcggcgaccgcgccggctgggccctcagctccggcggctggcccaggggcaagcgcttccgcgccggcgacgtgctgctgttcaagtacgggcgcggggcgcacaacgtggtggcggtgaacgcggcggggtacaagtcgtgcagcgcggcgaggggcggccggacgtacaactccggcagcgaccgcgtcacgctcgcccgcggcaccaactacttcatctgcagcgtccccggccactgccaggccggcatgaagatggccgtcaccgccgcatgatccgtctctccgtcgtccatcgccccgccggccggccggtgcttattaattaactttagtttactttccatcctcgagtgaccgaagctactgcatggtgcgtagtacgtgttcaataaaatgcccgagttcgtgggggttgggccgtctggccggttggcactagctagagagagattaatatactctgttgttccggttgtacgtgctttaatgcttgtataccagaattttgagttgttgtgtcctttgtgacactccttaaaaaaaaaaaaaaaa

SEQ ID NO: 8286 - protein, 124 aa, Zea mays
  misc_feature: Ceres CLONE ID no. 1448306
  misc_feature: Ceres CDNA ID no. 40041417
  misc_feature (39)..(117): Pfam Name: Cu_bind_like PFAM Desc: Plastocyanin
  misc_feature: Homolog of GI Number: 50918197 NR Desc: putative basic protein
  misc_feature: Homolog of GI Number: 50920109 NR Desc: putative basic blue copper protein
  misc_feature: Homolog of GI Number: 44887717 NR Desc: Chemocyanin precursor
  misc_feature: Homolog of GI Number: 3860333 NR Desc: basic blue copper protein
  misc_feature: Homolog of GI Number: 3395754 NR Desc: plantacyanin
  misc_feature: Homolog of GI Number: 21536649 NR Desc: putative basic blue protein plantacyanin
  misc_feature: Homolog of GI Number: 20453369 NR Desc: At2g02850/T17M13.2
  misc_feature: Homolog of GI Number: 50918193 NR Desc: putative disease resistance protein
  misc_feature: Homolog of GI Number: 14164559 NR Desc: putative S
  misc_feature: Homolog of GI Number: 11514132 NR Desc: Chain C
MAQGSGGATAVLALLLLCVLLHGDFAESKVYTVGDRAGWALSSGGWPRGKRFRAGDVLLFKYGRGAHNVVAVNAAGYKSCSAARGGRTYNSGSDRVTLARGTNYFICSVPGHCQAGMKMAVTAA

SEQ ID NO: 8287 - DNA, 1145 bp, Zea mays
  misc_feature: Ceres CLONE ID no. 1448360
  misc_feature: Ceres CDNA ID no. 36593501
  CDS (151)..(831): REFERENCED BY SEQ ID NO: 8288
ctctcctcctccgttcagatccccgcgatcgaagaggccaggccaggccaacaagcggccaacccggcacagctgccaagccaccgcaccaatcccacagcccgaggcccgatccagcgcccggcggctggggttcgccagcggcccgccatgtcctcctccaccgcgtcgtggtcgcgctacggcgccctccccacctccccccctgcgccgcagctcaagccggaggacgtcgcggccgcgggcggcgatgcggcgccctcctcctcctcggcggcggcaacggcggcggaggccggggtcgccttcttctcccgcgcgcgagcgttcgccggggccgcggcgggccggccgcgcgcgtggcgtgaggtgctggacccgacggcgttctcgtgcccggacagctgcggggaggcccgcgcgcgggcgcgccgcaacctcgcctacttccgcgccaactacgcgctggccgcgctcgcgctcgtcttcctcggcctcgtctaccgccccgcgtccatgctcgcgttcctggcgctcttcgtcgcctggctcggcctctacttcggccgcggcggcggggagccgctcgtgtgcctccgccgcgaggtggacgaccgcgtcgtgctggccgcgctctcggccgccaccgtgctcgccgtcgcgctcacccgcgcggggctcaacctcctcgtctccctcgtcgtcgccgcggccgtcatcggcgcgcacgccgccttcagggtcaacctgtacctcgacgagagcgacgcgttcgatgtcgccggcgcctcgttcacggacaccgcatacggctacgcgctccctagctgatggtaaacggtgggcggccatggggttgttgatcgtgttctgctctcttcttgaggcaggggattcttggtggctctgatccattatcggattttgcaaggcgttcatcatcgttggtgctgtgatgttcttactgcaccctctcttctagaccgcattgtacctatagtgattttcgtgctcggtttttaggggagattttagtttggttctggtattgagtgtagtttttagagtaaaacatatgtgactggtacgatttgaatctgtttgaagaaatatgaattgattatgttccaaaaaaaaaaaaaaaa

SEQ ID NO: 8288 - protein, 226 aa, Zea mays
  misc_feature: Ceres CLONE ID no. 1448360
  misc_feature: Ceres CDNA ID no. 36593501
  misc_feature (60)..(211): Pfam Name: PRA1 PFAM Desc: PRA1 family protein
  misc_feature: Homolog of GI Number: 34897194 NR Desc: putative prenylated Rab receptor
  misc_feature: Homolog of GI Number: 32815929 NR Desc: At1g08770
  misc_feature: Homolog of GI Number: 50918559 NR Desc: putative prenylated rab acceptor protein
  misc_feature: Homolog of GI Number: 34903576 NR Desc: P0419B01.1
  misc_feature: Homolog of GI Number: 55775685 NR Desc: prenylated Rab acceptor protein 1
  misc_feature: Homolog of GI Number: 28972153 NR Desc: mKIAA0324 protein
  misc_feature: Homolog of GI Number: 62655768 NR Desc:  similar to serine/arginine repetitive matrix 2
  misc_feature: Homolog of GI Number: 67987177 NR Desc: 4Fe
  misc_feature: Homolog of GI Number: 7949115 NR Desc: Ser/Arg
MSSSTASWSRYGALPTSPPAPQLKPEDVAAAGGDAAPSSSSAAATAAEAGVAFFSRARAFAGAAAGRPRAWREVLDPTAFSCPDSCGEARARARRNLAYFRANYALAALALVFLGLVYRPASMLAFLALFVAWLGLYFGRGGGEPLVCLRREVDDRVVLAALSAATVLAVALTRAGLNLLVSLVVAAAVIGAHAAFRVNLYLDESDAFDVAGASFTDTAYGYALPS

SEQ ID NO: 8289 - DNA, 866 bp, Zea mays
  misc_feature: Ceres CLONE ID no. 1448364
  misc_feature: Ceres CDNA ID no. 25445885
  CDS (115)..(573): REFERENCED BY SEQ ID NO: 8290
aatttggcccggggcttcacttaatcctggttccgccactgcagcgcaacctcgatcgcgcacagaggcccattccgccgaggagtggcacgaggagagacgacaggtgcggggatggggtcagttttgctgccaacgctgcggctgaagagtgaggtcgacgccgccatccgcgacaccctcgataaggtcctcgttctccgatttggtcgcgccaccgacgccacttgcctccacctagatgacatcctggataaatcttcttgggacatatccaagtttgctatggtagcattagttgacatggactctgaggagattcaagtttacattgactactttgacattactttggttccagcaaccattttcttcttcaatgcccatcacatgaagatggattcagggacacctgaccacacaaaatggataggttcttttagcagcaaacaagactttatcgatgtagttgaggcaatattcagaggtgcgatgaaaggcaaactgatagtgtcttgcccccttcctcctgagaggataccaagattccagcttcttttcaaggatgtctgaaaaaactgcagctcatcacgtgcacacaatcagctacctagcccaaggtaagtagaaaagctgaagcttctataagagaagcacaacagaggggacaatgcaggcgtgttcgtgcttcgaagaaacctaattgtgctggaaacagccattttcattctcaagactgtttgcgcaaatctctgcaataatctaatgttgtacttgtccatattgcatgtttaggtgtatttaatcacgttcatcaaatatgacgggtatagatttcttgtttggtgttaaaaaaaaaaaaaaaa

SEQ ID NO: 8290 - protein, 152 aa, Zea mays
  misc_feature: Ceres CLONE ID no. 1448364
  misc_feature: Ceres CDNA ID no. 25445885
  misc_feature (5)..(139): Pfam Name: DIM1 PFAM Desc: Mitosis protein DIM1
  misc_feature: Homolog of GI Number: 62734697 NR Desc: At3g24730
  misc_feature: Homolog of GI Number: 44917529 NR Desc: At3g24730
  misc_feature: Homolog of GI Number: 8923475 NR Desc: thioredoxin
  misc_feature: Homolog of GI Number: 62897337 NR Desc: thioredoxin
  misc_feature: Homolog of GI Number: 73957436 NR Desc:  similar to Dim1
  misc_feature: Homolog of GI Number: 59857895 NR Desc: thioredoxin
  misc_feature: Homolog of GI Number: 62858633 NR Desc: LOC549092
  misc_feature: Homolog of GI Number: 50729678 NR Desc:  similar to Dim1
MGSVLLPTLRLKSEVDAAIRDTLDKVLVLRFGRATDATCLHLDDILDKSSWDISKFAMVALVDMDSEEIQVYIDYFDITLVPATIFFFNAHHMKMDSGTPDHTKWIGSFSSKQDFIDVVEAIFRGAMKGKLIVSCPLPPERIPRFQLLFKDV

SEQ ID NO: 8291 - DNA, 1124 bp, Zea mays
  misc_feature: Ceres CLONE ID no. 1448380
  misc_feature: Ceres CDNA ID no. 35383409
  CDS (98)..(934): REFERENCED BY SEQ ID NO: 8292
ctcttccacccttcaccgccgccagcgccacagcctccaaaccctcgatctcccgcatcggagctccctgcccccaaccccccacccccacccaaccatggcggaccgcggcggcgagcgtggtggcgaccgcggaggcgagcgcggcgggttcggccgcggcttcgggcgcggcgggcgcggggaccgtggcgggcgccgcggcggccgtcgtggccctcgccaggaggaggagaagtgggtgcccgtcaccaaactcggccgcctcgtcaaggagggccgcttcaccaagatggaggagctctacctccactcgctacccatcaaggagcaccagatcgtggagcagctctgcccggggctcaaggacgaggtgatgaagatcacccccgtgcagaagcagacccgcgccggccagcggacccgcttcaaggcgttcgtcgtcgtcggcgacagcaacggccacgtcgggctcggcgtcaagtgcgccaaggaggtggccacggccatccgcggcgccatcatcctcgcaaagctctccatcgtgcccgttaggaggggctactgggggaacaagatcggcctgccccacaccgtgccctgcaaggtcaccggcaagtgcggctctgtcaccgtgcgcatggtgcccgccccgaggggttctggaatcgtcgccgcgcgcgtccccaagaaggtgctccagttcgctggtattgatgacgtcttcacttcctcgcgtggatccaccaagaccctcggcaacttcgtcaaggcaaccttcgactgcctgatgaagacctatggattcctcacccctgacttctggagggagacgaccttcaccaaggcaccgtaccaggagttcactgacattttggcgaagccgacgaaggccctgatgcttgatgcaccagccgagaagatagaagcttaggatgtccgtgtaaagggtttttactagctgggagctgtctaatgcactttgctttattcagttattaatactttgaatcgtgctgtttcaggatgtctctgtttgccgtcaagtgttggtttgtggaactatgctactctcttttatcgtcaatggacgctacataattatggcaaaaaaaaaaaaaaaa

SEQ ID NO: 8292 - protein, 278 aa, Zea mays; identical to SEQ ID NO: 3578
  misc_feature: Ceres CLONE ID no. 1448380
  misc_feature: Ceres CDNA ID no. 35383409
  misc_feature (171)..(244): Pfam Name: Ribosomal_S5_C PFAM Desc: Ribosomal protein S5
  misc_feature (88)..(154): Pfam Name: Ribosomal_S5 PFAM Desc: Ribosomal protein S5
  misc_feature: Homolog of GI Number: 50919281 NR Desc: putative 40S ribosomal protein S2
  misc_feature: Homolog of GI Number: 50935111 NR Desc: putative 40S ribosomal protein S2
  misc_feature: Homolog of GI Number: 22137092 NR Desc: At2g41840/T11A7.6
  misc_feature: Homolog of GI Number: 21553851 NR Desc: 40S ribosomal protein S2
  misc_feature: Homolog of GI Number: 22137288 NR Desc: At1g59359/T4M14_3
  misc_feature: Homolog of GI Number: 18181932 NR Desc: ribosomal protein S2
  misc_feature: Homolog of GI Number: 21618011 NR Desc: ribosomal protein S2
  misc_feature: Homolog of GI Number: 21539457 NR Desc: ribosomal protein S2
  misc_feature: Homolog of GI Number: 30017231 NR Desc: At3g57490
  misc_feature: Homolog of GI Number: 51708309 NR Desc:  similar to ribosomal protein S2
  misc_feature: Useful for increasing chlorophyll and photosynthetic capacity
  misc_feature: Useful for sterility

SEQ ID NO: 8293 - DNA, 645 bp, Zea mays
  misc_feature: Ceres CLONE ID no. 1448410
  misc_feature: Ceres CDNA ID no. 25447063
  CDS (99)..(467): REFERENCED BY SEQ ID NO: 8294
gtagtctccccaccccgtgcgtccagatctggttcctttcgatttgactcggttttcccttcctgttcggggtgccgtagggtttaggatcggcggcgatggcggcgaggctggcacagctgcgcgctcaggcggtgcaggcggcggagttcgcctcgaagcacggcggctcctactacaaggagctcatggagaagaacaagcagtacgtcgtgcagccccccaccatcgagaaatgccaggagctctccaagcagctcttctacacccgcctcgcaagcctaccaggtcggtatgagtcattctggaaggagcttgatggtgtcaagcaggtatggaagaacaggaaggacctcaaggttgaggaccttgggattgcgactttatttggagttgagctttatgcatggttctgcgtaggcgagattgttggcagaggtttcaccttaaccggctataaggtctagttgatttccagtgatttaagacctgctttataaatcgacactttagctgatgcttgtcgaaacgacgatgatacctgccttccttcacaattttgtttcttgtaagagtctacctagtgctgaatgccagcaaagacgggcacatggttgcaacattgccccaaaaaaaaaaaaaaaa

SEQ ID NO: 8294 - protein, 122 aa, Zea mays
  misc_feature: Ceres CLONE ID no. 1448410
  misc_feature: Ceres CDNA ID no. 25447063
  misc_feature (8)..(122): Pfam Name: ATP PFAM Desc: Mitochondrial ATP synthase g subunit
  misc_feature: Homolog of GI Number: 50901924 NR Desc: P0025A05.24
  misc_feature: Homolog of GI Number: 21553484 NR Desc: copia
MAARLAQLRAQAVQAAEFASKHGGSYYKELMEKNKQYVVQPPTIEKCQELSKQLFYTRLASLPGRYESFWKELDGVKQVWKNRKDLKVEDLGIATLFGVELYAWFCVGEIVGRGFTLTGYKV

SEQ ID NO: 8295 - DNA, 766 bp, Zea mays
  misc_feature: Ceres CLONE ID no. 1448461
  misc_feature: Ceres CDNA ID no. 29191322
  CDS (63)..(545): REFERENCED BY SEQ ID NO: 8296
atcgcatcggccattgagaggaagcgaagaggagagcggcggaggaggcgaaggcatcatccatggccgcggtggtccggagcgtgtggcaggggatcagggagaagggcctcaccaacttcctccgctacgcccgcgaagagggatacctaaaatgccttggggacggaaacctattgcaaaccaaaattcacaacattggtgcaacccttgtaggagttgacacttttggaaacaagtactatgagaaactacatgacactcagtatggaaggcataggtgggtagagtatgcggacaagggtcgctacaatgcatcccaagtgcctgctgaatggcatggatggctgcaccacattacagacagcactggggataagctgctggaggagaagactaaaaagttcattagggagcacagacagaactacaccggacagggtgatgacttgatctaccactccaaggggcatgctctgaacccagggcaaagggactggacaaggtaccagccttgggaaccaaagaaagaagaggccacctgatctgaatggtacctgataatcctcttctatgtttcacatttggtttggtgttgccgatctaaaaccaccagtcagtttggtttcatggactggtcctgaataatgtactctatctgatactgaatacctgccactgaacaattttaatctgtgtgtggatgtggcaatagagaaactggcgattcggtcgtcggtgtttgcatcgaaaaaaaaaaaaaaaa

SEQ ID NO: 8296 - protein, 160 aa, Zea mays
  misc_feature: Ceres CLONE ID no. 1448461
  misc_feature: Ceres CDNA ID no. 29191322
  misc_feature (48)..(154): Pfam Name: Complex1_17_2kD PFAM Desc: NADH:ubiquinone oxidoreductase 17.2 kD subunit
  misc_feature: Homolog of GI Number: 37537176 NR Desc: putative ubiquinone oxidoreductase subunit
  misc_feature: Homolog of GI Number: 79312708 NR Desc: NADH dehydrogenase
  misc_feature: Homolog of GI Number: 78709064 NR Desc: ubiquinone oxidoreductase subunit
  misc_feature: Homolog of GI Number: 34334022 NR Desc: NADH:ubiquinone oxidoreductase B17.2
  misc_feature: Homolog of GI Number: 12229865 NR Desc: Putative NADH
  misc_feature: Homolog of GI Number: 72171320 NR Desc:  similar to 13kDa differentiation
  misc_feature: Homolog of GI Number: 24581165 NR Desc: CG3214
MAAVVRSVWQGIREKGLTNFLRYAREEGYLKCLGDGNLLQTKIHNIGATLVGVDTFGNKYYEKLHDTQYGRHRWVEYADKGRYNASQVPAEWHGWLHHITDSTGDKLLEEKTKKFIREHRQNYTGQGDDLIYHSKGHALNPGQRDWTRYQPWEPKKEEAT

SEQ ID NO: 8297 - DNA, 987 bp, Zea mays
  misc_feature: Ceres CLONE ID no. 1448469
  misc_feature: Ceres CDNA ID no. 29191323
  CDS (74)..(742): REFERENCED BY SEQ ID NO: 8298
agttaagtcttcttctctagatctctgccttcctccgatccatcgctctccgcgtcgtttttcatagaagaaaatggcgcagcaatcgtcgttgatctacagcttcgtcgctaggggcacagtaatcctcgtggagttcaccgatttcaaaggtaactttacgtccgtcgctgcacagtgcctccagaagcttccgtcctcgaacaacaagttcacctacaactgcgatggccacaccttcaattacctcgtcgaaaacggattcacttattgtgttgttgcagttgattctgctgggaggcagattctcatggcttttttggaacgggtgaaggaggatttcaataagagatatggtggtggaaaggctgctactgctcaggctaacagcttgaataaagagtttgggtcgaaactgaaagagcacatgcagtattgcatggatcatcctgatgagattagcaagcttgctaaggtgaaagctcaggtgtctgaagttaaaggtgtcatgatggaaaacattgaaaaggttcttgaccgtggtgagaaaattgaacttttggtggacaaaactgaaaaccttcgctcacaggcgcaagatttcaggacacaaggaacacagatgagaagaaagatgtggtttcagaacatgaagataaagctcattgttctagcaatcatcattgccttgatcctcatcatcgtcctctcagtctgcggtggcttcaactgtggcaaataagtctgggaacatttcttcctcctagtgattttccgtcaacatcctcagtcacttcgttgtgctgctttcgctcttttttgtggtttctaaattctctcatgctatctttatctgcttagattgtacgtctttgaaattggttttgtataggccatatatatgtatgaatgttcgacattttgccaacatttgctattattggtggtatcaacacggattcttgcgaaccaaaaaaaaaaaaaaaa

SEQ ID NO: 8298 - protein, 222 aa, Zea mays
  misc_feature: Ceres CLONE ID no. 1448469
  misc_feature: Ceres CDNA ID no. 29191323
  misc_feature (129)..(216): Pfam Name: Synaptobrevin PFAM Desc: Synaptobrevin
  misc_feature: Homolog of GI Number: 21592481 NR Desc: putative synaptobrevin
  misc_feature: Homolog of GI Number: 600710 NR Desc: formerly called HAT24
  misc_feature: Homolog of GI Number: 79324082 NR Desc: SAR1
  misc_feature: Homolog of GI Number: 22137292 NR Desc: At1g04740/T1G11_1
  misc_feature: Homolog of GI Number: 51969436 NR Desc: putative vesicle
  misc_feature: Homolog of GI Number: 29893540 NR Desc: putative synaptobrevin protein
  misc_feature: Homolog of GI Number: 2914706 NR Desc: putative synaptobrevin
  misc_feature: Homolog of GI Number: 15220315 NR Desc: synaptobrevin family protein
  misc_feature: Homolog of GI Number: 50509098 NR Desc: synaptobrevin
  misc_feature: Homolog of GI Number: 50919181 NR Desc: synaptobrevin
MAQQSSLIYSFVARGTVILVEFTDFKGNFTSVAAQCLQKLPSSNNKFTYNCDGHTFNYLVENGFTYCVVAVDSAGRQILMAFLERVKEDFNKRYGGGKAATAQANSLNKEFGSKLKEHMQYCMDHPDEISKLAKVKAQVSEVKGVMMENIEKVLDRGEKIELLVDKTENLRSQAQDFRTQGTQMRRKMWFQNMKIKLIVLAIIIALILIIVLSVCGGFNCGK

SEQ ID NO: 8299 - DNA, 650 bp, Zea mays
  misc_feature: Ceres CLONE ID no. 1448533
  misc_feature: Ceres CDNA ID no. 40351868
  CDS (86)..(454): REFERENCED BY SEQ ID NO: 8300
aaaaagaaatcttgcaatccacccctcgaaagaaaacctcaatcaacaccagaagctctcgatcccaccgaggaagaagagaggaatggcgtccgaggagggagtcgtgatcgcctgccacaccaaggccgacttcgacgcccacatggccaaggccaaggaggccggcaagctggtgatcattgacttcacggcctcctggtgcggcccctgccgcttcatcgcgccactgttcgtcgagcacgccaagaagttcacccaggctgtgttcctgaaggtggacgtggacgagctgaaggaagttgccgcggcctacgatgtcgaggcgatgccgaccttccacttcgtcaagaacggggtgacggtggagaccgtcgtcggtgccaggaaggagaacctcctggcccagatcgagaagcactgcgccgcggccgtgcctgctgcgtctgcgtagagaggatggaccagcacgtacgtggcggtggtggtggtcttgtcgttttcagtttgggcttgtcagcgctgtggctgggtggtcgattgtgaactggagagcatgcagttctaatactttggaatttggatgtctggcttcgttctgttatgatgatgatgatgatggtgatggcatggcaaaaaaaaaaaaaaaa

SEQ ID NO: 8300 - protein, 122 aa, Zea mays
  misc_feature: Ceres CLONE ID no. 1448533
  misc_feature: Ceres CDNA ID no. 40351868
  misc_feature (8)..(114): Pfam Name: Thioredoxin PFAM Desc: Thioredoxin
MASEEGVVIACHTKADFDAHMAKAKEAGKLVIIDFTASWCGPCRFIAPLFVEHAKKFTQAVFLKVDVDELKEVAAAYDVEAMPTFHFVKNGVTVETVVGARKENLLAQIEKHCAAAVPAASA

SEQ ID NO: 8301 - DNA, 932 bp, Zea mays
  misc_feature: Ceres CLONE ID no. 1448556
  misc_feature: Ceres CDNA ID no. 25400714
  CDS (73)..(741): REFERENCED BY SEQ ID NO: 8302
aaccactgaccaccgattctctctctctctctctctctctctctctctctctctctttcgattggattagtcatggtggttgaactatgggagacggtaaaggaaaccatcacagcttacaccggactgtctccggcggcgtttttcaccgtcttagctctggctttcgcagtctatcaagtcgtctccggcttcttcgcgtctcccgaggaacaccgtcctcgctcgacggaggattaccctcagccggagccccttccgcctccggttcagctgggagaaatcacggaggaggagcttaagcagtacgacggctcagattcaaaaaagccccttctcatggccatcaaaggccagatctacgatgtttcccagagcaggatgttctatggaccaggtggaccatacgctctgtttgcagggaaagatgcaagccgagctcttgctaagatgtcctttgaggaaaccgatttgaccggagacatctctggtctcggtccatttgagctggatgcgttacaagactgggagtacaagttcatgagcaagtatgtcaaagtcgggaccattcagaagaatgatggagaaggcaaagaaagtgctgaaccttctacaaacactgtagaagaagcttccgccgaggttgcccacggtgaaacttctacaagcatagaagagaaaacggaagaaaccacggagaagaaggatgttgcaaatggtgatgcggcaaaggaggactaaggcaatgaagcaaagcagcacttttactttctcatgagaaagaaattagtgagatttttcagggttttatgagtcgtaaatatagctttgagttggaagaagcaaactcaataaataaaaaaatgtaagactgtgtgttaccttttggaatttatgacatctaaatctcgttatgaaaaaaaaaaaaaaaa

SEQ ID NO: 8302 - protein, 222 aa, Zea mays
  misc_feature: Ceres CLONE ID no. 1448556
  misc_feature: Ceres CDNA ID no. 25400714
  misc_feature (70)..(167): Pfam Name: Cyt PFAM Desc: Cytochrome b5
  misc_feature: Homolog of GI Number: 19310509 NR Desc: AT3g48890/T21J18_160
  misc_feature: Homolog of GI Number: 4960154 NR Desc: putative progesterone
  misc_feature: Homolog of GI Number: 37535798 NR Desc: putative steroid membrane binding protein
  misc_feature: Homolog of GI Number: 24030304 NR Desc: putative progesterone
  misc_feature: Homolog of GI Number: 21555444 NR Desc: progesterone
  misc_feature: Homolog of GI Number: 50911086 NR Desc: steroid membrane binding protein
  misc_feature: Homolog of GI Number: 37535794 NR Desc: putative steroid membrane binding protein
  misc_feature: Homolog of GI Number: 78708870 NR Desc: steroid membrane binding protein
  misc_feature: Homolog of GI Number: 50915542 NR Desc: cytochrome b5 domain
  misc_feature: Homolog of GI Number: 39794459 NR Desc: LOC394928 protein
  misc_feature: Useful for decreasing plant size
  misc_feature: Useful for sterility
  misc_feature: Useful for sterility
MVVELWETVKETITAYTGLSPAAFFTVLALAFAVYQVVSGFFASPEEHRPRSTEDYPQPEPLPPPVQLGEITEEELKQYDGSDSKKPLLMAIKGQIYDVSQSRMFYGPGGPYALFAGKDASRALAKMSFEETDLTGDISGLGPFELDALQDWEYKFMSKYVKVGTIQKNDGEGKESAEPSTNTVEEASAEVAHGETSTSIEEKTEETTEKKDVANGDAAKED

SEQ ID NO: 8303 - DNA, 687 bp, Zea mays
  misc_feature: Ceres CLONE ID no. 1448580
  misc_feature: Ceres CDNA ID no. 25445886
  CDS (144)..(338): REFERENCED BY SEQ ID NO: 8304
aacaacccccctgtttcctcataggagagggaggggggcgcgcgagcgagcgagttcgttcccgtggtgaagaaacgatcgaccggcagtcgggacgcggtgccgtcggccggctgtcccacccatcgatcgaggattcaaggatgctgatcctggatctgggcatctgggtgctacccttgacgctgctgctggcgccggcgcgccggatggtgcgcctcgtcgacggcctgcagcggatcttcctcgccgtcgcctgccaccgggcgccgccgcccgcgctcgggcggctctggagccgcctcgaccgcctcgactccgccaccgtcatgccctgaccctgatcattcagtggatatggatggatcagcgggtctaccctcccgaacgcgctgttttttttctctcccttggacaaaaaaaaagggcgctcttttgctgtaaatttcagctcttgctgtctgcttagactccgttttttttgtttttgttttgttttctgcttctctgtggtaatgcgatccctgtaaatctctgtaactagaggctgccaaccatatgattgatgaacgaaaagatcccctatgcatgtatacagtgaaagaggcttggggtgctccttttttttcattctaattatgctgctgatccactattgcaaatttggtgtgaaaaaaaaaaaaaaaa

SEQ ID NO: 8304 - protein, 64 aa, Zea mays
  misc_feature: Ceres CLONE ID no. 1448580
  misc_feature: Ceres CDNA ID no. 25445886
MLILDLGIWVLPLTLLLAPARRMVRLVDGLQRIFLAVACHRAPPPALGRLWSRLDRLDSATVMP

SEQ ID NO: 8305 - DNA, 525 bp, Zea mays
  misc_feature: Ceres CLONE ID no. 1448593
  misc_feature: Ceres CDNA ID no. 25447011
  CDS (101)..(271): REFERENCED BY SEQ ID NO: 8306
acagaagaagccgaacgttttcggttccgctcagagtcataagccaggtcagactaggttagggtttacctgtgaggcctgctcccctgccgccgccgccatgggacactccaacgtgtggaactcgcaccccaagaactacggccctggatctagggtttgccgtgtgtgcgctaacccccacggcttgatccgaaagtacgggctcatgtgctgcagacagtgcttccgcagcaacgccaaggacattggcttcatcaagtaccgctgaaacttggggagctccaaagcatggcaataatggaagcatggatggggacctaaaagatagcctgtactcttattcttatgataaaaccatgtaatgaattgtttggctttgtgtggacgaagttggtgtattctagatggtactcttgaatcttgatgcttccctgctatgctagctgagcatgtcgaaccgctatgaatcagacaatacagtatcaatgttaccactcagtcttgttaaaaaaaaaaaaaaaa

SEQ ID NO: 8306 - protein, 56 aa, Zea mays; identical to SEQ ID NO: 454
  misc_feature: Ceres CLONE ID no. 1448593
  misc_feature: Ceres CDNA ID no. 25447011
  misc_feature (3)..(56): Pfam Name: Ribosomal_S14 PFAM Desc: Ribosomal protein S14p/S29e
  misc_feature: Homolog of GI Number: 31745220 NR Desc: putative ribosomal protein S29
  misc_feature: Homolog of GI Number: 77555907 NR Desc: ribosomal protein S14p/S29e
  misc_feature: Homolog of GI Number: 57471722 NR Desc: ribosomal protein S29
  misc_feature: Homolog of GI Number: 13194826 NR Desc: putative ribosomal S29 protein
  misc_feature: Homolog of GI Number: 51970282 NR Desc: ribosomal S29 subunit
  misc_feature: Homolog of GI Number: 51971827 NR Desc: ribosomal S29 subunit
  misc_feature: Homolog of GI Number: 61654760 NR Desc: S29
  misc_feature: Homolog of GI Number: 47026945 NR Desc: ribosomal protein S29
  misc_feature: Homolog of GI Number: 32400973 NR Desc: ribosome protein S29

SEQ ID NO: 8307 - DNA, 715 bp, Zea mays
  misc_feature: Ceres CLONE ID no. 1448602
  misc_feature: Ceres CDNA ID no. 36593505
  CDS (279)..(506): REFERENCED BY SEQ ID NO: 8308
atagctagttctggtattaaccgtcaccctctttgcttagtgcataactactatgattaatacttgctgagctctattacatccagtccttactggcatatttaggattgagcttcggtactctttgacttctcttcacaagcaaataggcccagccaactccgatcccaccggcaccagccgcccgcaacccgcaaagctgcttcccggactagctagggtttcgtctacgccgcttgatctagtcctctctcccggcacgcgagggcgcagcgttgatggcggcggcaccggcggacgctaaggcggaggccgccaagatggacctcctcgaggacgatgacgagttcgaagagttcgagatcgaccaagaatgggatgaccaggaagaaggcaacgaagccgtccagcagtgggaggatgattgggatgacgatgacgtgaacgatgatttctcgctgcagcttaaggaagagctggacggaagcaacggccagaagagctgaagtattatttctctactttatataaatgatttttatatggcagctacttttggaaccgttgatgtgctttggatgtgaaagtttttggacatcagtcggcaatttgacagcactgtacgtgttagttgtcgttaggatatgtctctagccgaaacgctagaatccgccacaatgtctacgccccaactgtttcaaaaaaaaaaaaaaaa

SEQ ID NO: 8308 - protein, 75 aa, Zea mays; identical to SEQ ID NO: 836
  misc_feature: Ceres CLONE ID no. 1448602
  misc_feature: Ceres CDNA ID no. 36593505
  misc_feature (8)..(70): Pfam Name: DSS1_SEM1 PFAM Desc: DSS1/SEM1 family
  misc_feature: Homolog of GI Number: 37050895 NR Desc: deleted in split hand/splt foot protein 1
  misc_feature: Homolog of GI Number: 66509809 NR Desc:  similar to ENSANGP00000017966
  misc_feature: Homolog of GI Number: 32416282 NR Desc: predicted protein
  misc_feature: Homolog of GI Number: 60465541 NR Desc: DSS1/SEM1 family protein
  misc_feature: Homolog of GI Number: 55628924 NR Desc:  similar to 26 proteasome complex subunit DSS1
  misc_feature: Homolog of GI Number: 6320571 NR Desc: Component of the lid subcomplex of the regulatory subunit of the 26S proteasome

SEQ ID NO: 8309 - DNA, 989 bp, Zea mays
  misc_feature: Ceres CLONE ID no. 1448704
  misc_feature: Ceres CDNA ID no. 29191844
  CDS (71)..(781): REFERENCED BY SEQ ID NO: 8310
aacaaccacgtgacgaaacacaagccaaaacaagcagctcaaccttcatacacagatctagcaggagaccatggccggaggagatgacttgaagctgctgggcgcttgggcaagtccatttgtcaccagggtgaagcttgcgctgaacttcaagggcctgagcttcgaggatgtcgaagaggaccttagcaacaagagcgagctcctcctcagctcgaacccggtgcacaagaaggtgcccgtgctcgtccacaacggaaaacccatttgcgagtcagtgatcatcgttcagtacatcgatgaggcgttcgccggcatcggccccgctctccttccctctgacccctacgaacgcgccattgcccgtttctgggccgcctacgttgacgataagctcgtcgccccatgggtacagtcgttgagggccaagacagaggaggagaagtccgaggggcttaagcagacatttgccgcggtggagacactggaaggagccctgcgggagtgctccaagggagagggctactttggtggtgagaccgtcgggcttgtggacatttcacttgggagcctgctctcctggttgaacgcgacagaagtgatgtccggaaccaagatatttgatcctgttaagactccgctcctggcagcatggatggagcgctttagcaagctcgatgctgccaaggcggcgttgccagaagttgatagggtggtcgaatttgccaagaagagacaagcacaggctgctgccgccgccgctgcttcagagaccaagtaaacatcatggggacgtgacttccattgaataaaaaaaagtgcatgttttctatatagcatatatgattgttgtttgtatgtcgatttttgttgtaatggtgccaaggataattaatgcatgtgatattttgtgaaggttttaagatcatttgtaatattttgtgaagttttaacatcatttactacttgtattaaaaaaaaaaaaaaaa

SEQ ID NO: 8310 - protein, 236 aa, Zea mays
  misc_feature: Ceres CLONE ID no. 1448704
  misc_feature: Ceres CDNA ID no. 29191844
  misc_feature (7)..(78): Pfam Name: GST_N PFAM Desc: Glutathione S
  misc_feature (88)..(203): Pfam Name: GST_C PFAM Desc: Glutathione S
  misc_feature: Homolog of GI Number: 22038178 NR Desc: glutathione
  misc_feature: Homolog of GI Number: 22038179 NR Desc: glutathione S
  misc_feature: Homolog of GI Number: 21956482 NR Desc: glutathione
  misc_feature: Homolog of GI Number: 20143569 NR Desc: putative glutathione S
  misc_feature: Homolog of GI Number: 33304610 NR Desc: tau class GST protein 4
  misc_feature: Homolog of GI Number: 4127348 NR Desc: glutathione transferase
  misc_feature: Homolog of GI Number: 20143571 NR Desc: putative glutathione S
  misc_feature: Homolog of GI Number: 11385531 NR Desc: glutathione S
  misc_feature: Homolog of GI Number: 22038181 NR Desc: glutathione S
  misc_feature: Homolog of GI Number: 20143570 NR Desc: putative glutathione S
  misc_feature: Useful for making plants with altered leaf shape eg curled leaves
  misc_feature: Useful for sterility
MAGGDDLKLLGAWASPFVTRVKLALNFKGLSFEDVEEDLSNKSELLLSSNPVHKKVPVLVHNGKPICESVIIVQYIDEAFAGIGPALLPSDPYERAIARFWAAYVDDKLVAPWVQSLRAKTEEEKSEGLKQTFAAVETLEGALRECSKGEGYFGGETVGLVDISLGSLLSWLNATEVMSGTKIFDPVKTPLLAAWMERFSKLDAAKAALPEVDRVVEFAKKRQAQAAAAAAASETK

SEQ ID NO: 8311 - DNA, 1132 bp, Zea mays
  misc_feature: Ceres CLONE ID no. 1448731
  misc_feature: Ceres CDNA ID no. 29191325
  CDS (178)..(804): REFERENCED BY SEQ ID NO: 8312
ctcgatccaccttccggcgaaaccaattcattgctcgctttcgcaagactctttctttctcccctttcctctcccccaacccatccgtcgtcgcctccgcccgaggtaaccgccatagccacgaagaatcaagaacatcgcctgtcgcacgtcgtccctgaggacagagaagaagagatggagggcggctgcgtcgtggccgccgggacggaggacggctgcggcaagaagcagcagcagcaagcgcggccgcagttcgggcggtcgctgacgtaccaccaccaccaggggcaccggctactgccgcggtggcggcggccgcagctggcggacgagccccgcgcgcggccgcaggcggtggtgctctacacgacgtcgctgcgcggggtgcggcgcaccttcgcggactgctccgcggcgcgggccatcctgcgggggtcccgcgtcgccgtcgacgagcgcgacgtatccatggacgcggcgctccggcgcgagctgcaggcgctgctggccgcccggggccgcgccttctcgctcccgcagctcttcatcgggggccggctcgtcggcggcgccgacgaggtccggcagctggacgagtccggccagctccggcgcctcctcgagggcgccgcggggcaggacccggccttcgtctgcgacgcctgcggcggggtccgcttcgtcccctgcccggcctgcgccggcagccgcaaggtgttcgacgaggaggaggaccgcgccctccgctgcggcgactgcaacgagaacgggctggtgcgctgcgccaactgctcctcctgatcctaattgaattgcagggttagagttggtagattcgtattcgtcgtcagatcagagaggcgcattttcggtttcttggagttcttgatttatgtatcctgaatcaatcgatcaatcaatccgatcgtttggggatcggattgttagctgctcatgggcggaagagaacgaattgttcttggctcctttgctgcgggaatcgccgcccggtggtggcgattgatgatgaataagagccggtgcttgtatatgtgtgtaaaatttggtgctgatattagcctgatggattaatgtataacaaagaactgatgttaaaaaaaaaaaaaaa

SEQ ID NO: 8312 - protein, 208 aa, Zea mays
  misc_feature: Ceres CLONE ID no. 1448731
  misc_feature: Ceres CDNA ID no. 29191325
  misc_feature (60)..(149): Pfam Name: Glutaredoxin PFAM Desc: Glutaredoxin
  misc_feature: Homolog of GI Number: 50912785 NR Desc: glutaredoxin
  misc_feature: Homolog of GI Number: 34907946 NR Desc: B1088C09.21
  misc_feature: Homolog of GI Number: 50924087 NR Desc: OSJNBa0073L04.11
  misc_feature: Homolog of GI Number: 34899868 NR Desc: peptide transporter
  misc_feature: Homolog of GI Number: 50929077 NR Desc: OSJNBb0079B02.8
  misc_feature: Homolog of GI Number: 10241626 NR Desc: Contains similarity to F1N 19.7
  misc_feature: Homolog of GI Number: 53370707 NR Desc: glutaredoxin domain containing protein
  misc_feature: Homolog of GI Number: 56461742 NR Desc: At1g32760
  misc_feature: Homolog of GI Number: 17381052 NR Desc: putative peptide transporter protein
  misc_feature: Homolog of GI Number: 15810443 NR Desc: putative peptide transporter protein
MEGGCVVAAGTEDGCGKKQQQQARPQFGRSLTYHHHQGHRLLPRWRRPQLADEPRARPQAVVLYTTSLRGVRRTFADCSAARAILRGSRVAVDERDVSMDAALRRELQALLAARGRAFSLPQLFIGGRLVGGADEVRQLDESGQLRRLLEGAAGQDPAFVCDACGGVRFVPCPACAGSRKVFDEEEDRALRCGDCNENGLVRCANCSS

SEQ ID NO: 8313 - DNA, 672 bp, Zea mays
  misc_feature: Ceres CLONE ID no. 1448803
  misc_feature: Ceres CDNA ID no. 40351869
  CDS (82)..(537): REFERENCED BY SEQ ID NO: 8314
actctttagcgcagtcgcagacggaccaaaccgaagaagaacgttctcagagtaaagcaatctccgttaacagacgtcggcatggggaggcttcactctaaaggtaagggaatctcagcatctgctttgccgtacaagcgttcacctccgagttggctcaagacaacctctcaggatgttgatgagtccatttgcaagtttgcgaagaagggtttgacaccatctcagattggtgtcattcttcgtgactctcacggtatccctcaggtgaagagtgttactggaaacaagattttgagaatcttgaaagctcatggtcttgctcctgagatccctgaggatctctaccacctgatcaagaaagcagtggctatccgcaagcaccttgagaggaacaggaaagacaaggactccaagttcaggttgattcttgtcgagagcagaatccaccgtcttgctcgttactacaagaagaccaagaagctccctcccgtctggaaatacgagtctaccacagcaagcactcttgtggcttaaggaatcatagagctggtcaaagtctttcatgaacatccatttcatttgcattgcaactcaaaagttctatgacaatagactttgtatctgtttttgatagttttgattattttgaatttaaaaaaaaaaaaaaaa

SEQ ID NO: 8314 - protein, 151 aa, Zea mays
  misc_feature: Ceres CLONE ID no. 1448803
  misc_feature: Ceres CDNA ID no. 40351869
  misc_feature (1)..(60): Pfam Name: Ribosomal_S13_N PFAM Desc: Ribosomal S13/S15 N
  misc_feature (65)..(151): Pfam Name: Ribosomal_S15 PFAM Desc: Ribosomal protein S15
MGRLHSKGKGISASALPYKRSPPSWLKTTSQDVDESICKFAKKGLTPSQIGVILRDSHGIPQVKSVTGNKILRILKAHGLAPEIPEDLYHLIKKAVAIRKHLERNRKDKDSKFRLILVESRIHRLARYYKKTKKLPPVWKYESTTASTLVA

SEQ ID NO: 8315 - DNA, 1345 bp, Zea mays
  misc_feature: Ceres CLONE ID no. 1448835
  misc_feature: Ceres CDNA ID no. 25445965
  CDS (35)..(1105): REFERENCED BY SEQ ID NO: 8316
agcaaagtctctcttgcaactccaaaaagcaaccatgtctgcttttgtcggcaaatacgcagatgagctgatcaagactgccaagtacattgcaacgccgggaaaggggattctggcggcagatgagagcactggaaccattgggaaacgattctccagcatcaatgttgagaacattgagtccaaccgccaagctcttcgtgagctcctcttcacttcttctctcccttgcctctccggtgttatcctcttcgaggaaaccctttaccagaaaacttctgatggcaagccttttgtcgagttcctccaggagaacggagttatccccggaatcaaagtggacaagggtgtggttgatctagcaggaaccaatggtgagaccactactcagggtctagactcgcttggtgcacgttgccaggagtattacaaggcaggagccaggtttgccaaatggcgtgcagtcctcaagattggtgccaccgagccgagcgagctctcgatccaagagaacgccaaggggctagcacgttacgccatcatctgccaggagaacggactggtcccaatcgtcgagccagaggttttgactgacgggagccacgacattaagaaatgtgcggctgtgactgagacggttctttctgccgtgtacaaggccttgaacgaccaccacgtcctcctcgaaggcactctgcttaaacctaacatggtcactccaggctcagacagcgccaaggttgcaccggaagtcattgcggaatacacagtgactgctctccgccgcacggtcctaccagcggttccaggaatcgtgttcctctcaggaggacagagcgaagaggaagcaacgctaaatctgaacgcaatgaacaagctcgatctgttgaagccatggacgcttactttctcctttggccgagccctccagcaaagcacactcaaggcttggggaggtaagaaagagaacgtagccaaagctcaggccacgttcttggtcaggtgcaaggctaactcggacgctacacttgggaaatacattgctggggcttctggtgactctgctgcctccgagagcttgtttgtgaaaggatacagttactagggcggcgtctgcgtttgatacggtttgggtatatcttatatatgaatgttttgttggcgttggatttggtttaaatgtctgttggatttggtttatcgtttgaccaaattgtgtaatgtcttaagttatgtctatctctccctctttgtcataaggctcttgtgatggtttctttaacgttatttttggcgccaacacataactgtttggttcaaaagttcggtaaaaaaaaaaaaaaaa

SEQ ID NO: 8316 - protein, 356 aa, Zea mays
  misc_feature: Ceres CLONE ID no. 1448835
  misc_feature: Ceres CDNA ID no. 25445965
  misc_feature: null
  misc_feature: Useful for making plants with modulated phosphate use efficiency
  misc_feature (11)..(356): Pfam Name: Glycolytic PFAM Desc: Fructose
  misc_feature: Homolog of GI Number: 31711854 NR Desc: At4g26530
  misc_feature: Homolog of GI Number: 40362980 NR Desc: fructose 1
  misc_feature: Homolog of GI Number: 16284 NR Desc: fructose 1
  misc_feature: Homolog of GI Number: 927507 NR Desc: fructose
  misc_feature: Homolog of GI Number: 2213867 NR Desc: fructose
  misc_feature: Homolog of GI Number: 7269504 NR Desc: fructose
  misc_feature: Homolog of GI Number: 40457267 NR Desc: fructose
  misc_feature: Homolog of GI Number: 40716077 NR Desc: fructose
  misc_feature: Homolog of GI Number: 17104659 NR Desc: putative fructose bisphosphate aldolase
  misc_feature: Homolog of GI Number: 51090360 NR Desc: putative fructose
  misc_feature: Useful for making ornamental plants with modified leaves
  misc_feature: Useful for making plants with increased biomass
  misc_feature: Useful for sterility
  misc_feature: Useful for sterility
MSAFVGKYADELIKTAKYIATPGKGILAADESTGTIGKRFSSINVENIESNRQALRELLFTSSLPCLSGVILFEETLYQKTSDGKPFVEFLQENGVIPGIKVDKGVVDLAGTNGETTTQGLDSLGARCQEYYKAGARFAKWRAVLKIGATEPSELSIQENAKGLARYAIICQENGLVPIVEPEVLTDGSHDIKKCAAVTETVLSAVYKALNDHHVLLEGTLLKPNMVTPGSDSAKVAPEVIAEYTVTALRRTVLPAVPGIVFLSGGQSEEEATLNLNAMNKLDLLKPWTLTFSFGRALQQSTLKAWGGKKENVAKAQATFLVRCKANSDATLGKYIAGASGDSAASESLFVKGYSY

SEQ ID NO: 8317 - DNA, 1218 bp, Zea mays
  misc_feature: Ceres CLONE ID no. 1448906
  misc_feature: Ceres CDNA ID no. 25447064
  CDS (200)..(793): REFERENCED BY SEQ ID NO: 8318
caacaaaaaccgactagcccaggcaagcagaaacccactgtctccgcttccgctcccgactcctttgtctcgtcctcatccatccaaccaggcgagccaacaagcaagcaaaagtaaacggggcgaggagctggagagacgccggcgacgcgaagcaaccgcccgatcggagccgcggctgagcaggagggagccggagatggtgggtctcgtcggcggcagcacggcgcgggcggagcacgtcgtcgccaacgccggaggggaggcagagtacgtgcgccgcatgcaccgccacgcgccgaccgagcaccagtgcacctccaccctcgtcaagcacatcaaggcgcccgtccacctcgtgtgggagctggtgcggaggttcgaccagccgcagcggtacaagccgttcgtcaggaactgcgtcgtgcgcggggaccagctcgaggtcggcagcctgcgcgacgtcaacgtcaagaccggcctgccggcgacgaccagcaccgagcgcctcgagcagctcgacgacgacctgcacatactcggtgtcaagttcgtcggcggggaccaccgcctccagaactactcatccatcataactgtccaccccgagagcattgacgggaggccgggcaccctggtgatcgagtcgttcgtggtcgatgtgcctgatggcaacacgaaggacgagacatgctacttcgtggaggccgtgatcaagtgcaacctcaattctctcgcagaggtatcggagcagctagcagtggagtcacctacgtcgctgatcgatcagtgaagtcacctgcgtcgcccatcgatcagtgaccaccggtacaaaaaaagacgtcaatcagcaacaaataagaagaagcttcgaaggctggctggagagttcaacctttttgagaccggtggtttggccatcgtcttctgcgtgtaatgtctcttggaatatggaagtattagtcgttgtgtaggattaaacatctgtagtagcttgtatgctagggatggttgtttagccttagaaactgcacctagatacctcatggcatgtatgcatactgctagtatgtgtagagatcagggaaagcatggagcgggttttgcctcttaggtgcatggagatctgtctttttttccccctccattttgcggtggcgactctattggttggggttcttggataaatatactttcccgcgaaaaaaaaaaaaaaaa

SEQ ID NO: 8318 - protein, 197 aa, Zea mays
  misc_feature: Ceres CLONE ID no. 1448906
  misc_feature: Ceres CDNA ID no. 25447064
  misc_feature: Homolog of GI Number: 50252014 NR Desc: Bet v I allergen
  misc_feature: Homolog of GI Number: 78191398 NR Desc: CAPIP1
  misc_feature: Homolog of GI Number: 47558817 NR Desc: CAPIP1
  misc_feature: Homolog of GI Number: 56384584 NR Desc: AT
  misc_feature: Homolog of GI Number: 52077087 NR Desc: Bet v I allergen
  misc_feature: Homolog of GI Number: 11359723 NR Desc: proteophosphoglycan
  misc_feature: Homolog of GI Number: 13592175 NR Desc: ppg3
  misc_feature: Homolog of GI Number: 5420387 NR Desc: proteophosphoglycan
MVGLVGGSTARAEHVVANAGGEAEYVRRMHRHAPTEHQCTSTLVKHIKAPVHLVWELVRRFDQPQRYKPFVRNCVVRGDQLEVGSLRDVNVKTGLPATTSTERLEQLDDDLHILGVKFVGGDHRLQNYSSIITVHPESIDGRPGTLVIESFVVDVPDGNTKDETCYFVEAVIKCNLNSLAEVSEQLAVESPTSLIDQ

SEQ ID NO: 8319 - DNA, 825 bp, Zea mays
  misc_feature: Ceres CLONE ID no. 1448936
  misc_feature: Ceres CDNA ID no. 29191779
  CDS (287)..(520): REFERENCED BY SEQ ID NO: 8320
atctttctactttaattatcttcttcctttcttcagcaaaactttttattttattttttctggttgaagtttttgttttatttctttagcaagaagcgagactggccttatctgtacctttctctttgccattaaaagccctccattttttcttccatagattcttattttctctgattttctgtttgagattttcttgaattcgttatttttcgtaattttcattttcttgtagttttgattcttacacacgcttatgttttattccttgcagagaaattcgtccatggaatctccagcaagcaaatcctccaccgtgaagaaggtagaatttccccctcgtcggggaagagtgaagagagagatcttcggcgttttggccagctccatcgtttccgccgccgtgagggccggtggagtgttcggcaagaacgctgaaggttacggtggtgtctcttgttcctccaccgccactcctccgagcggatacacctccgaccagaacagcgaaactacttaaagcaagaaaacatataaagatataattacgaaggtgccactggtttatttaaccaccatggcatgacactactatgcggttctgttcgtttttttaaaacagaacgctgctttctccagatccggttcggtttaatttgttttgtggtttgttttaatttggtgtggtcgtccggtttaacttcggtttttggtgggttaaactgggtatacgtttatgggtgtgggccgtgtggttaatttgctttgttaaacaaaaatatctccctaatctgttgtttctacgtgttaaaaaaaaaaaaaaaa

SEQ ID NO: 8320 - protein, 77 aa, Zea mays
  misc_feature: Ceres CLONE ID no. 1448936
  misc_feature: Ceres CDNA ID no. 29191779
  misc_feature: Useful for making ornamental plants with modified flowers
  misc_feature: Useful for making plants with altered leaf shape eg curled leaves
  misc_feature: Useful for making plants with altered leaf shape eg curled leaves
  misc_feature: Useful for making plants with increased biomass and foliage
  misc_feature: Useful for making plants with increased biomass and foliage
MESPASKSSTVKKVEFPPRRGRVKREIFGVLASSIVSAAVRAGGVFGKNAEGYGGVSCSSTATPPSGYTSDQNSETT

SEQ ID NO: 8321 - DNA, 609 bp, Zea mays
  misc_feature: Ceres CLONE ID no. 1448949
  misc_feature: Ceres CDNA ID no. 35391350
  CDS (42)..(380): REFERENCED BY SEQ ID NO: 8322
aattcgcttcgatccccagaggcacagacgagacgacagagatgaaggacggaacgtcgtcggggggaggggcgttcgctgcgggcagcgatccaaggcagccgtcgacggcgaagccatacgcgccgccgaagctgtcgccccaggacctacccatcgactatgcaggcttcctcgccgtcgccttcggcgtcctcggcgtcatgctccgctacaaggtgtgctcgtggatcgcaatcatcttctgcgctcagtcgttggcaaacatgaagaactttgagaacgatctgaagcagctttctatggccttcatgtttgctgttatgggtctggtgacgaactattttggccccgctcgtccaggcagtacaaagcgctaaactgcggaagaacatgtgctacattcttcataggactttttggtgcttccgatagctttgccatcggtgctgacattatgtatgtccaatttgagcaaacgtcataggtatgggcatcaaattaatggaccggtacatgtatgatgctcaataatttatttgtgcaatactagtaaacgcatagactgtttgaacgagtacttggtttctccgaaaaaaaaaaaaaaaa

SEQ ID NO: 8322 - protein, 112 aa, Zea mays; identical to SEQ ID NO: 7042
  misc_feature: Ceres CLONE ID no. 1448949
  misc_feature: Ceres CDNA ID no. 35391350
  misc_feature (12)..(111): Pfam Name: UPF0139 PFAM Desc: Uncharacterised protein family
  misc_feature: Homolog of GI Number: 46250139 NR Desc: MGC81480 protein
  misc_feature: Homolog of GI Number: 12654705 NR Desc: PTD008 protein
  misc_feature: Homolog of GI Number: 62899649 NR Desc: UPF0139 protein CGI
  misc_feature: Homolog of GI Number: 49522721 NR Desc: MGC82186 protein
  misc_feature: Homolog of GI Number: 51712614 NR Desc: similar to cDNA sequence BC056474
  misc_feature: Homolog of GI Number: 61837351 NR Desc:  similar to cDNA sequence BC056474

SEQ ID NO: 8323 - DNA, 713 bp, Zea mays
  misc_feature: Ceres CLONE ID no. 1448982
  misc_feature: Ceres CDNA ID no. 40351870
  CDS (104)..(496): REFERENCED BY SEQ ID NO: 8324
cccccttgcgccgtcgccttcctgcttgccgctctcgctccgcagacgccgccgccgccgccgccgccacggccagagctcgactcgctccctagaggtaaggatggtgagagtcagtgtgctgaacgatgctctcaagagcatgtacaacgctgagaagcgtgggaagaggcaggtcatgatcaggccttcttccaaggtcattatcaagttccttatcgtcatgcagaagcatggatacattggcgagtttgagtatgttgatgatcacaggtctggcaagatcgtggttgaattgaatggcaggctgaacaagtgtggtgtcatcagtcctcgctttgatgttggtgtcaaggagattgagggatggactgcaaggctccttccttctcgtcagtttggttacatcgtgctgacaacctctgctgggatcatggaccatgaggaggcaaggcgtaagaatgttggtggcaaggtgctaggctttttctactgaaaatggaaaatggaaaattcgatgaaagtatctgagatgtgttagtaggatatttcccaaggaacacctaagttgtctttttttgtctgactagctgccgctgcttgttgagttattctggaatccgttatgcactttcggattgggtgcctttgtttgaaaactatgagctgtgcctgtcgttaattctgaaaaatccgtaaataaaaaaaaaaaa

SEQ ID NO: 8324 - protein, 130 aa, Zea mays; identical to SEQ ID NO: 2516
  misc_feature: Ceres CLONE ID no. 1448982
  misc_feature: Ceres CDNA ID no. 40351870
  misc_feature (5)..(130): Pfam Name: Ribosomal_S8 PFAM Desc: Ribosomal protein S8

SEQ ID NO: 8325 - DNA, 635 bp, Zea mays
  misc_feature: Ceres CLONE ID no. 1449140
  misc_feature: Ceres CDNA ID no. 40041418
  CDS (79)..(468): REFERENCED BY SEQ ID NO: 8326
aaatcgatttggtccagacaccaccgagcccccaaccagacccagaccaaaccctaggcggcggcggcggcggcggagatggcggcggcgagcctgaggaaggggaacgcgaggctgccgccggaggtgaaccgggcgctgttcgtgcggaacctgccgttcaacatctcgagcgaggagatgtacgacatcttcggcaagtacggggcgatccggcagatccggctgggcaacgccaaggacacgcgggggacggcgtacgtggtgtacgaggacatctacgacgccaagaacgccgtcgaccacctctcgggcttcaacgtcgccaaccgctacctcatcgtgctctactcgcagctcaacaggatgtccaagaagacggacatcaagaagaaggaggacgagatcaccaggctccaggagaagtatggcgtcggatccaagaccccctccgccaacgacgcctgaaccatggatgcctgcccgtgtttttctagttagaaatcgtcgagagaaactgttgaatcggagatcggtcctgtaatctgtgcttgccgcggtatgtttgtgtttgcggtggttccatattgatatgatgaacatgactctgattgatagcaaaaaaaaaaaaaaaa

SEQ ID NO: 8326 - protein, 129 aa, Zea mays; identical to SEQ ID NO: 4094
  misc_feature: Ceres CLONE ID no. 1449140
  misc_feature: Ceres CDNA ID no. 40041418
  misc_feature (21)..(89): Pfam Name: RRM_1 PFAM Desc: RNA recognition motif.
  misc_feature: Homolog of GI Number: 32129324 NR Desc: putative RNA binding protein
  misc_feature: Homolog of GI Number: 62857825 NR Desc: LOC550003
  misc_feature: Homolog of GI Number: 76698314 NR Desc:  similar to splicing factor 3B
  misc_feature: Homolog of GI Number: 34785490 NR Desc: MGC68842 protein
  misc_feature: Homolog of GI Number: 66515801 NR Desc:  similar to CG13298
  misc_feature: Homolog of GI Number: 54642523 NR Desc: GA12181
  misc_feature: Homolog of GI Number: 68395294 NR Desc:  similar to tudor domain containing 6
  misc_feature: Homolog of GI Number: 70945413 NR Desc: pre

SEQ ID NO: 8327 - DNA, 772 bp, Zea mays
  misc_feature: Ceres CLONE ID no. 1449159
  misc_feature: Ceres CDNA ID no. 29191326
  CDS (61)..(633): REFERENCED BY SEQ ID NO: 8328
aacaaacccctcacccctcgcccccgccgcccccgcccccgccgccaaacacccatcgccatgcggccaccgagaggcggcggaggtttccgcggacgcggcggcgaccgaggtggccgcttcggtggaggcggccgcggcggcggcggtaggggccgcttcggtggaggcggcggcgggttccgcgacgagggccctccagccgaggtcgtcgaggtgtcgacgttcctgcacgcctgcgagggggacgcggtaacgaagctgacgaacgagaaagtgccctacttcaacgcgcccatatacctccagaacaagacccagatcggcaaagtcgacgagatcttcggccccatcaacgaatcatatttctcggtcaagatgttcgagggagtcattgcaacatcttacaacgaaggtgacaagttcttcattgaccccatgaagctgctgcccctctcacgcttcctgccgcagccaaagggctcgactccaagaggtggtggtcgcggtggaagaggtggtggtcgcggtggaagaggtggccgtggtggattccgtggaagaggtgcaccaaggggtcgtggacctcccaggggtggagggcgtggtttcagaggacgaggcagattctaggatgtagttttaagtttgctgattgttgaaacatgatgctctacattatctgttcagctggaaacattatgctaagtcagctgcaagcgcactttgtgtggaagttgattcaatatttgtatgaaaaaaaaaaaaaaaa

SEQ ID NO: 8328 - protein, 190 aa, Zea mays
  misc_feature: Ceres CLONE ID no. 1449159
  misc_feature: Ceres CDNA ID no. 29191326
  misc_feature (43)..(144): Pfam Name: Gar1 PFAM Desc: Gar1 protein RNA binding region
  misc_feature: Homolog of GI Number: 20259633 NR Desc: putative GAR1 protein
  misc_feature: Homolog of GI Number: 21536739 NR Desc: putative GAR1 protein
  misc_feature: Homolog of GI Number: 50746777 NR Desc:  similar to nucleolar protein family A
  misc_feature: Homolog of GI Number: 18256903 NR Desc: Nola1 protein
  misc_feature: Homolog of GI Number: 61553379 NR Desc: nucleolar protein family A
  misc_feature: Homolog of GI Number: 19113157 NR Desc: pre
  misc_feature: Homolog of GI Number: 28316950 NR Desc: RE52135p
  misc_feature: Homolog of GI Number: 56500127 NR Desc: snornp protein gar1 homologue
  misc_feature: Homolog of GI Number: 23489852 NR Desc: snornp protein gar1
  misc_feature: Useful for increasing chlorophyll and photosynthetic capacity
  misc_feature: Useful for making plants with altered leaf shape eg curled leaves
MRPPRGGGGFRGRGGDRGGRFGGGGRGGGGRGRFGGGGGGFRDEGPPAEVVEVSTFLHACEGDAVTKLTNEKVPYFNAPIYLQNKTQIGKVDEIFGPINESYFSVKMFEGVIATSYNEGDKFFIDPMKLLPLSRFLPQPKGSTPRGGGRGGRGGGRGGRGGRGGFRGRGAPRGRGPPRGGGRGFRGRGRF

SEQ ID NO: 8329 - DNA, 827 bp, Zea mays
  misc_feature: Ceres CLONE ID no. 1449207
  misc_feature: Ceres CDNA ID no. 40351871
  CDS (97)..(645): REFERENCED BY SEQ ID NO: 8330
accccactttgcatccatccctatcgccgtctctcctcaacccacgccgccctcgcttcctcccctcccccgagccccctcacgcacgcacaacctatggcggccatgaaggtggtgcggaacctcgacctggagcggtacatgggccggtggtacgagatcgcgtgcttcccgtcccggttccagcccaaggacggcgccaacacgcgcgccatctacacgctcggccccgacggcgccgtcaaggtgctgaacgagacctggaccgacggccgccggggccacatcgagggcaccgccttccgcgccgaccccgccagcgacgaggccaagctcaaggtcaggttctacgtgccccccttcctccccgtcttccccgtcatcggcgactactgggtgctccacatcgacgacgcctatcagtacgcgctcgtcggccagccctccaggaactacctctggatcttgtgcaggcagccgcagatggacgagggcatgtacaaggagctggtggagagggccaaggaggaagggtacgacgtgagcaaactccggaagacgccgcacccggagccgacgccggagagccaggatgcccccaaggacggcggcctgtggtggatcaaatctctctttggaaagtagtaggtgccgctcgctcgcagaagcagagatgcagtagcaccagctggtctgccttgtacagttcaatctagtatgttcgtcgctgcagggaatatgaatatgttttgcttgtttgtgtcgaactgtagtgagtatataatctgcagaataatctgtttgtcgggcgaaaaaaaaaaaaaaaa

SEQ ID NO: 8330 - protein, 182 aa, Zea mays
  misc_feature: Ceres CLONE ID no. 1449207
  misc_feature: Ceres CDNA ID no. 40351871
MAAMKVVRNLDLERYMGRWYEIACFPSRFQPKDGANTRAIYTLGPDGAVKVLNETWTDGRRGHIEGTAFRADPASDEAKLKVRFYVPPFLPVFPVIGDYWVLHIDDAYQYALVGQPSRNYLWILCRQPQMDEGMYKELVERAKEEGYDVSKLRKTPHPEPTPESQDAPKDGGLWWIKSLFGK

SEQ ID NO: 8331 - DNA, 604 bp, Zea mays
  misc_feature: Ceres CLONE ID no. 1449287
  misc_feature: Ceres CDNA ID no. 25445887
  CDS (136)..(303): REFERENCED BY SEQ ID NO: 8332
aaaagagagcagagaaccctagctagagtttggcgagtggtgcggaggcgcggctgctcctgctcgtcgcgacgtcgaatttcagcgccgcccgcgcgatccttggtctcttcgcccgtgaggagaggcgcgacaatggctgggaaaggcgggccgaccaacctggagaaggagcagatgtttgggatggcggagaaggagatggagtacagggttgatcttttcaacaggcttacaaagacctgttttgagaagtgcgttgaaaaaaggtataaagaagctgagctcaatatgggtgactaatttagtaggtcagatgcttgggaaccagcctcagatgtgaaccgagatgcactagttccattttgtagcagaatcctattgctctgtttattctttttggttggtattagaatcccgccacctgctattaagtacaccaatacagcaccagacttgttaatgcgtggatcgctctgaagaaaaatcacggtgtcttgctctttccagtgatgtgcattatctttgaatcatgaacagggaacatgcctgtaataaatttatagagctcgagagtgatcctgtttcaaaaaaaaaaaaaaaa

SEQ ID NO: 8332 - protein, 55 aa, Zea mays
  misc_feature: Ceres CLONE ID no. 1449287
  misc_feature: Ceres CDNA ID no. 25445887
  misc_feature (14)..(52): Pfam Name: zf PFAM Desc: Tim10/DDP family zinc finger
  misc_feature: Homolog of GI Number: 34897366 NR Desc: putative zinc finger protein
  misc_feature: Homolog of GI Number: 50935395 NR Desc: small zinc finger
  misc_feature: Homolog of GI Number: 5107088 NR Desc: small zinc finger
  misc_feature: Homolog of GI Number: 5107180 NR Desc: small zinc finger
MAGKGGPTNLEKEQMFGMAEKEMEYRVDLFNRLTKTCFEKCVEKRYKEAELNMGD

SEQ ID NO: 8333 - DNA, 1090 bp, Zea mays
  misc_feature: Ceres CLONE ID no. 1449340
  misc_feature: Ceres CDNA ID no. 25446731
  CDS (196)..(861): REFERENCED BY SEQ ID NO: 8334
aaaaaaacatctcctttgtatcggcctcggcaatcctgaccggatcaacaaagacgtagctaccccctcccgcgtccgtcgaattcgcctccgccgcctgctcgatccggtgggaattcgccgctgccgggttgttttcgctggggtgattaaggctcgggattcgagatctacgcgagtcgcgggcaagcagccatgagcgaggtgttcgagggctacgagcggcagtactgcgaggcctccgcctcgctctcccgcaagtgcaccgctgcctccgccctcgatggggagaagaagaagcagaagctgtccgagatccaatccggcgttgaggaagctgaatcgctgattcgtaagatggacctggaggcaaggaacctacagcctagcattaaggctggtttgcttgcaaagctgagggagtataaatctgacctcaacaacgtcaagagtgagcttaagaggatctcagcgcccaatgctaggcaggctacccgggaggagctcctggagtctggaatggctgatactctcgcggtgtctactgatcagagggggagattgatgatgacaactgaaagactgaatcagtcaactgacagaattaaagagagccgaagaactatgttggagacagaagagcttggtgtgtcaattcttcaggatcttcaccaacagcgacagtcactactacatgctcatactactttgcacggagttgatgacaacattggcaagagcaagaagatcctggctgcaatgtcaaagaggatggataggaacaagtggatcattgggggaattatcacggctctcgttctggccatccttctcatactctacttcaagctcgctaattaagcctgcctgcaggtaggttccccctacatatctgtgttcagtaattgtgtgatatgagttgtctgaatgccgtgtattgagcaacacgcagctctccgagcgtcatttgttccccctcaaacctgtaaactcaaaatggcttattctgtgtatagttagttattcccaactatgtaaaatgtctaaagagtaaaaaaataatacttggtgttgaaaaaaaaaaaaaaaa

SEQ ID NO: 8334 - protein, 221 aa, Zea mays
  misc_feature: Ceres CLONE ID no. 1449340
  misc_feature: Ceres CDNA ID no. 25446731
  misc_feature (41)..(196): Pfam Name: V PFAM Desc: Vesicle transport v
  misc_feature: Homolog of GI Number: 34910406 NR Desc: putative vesicle transport v
  misc_feature: Homolog of GI Number: 78191454 NR Desc: vesicle transport v
  misc_feature: Homolog of GI Number: 9294029 NR Desc: vesicle transport v
  misc_feature: Homolog of GI Number: 34914100 NR Desc: similar to vesicle transport protein
  misc_feature: Homolog of GI Number: 20147179 NR Desc: AT5g39510/MUL8_190
  misc_feature: Homolog of GI Number: 6690274 NR Desc: v
  misc_feature: Homolog of GI Number: 18396008 NR Desc: vesical transport v
  misc_feature: Homolog of GI Number: 6690276 NR Desc: v
  misc_feature: Homolog of GI Number: 27805772 NR Desc: Vesicle transport v
MSEVFEGYERQYCEASASLSRKCTAASALDGEKKKQKLSEIQSGVEEAESLIRKMDLEARNLQPSIKAGLLAKLREYKSDLNNVKSELKRISAPNARQATREELLESGMADTLAVSTDQRGRLMMTTERLNQSTDRIKESRRTMLETEELGVSILQDLHQQRQSLLHAHTTLHGVDDNIGKSKKILAAMSKRMDRNKWIIGGIITALVLAILLILYFKLAN

SEQ ID NO: 8335 - DNA, 920 bp, Zea mays
  misc_feature: Ceres CLONE ID no. 1449380
  misc_feature: Ceres CDNA ID no. 25446020
  CDS (114)..(710): REFERENCED BY SEQ ID NO: 8336
atcggtcgatccattggtcgagagagagaaacgcattgactgtttgacgctgctagtgcaatctgctctctcttttccggttaggttggttgaggacttcaggtgctggtgagatgggttctggtggcaggtgcctggccttggccgcgctgctgctcgtgagctgcgcgtcgacggcgaccgcggcgaagtacaccgtcggcgacacctccggctggaccaccggcgcggactacaccacctgggccagcgacaagaagatcaaagtcggcgacaccctcgtgttcaactacgccggcggggcgcacaacgtggcggaggtgagcgcggcggactacgcgtcctgctccgccgccaacgcgctcagcagcgacggcagcggcgccaccaccgtcgcgctcaagaccgcggggaagcactacttcatctgcggcgtcaccggccactgcagcaacggcatgaagctcgtggtcaacgtcgccgccgccgccgccgcctcgccgcccaaggcgtccccgaccccggacacccccgacaccccctccaccaccccgacgtccccgtccaccccagccgccacgcccaagaccccggcgaccgtgctcgcgccgccggccaagcagtcggaatccggcgccaccgggctcagagccacggcggtggctggcctgggcgccattgccgggcttgtggccgcggggctcttctagacgggcgaggccagggtggaggcagtgcagtgctgtacgttaggttgcatgtcgtcgatcagctcatcgatcgtgtcagtcgtttctcgtttgttgaggaggccatgtttcttttgacggaggggactagcttttgttgtggttggcacggtggttgggtgccttggattctatgttatgatttttttttttacaaaaaaaaaaaaaaaa

SEQ ID NO: 8336 - protein, 198 aa, Zea mays
  misc_feature: Ceres CLONE ID no. 1449380
  misc_feature: Ceres CDNA ID no. 25446020
  misc_feature (35)..(116): Pfam Name: Cu_bind_like PFAM Desc: Plastocyanin
  misc_feature: Homolog of GI Number: 51535359 NR Desc: putative blue copper protein
  misc_feature: Homolog of GI Number: 50912975 NR Desc: putative Blue copper protein precursor
  misc_feature: Homolog of GI Number: 562779 NR Desc: blue copper protein
  misc_feature: Homolog of GI Number: 50911371 NR Desc: putative uclacyanin 3
  misc_feature: Homolog of GI Number: 14140127 NR Desc: uclacyanin 3
  misc_feature: Homolog of GI Number: 50927428 NR Desc: OSJNBa0079A21.5
  misc_feature: Homolog of GI Number: 50946959 NR Desc: putative blue copper protein precursor
  misc_feature: Homolog of GI Number: 7576204 NR Desc: uclacyanin 3
  misc_feature: Homolog of GI Number: 25453522 NR Desc: blue copper
  misc_feature: Homolog of GI Number: 34910162 NR Desc: uclacyanin
MGSGGRCLALAALLLVSCASTATAAKYTVGDTSGWTTGADYTTWASDKKIKVGDTLVFNYAGGAHNVAEVSAADYASCSAANALSSDGSGATTVALKTAGKHYFICGVTGHCSNGMKLVVNVAAAAAASPPKASPTPDTPDTPSTTPTSPSTPAATPKTPATVLAPPAKQSESGATGLRATAVAGLGAIAGLVAAGLF

SEQ ID NO: 8337 - DNA, 834 bp, Zea mays
  misc_feature: Ceres CLONE ID no. 1449455
  misc_feature: Ceres CDNA ID no. 40351872
  CDS (46)..(660): REFERENCED BY SEQ ID NO: 8338
agtgacaattcctaccttgcgccggtgctttgcggctcttcgaaaatgggtgcgtacaagtatgtgtctgagctatggaggaagaaacaatccgatgtgatgaggtttgtgcagagggtgaggtgctgggagtacagacagcagccctcgattgtccgtctcgtcaggcctactcgtcccgacaaggcccgtcgtttgggttacaaggccaagcagggcttcgtggtgtaccgtgtccgtgtgagacgtggtggaagaaagaggccagtgccaaagggtattgtgtatggtaaacccacaaaccagggagttactcaactcaagttccagaggagcaagcgttctgttgctgaggagcgtgctggaaggaaactgggcggtctaagagtcgtcaactcctactggctcaacgaggattcgacgtacaagtactacgagatcatcttggttgacccggcacacaacgctgtgcgtaatgacccgaggatcaactggatctgcaacccggttcacaaacaccgtgagctcaggggacttacatcggagggaaagaagaacagaggactgcgcggaaagggtcacagaaaccacaagaaccgcccgtctcgcagagctacatggaagaagaataactccctctcccttcgtcgttaccgttgattcgcctttggccatcattgttactgctatcatcatcttcttctagaattcatgttgtcgcatgttgactttatgtttttacaaattttggagactatacgatggccttctaattaaaaaaaaaaaaaaaaaaaaaaaaaaaaaaaaaaaaaaaaaagaaaaaaaaaaaaaaaa

SEQ ID NO: 8338 - protein, 204 aa, Zea mays
  misc_feature: Ceres CLONE ID no. 1449455
  misc_feature: Ceres CDNA ID no. 40351872
  misc_feature (2)..(193): Pfam Name: Ribosomal_L15e PFAM Desc: Ribosomal L15
MGAYKYVSELWRKKQSDVMRFVQRVRCWEYRQQPSIVRLVRPTRPDKARRLGYKAKQGFVVYRVRVRRGGRKRPVPKGIVYGKPTNQGVTQLKFQRSKRSVAEERAGRKLGGLRVVNSYWLNEDSTYKYYEIILVDPAHNAVRNDPRINWICNPVHKHRELRGLTSEGKKNRGLRGKGHRNHKNRPSRRATWKKNNSLSLRRYR

SEQ ID NO: 8339 - DNA, 959 bp, Zea mays
  misc_feature: Ceres CLONE ID no. 1449463
  misc_feature: Ceres CDNA ID no. 25891094
  CDS (53)..(823): REFERENCED BY SEQ ID NO: 8340
atttttcgacttcagcgccgtccgtttggagaaaccacccatttggacgacgatggccccgaagaaaggagtcaaggttgctgccaagaagaagacggataaagtagcgaaccctctgtttgagagaaggcctaagcagtttggtataggtggagctcttcctccaaagaaggatctcactcgctacatcaaatggcccaagtccatccgtcttcaaaggcagaagaggatccttaagcagaggttgaaggtcccacctgcccttaaccagttcaccaagaccctcgacaagaatcttgcaaccagcctgttcaagatccttctcaagtacaggccagaggacaaagccgccaagaaagagcgccttgtcaagaaggctcaagctgaagctgagggaaagccttctgaatccaagaagcccattgttgtcaaatacggccttaaccatgtcacctacctcatcgagcagaacaaggcacagcttgttgtcattgctcatgatgtcgaccccatcgagttggtcgtctggttgcctgctctctgcaggaagatggaagtcccttactgcattgtcaaaggcaaatctcgtctcggagctgttgttcaccaaaagactgctgcttgcctgtgtttgaccactgtcaagaacgaggacaagcttgagtttagcaaagtccttgaagccatcaaggcaaacttcaacgacaagtacgaagagtacaggaagaaatggggaggaggcataatgggatccaaatctcaggccaagacaaaggccaaggaaagagttcttgcaaaggaggctgcccagaggaataactaattaaggaatctatcttttttgagtgtttagattgtctctcttttctttttagttggaactatcgtttgtttatggatatgttttgcacccgtcttcagacagttttcaagctttattatcaaaaaaaaaaaaaaaa

SEQ ID NO: 8340 - protein, 256 aa, Zea mays
  misc_feature: Ceres CLONE ID no. 1449463
  misc_feature: Ceres CDNA ID no. 25891094
  misc_feature (111)..(206): Pfam Name: Ribosomal_L7Ae PFAM Desc: Ribosomal protein L7Ae/L30e/S12e/Gadd45 family
  misc_feature: Homolog of GI Number: 23308199 NR Desc: At2g47610/T30B22.8
  misc_feature: Homolog of GI Number: 21592470 NR Desc: 60S RIBOSOMAL PROTEIN L7A protein
  misc_feature: Homolog of GI Number: 82400140 NR Desc: 60S ribosomal protein L7A
  misc_feature: Homolog of GI Number: 82623429 NR Desc: 60S ribosomal protein L7A
  misc_feature: Homolog of GI Number: 50944205 NR Desc: 60S ribosomal protein L7A
  misc_feature: Homolog of GI Number: 57900205 NR Desc: putative 60S ribosomal protein L7A
  misc_feature: Homolog of GI Number: 50904347 NR Desc: putative 60S ribosomal protein
  misc_feature: Homolog of GI Number: 61654624 NR Desc: L7a
  misc_feature: Homolog of GI Number: 54609203 NR Desc: ribosomal protein L7A
  misc_feature: Homolog of GI Number: 54643704 NR Desc: GA17314
  misc_feature: Useful for making plants with altered leaf shape eg curled leaves
  misc_feature: Useful for making plants with increased biomass and foliage
  misc_feature: Useful for making plants with increased biomass and foliage
  misc_feature: Useful for making shorter plants
MAPKKGVKVAAKKKTDKVANPLFERRPKQFGIGGALPPKKDLTRYIKWPKSIRLQRQKRILKQRLKVPPALNQFTKTLDKNLATSLFKILLKYRPEDKAAKKERLVKKAQAEAEGKPSESKKPIVVKYGLNHVTYLIEQNKAQLVVIAHDVDPIELVVWLPALCRKMEVPYCIVKGKSRLGAVVHQKTAACLCLTTVKNEDKLEFSKVLEAIKANFNDKYEEYRKKWGGGIMGSKSQAKTKAKERVLAKEAAQRNN

SEQ ID NO: 8341 - DNA, 950 bp, Zea mays
  misc_feature: Ceres CLONE ID no. 1449489
  misc_feature: Ceres CDNA ID no. 40351873
  CDS (523)..(771): REFERENCED BY SEQ ID NO: 8342
agcttccgtcacccacacagccggcgaggtggcttccatctcgctcgtgggccgatctcactgagcccccgccgttcttctctccacttcctgcgttctccagccgccgtcttcgctgataggctacgccgcccgctggcctgcgcgcgccgcagccttaccctgtgtgcaccctgttcctaaccctgcgtgtggccgccgccgactggcttgcgtgcgcccgcgcctccgcctaaccctgctagcttgcgcgcccaacgccagatgccctgagcccaccgccggctgtctgtgcacgcaagtgaacccatccggctacctgggcacgccatccgacctccctgcgaacctctgtatcggccgatattcctcaagaacacagtgcaaacagtaacacatcagcaagttcgagactgccaaaaatatgcaaggcagctggctggaaagaaccatcatttgactttgaagaacaaggacctccgcataacagagtattcacatgcaaggtgaccgtccacctggatgaactggtcaacaccattatggagtgtttcagcgaccccaaacctaagaagaaagctgcacgggagaacgccgcacaaggggcattatggtgccttgagcgctctggttatgtcaagtcatcttcagatgttcctgacctgtgcggccatcagcccttctgctagccagatctacccttgtaggagtattaatgttggtagacgggtgcagcttgttgctgtggcacagtggttatccatgcactgatgccatgatactcttgagaagttgagtcccttatgaatcttgagccggctgtgttggctcgtgtacctagtctctagctcgtttggttacatgcccaacgcctgcacttgtactgtgtaaaatactgaactccggcgatcaatgcaatcaaactggaactcctaaaaaaaaaaaaaaaa

SEQ ID NO: 8342 - protein, 82 aa, Zea mays
  misc_feature: Ceres CLONE ID no. 1449489
  misc_feature: Ceres CDNA ID no. 40351873
MNWSTPLWSVSATPNLRRKLHGRTPHKGHYGALSALVMSSHLQMFLTCAAISPSASQIYPCRSINVGRRVQLVAVAQWLSMH

SEQ ID NO: 8343 - DNA, 624 bp, Zea mays
  misc_feature: Ceres CLONE ID no. 1449648
  misc_feature: Ceres CDNA ID no. 25447065
  CDS (190)..(417): REFERENCED BY SEQ ID NO: 8344
gtagcaggcctaggcttttttgaggagcgcggactagggaggacgggacgggggggagagagaggcgcgtgcgttcgtggtcggtgccggtgcgtgcgtgcgtggcgtggtggccgctgccgtacgtgatccgtccaccccctctcctcttccgacgccggcgacagcgggaggtactcccggggaggaatggccgtggcaagggctccgctcggcgcggttgcgatggcggtggccgctctcgtcttcgccatactcatgcccgccgccgctgcggcgcaggcaccggcgcccgcgcccaccagcgacggcacatcaatcgacctggggattgcgtacatccttatgctggttgccctagtgctcacctacctgatccacccgcttgacgcgtcctccccctacaagctcttctgatccctgcgcctttccgtttggtcatgcggttaagggcgcgataggattttgagttaggcaacgtgcttaggtgaggctgggaggtttaggatgatgattgccatcatctggtcttgcttggtatgatgtattggaggctcgaagctgttggtgttctgattggttttgtatcggacggactccatgatcttaaaaaaaaaaaaaaaa

SEQ ID NO: 8344 - protein, 75 aa, Zea mays
  misc_feature: Ceres CLONE ID no. 1449648
  misc_feature: Ceres CDNA ID no. 25447065
MAVARAPLGAVAMAVAALVFAILMPAAAAAQAPAPAPTSDGTSIDLGIAYILMLVALVLTYLIHPLDASSPYKLF

SEQ ID NO: 8345 - DNA, 681 bp, Zea mays
  misc_feature: Ceres CLONE ID no. 1449764
  misc_feature: Ceres CDNA ID no. 40351874
  CDS (172)..(516): REFERENCED BY SEQ ID NO: 8346
atatatgatgatactacggctcagcccaacgatttccttttgcaaaccctgctccaactccgattcgtcactccaccctcgtcgcgccgccgccgccgccgccgcctgccgcgtccccggccagcctcgcggcccggtggtctgctagccacagcggagagaccaggagtcatggtgatccctccaccagcaagggcagctagagtcacccgtttcctcaagccctacctattgaggatgcatttctcaaacaagtatgtatctgctcaggtcgtccacaccccaacagcaactgttgcatgttctgcaagctcgcaggagaagctgttgagaccaaacatggagtcgacccgtgacgtcgcagcagctgcgaagattggaaagttgctcggcgagcgcctgctcctcaagggaatacctgcagtgtccatccacatgaagagagaacaaaagtaccatgggaaagtgaaggccgttatagattcagtcagagaagctggagtcaagctgttgtgattgcgatgttgaaaacattggacttagcatttgtgcaatggctgagctgtaatctttaagtgtttatcaatgcaaaatggctggacgttgctgttctgaaattctgggccaaatgttactcaggtcaataaaggactttgtttggacttaaaaaaaaaaaaaaaa

SEQ ID NO: 8346 - protein, 114 aa, Zea mays; identical to SEQ ID NO: 1042
  misc_feature: Ceres CLONE ID no. 1449764
  misc_feature: Ceres CDNA ID no. 40351874
  misc_feature (24)..(113): Pfam Name: Ribosomal_L18p PFAM Desc: Ribosomal L18p/L5e family

SEQ ID NO: 8347 - DNA, 942 bp, Zea mays
  misc_feature: Ceres CLONE ID no. 1449812
  misc_feature: Ceres CDNA ID no. 29191845
  CDS (102)..(722): REFERENCED BY SEQ ID NO: 8348
aatacagatcaggaacagcttcaagggaggacacaaagcgaagaaaacatcaggagatcgtagaatctctccgttgatcatttaatctacttgcgatacagatgccttcccgtagacgcactctcctcaaagtcatcatcctcggcgacagcggggtggggaaaacttctttgatgaaccaatatgttaataaaaagtttagcaaccagtacaaggccaccattggagctgacttcttgactaaggaagtccagtttgaagatcgtcttttcactttacagatatgggatacagctggacaggaaaggttccagagccttggtgtagctttctaccgaggtgctgattgctgtgtgcttgtatatgatgtcaactccatgaaatcatttgaaaacctcaacacctggcgagaagagtttctcatccaggctagtccatcggatcccgagaattttccctttgttcttatcggaaacaaggtcgacgtggacggtggaaacagcagagtggtttcagagaagaaggctaaagcttggtgtgcttcaaagggaaacattccctactttgagacctctgctaaggaaggcaccaatgtggaagaagctttccagtgcattgccaagaatgctctgaagaccggagaagaggaagagctgtacttgccagacacaatcgacgttgggacaagcaatcaaccgagatcttcagggtgtgaatgctaaaatgggtttttctctctccaagaagaatgcttttgagttcaacaatgtgttttggtgtctcctctcattacctctcttcaccagctatctctaaagtttattacatgctgtaaatttgttcttttgtgtgaaaaaaagaacccttcaaatccatggactacttgttcagtgttccttctttttcattatataaaaacttattttaaaaaaaaaaaaaaaa

SEQ ID NO: 8348 - protein, 206 aa, Zea mays
  misc_feature: Ceres CLONE ID no. 1449812
  misc_feature: Ceres CDNA ID no. 29191845
  misc_feature (3)..(176): Pfam Name: Arf PFAM Desc: ADP
  misc_feature: Homolog of GI Number: 34484308 NR Desc: putative GTP
  misc_feature: Homolog of GI Number: 16323368 NR Desc: putative GTP binding protein
  misc_feature: Homolog of GI Number: 21536526 NR Desc: GTP binding protein
  misc_feature: Homolog of GI Number: 1370186 NR Desc: RAB7C
  misc_feature: Homolog of GI Number: 20756 NR Desc: RAS
  misc_feature: Homolog of GI Number: 7438408 NR Desc: GTP
  misc_feature: Homolog of GI Number: 5430767 NR Desc: Putative RAB7 GTP
  misc_feature: Homolog of GI Number: 1155265 NR Desc: possible apospory
  misc_feature: Homolog of GI Number: 50932369 NR Desc: putative GTP
  misc_feature: Useful for delaying flowering time
  misc_feature: Useful for making ornamental plants with modified flowers
  misc_feature: Useful for making shorter plants
  misc_feature: Useful for modifying fruit shape and seed yield
  misc_feature: Useful for modifying plant structure
MPSRRRTLLKVIILGDSGVGKTSLMNQYVNKKFSNQYKATIGADFLTKEVQFEDRLFTLQIWDTAGQERFQSLGVAFYRGADCCVLVYDVNSMKSFENLNTWREEFLIQASPSDPENFPFVLIGNKVDVDGGNSRVVSEKKAKAWCASKGNIPYFETSAKEGTNVEEAFQCIAKNALKTGEEEELYLPDTIDVGTSNQPRSSGCEC

SEQ ID NO: 8349 - DNA, 1092 bp, Zea mays
  misc_feature: Ceres CLONE ID no. 1449969
  misc_feature: Ceres CDNA ID no. 25445966
  CDS (98)..(595): REFERENCED BY SEQ ID NO: 8350
aaaaaccaacagctgctactccagcatccacccatccatctctcatcttcttcttcttgcgaccaaacgagcgtctagctagctaaagattcgaacgatggccgttcttgtggcgaggcaggggcgcgagctgcagcggtacagcacgagcaccggcgggcgcatcgtggtggggtgcatcccgtaccggatgcgcgacggcggcgacagcgacggcgagggcgagctggaggtgctggtcatcagctcgcagaaggggcacggcatgatgtttcccaagggcgggtgggagctggacgagtccatggacgacgcggcacggcgcgaggccctcgaggaggccggcgtccgcggggagatgggcaaggtgctcggctgctggcactaccagagccgccgctaccagaccacctacgagggcatcatgtacccgctccgcgtcaccgacgagctccagcagtggcccgagatggcgtcccgcaagcgcacctgggcaactgtgcagcaggtcatggagggatgccagcactgctggatgcgggaggcgctcgaggagctcgtcgcccggcacgccaagccgcagtccgccctgtgagcagccaagcgggctggcggggtgactggagctcgagcgcgcgcgactctcgcgagaagaggccgggagcgagcaccaacgtccgtccgtcgtcctcgtcgtctctctctcttctttcctcggtgcagcggcaggcctgccggcgtgtccggtgtcgtacgacgaccggaccggagcatatatttggccgcccttgccggagagacggactgggatccacgatggcacgcgcgcgtcgacgctttcctgaggcgcagagtcgtcgtcgccgtcgtcgcggcaaataatggggacgaacttagaaatgtgtgaggtagagatcgaaagcgaacggggcaggaaaacttgtcaaaacactgccgaacgaacatgctcacgattctttccttaggctctgggagtaaaagatcaaattgtaaattaattctagtgaaaccgcttcttggtggcacgatcgatcaatcaaacgagtactgctactaaaaaaaaaaaaaaaa

SEQ ID NO: 8350 - protein, 165 aa, Zea mays
  misc_feature: Ceres CLONE ID no. 1449969
  misc_feature: Ceres CDNA ID no. 25445966
  misc_feature (21)..(157): Pfam Name: NUDIX PFAM Desc: NUDIX domain
  misc_feature: Homolog of GI Number: 50912493 NR Desc: MutT/nudix
  misc_feature: Homolog of GI Number: 52076410 NR Desc: MutT/nudix
  misc_feature: Homolog of GI Number: 27765008 NR Desc: At1g18300
  misc_feature: Homolog of GI Number: 31747031 NR Desc: MutT
  misc_feature: Homolog of GI Number: 50882190 NR Desc: MutT
  misc_feature: Homolog of GI Number: 8698735 NR Desc: Contains similarity to AP2/EREBP
  misc_feature: Homolog of GI Number: 34879779 NR Desc: similar to nudix
  misc_feature: Homolog of GI Number: 57112147 NR Desc:  similar to nudix
  misc_feature: Homolog of GI Number: 34879777 NR Desc: similar to nudix
  misc_feature: Useful for decreasing plant size
MAVLVARQGRELQRYSTSTGGRIVVGCIPYRMRDGGDSDGEGELEVLVISSQKGHGMMFPKGGWELDESMDDAARREALEEAGVRGEMGKVLGCWHYQSRRYQTTYEGIMYPLRVTDELQQWPEMASRKRTWATVQQVMEGCQHCWMREALEELVARHAKPQSAL

SEQ ID NO: 8351 - DNA, 715 bp, Zea mays
  misc_feature: Ceres CLONE ID no. 1450001
  misc_feature: Ceres CDNA ID no. 40351875
  CDS (61)..(249): REFERENCED BY SEQ ID NO: 8352
ctcggtcgtcttttccaaactgcaagatccaatccccaacaaaccctaacgcctgtgcccatgctcagggcgccgcctctggctaccgtgcctcttggttcggccccggcatctcctcccacgacgcctcctccggtctcctctctcgttccccaggcatttccattcaattattcagccataggatcccctcgtcgccgccgacgccgaactctgtgtcttccctcgtatcggccctatcctaggtaaaacattcagactctgaccctgtcacaaaactgcttgtccgccgccggcggcggctaccactcaccagcaagccatctcttggagggggtccgcttcctccttgactacccatcgacctctccgccctcgtggccttcgcaccggtgccaacagccgcgaaaaaaggtggcgtggatgccgtgctcgtgtcttcctctacgggttcctcaccaggctccctggattcaccaacacgaagatatcaagtgcagaatttacatttgcaccgtggacaccttttcctaccaagaggttattaccaagaatccttgatccaaatccaagacgttgagcatcatagcaatatttcaatagttaattatttttttataaaagaagtcaattgtgtttctacctttgaaggttcaaattttactgcaaaatcaacgagttcttggtggtgttggtatgaaaaaaaaaaaaaaaa

SEQ ID NO: 8352 - protein, 62 aa, Zea mays
  misc_feature: Ceres CLONE ID no. 1450001
  misc_feature: Ceres CDNA ID no. 40351875
MLRAPPLATVPLGSAPASPPTTPPPVSSLVPQAFPFNYSAIGSPRRRRRRTLCLPSYRPYPR

SEQ ID NO: 8353 - DNA, 964 bp, Zea mays
  misc_feature: Ceres CLONE ID no. 1450038
  misc_feature: Ceres CDNA ID no. 25446798
  CDS (144)..(602): REFERENCED BY SEQ ID NO: 8354
ccctctctctattttgttcttttttttcgtcgcttggcaaacagcttcgtctggcttccttgcctcggctaacggctaaaaaaaccagcgagcacgatttctcctctctctgagctctgcagtaaaggaagtgtgtagtcaccatggtccatttcaagaataggtatatggtggtggagatctttatagatgcaggtagaggtgaacaggaccctataatcctcacccaatttaatataacaaaagttataaaagacagcattcagctcaactttggtgagtgtggcctagctggatctcttggatcattgcaagttaagtatgtcaatcctgtaacgaagctctgcattgtccgcgtgtctcgcgaagaccaccagaaagtttgggctgctatgacgatggtgcggtgcattgggaagatccccgtttcgttcaacttgctcgacatgagtggaagcatcagggcttgcaagaaagctgcattggagtgcgatgaagcgaaatttgagcaatacaagctggttgcaggtgattgtatcacggcagagatcacccagtctgtagagaagtgctttgagaagatcagaggactagagagctaagcagaagaattgacatcatgtccacccacactcggatcctaaaacctgctgaccctgcaccacatccgtgatcacgtcacaccacaagttgtgtgtccagcgcccaccacagcaacggcctcttgctgccagcagcctccgtgcctccagcagctctcctctccaaggaaaagtctgaagtccgcaaccaaacaagtgttctgcagctgctctttgccgttggttgaagtctgcaaccaaacaagtgttatgcagctgctctttgccgttggttggagttcttggcttcacactttcagaaagaattcatgtatacataaaatttattatatagagagtttgcttcaaaaaaaaaaaaaaaa

SEQ ID NO: 8354 - protein, 152 aa, Zea mays; identical to SEQ ID NO: 4722
  misc_feature: Ceres CLONE ID no. 1450038
  misc_feature: Ceres CDNA ID no. 25446798
  misc_feature (7)..(116): Pfam Name: RNase_P_Rpp14 PFAM Desc: Rpp14 family
  misc_feature: Homolog of GI Number: 38343977 NR Desc: OSJNBa0041M21.1
  misc_feature: Homolog of GI Number: 50922603 NR Desc: OSJNBb0068N06.26
  misc_feature: Homolog of GI Number: 53850511 NR Desc: At1g04635
  misc_feature: Homolog of GI Number: 19075979 NR Desc: putative pre
  misc_feature: Homolog of GI Number: 20270249 NR Desc: processing of precursor 5
  misc_feature: Homolog of GI Number: 72057243 NR Desc:  similar to processing of precursor 5
  misc_feature: Homolog of GI Number: 62897973 NR Desc: processing of precursor 5
  misc_feature: Homolog of GI Number: 27666062 NR Desc: similar to ribonuclease P protein 3
  misc_feature: Useful for making plants that grow better in shade
  misc_feature: Useful for making plants with increased biomass

SEQ ID NO: 8355 - DNA, 953 bp, Zea mays
  misc_feature: Ceres CLONE ID no. 1450085
  misc_feature: Ceres CDNA ID no. 29191327
  CDS (81)..(719): REFERENCED BY SEQ ID NO: 8356
atcccatcccatccgcagcggctttacctaccgagaagaagagagaaaaaaggttcgagtgcgttgcagagtgagaagagatggctccggtgaagctgtacggcgcgaccctgtcgtggaacgtcaccaggtgcgtggcggcgctggaggaggccggcgtcgagtacgagctcgtccccatcaacttcggcaccggcgagcacaagagccccgaccacctcgccaggaacccctttggccaggtgccagctttgcaggatggtgacttgtacgtcttcgaatcacgtgctatttgcaagtatgcgtgccgcaagaacaagccagagctgttgaaggagggcgacatcaaggagtcagcaatggtggatgtgtggctcgaggtggaggcccatcagtacaccgccgctctgagccccattctcttcgagtgccttatccatcctatgcttgggggagccactgaccagaaggtcattgacgacaaccttgttaagatcaagaacgtgctggcagtgtacgaggcgcacctgagcaagtccaagtacctggctggagactccctcagtcttgcggaccttaaccatgtgtctgtcaccctgtgcttggcggctacaccctacgcatctctgttcgacgcgtacccgcatgtgaaggcctggtggactgacctgttggcgaggccgtccgtccagaaggtcgctgcgctgatgaagccatgatcttagtttctggcgctcgttcgtcgcgaaataagccgaggtgtgtcccccctgatgtgtgcctgtacgagtgtgtgttcttgtgatgtctcctcgtgttgattgttcaggcttgtgcttgcgatcctgtctaatcttgtactgaaatgagcattcctgtgctctggtttaataataaattgtgcccaggtatttatctcaactttaatattttttctaaaaaaaaaaaaaaaa

SEQ ID NO: 8356 - protein, 212 aa, Zea mays; identical to SEQ ID NO: 7324
  misc_feature: Ceres CLONE ID no. 1450085
  misc_feature: Ceres CDNA ID no. 29191327
  misc_feature (4)..(77): Pfam Name: GST_N PFAM Desc: Glutathione S
  misc_feature (93)..(201): Pfam Name: GST_C PFAM Desc: Glutathione S
  misc_feature: Homolog of GI Number: 5923877 NR Desc: glutathione S
  misc_feature: Homolog of GI Number: 23504749 NR Desc: glutathione transferase F1
  misc_feature: Homolog of GI Number: 21212950 NR Desc: glutathione
  misc_feature: Homolog of GI Number: 44894209 NR Desc: glutathione s
  misc_feature: Homolog of GI Number: 554565 NR Desc: glutathione S
  misc_feature: Homolog of GI Number: 168491 NR Desc: glutathione S
  misc_feature: Homolog of GI Number: 3891708 NR Desc: Chain D
  misc_feature: Homolog of GI Number: 56412207 NR Desc: glutathione S
  misc_feature: Homolog of GI Number: 66615 NR Desc: glutathione transferase
  misc_feature: Homolog of GI Number: 21790 NR Desc: glutathione transferase
  misc_feature: Useful for making larger plants

SEQ ID NO: 8357 - DNA, 648 bp, Zea mays
  misc_feature: Ceres CLONE ID no. 1450112
  misc_feature: Ceres CDNA ID no. 25447066
  CDS (24)..(227): REFERENCED BY SEQ ID NO: 8358
caaaaactggtgggttgttgaatatggaagctgccaaatcaggaataaaaggtgtgatgtctataaatgctgagatatttcaaatcacaccaaattatcatctcgtggagatcaagaaaatcaatggtgacatccttgagtatcataactttatgaaccaaagcatgagaccggcactagaagatattgtgtgggcatggcatggtgaacaacctgacgagaagtagactcatcaactttagataatcgtcaacctacaaccttagatattatgacaggtgtaatgctattagaaagtgtatcaggccaaaaaaaatgtcatgggacttaataatattacttctatgttgtttttattctcatgctcatgctgtcatgcagtaaagtgttctttctattgaccatactactggaacatggtttctatccgaaggaacattttgataatcaattactttgattggtgaaaaaaatagatattagagaatgggtgaacctaatagagctgctttattgtatgaattttctgtggtaacgttagctagaaagttctttactctagtaatttattaagaaagtgatgcctgatgtgttgcagaagttgtttaggcaactactagtccttatactataaaaaaaaaaaaaaaa

SEQ ID NO: 8358 - protein, 67 aa, Zea mays
  misc_feature: Ceres CLONE ID no. 1450112
  misc_feature: Ceres CDNA ID no. 25447066
  misc_feature: Homolog of GI Number: 50939993 NR Desc: putative Serine/threonine Kinase
  misc_feature: Homolog of GI Number: 55168043 NR Desc: putative serine/threonine protein kinase
  misc_feature: Homolog of GI Number: 23428550 NR Desc: Serine/threonine Kinase
  misc_feature: Homolog of GI Number: 8777339 NR Desc: serine/threonine protein kinase
  misc_feature: Homolog of GI Number: 21928023 NR Desc: AT5g07070/T28J14_10
  misc_feature: Homolog of GI Number: 50905393 NR Desc: putative Serine/threonine Kinase
  misc_feature: Homolog of GI Number: 9280636 NR Desc: CBL
  misc_feature: Homolog of GI Number: 9759563 NR Desc: serine/threonine protein kinase
  misc_feature: Homolog of GI Number: 57900267 NR Desc: putative serine/threonine Kinase
  misc_feature: Homolog of GI Number: 34907870 NR Desc: putative serine/threonine protein kinase
MEAAKSGIKGVMSINAEIFQITPNYHLVEIKKINGDILEYHNFMNQSMRPALEDIVWAWHGEQPDEK

SEQ ID NO: 8359 - DNA, 730 bp, Zea mays
  misc_feature: Ceres CLONE ID no. 1450114
  misc_feature: Ceres CDNA ID no. 36706553
  CDS (84)..(494): REFERENCED BY SEQ ID NO: 8360
actattcgcctttccgcaccctcttccgtcgccgtcgattcgaacctcccccaaatcagcagcagtcgaccggaggcgccgccatggcccgtaccaagcagaccgcccgcaagtccaccggcggcaaggcgccccgcaagcagctcgccaccaaggcggcgaggaagtcggcgccgaccaccggcggagtgaagaaaccccaccgctacaggccggggaccgtggcgctccgggagatccgcaagtaccagaagagcacggagctgctgatccgcaagctgcctttccagcgcctggtccgcgagatcgcgcaggacttcaagacggacctccgcttccagtcccacgccgtgctggccctccaggaggcggccgaggcgtacctcgtcgggctgttcgaggacaccaacctgtgcgccatccacgccaagcgcgtcaccatcatgcccaaggacatccagctcgcccgccgcatccgtggcgagagggcctaagctgtcctctccgtgaacgacggtagtggatcgggatgagttgattccggttgtagtttgttcctaattgctgttctaggtcttaagcttttgtgtagaagaaatatggttgttaggtatgagtaagacgaaccaacttgatatgtgatgttccttttggtttgcgatgaagcaaacgtatgtctatgttgaagacctcagaaccattgttgttcgctgcaaaaaacaaaaaaaaa

SEQ ID NO: 8360 - protein, 136 aa, Zea mays; identical to SEQ ID NO: 30
  misc_feature: Ceres CLONE ID no. 1450114
  misc_feature: Ceres CDNA ID no. 36706553
  misc_feature (58)..(134): Pfam Name: Histone PFAM Desc: Core histone H2A/H2B/H3/H4
  misc_feature: Homolog of GI Number: 37991915 NR Desc: histone H3.2 protein
  misc_feature: Homolog of GI Number: 18698662 NR Desc: disease
  misc_feature: Homolog of GI Number: 62642119 NR Desc: histone 3
  misc_feature: Homolog of GI Number: 57098927 NR Desc:  similar to histone protein Hist2h3c1
  misc_feature: Homolog of GI Number: 73808026 NR Desc: histone H3
  misc_feature: Homolog of GI Number: 61840887 NR Desc:  similar to histone 1
  misc_feature: Homolog of GI Number: 55626038 NR Desc:  similar to HIST2H3C protein
  misc_feature: Homolog of GI Number: 50728592 NR Desc:  similar to histone protein Hist2h3c1
  misc_feature: Homolog of GI Number: 34858260 NR Desc: similar to histone protein Hist2h3c1
  misc_feature: Homolog of GI Number: 50729226 NR Desc:  similar to histone protein Hist2h3c1

SEQ ID NO: 8361 - DNA, 697 bp, Zea mays
  misc_feature: Ceres CLONE ID no. 1450193
  misc_feature: Ceres CDNA ID no. 40041419
  CDS (91)..(387): REFERENCED BY SEQ ID NO: 8362
gcctcgctcccgtcgcttgacctgtactgtccccacggagatcacgacacgaaccgagcaagaaccgcacgagccgagcccagcagcaggatggcggcggcggcgagcgggaaggcgccgtcgctggtggtggcggcgagcatgggcgcggtggaggcgctcaaggaccaggcgggcctgtgccgctgggactacgcgctgcgctcgctctaccaccgcgccgccgccgcgccccggatccgcgcgctgtccgccgcgctctcggactccgtgtccgtgccggcggacgcgcccccgcgggcgtcgcggccaccgcccccgccggcgccgcgggacgcggacaggatgcgcaaggcctaccacctcgtgtgctggggccccaactgatcggcgggcgggcgccgactgcatgcctgtagctgtagctgtagcgcgctgaccaaggcctggctgggtgtggttgtctgtagcttcttcttcttgttgttgtcgcctctcgtgcgtgtgtgtgtgtgtgttgctctcgctccgtccatcgattccatccgtgtccgtcggcagatgagatgagatgagaatgagaatgagaaggcgatgtgaatgctcttccgtcgtttgggttccggagccgaggattctctaaacaaaaccaattttactacgtgcgctgctgcgtacattaaaaaaaaaaaaaaaa

SEQ ID NO: 8362 - protein, 98 aa, Zea mays
  misc_feature: Ceres CLONE ID no. 1450193
  misc_feature: Ceres CDNA ID no. 40041419
  misc_feature: Homolog of GI Number: 50928991 NR Desc: OSJNBa0043L09.19
  misc_feature: Homolog of GI Number: 50928999 NR Desc: OSJNBa0043L09.23
  misc_feature: Homolog of GI Number: 50929001 NR Desc: OSJNBa0043L09.24
  misc_feature: Homolog of GI Number: 50929003 NR Desc: OSJNBa0043L09.25
  misc_feature: Homolog of GI Number: 19320 NR Desc: wound induced protein
  misc_feature: Homolog of GI Number: 50928989 NR Desc: OSJNBa0043L09.18
  misc_feature: Homolog of GI Number: 21553934 NR Desc: probable wound
MAAAASGKAPSLVVAASMGAVEALKDQAGLCRWDYALRSLYHRAAAAPRIRALSAALSDSVSVPADAPPRASRPPPPPAPRDADRMRKAYHLVCWGPN

SEQ ID NO: 8363 - DNA, 862 bp, Zea mays
  misc_feature: Ceres CLONE ID no. 1450196
  misc_feature: Ceres CDNA ID no. 25445888
  CDS (123)..(596): REFERENCED BY SEQ ID NO: 8364
aaaaagaaagtctgaagaaagcaccgaccaaagagctaccacaaatcaatcgtcacccttccgcttccaacaccagccaaatcgtcgattcctttcgccagcagctcgaatccccacagacaatgtcgctgatccgccgcagcaacgtgttcgaccccttctccctcgacttcttcgacccattcgaaggcttccccttcggctccggcaacagcagcagcggcagtctcgtcccgcgcacctcctccgacacagcggccttcgcgggcgcgcgcatcgactggaaggagacgtccgaggcgcacgtgttcaaggcggacgtgccggggctgaagaaggaggaggtgaaggtggaggtggaggacggcaacatcctccagatcagcggcgagcggaagaaggagcaggaggagaagaccgacacctggcaccgcgtggagcgcagcagcggcaagttcctgcgcaggttctgcctcccggacaacgccaaggcggagcaggtgaaggcgtccatggagaacggcgtgctcaccgtcaccgtgcccaaggaggaggccaagaagcccgaggtcaagtccatccagatctcaggctaggcgtcggcgtgctcgctgctgcgcgatgagatgactgcagtctgcagagcagcggtgtggagtttcgacccggtcgtcgcgatgaaataaaatcaggggtaaaatcagagtccggctgtctagtgctctagtgttgtgtgcgaatggtccgatgttgcagtcagtgttttgagcctctcgcgtctgtgttttgagtccactttgttcatcagtctgtacttattccatcagcaaccaaattaaatccattaaaaaaaaaaaaaaaa

SEQ ID NO: 8364 - protein, 157 aa, Zea mays
  misc_feature: Ceres CLONE ID no. 1450196
  misc_feature: Ceres CDNA ID no. 25445888
  misc_feature (53)..(156): Pfam Name: HSP20 PFAM Desc: Hsp20/alpha crystallin family
  misc_feature: Homolog of GI Number: 34902016 NR Desc: putative class I low
  misc_feature: Homolog of GI Number: 1122317 NR Desc: heat shock protein 17.9
  misc_feature: Homolog of GI Number: 218251 NR Desc: low molecular weight heat shock protein
  misc_feature: Homolog of GI Number: 1815662 NR Desc: low molecular mass heat shock protein Oshsp18.0
  misc_feature: Homolog of GI Number: 34902028 NR Desc: shock protein
  misc_feature: Homolog of GI Number: 169801 NR Desc: LMW heat shock protein
  misc_feature: Homolog of GI Number: 1213073 NR Desc: heat shock protein 17.8
  misc_feature: Homolog of GI Number: 25044839 NR Desc: class
  misc_feature: Homolog of GI Number: 8671873 NR Desc: Contains similarity to 17.6 KD class I heat shock protein from Arabidopsis thaliana giP13853
  misc_feature: Homolog of GI Number: 16930753 NR Desc: small heat shock protein
  misc_feature: Useful for delaying flowering time
  misc_feature: Useful for increasing chlorophyll and photosynthetic capacity
  misc_feature: Useful for making ornamental plants with modified flowers
  misc_feature: Useful for making ornamental plants with modified leaves
  misc_feature: Useful for making plants with increased biomass
  misc_feature: Useful for making plants with increased biomass and foliage
  misc_feature: Useful for making plants with increased biomass and foliage
  misc_feature: Useful for making plants with increased biomass and foliage
  misc_feature: Useful for making shorter plants
  misc_feature: Useful for making stronger plants
MSLIRRSNVFDPFSLDFFDPFEGFPFGSGNSSSGSLVPRTSSDTAAFAGARIDWKETSEAHVFKADVPGLKKEEVKVEVEDGNILQISGERKKEQEEKTDTWHRVERSSGKFLRRFCLPDNAKAEQVKASMENGVLTVTVPKEEAKKPEVKSIQISG

SEQ ID NO: 8365 - DNA, 579 bp, Zea mays
  misc_feature: Ceres CLONE ID no. 1450225
  misc_feature: Ceres CDNA ID no. 36706554
  CDS (25)..(447): REFERENCED BY SEQ ID NO: 8366
aaggagagctgctactctgcaaccatgtcgaagcgaggaagaggaggaacctctggtaacaagttcaggatgtcactgggtcttccagtggcagccaccgtgaactgtgctgacaacaccggagccaagaacctttacatcatctccgttaaaggtatcaagggtcgtctcaaccgtctgccatcagcctgtgttggtgacatggttatggctaccgtcaagaagggtaaacctgatctccgtaagaaggttctgcctgctgtcattgttaggcagaggaagccttggcgccgaaaggatggtgtcttcatgtacttcgaggataatgctggtgtcattgtcaatcccaagggtgaaatgaagggatctgctatcactggaccaatcggaaaggagtgtgctgacctgtggccaaggatcgctagtgctgcaaacgctatcgtttagaatctatctttgtgtgcttgttgaacttgtcactgttgaggatgctttgtttttgtcatagacttgttatgcttaatcttgattctggtttctataaatttttggtttctcttgccaaaaaaaaaaaaaaaa

SEQ ID NO: 8366 - protein, 140 aa, Zea mays [sequence omitted]

SEQ ID NO: 8367 - DNA, 508 bp, Zea mays
  misc_feature: Ceres CLONE ID no. 1450262
  misc_feature: Ceres CDNA ID no. 36706887
  CDS (78)..(353): REFERENCED BY SEQ ID NO: 8368
atactatatattagacataccggtattattgttcttagacatcgcacaagactcttgtcaacaagaccaacaacaggatgaggactgccgtgcatgctgcgctttgcattgtgcttgtgataatgtcttcaacactgtcatcttgcgaggacgatgagaaggtatctatcgcatgtgacacaggatgcaatgccgcgatctcccgtctcaaatgcttcctgatggcctattctgaagggaaagtgttggtcagcagcaactgcgaaacgccgaccaggtgcggctgcgtgtttcgtcacaaacaagatgcagcccttatcgccggcgacgttggcaacaaaaagggatactgatggcagacgtgtacttcttggttgaataatactgctagaattaatatgggcaccaacgaaatatctataatgttattcttcagtgtaatgcttccagcatgttctgatttagtttaactaaatatctatctttccccccaaaaaaaaaaaaaaaa

SEQ ID NO: 8368 - protein, 91 aa, Zea mays; identical to SEQ ID NO: 5620
  misc_feature: Ceres CLONE ID no. 1450262
  misc_feature: Ceres CDNA ID no. 36706887

SEQ ID NO: 8369 - DNA, 895 bp, Zea mays
  misc_feature: Ceres CLONE ID no. 1450302
  misc_feature: Ceres CDNA ID no. 29191566
  CDS (117)..(536): REFERENCED BY SEQ ID NO: 8370
acccaacccccccacccccctcccccagcagccgccgcagccgacacaagggagcgaggaggaactcgagaggaaggaaacccgtcgaacccgtctccgactccggggcctccgacatggcgaacgctgcgtcaggcatggctgtggacgacgaatgcaagctcaagttcctcgagctgaaggcgaagcgaacccaccgcttcatcatctacaagatagacgacaagaagaagatggttgttgtggagaaggtcggcgagcctgccctgaactacgaggactttgccgccagcctccccaccaatgaatgcagatatgcgatattcgactacgactttgtcaccgaggagaactgccagaagagcaagatattcttcgtcgcatggtctcctgacaccgcacgcgtgaggagcaagatgatctacgcgagctccaaggagaggttcaagagggagctcgacggcatccaggtggagctgcaggcgacagacccgaccgaggttggcttcgatgtgatccaaggccgtgccaactgagcaccatagctgtgctgctgcttaccttaagtatgagcctctgatgaggatttagcgcgcttgccgaggctggtcatgagctgtttaccatgaggcaattgtgattgagttgccagtatgtaccacctaaggaagatgtaagctgtgactggtgcgacgacaaatgtatcctttctggttgttgattcgtgggtcctgatatccccccttcttacctgctaagatcagttgcatcttcatggtaaatttttggtagattcttgctgtgagctttcatactaggatcactggttcttgaaactaatgatgcccactgaggcttattatgcaacacattttgatcaaaaaaaaaaaaaaaa

SEQ ID NO: 8370 - protein, 139 aa, Zea mays
  misc_feature: Ceres CLONE ID no. 1450302
  misc_feature: Ceres CDNA ID no. 29191566
  misc_feature: The plant senesces significantly late copared to wild-type.
  misc_feature: Useful for making plants with modulated time to senescence
  misc_feature (12)..(139): Pfam Name: Cofilin_ADF PFAM Desc: Cofilin/tropomyosin
  misc_feature: Homolog of GI Number: 50931103 NR Desc: putative actin
  misc_feature: Homolog of GI Number: 14906219 NR Desc: actin
  misc_feature: Homolog of GI Number: 21536985 NR Desc: actin depolymerizing factor 4
  misc_feature: Homolog of GI Number: 38564721 NR Desc: putative actin
  misc_feature: Homolog of GI Number: 4185511 NR Desc: actin depolymerizing factor 4
  misc_feature: Homolog of GI Number: 17065584 NR Desc: putative actin depolymerizing factor 1
  misc_feature: Homolog of GI Number: 14906210 NR Desc: actin
  misc_feature: Homolog of GI Number: 68166241 NR Desc: actin depolymerizing factor
  misc_feature: Homolog of GI Number: 19699262 NR Desc: At1g05180/YUP8H12_21
  misc_feature: Homolog of GI Number: 23198338 NR Desc: actin depolymerizing factor 2
MANAASGMAVDDECKLKFLELKAKRTHRFIIYKIDDKKKMVVVEKVGEPALNYEDFAASLPTNECRYAIFDYDFVTEENCQKSKIFFVAWSPDTARVRSKMIYASSKERFKRELDGIQVELQATDPTEVGFDVIQGRAN

SEQ ID NO: 8371 - DNA, 717 bp, Zea mays
  misc_feature: Ceres CLONE ID no. 1450326
  misc_feature: Ceres CDNA ID no. 40351876
  CDS (65)..(472): REFERENCED BY SEQ ID NO: 8372
ttgagaccgagcgagcgagctagggtttggcgcggcggcggaaggaaggaagggagtcgggaagatgagccgcagccttgggatcccggtgaagctgctgcacgaggcggcggggcacgtggtgacggtggagctcaagaccggcgaggtctaccggggctccatgatcgagtgcgaggacaactggaactgccagatcgagaacatcaccttcaccgccaaggacggcaaggtgtcgcagctggagcacgtcttcatcaggggcagcagggtcaggttcatgatcatccccgacatgctcaagaacgcacccatgttcaagcgcctcgaggccaggataaggggcaaggggtcggccatcggcgtcgggcgtggccgtgctgtcgcgatgcgtgcccgggctgctggtggtcgtggtggtggcccccctgttggaggaggacgaggtggcgcgcctccggtgaggaggtagatgatgtgaggtgagccgctgcctggtcgaggaaggaaggaagtcgctgctgtcttctttactggcgaaacaaactgctgcggcagccatgcttgtgagcttcttatgatgtgcctctagtttagtttgtcggtttgtgcgaaccgattttctctatgtatgatgatgatgtattgctgttgttagctgtaaacatgagttgacttgatggctgtcattggaatggattaaaaaaaaaaaaaaaa

SEQ ID NO: 8372 - protein, 135 aa, Zea mays
  misc_feature: Ceres CLONE ID no. 1450326
  misc_feature: Ceres CDNA ID no. 40351876
  misc_feature (10)..(75): Pfam Name: LSM PFAM Desc: LSM domain
MSRSLGIPVKLLHEAAGHVVTVELKTGEVYRGSMIECEDNWNCQIENITFTAKDGKVSQLEHVFIRGSRVRFMIIPDMLKNAPMFKRLEARIRGKGSAIGVGRGRAVAMRARAAGGRGGGPPVGGGRGGAPPVRR

SEQ ID NO: 8373 - DNA, 685 bp, Zea mays
  misc_feature: Ceres CLONE ID no. 1450384
  misc_feature: Ceres CDNA ID no. 25891281
  CDS (80)..(505): REFERENCED BY SEQ ID NO: 8374
accaagcaaacccaaatcaattccacttactagttactactactacatcgatctcagtttagcacctctagaaaaatcaatggcgcccaaggcagcagagaagaagcccgcggagaagaagccggccgagaaagcaccggcggagaagaagccaaaggccgggaagaagctcccgaaggatccctccgccgtcgccggagacaagaagaagaagcggtccaagaagagcgtcgagacatacaagatctacatcttcaaggtgctgaagcaggtccaccccgacatcgggatctcgagcaaagccatggggatcatgaacagtttcatcaacgacatcttcgagaagcttgccggcgagtcttccaagctcgcgaggtacaacaagaagccgaccatcacttccagggagattcagacggcggtgagactcgtcttgcctggagagctggcgaaacacgctgtttccgaagggaccaaggcggtgactaagttcacgagctcctgaactgtctggaatgtctgaattagagtttctttgtagaatgtcctttctcttgtgttttgcaatctcgtgttttgtaaagtactgcgaattggtatgtttggaatctaatgtcttgtctttgtatctttaatgcgttgagattgtgagatctactgatgaagtttaaaaaaaaaaaaaaaa

SEQ ID NO: 8374 - protein, 141 aa, Zea mays; identical to SEQ ID NO: 5910
  misc_feature: Ceres CLONE ID no. 1450384
  misc_feature: Ceres CDNA ID no. 25891281
  misc_feature: No seed is being produced by the plant
  misc_feature: The plant flowers significantly late compared to wild-type.
  misc_feature: Useful for biocontainment applications
  misc_feature: Useful for making plants with modulated flowering time
  misc_feature (48)..(120): Pfam Name: Histone PFAM Desc: Core histone H2A/H2B/H3/H4
  misc_feature: Homolog of GI Number: 2558962 NR Desc: histone H2B1
  misc_feature: Homolog of GI Number: 3021485 NR Desc: histone H2B
  misc_feature: Homolog of GI Number: 10177235 NR Desc: histone H2B like protein
  misc_feature: Homolog of GI Number: 21536602 NR Desc: histone H2B
  misc_feature: Homolog of GI Number: 1617013 NR Desc: histone H2B like protein
  misc_feature: Homolog of GI Number: 82400146 NR Desc: histone H2B
  misc_feature: Homolog of GI Number: 30102580 NR Desc: At3g45980
  misc_feature: Homolog of GI Number: 21592734 NR Desc: putative histone H2B
  misc_feature: Homolog of GI Number: 2746719 NR Desc: histone H2B
  misc_feature: Homolog of GI Number: 21617908 NR Desc: histone H2B
  misc_feature: Useful for delaying flowering time
  misc_feature: Useful for increasing chlorophyll and photosynthetic capacity
  misc_feature: Useful for making plants with altered leaf shape eg curled leaves
  misc_feature: Useful for making plants with altered leaf shape eg curled leaves
  misc_feature: Useful for making plants with increased biomass and foliage
  misc_feature: Useful for making plants with increased biomass and foliage
  misc_feature: Useful for sterility
  misc_feature: Useful for sterility

SEQ ID NO: 8375 - DNA, 696 bp, Zea mays
  misc_feature: Ceres CLONE ID no. 1450440
  misc_feature: Ceres CDNA ID no. 40351877
  CDS (1)..(270): REFERENCED BY SEQ ID NO: 8376
attcgagacggcctactgttgtggtccagtgatccagtctgcgtctctttccccgtcgtggtgggttccgatccaatcgacgtcgacgactccgcagccaccgctcctctcctctcgtcgcttcttctatctctcggcgtcgaatctcatccggccagtgaccacactctactagccgcccggaaggagttcttccgggattcgagccgttgctgccctcacctctgcaggcccagcgtcgagcggagatccaatcggaaattgaactgacttcatcttttgtcggtgtgagtcagatgtcatcctcggcgcagacacttgccagtgggttcctggctgtcatatcagttaatctagtgatcggcttttacatattcatggcgatgaaggagactccacaccaagagccacagccagatcccaccttcctggagaaagccaaagcgagtatcaaccagccaacatcctctcgagtgagtgatgattccaaggggaagggaaaggtcgagtaagctgtagcatgttggcttaggtctcgtgtatgttaagtgcatgttatttaggaggaatagttatgccacaccatcacaaggaccgcaacctttcacaatttatgattttgctgtaaatcttgacagttatggctatggagcaatatgaagttgaaccttttgtacctaaaaaaaaaaaaaaaaa

SEQ ID NO: 8376 - protein, 71 aa, Zea mays
  misc_feature: Ceres CLONE ID no. 1450440
  misc_feature: Ceres CDNA ID no. 40351877
MSSSAQTLASGFLAVISVNLVIGFYIFMAMKETPHQEPQPDPTFLEKAKASINQPTSSRVSDDSKGKGKVE

SEQ ID NO: 8377 - DNA, 1085 bp, Zea mays
  misc_feature: Ceres CLONE ID no. 1450475
  misc_feature: Ceres CDNA ID no. 25447067
  CDS (176)..(820): REFERENCED BY SEQ ID NO: 8378
ctctaggtttccaccgccgccgcctcccctctactcctcgctatcggccacgctccgcctcctttcctctgccccgcaactccgccgtcctccgcgccgccgcctcgccggacctccgccgccccgacctcccctcctcctcctccggagctacatagaggtttgattgagcgagatggggttgagggacaagaagaggaaccagaggcgcgtgctctcgcgccgctcggctggtcccaagaccggcgagggcaaggatttcctgccgctggaggggaaagagcagagggtccgggagaagaagcagcccgaggagccggagagcacggccaccgtcctctacatcggccatatcccccacggtttctacgaggaccagatgcaaggtttctttcagcagtttggggctgttaagagggtcagggttgcccggaaccgcaagacagggaagtctaagcattatggattcattgagttcgagaaccctgaggtggcgaagattgtggctgatgagatgaataactacctgttgtttgagcacactctgcagattgcgcctgtcccgccggagaaagttcatgccaaattatggaaaggtgtgcgtaagggatttataccagttgaccgagtagcaattgaacggaggcggcttagtaaggataaaacagtggaagagcacaagaagatgctcgaaggaattgtaaagcgggatgagaagcgccgcaaaagaatcaaggctgctggtatcgattacgagtgtccagcccttatcggaagcgttcagccttcagctaagaagatcaagtttgatgaggattagctatagagaaggcagatggatctttctttatcgggtaggagtgacgggactctgctgagttaacctggctggtccattttagctggggatgagatggcgatttcgtactttggctttgtatctgtgtttggtcgatgttatgtaagttgaatgactggtttatgttggtgaagaagcataaagctgtggtggaaaattaatgaacttgctttctttcctgctccctgatttacatcaaaaaaaaaaagcaaaaaaaaaaaaaaaa

SEQ ID NO: 8378 - protein, 214 aa, Zea mays
  misc_feature: Ceres CLONE ID no. 1450475
  misc_feature: Ceres CDNA ID no. 25447067
  misc_feature (55)..(126): Pfam Name: RRM_1 PFAM Desc: RNA recognition motif.
  misc_feature: Homolog of GI Number: 50945703 NR Desc: putative RNA binding protein
  misc_feature: Homolog of GI Number: 46367676 NR Desc: TA8 protein
  misc_feature: Homolog of GI Number: 18652180 NR Desc: RNA binding protein
  misc_feature: Homolog of GI Number: 82623439 NR Desc: RNA binding protein
  misc_feature: Homolog of GI Number: 21689805 NR Desc: putative RNA binding protein
  misc_feature: Homolog of GI Number: 57225995 NR Desc: ribosomal large subunit biogenesis
  misc_feature: Homolog of GI Number: 66849823 NR Desc: rna binding protein
  misc_feature: Homolog of GI Number: 47940061 NR Desc: Mki67
  misc_feature: Homolog of GI Number: 27545352 NR Desc: mki67
  misc_feature: Homolog of GI Number: 49257917 NR Desc: MKI67
MGLRDKKRNQRRVLSRRSAGPKTGEGKDFLPLEGKEQRVREKKQPEEPESTATVLYIGHIPHGFYEDQMQGFFQQFGAVKRVRVARNRKTGKSKHYGFIEFENPEVAKIVADEMNNYLLFEHTLQIAPVPPEKVHAKLWKGVRKGFIPVDRVAIERRRLSKDKTVEEHKKMLEGIVKRDEKRRKRIKAAGIDYECPALIGSVQPSAKKIKFDED

SEQ ID NO: 8379 - DNA, 677 bp, Zea mays
  misc_feature: Ceres CLONE ID no. 1450490
  misc_feature: Ceres CDNA ID no. 40351878
  CDS (72)..(446): REFERENCED BY SEQ ID NO: 8380
gccagtttcgttctcatctccgttctctggattgtcccccgctcccctcttccggtcttccactcttccccatgtcggacgcgtataggaaagccaagcccggccgcctcgtcttcaagggcggcgaagccgcctccatccacaagccaaagaagcacaagaagaataagaagcccgcgtcggacgccctcgccgacggcgacatcgaggccgcagccgcggccgcggagggtgctgaaggcggcggaggtgccggcagcggcactggcgacgactacaccatcgacgcggcgaagaagatgaagtacgaggaactcttccctgtggagtcgaagaagttcgggtatgaccccgacaacgccgcccgcgctgccgcccggaaccgcaccgtcgaggaagccctcgacgaccgcgtccgcaagaaggccgaccgctactgcaaatgagctgtattgctcagtgtattgaagatggcctctttggagaattatgatccttcacggcatgttgtttagtagtcaaagtgctagtcaagcattttccttatgcatatttgtactagtaattagcaaacataaggattcttgcacatgttattccgataaacttgttctgccctctttgggttgattaagagaatactaccgcctggagattgtttaaaaaaaaaaaaaaaa

SEQ ID NO: 8380 - protein, 124 aa, Zea mays
  misc_feature: Ceres CLONE ID no. 1450490
  misc_feature: Ceres CDNA ID no. 40351878
MSDAYRKAKPGRLVFKGGEAASIHKPKKHKKNKKPASDALADGDIEAAAAAAEGAEGGGGAGSGTGDDYTIDAAKKMKYEELFPVESKKFGYDPDNAARAAARNRTVEEALDDRVRKKADRYCK

SEQ ID NO: 8381 - DNA, 1528 bp, Zea mays
  misc_feature: Ceres CLONE ID no. 1450493
  misc_feature: Ceres CDNA ID no. 40351879
  CDS (53)..(1336): REFERENCED BY SEQ ID NO: 8382
atcagttctccatcgtcctcttccaaagcacagctagctagagctcaaggtcatggcgaacaaacactcgtccctctccctcttcctcgtcctccttggcctgtcggcaagcttagcctccggtcaagtcctgtttcagggtttcaactgggagtcgtggaagcacaatggcgggtggtacaacttcctgatgggcaaggtggacgacatcgccgccgccggcgtcacgcacgtgtggctccccccggcgtcgcagtccgtcgccgagcaagggtacatgccgggccggctgtacgacctggacgcgtccaagtacggcaacaaggcgcagctcaagtccctgatcggggcgctccacggcaagggcgtcaaggccatcgccgacatcgtcatcaaccaccgcacggcggagcgcaaggacggccggggcatctactgcatcttcgagggcggcacccctgacgcgcgcctcgactggggcccccacatgatctgccgcgacgaccggccctacgccgacggcacgggcaacccagacaccggcgccgacttcggggccgccccggacatcgaccacctcaacccgcgcgtccagaaggagctcgtggagtggctcaactggctcaggaccgacgtcggcttcgacggctggcgcttcgacttcgccaagggctactccgcggacgtcgccaagatctacatcgaccgctcggagcccagcttcgccgtggccgagatatggacgtcgctggcgtacggcggggacggcaagcccaacctcaaccaggaccagcaccggcaggagctggtgaactgggtgaacaaggtgggcggctccggccccggcaccacgttcgacttcaccaccaaaggcatcctcaacgtggctgtggagggcgagctgtggcggctgcgcggcaccgacggcaaggcgccaggcatgatcgggtggtggccagccaaggcggtgaccttcgtggacaaccatgacaccggctccacgcagcacatgtggcccttcccttccgacaaggtcatgcagggatacgcctacatcctcacgcaccctgggaccccatgcatcttctacgatcatttcttcgactgggggctgaaggaggagatcgatcgcctggtgtcaatcaggacccggcaggggatacacagtgagagcaagctgcaaatcatagaggccgacgccgacctttacctggccgagatcgatggcaaggtcatcgtcaagctcgggccaagatacgatgtcgggcacctcattcctcaaggcttcaaggtggtcgcgcacggcaatgactatgccgtatgggagaaaatataagcaaaattatccgagctgctccacaatttttcttccctatatatgaatgtcacacctattagtccgagctcgtgttgtccacatagtacgattttagtacttcctccatgtaaaagtgaggatgagggacatccattgtatttttcataaataataatcaataagtattttcgctgaaaaaaaaaaaaaaaa

SEQ ID NO: 8382 - protein, 427 aa, Zea mays
  misc_feature: Ceres CLONE ID no. 1450493
  misc_feature: Ceres CDNA ID no. 40351879
  misc_feature (25)..(365): Pfam Name: Alpha PFAM Desc: Alpha amylase
  misc_feature (367)..(426): Pfam Name: Alpha PFAM Desc: Alpha
MANKHSSLSLFLVLLGLSASLASGQVLFQGFNWESWKHNGGWYNFLMGKVDDIAAAGVTHVWLPPASQSVAEQGYMPGRLYDLDASKYGNKAQLKSLIGALHGKGVKAIADIVINHRTAERKDGRGIYCIFEGGTPDARLDWGPHMICRDDRPYADGTGNPDTGADFGAAPDIDHLNPRVQKELVEWLNWLRTDVGFDGWRFDFAKGYSADVAKIYIDRSEPSFAVAEIWTSLAYGGDGKPNLNQDQHRQELVNWVNKVGGSGPGTTFDFTTKGILNVAVEGELWRLRGTDGKAPGMIGWWPAKAVTFVDNHDTGSTQHMWPFPSDKVMQGYAYILTHPGTPCIFYDHFFDWGLKEEIDRLVSIRTRQGIHSESKLQIIEADADLYLAEIDGKVIVKLGPRYDVGHLIPQGFKVVAHGNDYAVWEKI

SEQ ID NO: 8383 - DNA, 1049 bp, Zea mays
  misc_feature: Ceres CLONE ID no. 1450518
  misc_feature: Ceres CDNA ID no. 25445932
  CDS (18)..(797): REFERENCED BY SEQ ID NO: 8384
ggaactcgggagaggagatgggtgcgccgaagcagaagtggacgtcggaggaggaggaggcgctgcggcgcggcgtgctcaagcacggcgctggcaagtggcgcaccatccagaaggatcccgagttcagccccgtcctctcctctcgctccaacatcgacctcaaggacaaatggaggaatttgagttttagtgcaagtggactgggttcaagggataaacaaagggttccaaggccgaaagcaccttcgtcctccccatcacctagcccgcagcttctgcttctctcagccccgaataatgttgccgaggcttctccaccagaagattgtgaaaaaagcccacaggatgacaagactccgagtccaaagtacagttccatgatcctggaagctctcggcgaactgaaagagccaaatggttcagaagttgctacaatttgcaatttcatagagattgataagtcctataagctgacggattcatatgcaaaaagggctctggctccaatgaaagatccatctctaaagaagaaggattcagccaagtcatccaaggcagcaaagggtctaggccagtcgagtcctgcactggacgcagctgaagctgcagcgatgaaagtagcggacgcggaggccaaatcgcacctcgcaaacgagcacatgatggaggttgaaaggatcggcaagatggccgaggagaccgagtctctcctcgagctcgcctcagagctctacgagcgatgttcaagaggagaggcgctcacaatactgcaagtggcgcacagggagttttgatggtgttgtcgaccccgtcagctgcgcgccgacatctgctctcttgtacatggatggatggaagcgttggcccagcctgttgtcttcttgtccgcgtgttgtctctgttgtatcataactcgaatcaattcgttggttgtacctgagagggcatgcctttcattgcctaggaatgattttgagttggtgcattttggatactgtcctgtgttgaagtcagggaataatgtgtatccaaaaaaaaaaaaaaaa

SEQ ID NO: 8384 - protein, 259 aa, Zea mays
  misc_feature: Ceres CLONE ID no. 1450518
  misc_feature: Ceres CDNA ID no. 25445932
  misc_feature (115)..(136): Pfam Name: Linker_histone PFAM Desc: linker histone H1 and H5 family
  misc_feature (5)..(57): Pfam Name: Myb_DNA PFAM Desc: Myb
  misc_feature: Homolog of GI Number: 34910440 NR Desc: histone H1
  misc_feature: Homolog of GI Number: 27125811 NR Desc: MYB28 protein
  misc_feature: Homolog of GI Number: 34105721 NR Desc: Single myb histone 4
  misc_feature: Homolog of GI Number: 18463961 NR Desc: histone H1
  misc_feature: Homolog of GI Number: 34105717 NR Desc: single myb histone 3
  misc_feature: Homolog of GI Number: 8778473 NR Desc: F1L3.23
  misc_feature: Homolog of GI Number: 56784760 NR Desc: DNA
  misc_feature: Homolog of GI Number: 34912214 NR Desc: putative telomere repeat binding factor
  misc_feature: Homolog of GI Number: 7488947 NR Desc: DNA
  misc_feature: Homolog of GI Number: 8569103 NR Desc: Contains similarity to DNA
MGAPKQKWTSEEEEALRRGVLKHGAGKWRTIQKDPEFSPVLSSRSNIDLKDKWRNLSFSASGLGSRDKQRVPRPKAPSSSPSPSPQLLLLSAPNNVAEASPPEDCEKSPQDDKTPSPKYSSMILEALGELKEPNGSEVATICNFIEIDKSYKLTDSYAKRALAPMKDPSLKKKDSAKSSKAAKGLGQSSPALDAAEAAAMKVADAEAKSHLANEHMMEVERIGKMAEETESLLELASELYERCSRGEALTILQVAHREF

SEQ ID NO: 8385 - DNA, 679 bp, Zea mays
  misc_feature: Ceres CLONE ID no. 1450521
  misc_feature: Ceres CDNA ID no. 40351880
  CDS (62)..(466): REFERENCED BY SEQ ID NO: 8386
gtccactgtataattccctctcttggcattcaaagtttttcattacttcgtctctctagaaatggccggccgtggaaaaactctcggatctggagtcgccaagaaggcgacgtcgaggagcagcaaagccggtctccagttccccgtcggccgtatcgcaagatttctcaagaacggcaaatacgccgaacgtgttggtgccggagctccggtttacttagccgccgttctcgaatacctcgccgcagaggttctcgaactggctggaaacgcggcgagggacaacaagaagacaagaatcgtgccgcgtcacattcaattggcggtgaggaacgatgaggagctgagtaagttgcttggggatgtgacgattgctaacggaggtgtgatgcccaacattcacaaccttcttcttcccaagaaggctggtggtgcttccaaaccttccggtgacgacgatgagtagatcaagctctgtgaggatggttcaatgtgtagcgtttagatttagattaggtcgttgttttatctcttctgttgtgtagaagtccttttcgttttgaatgaaatcatgtgatcttgttatgttttgactctcggtttaaacgaacccacatgcgaattttaattctcaaaccaataaacccaaatttgatctcgaccaaaaaaaaaaaaaaaa

SEQ ID NO: 8386 - protein, 134 aa, Zea mays
  misc_feature: Ceres CLONE ID no. 1450521
  misc_feature: Ceres CDNA ID no. 40351880
  misc_feature (25)..(89): Pfam Name: CBFD_NFYB_HMF PFAM Desc: Histone
MAGRGKTLGSGVAKKATSRSSKAGLQFPVGRIARFLKNGKYAERVGAGAPVYLAAVLEYLAAEVLELAGNAARDNKKTRIVPRHIQLAVRNDEELSKLLGDVTIANGGVMPNIHNLLLPKKAGGASKPSGDDDE

SEQ ID NO: 8387 - DNA, 739 bp, Zea mays
  misc_feature: Ceres CLONE ID no. 1450693
  misc_feature: Ceres CDNA ID no. 25891791
  CDS (48)..(455): REFERENCED BY SEQ ID NO: 8388
ggcgataaacaagacgaaggagagggatctacacaagtgaagcaacaatggtgaagttcttgaagcagaacaaggcagtgatcctcctccaaggccgatacgccgggaagaaggcggtgatcatccgttccttcgacgacggaaaccgcgagcgtccttacgggcactgcctcgttgccgggctcaagaagtaccccagcaaggtcatccgcaaggactcagcgaagaagacggcgaagaaatctagggttaagtgtttcatcaaggtcgtcaactaccagcatctgatgcctacgcgttacaccctcgatgtggatctcaaggaagtcgcgaccctcgaggctctgtcttcaaaggacaagaaggtcgctgctctcaaggaggctaaggctaagctcgaggagcgtttcaagaccgggaagaacagatggttctttaccaaactcaggttctgaaggaatcactgtcggaagaaacattctgagcttattttgttgtttcattttcttatccaatatttaaaacagcgtattattgttagtttctatggttcatatggagaacaatgtggatccttttttgggttgtgaaagacttttgttggaaatttctgttctggagtttgattctctatggcattttgattacctctttgcttccattgaatgattttgctttggattttgtgataatttgagtattagtaatgactaccttacgcttaaaaaaaaaaaaaaaa

SEQ ID NO: 8388 - protein, 135 aa, Zea mays; identical to SEQ ID NO: 6270
  misc_feature: Ceres CLONE ID no. 1450693
  misc_feature: Ceres CDNA ID no. 25891791
  misc_feature (5)..(40): Pfam Name: KOW PFAM Desc: KOW motif
  misc_feature (52)..(135): Pfam Name: Ribosomal_L27e PFAM Desc: Ribosomal L27e protein family
  misc_feature: Homolog of GI Number: 20466061 NR Desc: putative ribosomal protein
  misc_feature: Homolog of GI Number: 23198420 NR Desc: putative ribosomal protein L27
  misc_feature: Homolog of GI Number: 21554529 NR Desc: ribosomal protein L27
  misc_feature: Homolog of GI Number: 7441033 NR Desc: ribosomal protein L27
  misc_feature: Homolog of GI Number: 7441035 NR Desc: ribosomal protein L27
  misc_feature: Homolog of GI Number: 20768 NR Desc: ribosomal protein L27
  misc_feature: Homolog of GI Number: 62867611 NR Desc: At2g32220
  misc_feature: Homolog of GI Number: 7441034 NR Desc: ribosomal protein L27
  misc_feature: Homolog of GI Number: 37536910 NR Desc: putative ribosomal protein L27
  misc_feature: Homolog of GI Number: 50906961 NR Desc: putative 60S ribosomal protein L27
  misc_feature: Useful for making bigger plants
  misc_feature: Useful for making taller plants and plants with longer inflorescences
  misc_feature: Useful for sterility

SEQ ID NO: 8389 - DNA, 1104 bp, Zea mays
  misc_feature: Ceres CLONE ID no. 1450753
  misc_feature: Ceres CDNA ID no. 40041420
  CDS (91)..(918): REFERENCED BY SEQ ID NO: 8390
tcccttagccgccgccacagcctccagctccaaaccctcatcccccccatcggagctcccctgcccccaaccccccacccccacccagccatggcggaccgcggcggcgagcgtggtgtcggcgagcgcggcggcttcgggcgcggcttcggtcgcggcgggcgcggggaccgtggcgggcgccgcggcggccgccgtggccctcgccaggaggaggagaagtgggtgcccgtcaccaagctcggccgcctcgtcaaggagggccgcttcaccaagatggaggagatctacctacactcgctccccgtcaaggagcaccagatcgtggagacgctctgcccggggctcaaggacgaggtgatgaagatcaccccggtgcagaagcagacccgcgccgggcagcgcacccgcttcaaggccttcgtcgtcgtcggcgacagcaacggccacgtcggcctcggcgtcaagtgcgccaaggaggtggccacggccatccgcggcgccatcatcctcgccaagctctcgatcgtgcccgtcaggaggggctactgggggaacaagatcggcctgccccacaccgtgccctgcaaggtcaccggcaagtgcggctccgtcaccgtgcgcatggtgcccgcccccaggggttccggaatcgtcgccgcccgcgtccccaagaaggtgctgcagttcgccgggatcgatgatgtcttcacttcctcgcgtggatccaccaagacccttggcaacttcgtcaaggctacctttgactgcctgatgaagacctatggattcctcactcctgacttctggagggagacaaccttcaccaaggcgccgtaccaggagttcaccgacatcttggcgaagccgaccaaggccctgatgcttgatgcaccagctgagaagatagaagcttaggatgaagggtttttactagctgggagctgtctgttgcactttgctttattatagtcgagaaccaggtgtctttgaattgtgctacttgtggaagtctctgtttgctgtcaaagttttggattatggtgcaatgctactctgttattggcaatggatgctacataattatgccaaaaaaaaaaaaaa

SEQ ID NO: 8390 - protein, 275 aa, Zea mays; identical to SEQ ID NO: 4084
  misc_feature: Ceres CLONE ID no. 1450753
  misc_feature: Ceres CDNA ID no. 40041420
  misc_feature (168)..(241): Pfam Name: Ribosomal_S5_C PFAM Desc: Ribosomal protein S5
  misc_feature (85)..(151): Pfam Name: Ribosomal_S5 PFAM Desc: Ribosomal protein S5
  misc_feature: Homolog of GI Number: 50919281 NR Desc: putative 40S ribosomal protein S2
  misc_feature: Homolog of GI Number: 50935111 NR Desc: putative 40S ribosomal protein S2
  misc_feature: Homolog of GI Number: 22137092 NR Desc: At2g41840/T11A7.6
  misc_feature: Homolog of GI Number: 21553851 NR Desc: 40S ribosomal protein S2
  misc_feature: Homolog of GI Number: 30017231 NR Desc: At3g57490
  misc_feature: Homolog of GI Number: 22137288 NR Desc: At1g59359/T4M14_3
  misc_feature: Homolog of GI Number: 18181932 NR Desc: ribosomal protein S2
  misc_feature: Homolog of GI Number: 21618011 NR Desc: ribosomal protein S2
  misc_feature: Homolog of GI Number: 21539457 NR Desc: ribosomal protein S2
  misc_feature: Homolog of GI Number: 6566279 NR Desc: RF12
  misc_feature: Useful for increasing chlorophyll and photosynthetic capacity
  misc_feature: Useful for sterility

SEQ ID NO: 8391 - DNA, 838 bp, Zea mays
  misc_feature: Ceres CLONE ID no. 1450765
  misc_feature: Ceres CDNA ID no. 29191567
  CDS (66)..(704): REFERENCED BY SEQ ID NO: 8392
acaaccgccgccgcccatcgcgcacagaaaccacgctccaagacaccaaaacccaccgatcccccatggagaacggcgacgaaaccctcgtctcccccaccgctgaggccgagaaggctgggcccaacggaggcgtcgcgggcgaggaggtcaccctcgccgacgccgtccaccccgccaagtcctacgccgccgtcgccgccaacgccgagatcgaggacctccgcgccaccaagctcgacctcgaggagcagctcgccaacgccagccaggagaacaagaccctcgccgcggaggcccaccgcctcgaaggcctcttctcccaggctcgggacgacgtcgccaccgccgagcacgccgccgccaccaccgaagaagaggtggcctcgctccgcgccgaggtcgagcgcctccaggccctcctcgaccgcaagaaggccgaccgtgaggcggacgagcgccaacgccaggagctcacggccgaggtggagaccgttcgtcaggcgaagctcaatctcgagaaggaggtcgacgccctgaaggcttccgccgctgctaccaccgtggaggacagggaggctgctccggatgctggggccccgaaggaagagggagtcacctggcaggggatggcagcgggggcggccgctggtgctgccatcacagctgccgtcgttctgatctacctccgcctcaagaggtaatctgatgctctggtgcgcaggaagttttgctctgctgctacagcttatggaagatttgatgagtttgtcgtggtgatgctgttactaccgaaccgagagtaatatgtcttctatcagcaaaaaaaaaaaaaaaa

SEQ ID NO: 8392 - protein, 212 aa, Zea mays
  misc_feature: Ceres CLONE ID no. 1450765
  misc_feature: Ceres CDNA ID no. 29191567
  misc_feature: Homolog of GI Number: 6996142 NR Desc: VIP1 protein
  misc_feature: Homolog of GI Number: 57863856 NR Desc: putative VIP1 protein
  misc_feature: Homolog of GI Number: 50901988 NR Desc: OJ1116_H09.21
  misc_feature: Homolog of GI Number: 6523547 NR Desc: hydroxyproline
  misc_feature: Homolog of GI Number: 61826057 NR Desc:  similar to serine\/arginine repetitive matrix 1
  misc_feature: Homolog of GI Number: 58388035 NR Desc: ENSANGP00000010844
  misc_feature: Homolog of GI Number: 2429362 NR Desc: proline rich protein
  misc_feature: Homolog of GI Number: 227614 NR Desc: Thr rich extensin
  misc_feature: Homolog of GI Number: 7949115 NR Desc: Ser/Arg
MENGDETLVSPTAEAEKAGPNGGVAGEEVTLADAVHPAKSYAAVAANAEIEDLRATKLDLEEQLANASQENKTLAAEAHRLEGLFSQARDDVATAEHAAATTEEEVASLRAEVERLQALLDRKKADREADERQRQELTAEVETVRQAKLNLEKEVDALKASAAATTVEDREAAPDAGAPKEEGVTWQGMAAGAAAGAAITAAVVLIYLRLKR

SEQ ID NO: 8393 - DNA, 597 bp, Zea mays
  misc_feature: Ceres CLONE ID no. 1450767
  misc_feature: Ceres CDNA ID no. 35391354
  CDS (1)..(345): REFERENCED BY SEQ ID NO: 8394
aaccaatctactcgctgctacaacagagtttgcctgttgccttgcttccacctcccggctgcagctgcacctgctgctcgatcggatcggccgcgcgcggcatgtcgaccaccacccccaccaacgccgcctcccagcaggaattatctgcatatatacaagggcgacgacgctgcggctggcggcgcggacaagaagccggcgcaagagacggtgacgaagacggtgcagacggtggaggtgcggtcctcggcagggcagcccgacgaggagggcgtgctcaagcccgtgaaggtggtgcacgagatccccgccaaggacagctccggcgtcaagcaggactaggactagctaagctgcctagctcgatcgatcatctagctaggatcgatgctgctgctgctaagctgagtggatttgatgctgctgcggtcagaaatcttatcgtcatttccaccccccaaccagatcctagctagtaattgcaaataaacaaatgttgcgttggatcctaatgtgaattagtgatctgtgcggcctgccgcttcatttgtaaacatgtactaataagacgcctgattttgtgtccaaaaaaaa

SEQ ID NO: 8394 - protein, 125 aa, Zea mays
  misc_feature: Ceres CLONE ID no. 1450767
  misc_feature: Ceres CDNA ID no. 35391354
MSTTTPTNAASQQELSAYIQGRRRCGWRRGQEAGARDGDEDGADGGGAVLGRAARRGGRAQAREGGARDPRQGQLRRQAGLGLAKLPSSIDHLARIDAAAAKLSGFDAAAVRNLIVISTPQPDPS

SEQ ID NO: 8395 - DNA, 1017 bp, Zea mays
  misc_feature: Ceres CLONE ID no. 1450843
  misc_feature: Ceres CDNA ID no. 25401811
  CDS (69)..(734): REFERENCED BY SEQ ID NO: 8396
gccttttttttccctacagactccagtccactgcgcaaactccaccagttgctttgctcgaaaggcggatgcgcgctatgcgcgcggaggccaccgagagcagcgccttaaccgccggggctgcgcatttgctctgctttgcaggcctcgctgccgcccacaccctcgctggccgcggcgcgctcgtctcagaccccgcgctcgccctccgccttctcgtggtctgtgaagcgcccatagtcatcgccgtgttcagctacctccggcgtgatgccaaaagctgctcgattttcaaagctgttgcgagaggattgatctgcttgcccgtgggagcattccttaatgcatttggagcaatcgttcttggtgcacctgttggaatcaaatactggatacctactatatattggtcactcctcatgtccctgttcacgtttgttccagcagcatgtgtctttggagcatccaagattgattggcaaaatgtgctttctcactccatttatttcatgccaaatgatgttgagaactacatgatctctgcaccttgtcatggagctgtgctaggagcatggctcggtggttggcctatgccccttgactgggagaggccctggcaggaatggccaatctgtgtctcttatggtgccgttgctgggtatttggttggaatggcagtgtcagtggtcctagtagctgttcacaatagaagggttcgtgcaaaagctgactagcctgtggtcctgtggatgatgagtgcagctgtcctaatagctgttcacaagaacaatgtatttgctgataacctatcttgttagtgtgagtactggttgtttccaatgtatagcttcatcctggttcgattgctctattcttttttaatatttttttttgcagctgtacattgtaagggtctcagttcagttttttttccacagagaagagggagatactagtttattacgtattctattttatgatgaataaacgaaactttccctaaaaaaaaaaaaaaaa

SEQ ID NO: 8396 - protein, 221 aa, Zea mays
  misc_feature: Ceres CLONE ID no. 1450843
  misc_feature: Ceres CDNA ID no. 25401811
  misc_feature (37)..(208): Pfam Name: PIG PFAM Desc: Phospho
  misc_feature: Homolog of GI Number: 78708040 NR Desc: retrotransposon protein
  misc_feature: Homolog of GI Number: 6679315 NR Desc: phosphatidylinositol glycan
  misc_feature: Homolog of GI Number: 22135636 NR Desc: Phosphatidylinositol glycan
  misc_feature: Homolog of GI Number: 50740452 NR Desc:  similar to phosphatidylinositol glycan
  misc_feature: Homolog of GI Number: 62859541 NR Desc: LOC548825
  misc_feature: Homolog of GI Number: 73969534 NR Desc:  similar to phosphatidylinositol glycan
  misc_feature: Homolog of GI Number: 62650301 NR Desc:  similar to Phosphatidylinositol glycan
  misc_feature: Homolog of GI Number: 4505797 NR Desc: phosphatidylinositol glycan
  misc_feature: Homolog of GI Number: 57092905 NR Desc:  similar to phosphatidylinositol glycan
MRAMRAEATESSALTAGAAHLLCFAGLAAAHTLAGRGALVSDPALALRLLVVCEAPIVIAVFSYLRRDAKSCSIFKAVARGLICLPVGAFLNAFGAIVLGAPVGIKYWIPTIYWSLLMSLFTFVPAACVFGASKIDWQNVLSHSIYFMPNDVENYMISAPCHGAVLGAWLGGWPMPLDWERPWQEWPICVSYGAVAGYLVGMAVSVVLVAVHNRRVRAKAD

SEQ ID NO: 8397 - DNA, 749 bp, Zea mays
  misc_feature: Ceres CLONE ID no. 1450882
  misc_feature: Ceres CDNA ID no. 40351881
  CDS (299)..(553): REFERENCED BY SEQ ID NO: 8398
tcttatttttactgcagtttttgtcagcttgaaaaggttgaatacatgaacagagttgagcaaaaacagtttatgccagacaatcagcgacatcattttgaaacttcgttctcctagcacagaagtgattgtagatcatttaaagaataggacatgtaatgcagtaactttattttgcctctcttgtattccttgatattttgttccaggaactgccattctttttcttgacctgtctgcggaccctgcactatttcaagggaaaaagggagataaacaggcagaaacatatcgaagaatgaaacaaatcacccaggaacactgggagggcagcttcccgaagacaaacgtggtgtggttaatctaccttgtagatatggtgctacagaagctgaaatcacctgctcatggcaacaaaatcgagcgggagcttcgctcgctcaagaaacgcctggcgtcttacgagtccgctggagattgtctacgcgaccccttcttcgctgatgtgttgctgatcgaggatgaccaggtcccttcaatgcctcctctgtaggtggatatgcgaaccggcagatcgagggtgtttgggttttagggttgtgttatttatgaccactgaaacacctgacgtgtagagaacgcaatgcctgaggcacgcaagagagcttactgttgcccggccgccttttgtaactactcgttactcgtataactgatcacgttggtgctggctaaaaaaaaaaaaaaaa

SEQ ID NO: 8398 - protein, 84 aa, Zea mays
  misc_feature: Ceres CLONE ID no. 1450882
  misc_feature: Ceres CDNA ID no. 40351881
MKQITQEHWEGSFPKTNVVWLIYLVDMVLQKLKSPAHGNKIERELRSLKKRLASYESAGDCLRDPFFADVLLIEDDQVPSMPPL

SEQ ID NO: 8399 - DNA, 963 bp, Zea mays
  misc_feature: Ceres CLONE ID no. 1450906
  misc_feature: Ceres CDNA ID no. 40351882
  CDS (188)..(832): REFERENCED BY SEQ ID NO: 8400
gaacgcgacactcgcaaagtcgcaagcgggtcgcaatcaaggctgctcccctctatctccgtgttcgcccctcggttcaccacccgccgccgccgagacctcctcctcgccggctactcctgaccccataaaggcagcgctcggaggtggccctctgtcgggtggagtggtggacacatccgcgcccatggccaaccgcggcgctgcggccggcaagctcaccgtcgccgagacattctccaacctcagggagcaaggcaagagtgcattcatcccgttcatcactgctggtgatcctgacctggcaaccacatcaaaagcattgaagattctcaattcctgcggttcggatgttatagaggttggcgtaccatactcggatccactggctgatggaccagttattcaggcttctgcaacacgggcgcttaagaaaggcactacactcgattctgtcatagaaatgctgaagggggttacacctgagctttcttgccccattgttcttttcacatactataatccaattctgaaacgtggtgtgggaaacttcatgtcttttatcaaacaagctggcatacatggacttgtagtgcctgatcttcccttggaggagacagcgttgctgaggagcgaggccattatgcacaacatagagctggtgctgcttacaacgccaaccacgccaacagatcggatgaagggaattgcacaagcttcagaaggatttctctatcttgtgagcgctgtaggggttacaggtgcacgctcaaatgtaaacttacgtgtagaacaccttcttagggagatcaagaaggttagtaaactataacctgtttgtcgtcagtaaagagtgaacgagttttaatgcaccagcatggctagagaaatttgcgttcaagaatggttatgagaaaattcctggtatgccatcagattttatactcaaaaaaaaaaaaaaaa

SEQ ID NO: 8400 - protein, 214 aa, Zea mays
  misc_feature: Ceres CLONE ID no. 1450906
  misc_feature: Ceres CDNA ID no. 40351882
  misc_feature (17)..(214): Pfam Name: Trp_syntA PFAM Desc: Tryptophan synthase alpha chain
MANRGAAAGKLTVAETFSNLREQGKSAFIPFITAGDPDLATTSKALKILNSCGSDVIEVGVPYSDPLADGPVIQASATRALKKGTTLDSVIEMLKGVTPELSCPIVLFTYYNPILKRGVGNFMSFIKQAGIHGLVVPDLPLEETALLRSEAIMHNIELVLLTTPTTPTDRMKGIAQASEGFLYLVSAVGVTGARSNVNLRVEHLLREIKKVSKL

SEQ ID NO: 8401 - DNA, 810 bp, Zea mays
  misc_feature: Ceres CLONE ID no. 1450908
  misc_feature: Ceres CDNA ID no. 35383410
  CDS (99)..(641): REFERENCED BY SEQ ID NO: 8402
ctgttccagtcctcgcaatcgtgcgttcttcgccgccccctcccctcggacgaaacatcgccgcgagagagatccccgtcgagagccagccgggcgagatggggttcatcggcgaccaggtggagtcgatccggtcgatgcaggtccgccaggtcgtcacgcagatcatcagcctcggtatgattgttacctcggcactgatcatatggaagggattgatggtcgcgacagggagcgaatcgccagttgtggtggttctttctggtagcatggagcctggatttaaaaggggtgatattctgtttttgcacatgagcaaagaacctatccgcactggagaaatagttgtttttaatattgatggccgtgaaattccaattgttcaccgtgtgatcaaggttcatgaacggcaagaaagtggagaagttgatatcctcacaaaaggcgataataattttggggatgaccgacttctgtatgcacaagggcagctttggcttcagaagcatcacattatggggcgggctgtaggctatctaccatatgttgggtgggttacgattgtgatgactgagaagcccatcattaagtaccttctgattggcgcgctgggcctgcttgtcataacatcgaaagagtgaagctgtcaacctttagcacatagtttatcttgtaatcgagggcagaacaagttttgttgcgccgtgtaccgaatggaagatgtatttttatctgttttgactgttgtctctgccctaaagcctaaacctggctcttatgcaatagttatcttcaaaaaaaaaaaaaaaa

SEQ ID NO: 8402 - protein, 180 aa, Zea mays; identical to SEQ ID NO: 3838
  misc_feature: Ceres CLONE ID no. 1450908
  misc_feature: Ceres CDNA ID no. 35383410
  misc_feature (52)..(115): Pfam Name: Peptidase_S24 PFAM Desc: Peptidase S24
  misc_feature: Homolog of GI Number: 55296017 NR Desc: putative signal peptidase 18K chain
  misc_feature: Homolog of GI Number: 20465737 NR Desc: putative signal peptidase subunit
  misc_feature: Homolog of GI Number: 51972110 NR Desc: At3g15710
  misc_feature: Homolog of GI Number: 55247312 NR Desc: ENSANGP00000013674
  misc_feature: Homolog of GI Number: 55642557 NR Desc:  similar to SPC18 protein
  misc_feature: Homolog of GI Number: 34784421 NR Desc: Spc18 protein
  misc_feature: Homolog of GI Number: 62898009 NR Desc: signal peptidase complex
  misc_feature: Homolog of GI Number: 61889101 NR Desc: signal peptidase complex 18kD
  misc_feature: Homolog of GI Number: 32484220 NR Desc: MGC64284 protein
  misc_feature: Homolog of GI Number: 51467087 NR Desc:  similar to SPC18 protein
  misc_feature: Useful for making ornamental plants with modified flowers
  misc_feature: Useful for making ornamental plants with modified flowers
  misc_feature: Useful for making ornamental plants with modified flowers
  misc_feature: Useful for making plants with increased biomass and foliage
  misc_feature: Useful for making plants with increased biomass and foliage
  misc_feature: Useful for making smaller plants

SEQ ID NO: 8403 - DNA, 529 bp, Zea mays
  misc_feature: Ceres CLONE ID no. 1450924
  misc_feature: Ceres CDNA ID no. 36707114
  CDS (94)..(342): REFERENCED BY SEQ ID NO: 8404
aactcgctggccatagatccattgattgatcggacggacgcgcgtctccggtcccgtccgtaataacactgatccgatccacgccggccggcgatggagctcatcaagtccagggcgaccgtgtgcgcgctcctcctggcgctgctcctgctctcacactacgacggcgggacgacgacgacgatggtggcggaggcccgggtgtgcatgggcaagagccagcaccactcgttcccctgcatctccgaccgcctctgcagcaacgagtgcgtcaaggaggacggcgggtggaccgccggctactgccacctccgctactgcaggtgccagaaggcgtgctaagcaaagctcttcaaacacccttggcttgccagaactgaactctagtagtactaagtaacacccttggctagctgtgcacaacctacgtaccgtgcatgcatgtaatgtggtgtcatgtaacgtgacagcaataaatagtattaataataataacacggcatgtagccaagcaaaaaaaaaaaaaaaa

SEQ ID NO: 8404 - protein, 82 aa, Zea mays; identical to SEQ ID NO: 4784
  misc_feature: Ceres CLONE ID no. 1450924
  misc_feature: Ceres CDNA ID no. 36707114
  misc_feature (36)..(82): Pfam Name: Gamma PFAM Desc: Gamma
  misc_feature: Homolog of GI Number: 2130034 NR Desc: gamma
  misc_feature: Homolog of GI Number: 2501197 NR Desc: Gamma
  misc_feature: Homolog of GI Number: 1173436 NR Desc: Small protein inhibitor of insect alpha
  misc_feature: Homolog of GI Number: 7451437 NR Desc: gamma
  misc_feature: Homolog of GI Number: 7451438 NR Desc: omega
  misc_feature: Homolog of GI Number: 533692 NR Desc: protease inhibitor

SEQ ID NO: 8405 - DNA, 1161 bp, Zea mays
  misc_feature: Ceres CLONE ID no. 1450990
  misc_feature: Ceres CDNA ID no. 36707066
  CDS (49)..(1065): REFERENCED BY SEQ ID NO: 8406
acttcgtagctctctctctcgatctcatcgacaccctctgatatcgaaatggctgacaagaagattaagatcggaatcaacggtttcggaagaatcggtcgcttggtggctagagttatccttcagaggaacgatgttgagctcgtcgctgttaacgaccccttcatcaccaccgagtacatgacgtacatgtttaagtatgacagtgttcacggtcagtggaagcacaacgagctcaaggttaaggatgagaagacacttctcttcggtgagaagcctgtcactgttttcggcatcaggaaccctgaggatatcccatggggtgaggctggagctgactttgttgttgagtctactggtgtcttcaccgacaaggacaaggctgctgctcacttgaagggtggtgcgaagaaagttgtcatctctgcaccaagcaaagatgctcccatgttcgttgttggtgtcaatgagcatgagtacaagtctgatctcaacattgtttccaacgctagttgcaccactaactgccttgctccacttgccaaggttatcaacgacaggtttggaattgtcgagggactcatgaccaccgtccactctatcactgcaactcagaagacagttgatggtccatcaatgaaggactggagaggtggaagagccgcttccttcaacatcattcccagcagcaccggagctgccaaggctgtcgtaaaggttcttccacagctcaacggaaagctgaccggtatgtccttccgtgttcccaccgttgatgtttcagttgttgacctcacggttagactcgagaaagctgcaacctacgatgaaatcaagaaggctatcaaggaggaatctgagggcaagctaaagggaatccttggttacacagaggatgatgttgtctcaaccgacttcgttggtgacaacaggtcgagcatttttgacgcaaaggctggaatcgcgttgagtgacaactttgtgaagctggtgtcgtggtacgacaacgaatggggttacagtacccgtgtggtcgacttgatcattcacatgtccaaggcctaagtcgatgaagatctcgagtgatgtaatggtgtttttaaattgttgtttttatcgaataaattttcttgggttttgaaaccaaaaaaaaaaaaaaaa

SEQ ID NO: 8406 - protein, 338 aa, Zea mays
  misc_feature: Ceres CLONE ID no. 1450990
  misc_feature: Ceres CDNA ID no. 36707066
  misc_feature (161)..(318): Pfam Name: Gp_dh_C PFAM Desc: Glyceraldehyde 3
  misc_feature (6)..(156): Pfam Name: Gp_dh_N PFAM Desc: Glyceraldehyde 3
  misc_feature: Homolog of GI Number: 19699140 NR Desc: At1g13440/F13B4_8
  misc_feature: Homolog of GI Number: 462137 NR Desc: Glyceraldehyde
  misc_feature: Homolog of GI Number: 51703306 NR Desc: glyceraldehyde 3
  misc_feature: Homolog of GI Number: 22094840 NR Desc: glyceraldehyde 3
  misc_feature: Homolog of GI Number: 166710 NR Desc: glyceraldehyde
  misc_feature: Homolog of GI Number: 21593240 NR Desc: glyceraldehyde
  misc_feature: Homolog of GI Number: 414607 NR Desc: glyceraldehyde
  misc_feature: Homolog of GI Number: 18076094 NR Desc: glyceraldehyde
  misc_feature: Homolog of GI Number: 4539543 NR Desc: glyceraldehyde
  misc_feature: Homolog of GI Number: 3059122 NR Desc: glyeraldehyde
MADKKIKIGINGFGRIGRLVARVILQRNDVELVAVNDPFITTEYMTYMFKYDSVHGQWKHNELKVKDEKTLLFGEKPVTVFGIRNPEDIPWGEAGADFVVESTGVFTDKDKAAAHLKGGAKKVVISAPSKDAPMFVVGVNEHEYKSDLNIVSNASCTTNCLAPLAKVINDRFGIVEGLMTTVHSITATQKTVDGPSMKDWRGGRAASFNIIPSSTGAAKAVVKVLPQLNGKLTGMSFRVPTVDVSVVDLTVRLEKAATYDEIKKAIKEESEGKLKGILGYTEDDVVSTDFVGDNRSSIFDAKAGIALSDNFVKLVSWYDNEWGYSTRVVDLIIHMSKA

SEQ ID NO: 8407 - DNA, 805 bp, Zea mays
  misc_feature: Ceres CLONE ID no. 1451013
  misc_feature: Ceres CDNA ID no. 40351883
  CDS (1)..(504): REFERENCED BY SEQ ID NO: 8408
acctgcgtctctctcgcctccaccgcctcctgtcccctcgcgcgttccgcctcccagttgcggctccggtcgttcccctcctcctcggttgctgagatggccggtcgtgggaaggcaatcggcgccggcgcggccaagaaggcgacgtcaaggagctccaaggctgggctgcagttccccgtgggaaggatcgccaggttcctcaaggccggcaagtacgccgagcgcgtcggagccggcgcccccgtctacctcgccgccgtccttgagtacctcgccgctgaggtcctggagctggccggaaacgccgccagggacaacaagaagacacgtatcgtgccccgccacatccagctcgccgtgcgcaatgacgaggagctgaccaagttgctcggcggcgccaccatcgccagcggcggtgtgatgcccaacatccaccagcacctcctccccaagaaggcctcttcctccaaggcgtccaccgtcgatgacgacgacaactgaggccctgacctttccctcgctgccaccgcccgcaccttggaatacatttgcatcacaaagacgagtttcttgtttcgtaggatttagtgtcttcgttttcaggagagtcctggatggcttggtattaggagaatttctagttggtggtcggattagttgctttcatcccatggctgtgaatatggcaaacaaattttcgggtgtttaaactcagatgtaaggctgcttgatcttatccggtttccatggttgaagaaattgaaaggaactcaactttaagcttacaaaaaaaaaaaaaaaa

SEQ ID NO: 8408 - protein, 135 aa, Zea mays; identical to SEQ ID NO: 7178
  misc_feature: Ceres CLONE ID no. 1451013
  misc_feature: Ceres CDNA ID no. 40351883
  misc_feature (25)..(89): Pfam Name: CBFD_NFYB_HMF PFAM Desc: Histone

SEQ ID NO: 8409 - DNA, 953 bp, Zea mays
  misc_feature: Ceres CLONE ID no. 1451016
  misc_feature: Ceres CDNA ID no. 40351884
  CDS (142)..(561): REFERENCED BY SEQ ID NO: 8410
acacacccaacccccccacccccccaccccctcccccagcagccgccgcaaaagagagcaggaagcgaggaggaactttacaagagagggcatcgaatccgcctccttcttcctcgcgcggtcgtctccgaggcctccgacatggcgaacgcggcatcgggcatggctgtggacgacgaatgcaagctcaagttcctggagctgaaggcgaagcgaacccaccgcttcatcatctacaagatagacgacaagaagaagatggttgttgtggagaaagtcggtgagcctgccctgaactatgaggactttgctgccagcctccccaccaatgaatgcagatacgcgatattcgactatgactttgtcaccgaggagaactgccaaaagagcaagatattcttcgtcgcatggtctcctgacaccgcacgcgtgaggagcaagatgatctacgcaagctccaaggagaggttcaagagggagctcgacggcatccaggtggagctgcaggcgacagacccgaccgaggtcggcttcgatgtcatccaaggccgtgccaactgagcaccatggctgtgctgctgcttaccttaagtatgagcctctgatgaggatttagcgtgctcgccgaggctggtcatgagctgtttaccatgaggcaattgtgatttgagttgccagtatgtaccacctaaggaagatgtaagctatgactggcgcgacgacaaatgtatcctttctggttgttgattcgtggatcctgatatccccttcttgcctgctaaagatcagttgcatcttgatggtaacaattttggtagattctatcttgtgagctttcatactaggatcactggttcttgaaacaaatgatgccatgatgtccactgaggcttattatgcaacacattttgatgataaaaccaattcagaaatttgtaaaaaaaaaaaaaaaa

SEQ ID NO: 8410 - protein, 139 aa, Zea mays; identical to SEQ ID NO: 8370
  misc_feature: Ceres CLONE ID no. 1451016
  misc_feature: Ceres CDNA ID no. 40351884
  misc_feature: The plant senesces significantly late copared to wild-type.
  misc_feature: Useful for making plants with modulated time to senescence
  misc_feature (12)..(139): Pfam Name: Cofilin_ADF PFAM Desc: Cofilin/tropomyosin

SEQ ID NO: 8411 - DNA, 765 bp, Zea mays
  misc_feature: Ceres CLONE ID no. 1451035
  misc_feature: Ceres CDNA ID no. 40351885
  CDS (98)..(421): REFERENCED BY SEQ ID NO: 8412
acaataaccaggagcgagctacctgcgaagccacatctctccttcctcttcatcgatagtacttctccatattcagtgcagaggcacaagctaagccatgagcaacggtggtaaccgcagcaggggcggcgcgaggttcgagctgcagctgcacctgtcgccgccgccgccggctaggagggtagaggtggacggcggaggcgacggcagcgactcgtcgtcgtccccgagctcgtgcgtgtcgtcggacggcagcccagggagcaagtcgccgatggtgatcggcgcctgcacgcggtgcatgatgtactgcatggtggccaagaaggacttccccacctgcatcaactgcaagcagccctgcctcgtggacctcctccactgctctggcgccggcggcagcggcggcaaggccaagtgaaaggacggtcagcgtgtcgtaccgtaccccggccgtcggtccagttgatgctcatacggatggttagctcagaccttagcttgtgggctttgtgcgctcatctcgaggcgcggtgggggagtgaccgccgttggatcatccactggatggacatggcctacttggtttagtaataggctagtgtagtactccccctattagcttatcttcgtttatgatgttgttgcttctttaaccgcggcatcggtatgtgatcgccggcgtggttcactgcctattattgttgctggcaatggtttttagctgcaacaatgctatgtttaaatggaaaaaaaaaaaaaaaa

SEQ ID NO: 8412 - protein, 107 aa, Zea mays; identical to SEQ ID NO: 8252
  misc_feature: Ceres CLONE ID no. 1451035
  misc_feature: Ceres CDNA ID no. 40351885

SEQ ID NO: 8413 - DNA, 764 bp, Zea mays
  misc_feature: Ceres CLONE ID no. 1451089
  misc_feature: Ceres CDNA ID no. 36698159
  CDS (98)..(520): REFERENCED BY SEQ ID NO: 8414
aagtttcttttcttccccgcaaagaaagaaggcaagagttctcggcttctcgcgagtcgcgagtcgcgacagagagagaggcggagttgcggagaagatgcagagcagcagcatgaagagggagatcagcgaggcccacgacaccattcgcttcggcatcaacgccggcgtcaaagccgacctcgccccgccgcacccgctccagtctaccatccaatcggagaccaagttctgggcggacaagaagaagttcgggacagatgccatatacggatccgccctcaacatccgcaaggatctcgatgcccaaatcctctccaggttccaaaggccccctggtgctttgccgtcatctctgcttggatacgaggcactgacaggttccttggatgattttggatttgaagattatcttaacatgcctcatgattctgacagtttccgtcaacctgacatgcaccatggaatggaggttcgccttggtttgtccaagggacctatctgtcctagcttcaattgaggcagtaatgtaattctgctgcaagttcacctctcagtccagtacttcagtcaatagaccatattaagatggtgaaatatgaaaactggtagcttgcatctgttcaatgttatgttttaatcaacgctgaatttaatatttgtcaagtttgaactttgacacctactttttctggtttccttgccactgcgaggccatggaagcgaccaaatttatttatgtttgacgaaaaaaaaaaaaaaaa

SEQ ID NO: 8414 - protein, 140 aa, Zea mays
  misc_feature: Ceres CLONE ID no. 1451089
  misc_feature: Ceres CDNA ID no. 36698159
  misc_feature (2)..(131): Pfam Name: UMP1 PFAM Desc: Proteasome maturation factor UMP1
  misc_feature: Homolog of GI Number: 51090706 NR Desc: proteasome maturation factor
  misc_feature: Homolog of GI Number: 50901266 NR Desc: putative proteasome maturation factor
  misc_feature: Homolog of GI Number: 9828633 NR Desc: F1N21.7
  misc_feature: Homolog of GI Number: 50726392 NR Desc: proteasome maturation factor
  misc_feature: Homolog of GI Number: 50726391 NR Desc: proteasome maturation factor
  misc_feature: Homolog of GI Number: 27691986 NR Desc: similar to chromosome 13 open reading frame 12
MQSSSMKREISEAHDTIRFGINAGVKADLAPPHPLQSTIQSETKFWADKKKFGTDAIYGSALNIRKDLDAQILSRFQRPPGALPSSLLGYEALTGSLDDFGFEDYLNMPHDSDSFRQPDMHHGMEVRLGLSKGPICPSFN

SEQ ID NO: 8415 - DNA, 679 bp, Zea mays
  misc_feature: Ceres CLONE ID no. 1451201
  misc_feature: Ceres CDNA ID no. 29191568
  CDS (54)..(554): REFERENCED BY SEQ ID NO: 8416
catttgccttctgcgcctcacactctctcatccccacaccaaaaccaaacacaatgccgcccaagttggacccgagcgcgatcgtcgacgtctacgtccgcgtcaccggaggcgaagtcggagccgccagctccctcgcccccaagatcggtcccctcggtctcgccccgaagaagatcggagaagacatcgccaaggaaaccgccaaggagtggaaaggcctccgcgtcaccgtcaagctaacggtccagaaccgtcaggcgaaggtcacggtggttccgtcagccgcggcgctcgtcatcaaggcgttgaaggagccggagagggaccggaagaaggtgaagaacatcaagcacaacgggaacatttcgtttgacgatgtgattgagatcgcgaggatcatgaggccgaggtcgattgccaaggagctgagtgggaccgtgagggagattctcgggacgtgtgtgtctgttgggtgtactgttgatgggaaggaccccaaggatcttcagcaggagattcaggagggtgagattgacatccctgagaactaaggcatcaaagaaacgaaagatgttgttttgtcttattgttagatgctatcttgtttttaattacaatgactcgagttttggattattattattattattatctccgtgtaaaaaaaaaaaaaaaa

SEQ ID NO: 8416 - protein, 166 aa, Zea mays
  misc_feature: Ceres CLONE ID no. 1451201
  misc_feature: Ceres CDNA ID no. 29191568
  misc_feature (12)..(71): Pfam Name: Ribosomal_L11_N PFAM Desc: Ribosomal protein L11
  misc_feature (76)..(144): Pfam Name: Ribosomal_L11 PFAM Desc: Ribosomal protein L11
  misc_feature: Homolog of GI Number: 22655306 NR Desc: 60S ribosomal protein L12
  misc_feature: Homolog of GI Number: 21592414 NR Desc: 60S ribosomal protein L12
  misc_feature: Homolog of GI Number: 21593741 NR Desc: 60S ribosomal protein L12
  misc_feature: Homolog of GI Number: 50911805 NR Desc: putative 60S ribosomal protein L12
  misc_feature: Homolog of GI Number: 40287508 NR Desc: 60S ribosomal protein L12
  misc_feature: Homolog of GI Number: 50900506 NR Desc: OSJNBa0093F12.16
  misc_feature: Homolog of GI Number: 2677830 NR Desc: ribosomal protein L12
  misc_feature: Homolog of GI Number: 3986695 NR Desc: ribosomal protein L12
  misc_feature: Homolog of GI Number: 62644959 NR Desc:  similar to 60S ribosomal protein L12
MPPKLDPSAIVDVYVRVTGGEVGAASSLAPKIGPLGLAPKKIGEDIAKETAKEWKGLRVTVKLTVQNRQAKVTVVPSAAALVIKALKEPERDRKKVKNIKHNGNISFDDVIEIARIMRPRSIAKELSGTVREILGTCVSVGCTVDGKDPKDLQQEIQEGEIDIPEN

SEQ ID NO: 8417 - DNA, 743 bp, Zea mays
  misc_feature: Ceres CLONE ID no. 1451406
  misc_feature: Ceres CDNA ID no. 25446021
  CDS (54)..(389): REFERENCED BY SEQ ID NO: 8418
atcttcgcagtggtgacacccccatcccggggcacgaaaccctaactgaacccatggcgctctccgccgctcgccggctctccaccaccgcgtcctcctcctccgtcgccgacgcgccgccaaagctttcttcgctgttccagaacccgaagcctcgaccgctgcctgtccgcggcgtcgaggagccgcggcggggggccaggcccaggccgaggcagccctgggaggaggaggcgggggcgctgctgctgcggctccacaaggggaggtacctcccgggccccgacctctcgtcggcgccgcacgctgtctcacccgacgccgtcaagaccgccgccgagtggttcgggcatgaccaccagcccgtcgccaacgctgtgaagcggtgagaggtctcacatgagtcagttggcgtctgggatgccgaggagtggggacactgagggcacagctaacgcccaggcccagcaatctcggataagcatcatcaggtcccatgttcgcttcatgtgccgacagtctcgctatatccgcattgaatcgcctaacgatgtacaggaactctggtcgttgacgggcgacctcaagccggaacagtttgatgacataacggttcgttccctcccctttgagatcgatggtggccagcgcgtttgtcaagttacttgtctctgaagtatcacatgtttgacaacaataaattatttatttatttatctatctatcgaaaaaaaaaaaaaaaa

SEQ ID NO: 8418 - protein, 111 aa, Zea mays
  misc_feature: Ceres CLONE ID no. 1451406
  misc_feature: Ceres CDNA ID no. 25446021
  misc_feature: Homolog of GI Number: 34903722 NR Desc: P0489A05.27
MALSAARRLSTTASSSSVADAPPKLSSLFQNPKPRPLPVRGVEEPRRGARPRPRQPWEEEAGALLLRLHKGRYLPGPDLSSAPHAVSPDAVKTAAEWFGHDHQPVANAVKR

SEQ ID NO: 8419 - DNA, 976 bp, Zea mays
  misc_feature: Ceres CLONE ID no. 1451421
  misc_feature: Ceres CDNA ID no. 36706854
  CDS (51)..(791): REFERENCED BY SEQ ID NO: 8420
atcgccgcctcatcgccgccaggagttcgagctccccccgaaccgtcgccatggccgccgccgctgccgctgccgcaccggtcatctccccgaaagaaaatctgcccccttcgctgacctccacctccgagccccctccactcttcgacggcaccaccaggttgtatgttgcatatcactgcccgtatgcgcagcgcgcttggattgccaggaactacaagggtttgcaagacaagatcaagataatcgggatcgatctcgcagacaggccggcttggtacaaggagaaggtttacccacagaacaaggtgccttcactggagcataacaacgaggtgaaaggagaaagcttggatttggtcaagtacattgacagcaatttcgatggcccagcattgctccctgatgattctgcaaagaagcagtttgccgaggagctgcttgtgtacaccgacgagtccaataaagcactatactcatccataacctccaagggagatgtggcagaggaaactgttgctgcgctggataaaatagaagcggccctgggaaagttcagtgatggacctttcttccttggccagttcagtttggtggacattgcatatgtgccatttatcgaaaggtttcagatattcttttctggtatcaaaaactatgatatcaccaaggacagacctaacattcagaaattcatcgaggaagtgaacaagatcgatgcgtacacgcaaacgaaactggacccacaatttctgcttgaacacacaaagaagcggcttgggattgagtgaagatgtgaccaaggatgaccaagaggccagggaactactgcagcatggaagatgaagatgaagacactcaggagtgtgcttgcttgctagtactatatactatactttgaataaaaagatgcatgctactaaggccctgccttttgagaataaattaagtggttgtttgaaaaaaaaaaaaaaaa

SEQ ID NO: 8420 - protein, 246 aa, Zea mays
  misc_feature: Ceres CLONE ID no. 1451421
  misc_feature: Ceres CDNA ID no. 36706854
  misc_feature (153)..(223): Pfam Name: GST_C PFAM Desc: Glutathione S
  misc_feature: Homolog of GI Number: 50948973 NR Desc: putative glutathione S
  misc_feature: Homolog of GI Number: 7939638 NR Desc: XIG
  misc_feature: Homolog of GI Number: 50948975 NR Desc: putative glutathione S
  misc_feature: Homolog of GI Number: 22347 NR Desc: In2
  misc_feature: Homolog of GI Number: 3393062 NR Desc: putative In2.1 protein
  misc_feature: Homolog of GI Number: 37051105 NR Desc: glutathione S
  misc_feature: Homolog of GI Number: 11385579 NR Desc: In2
  misc_feature: Homolog of GI Number: 21537338 NR Desc: In2
  misc_feature: Homolog of GI Number: 38454162 NR Desc: At5g02780
  misc_feature: Homolog of GI Number: 66499807 NR Desc:  similar to glutathione transferase o1
MAAAAAAAAPVISPKENLPPSLTSTSEPPPLFDGTTRLYVAYHCPYAQRAWIARNYKGLQDKIKIIGIDLADRPAWYKEKVYPQNKVPSLEHNNEVKGESLDLVKYIDSNFDGPALLPDDSAKKQFAEELLVYTDESNKALYSSITSKGDVAEETVAALDKIEAALGKFSDGPFFLGQFSLVDIAYVPFIERFQIFFSGIKNYDITKDRPNIQKFIEEVNKIDAYTQTKLDPQFLLEHTKKRLGIE

SEQ ID NO: 8421 - DNA, 1232 bp, Zea mays
  misc_feature: Ceres CLONE ID no. 1451477
  misc_feature: Ceres CDNA ID no. 40351886
  CDS (105)..(977): REFERENCED BY SEQ ID NO: 8422
catcggtgccttcccctcttctccttggaaacctctggactgagctcctctcatcagcgtgcgacgaatctccgcccgatcgaatctccagggtgataacagggatggctactggtagtgatgctggaaagtccgctgaggcagtgttggagtggcctaagcaggacaaaaagaggatgctgcatgctgtttaccgtgtgggagatctcgaccgcaccattaagtgttacacagaatgctttgggatgaagctgctgaggaaaagagatgtcccagaagagaagtacaccaatgccttccttggatatggacctgaggatactaattttgcacttgagctgacttacaattatggtgttgacaagtacgacattggagctggctttggacattttgccatcgcaaatgaggatgtgtacaagctgtctgagacaattaaatcatctgattgttgtaagatcactcgtgaacctggtcctgtcaagggagggtccactgtgattgcctttgcacaagacccagatggttacatgtttgagcttatccagaggggtccgacgcctgagcctctctgtcaagttatgcttcgtgttggtgaccttgatcgggctatcatgttctacgagaaggcccttgggatgaagcttctgaggaagaaggatgtgcctcagtataagtacactattgccatgggctatgctgaggaggacaagaccactgttctggagttgacatacaactatggtgtcacggaatataacaagggcaatgcatatgctcaggttgctattggcactgacgatgtgtacaagagcgctgaagcagttgagctggttaccaaagaactaggtggaaagattctaaggcagccagggccactgccggggctgaacaccaaaatcacctctttccttgacccagatggctggaaagtggttctggtggatcatgcggacttcctcaaggagctgcactgaagatgggcaggctcaaatgttagtgttcgcgaggaggcaaaccttatgttagcaatggtacgtgtgtgattgtaataaaacaaaccttatgtagcaatggtctgtgtgatgtaataaaacggcagcctcttccgctcgacgaacaaaaataaaaagcaaccactgcatgcatatgcggtgattgacctagtgttatcaagttgcttgcagtttgattatcgctaacaataaaaaaaaaaaaaaaaaaaaaaaaaa

SEQ ID NO: 8422 - protein, 290 aa, Zea mays
  misc_feature: Ceres CLONE ID no. 1451477
  misc_feature: Ceres CDNA ID no. 40351886
  misc_feature (24)..(146): Pfam Name: Glyoxalase PFAM Desc: Glyoxalase/Bleomycin resistance protein/Dioxygenase superfamily
MATGSDAGKSAEAVLEWPKQDKKRMLHAVYRVGDLDRTIKCYTECFGMKLLRKRDVPEEKYTNAFLGYGPEDTNFALELTYNYGVDKYDIGAGFGHFAIANEDVYKLSETIKSSDCCKITREPGPVKGGSTVIAFAQDPDGYMFELIQRGPTPEPLCQVMLRVGDLDRAIMFYEKALGMKLLRKKDVPQYKYTIAMGYAEEDKTTVLELTYNYGVTEYNKGNAYAQVAIGTDDVYKSAEAVELVTKELGGKILRQPGPLPGLNTKITSFLDPDGWKVVLVDHADFLKELH

SEQ ID NO: 8423 - DNA, 686 bp, Zea mays
  misc_feature: Ceres CLONE ID no. 1451505
  misc_feature: Ceres CDNA ID no. 29191459
  CDS (1)..(414): REFERENCED BY SEQ ID NO: 8424
acagactcgagtcgtcttcttcctctgctcctgctcggatcccctaccctgctcctcaccccaaccccccctctcgcggcgcggcacggcagagaggagtcggcggagatgtcgggcgtgacggcggacgaggacaagaagcccgcgggcgacggcggaggcgcccacatcaacctcaaggtcaaggggcaggatggcaatgaggttttcttccgcatcaagagatccacacagctgaagaagctgatgaacgcctactgcgaccgtcagtctgtggatctcaactccattgctttcctttttgatggtcgtaggctccgtggtgagcagacccctgatgagcttgagatggaggaaggcgacgagattgacgccatgcttcaccagaccggagggggctttcctcgcccttagaaggagcttgctgcagcctggctgttctatgtcgtatgctacctttagaactagagtaaaatgtaagaagtgaaagaacttgcgaggctatgattctgtgccatagcctgagggggggtctggaggtgaaagaacatcggagtactgttgatgtcgtgactgaactatcatccattgcctaatatatcatgccttgttgtgttcccaatgatttgcaaactcatttggtttctcatcatagcgaggcatcattttcaaaaaaaaaaaaaaaa

SEQ ID NO: 8424 - protein, 101 aa, Zea mays
  misc_feature: Ceres CLONE ID no. 1451505
  misc_feature: Ceres CDNA ID no. 29191459
  misc_feature (19)..(94): Pfam Name: ubiquitin PFAM Desc: Ubiquitin family
  misc_feature: Homolog of GI Number: 1668773 NR Desc: ubiquitin
  misc_feature: Homolog of GI Number: 34907008 NR Desc: putative ubiquitin
  misc_feature: Homolog of GI Number: 34907010 NR Desc: putative ubiquitin
  misc_feature: Homolog of GI Number: 1707372 NR Desc: ubiquitin
  misc_feature: Homolog of GI Number: 30725548 NR Desc: At4g26840
  misc_feature: Homolog of GI Number: 21537401 NR Desc: ubiquitin
  misc_feature: Homolog of GI Number: 6433950 NR Desc: SUMO protein
  misc_feature: Homolog of GI Number: 20386084 NR Desc: ubiquitin
  misc_feature: Homolog of GI Number: 2558518 NR Desc: Ubiquitin
  misc_feature: Homolog of GI Number: 55859483 NR Desc: ubiquitin
  misc_feature: Useful for accelerating flowering time
  misc_feature: Useful for making ornamental plants with modified leaves
MSGVTADEDKKPAGDGGGAHINLKVKGQDGNEVFFRIKRSTQLKKLMNAYCDRQSVDLNSIAFLFDGRRLRGEQTPDELEMEEGDEIDAMLHQTGGGFPRP

SEQ ID NO: 8425 - DNA, 577 bp, Zea mays
  misc_feature: Ceres CLONE ID no. 1451646
  misc_feature: Ceres CDNA ID no. 25445798
  CDS (126)..(299): REFERENCED BY SEQ ID NO: 8426
acctccccactcgagccagccagccagccagccagccgcttgggcgccatctctctagagcttcgtaccctcgaagagagatccggcgcggcctaataaacacccggctcactacagactcgcagatggccggcctcaggatgaagttcgtcgccgtcgccgccatggccgccgcgctcgtggcgtccgccgcagccgccgaggcccccgccccggctcccgcgtccgacgccgcggccgccgtacccctcgccgcggcctccctcgccgccgccgccttcggctacctcttctgctagatccgcgctggatacgtggttcctgctccaaaatatgattcgtctggtctggcgcgcgtgagtccagctcgtgtgtcgtgtgtgtctctgtgtgaggtgtcggcgggcgtgtgtgtatgtatggagtcggccgcggcggcggcggcggaggaggtgtgcgcgtggtgggtggtacgtgcttcgacgcgccactgtttgtcgcggcgatcatgtactaccctgctgcgttttctggttatcaatgagatgatttatttgattcaaaaaaaaaaaaaaaa

SEQ ID NO: 8426 - protein, 57 aa, Zea mays
  misc_feature: Ceres CLONE ID no. 1451646
  misc_feature: Ceres CDNA ID no. 25445798
  misc_feature: Homolog of GI Number: 19919 NR Desc: Pistil extensin like protein
  misc_feature: Homolog of GI Number: 539029 NR Desc: cysteine
  misc_feature: Homolog of GI Number: 46396546 NR Desc: Chitin
  misc_feature: Homolog of GI Number: 539030 NR Desc: cysteine
  misc_feature: Homolog of GI Number: 6523547 NR Desc: hydroxyproline
  misc_feature: Homolog of GI Number: 76262498 NR Desc: pherophorin
  misc_feature: Homolog of GI Number: 53717377 NR Desc: hemagglutinin domain protein
  misc_feature: Homolog of GI Number: 34912294 NR Desc: putative extensin
MAGLRMKFVAVAAMAAALVASAAAAEAPAPAPASDAAAAVPLAAASLAAAAFGYLFC

SEQ ID NO: 8427 - DNA, 1202 bp, Zea mays
  misc_feature: Ceres CLONE ID no. 1451756
  misc_feature: Ceres CDNA ID no. 25402744
  CDS (79)..(903): REFERENCED BY SEQ ID NO: 8428
tttagccgccgccacagcctccagctccaaaccctcatccccccatccgagctcactgccccccacccccacccagccatggcggaccgcggcggcgagcgtggcgtcgaccgcggcggcttcggacgcggcttcgggcgcggcgggcgcggggaccgtggcgggcgccgcggcggccgccgcggcccccgccaggaggaggagaagtgggtgcccgtcaccaagctcggccgcctcgtcaaggagggccgcttcaccaagatggaggagatctacctccactcgctccccgtcaaggagcaccagatcgtggagacgctctgcccggggctcaaggacgaggtgatgaagatcaccccggtccagaagcagacccgcgccggacaacgcacccgcttcaaggccttcgtcgtcgtcggcgacagcaacggccacgtcggcctcggcgtcaagtgcgccaaggaggtggccacggccatccgtggcgccatcatcctcgccaagctctccatcgtgcccgtcaggaggggctactgggggaacaagatcggcctgccccacaccgtgccctgcaaggtcaccggcaagtgcggctccgtcaccgtgcgcatggtgcccgcccccaggggttccggaatcgtcgccgcccgcgtccccaagaaggtcctgcagttcgccgggattgatgatgtcttcacttcctcgcgtggatccaccaagacccttggcaacttcgtcaaggcaaccttcgactgcctgatgaagacctatggattcctcacccctgacttctggagggagacaaccttcactaaggcgccgtaccaggagttcaccgacatcttggcgaagccgaccaaggccctgatgcttgatgcaccagccgagaaggtagaagcttaggatgttgccataaaagggtttttactagctgggagctgtctgttgcacttccctttattatagtcgagaaccaggtgtctttgaattgtgctacttgtggaagtctctgtttgctgtcaagttttggattatggtgcaatgctactctctgttatcggcaacatttttggtctgtgctttgtgttgatcgtatccatttgcctcctgctttgtttggaatgtggtagtttggctggtgtgatttcagcagccttgcctttatatgtgatattttcttcatcccaaaaaaaaaaaaaaaa

SEQ ID NO: 8428 - protein, 274 aa, Zea mays
  misc_feature: Ceres CLONE ID no. 1451756
  misc_feature: Ceres CDNA ID no. 25402744
  misc_feature (167)..(240): Pfam Name: Ribosomal_S5_C PFAM Desc: Ribosomal protein S5
  misc_feature (84)..(150): Pfam Name: Ribosomal_S5 PFAM Desc: Ribosomal protein S5
  misc_feature: Homolog of GI Number: 50919281 NR Desc: putative 40S ribosomal protein S2
  misc_feature: Homolog of GI Number: 50935111 NR Desc: putative 40S ribosomal protein S2
  misc_feature: Homolog of GI Number: 22137092 NR Desc: At2g41840/T11A7.6
  misc_feature: Homolog of GI Number: 21553851 NR Desc: 40S ribosomal protein S2
  misc_feature: Homolog of GI Number: 30017231 NR Desc: At3g57490
  misc_feature: Homolog of GI Number: 22137288 NR Desc: At1g59359/T4M14_3
  misc_feature: Homolog of GI Number: 18181932 NR Desc: ribosomal protein S2
  misc_feature: Homolog of GI Number: 21618011 NR Desc: ribosomal protein S2
  misc_feature: Homolog of GI Number: 21539457 NR Desc: ribosomal protein S2
  misc_feature: Homolog of GI Number: 50755669 NR Desc:  similar to 40S ribosomal protein S2
  misc_feature: Useful for increasing chlorophyll and photosynthetic capacity
  misc_feature: Useful for sterility
MADRGGERGVDRGGFGRGFGRGGRGDRGGRRGGRRGPRQEEEKWVPVTKLGRLVKEGRFTKMEEIYLHSLPVKEHQIVETLCPGLKDEVMKITPVQKQTRAGQRTRFKAFVVVGDSNGHVGLGVKCAKEVATAIRGAIILAKLSIVPVRRGYWGNKIGLPHTVPCKVTGKCGSVTVRMVPAPRGSGIVAARVPKKVLQFAGIDDVFTSSRGSTKTLGNFVKATFDCLMKTYGFLTPDFWRETTFTKAPYQEFTDILAKPTKALMLDAPAEKVEA

SEQ ID NO: 8429 - DNA, 647 bp, Zea mays
  misc_feature: Ceres CLONE ID no. 1452106
  misc_feature: Ceres CDNA ID no. 29191780
  CDS (119)..(478): REFERENCED BY SEQ ID NO: 8430
acaactcgcagctcacaagcctcaagcactactgcacgcagatccaaagcattcgcttgccatcatcccctctcctctccaagtctcgggcaaggctttcaccgtcgacaagaaccggatggctcgcttcgccgtcgtcgccgccatcctcgccctcctcgccgtcggcgccgccgcgcagggccccatgccggcgccccggatggccccgcttccggcgccaccggcgaggtccccggccaccgcccccgcgccggtcgccacccctccaaccgccgcgtcgccgtccccgatggcatctccccctgccccgaccaccgacgctccctccgcgatgacgccgtccgcggtctctgccacacccaccggcgcacccatcggcgcccccaccggcacccccgcgagctccgccgtttactcatcggccgccagcttcgtcgcagtcgtcggagcggtcgccgccgccatcgtgttctagatggatcgacgatttttttagcggggggactctgttcgctgttgtctatacaatttcattctttctgagatttcttcgttatagacggaggaaagattacacacgacattgcgatgtaatcttgatacgagattattatgaatataaaattctaaaaaaaaaaaaaaaa

SEQ ID NO: 8430 - protein, 119 aa, Zea mays
  misc_feature: Ceres CLONE ID no. 1452106
  misc_feature: Ceres CDNA ID no. 29191780
  misc_feature: Homolog of GI Number: 21992 NR Desc: extensin
  misc_feature: Homolog of GI Number: 6523547 NR Desc: hydroxyproline
  misc_feature: Homolog of GI Number: 488731 NR Desc: chitinase
  misc_feature: Homolog of GI Number: 30140331 NR Desc: putative arabinagalactan protein
  misc_feature: Homolog of GI Number: 227614 NR Desc: Thr rich extensin
  misc_feature: Homolog of GI Number: 76262498 NR Desc: pherophorin
  misc_feature: Homolog of GI Number: 50940371 NR Desc: putative pherophorin
MARFAVVAAILALLAVGAAAQGPMPAPRMAPLPAPPARSPATAPAPVATPPTAASPSPMASPPAPTTDAPSAMTPSAVSATPTGAPIGAPTGTPASSAVYSSAASFVAVVGAVAAAIVF

SEQ ID NO: 8431 - DNA, 739 bp, Zea mays
  misc_feature: Ceres CLONE ID no. 1452216
  misc_feature: Ceres CDNA ID no. 24766076
  CDS (87)..(533): REFERENCED BY SEQ ID NO: 8432
acaacaccaagaagcaagaaaactagaaaaggctcctcccgaccgcaacgcccctcatctccctcgaccccgacatccccgacccgatggcgcccaaggcggagaagaagccagcggagaagaagccggcggccgaggagaaggcggagaagacgaccgcagggaagaagcccaaggccgagaagcggctgcccgcgtccaagtcctccggcaaggagggcggcgagaagaaggggaagaagaaggccaagaagagcgtggagacctacaagatctacatcttcaaggtgctgaagcaggtgcaccccgacatcggcatatcctccaaggccatgtccatcatgaactccttcatcaacgacatctttgagaagctggccggcgaggccgccaagctggcgcggtacaacaagaagcccaccatcacgtcccgcgagatccagacctccgtgcgcctagtcctccccggagagctcgccaagcacgccgtctccgagggaaccaaggccgtcaccaagttcaccagcaactgagcgcgctgcgggatccgcggatctgttagaagggttctttgctgtgtcctttccccagtcccccaccctacccgcctagtagctagcttgcctgctctataaatccggcgcgccggattgtaatggtcctcttagatttgatgtccctgttgtggaatatagttgtatctctccgcttgctatttttctcaaaaaaaaaaaaaaaa

SEQ ID NO: 8432 - protein, 148 aa, Zea mays; identical to SEQ ID NO: 244
  misc_feature: Ceres CLONE ID no. 1452216
  misc_feature: Ceres CDNA ID no. 24766076
  misc_feature: No seed is being produced by the plant
  misc_feature: The plant flowers significantly late compared to wild-type.
  misc_feature: Useful for biocontainment applications
  misc_feature: Useful for making plants with modulated flowering time
  misc_feature (55)..(127): Pfam Name: Histone PFAM Desc: Core histone H2A/H2B/H3/H4
  misc_feature: Homolog of GI Number: 21801 NR Desc: histone H2B
  misc_feature: Homolog of GI Number: 577825 NR Desc: H2B histone
  misc_feature: Homolog of GI Number: 22325 NR Desc: H2B histone
  misc_feature: Homolog of GI Number: 1708107 NR Desc: Histone H2B
  misc_feature: Homolog of GI Number: 22323 NR Desc: H2B histone
  misc_feature: Homolog of GI Number: 50947133 NR Desc: putative Histone H2B.2
  misc_feature: Homolog of GI Number: 34895888 NR Desc: putative histone H2B
  misc_feature: Homolog of GI Number: 34895838 NR Desc: putative histone H2B
  misc_feature: Homolog of GI Number: 34895832 NR Desc: putative histone H2B
  misc_feature: Homolog of GI Number: 34895896 NR Desc: putative histone H2B

SEQ ID NO: 8433 - DNA, 640 bp, Zea mays
  misc_feature: Ceres CLONE ID no. 1452283
  misc_feature: Ceres CDNA ID no. 40351887
  CDS (168)..(476): REFERENCED BY SEQ ID NO: 8434
acaacacactcctactctctctttgcggccggtctctgctttcagattcatttctaaccagggttcctccagcccagccgccgccactgttgaggagctcacatcgcctcgacacaacacggtctctggtttcaacgtataataactgggctgcgagcactatatggatgatggcttcacgaggcaccagtgccgtgctttcaagggctgctcggatgaggcaaaaactgcagtctgccttggaggccagtgccctagatattgaagacgtttcttaccaacatgccgggcatgcagccgtcaaggacaatgcgaacgagacgcacttcaacatcaaggttgtttcaccaaaatttgaggggcagaaccttgtgaagcgtcacaggatggtgtatgatcttctgagggatgagcttagctcaggcctccatgctgtctccattgttgcgaaaaccccgaaagagttagggtcttgattgtataacaatgttgaataagcactgtcctatgtttcgaaataagtctgtcgtagcagccatgacactgattgccaaaacaatgtcaccggcatgctcttcttattaagatctggtactcttcttattaagatctggtattcggattaaaaaaaaaaaaaaaa

SEQ ID NO: 8434 - protein, 102 aa, Zea mays
  misc_feature: Ceres CLONE ID no. 1452283
  misc_feature: Ceres CDNA ID no. 40351887
  misc_feature (20)..(100): Pfam Name: BolA PFAM Desc: BolA
MMASRGTSAVLSRAARMRQKLQSALEASALDIEDVSYQHAGHAAVKDNANETHFNIKVVSPKFEGQNLVKRHRMVYDLLRDELSSGLHAVSIVAKTPKELGS

SEQ ID NO: 8435 - DNA, 523 bp, Zea mays
  misc_feature: Ceres CLONE ID no. 1452287
  misc_feature: Ceres CDNA ID no. 36707115
  CDS (82)..(357): REFERENCED BY SEQ ID NO: 8436
aagcatactattagacataccggtatatattattgttcttagtcatcgcacaagactcttgtcaacaagaccaacaacaggatgaggactgccgtgcatgctgcgctttgcattgtgcttgtgataatgtcttcaacactgtcatcttgcgagaacgatgagaaggtatctatcgcatgtgacacaggatgcaatgccgcgatctcccgtctcaaatgcttcctgatggcctattctgaagggaaagtgttggtcagcagcaactgcgaaacgccgaccaggtgcggctgcgtgtttcgtcacaaacaagatgcaacccttatcgccggcgacgttggcaacaaaaagggatattgatggcagacgtgtatttcttggttgaataatatatactgctagaattaatatgggcaccaacaacgaaatatctataatgttattcttcagtgtaatgcttccagcatgttctgttttagtataactaaatatctatctttccccctttataaaaaaaaaaaaaaaa

SEQ ID NO: 8436 - protein, 91 aa, Zea mays
  misc_feature: Ceres CLONE ID no. 1452287
  misc_feature: Ceres CDNA ID no. 36707115
MRTAVHAALCIVLVIMSSTLSSCENDEKVSIACDTGCNAAISRLKCFLMAYSEGKVLVSSNCETPTRCGCVFRHKQDATLIAGDVGNKKGY

SEQ ID NO: 8437 - DNA, 1016 bp, Zea mays
  misc_feature: Ceres CLONE ID no. 1452331
  misc_feature: Ceres CDNA ID no. 29191733
  CDS (3)..(797): REFERENCED BY SEQ ID NO: 8438
ccttccgaatctcggacgcctccgcgccggccgcagggcacgcgacttccgttccggcggcgggggaagagatggcggcgaacctcgaggacgtgccgtcggtggatctcatcaccgaggtgctccgccgcgccaagtgcagctccaagcccgacaagcgcatcatcctcgtcggtccacctggctctggaaagggtacgcagtcgccccttattaaggatgaatactgcttgtgccatttagccactggtgatatgctgagagctgctgttgctgctaagactcctctggggatcaaggctaaagaagctatgaacaagggagagcttgtttcagatgacttggttgttgggattatcgatgaagccatgaagaaaccctcatgccagaagggttttatccttgatggcttccctagaactgttgttcaagcacaaaagcttgatgacatgctggcaaagcaaggcgctaaagttgacaaggttttgaacttcgcaattgatgatgcaatattggaagaacgaattactggccgctggatacacccatcgagtggcagatcttaccatacaaagtttgctcctccgaagactcctggagttgatgatgttaccggagagcccttgattcaaaggaaagatgacacagctgcggttttaaagtcaaggcttgaggctttccatatgcaaaccgaacctgtgattgactactactccaagaatggcttggtggcaaatcttcatgcggagaaaccaccaaaggaagtgaccgttgaggtgcagaaagccctttcatgaagcagcccattttcacattgaaaacggcatgtaccaaagcccttgcctgggttcctagaactaggaagtaataaactgataccggcaccgtatgattcacattttccgcctgcaatgtgcgtgattgcaccattttgttacagcttttgcaagctcatgattggtccgagcaatttaaccgtgcaaatgaacattcttttatgaaaaaaaaaaaaaaaa

SEQ ID NO: 8438 - protein, 241 aa, Zea mays
  misc_feature: Ceres CLONE ID no. 1452331
  misc_feature: Ceres CDNA ID no. 29191733
  misc_feature (33)..(219): Pfam Name: ADK PFAM Desc: Adenylate kinase
  misc_feature: Homolog of GI Number: 391877 NR Desc: adenylate kinase
  misc_feature: Homolog of GI Number: 62734015 NR Desc: adenylate kinase b
  misc_feature: Homolog of GI Number: 19310681 NR Desc: putative adenylate kinase
  misc_feature: Homolog of GI Number: 7630193 NR Desc: adenylate kinase
  misc_feature: Homolog of GI Number: 21554270 NR Desc: adenylate kinase
  misc_feature: Homolog of GI Number: 28466937 NR Desc: At5g50370
  misc_feature: Homolog of GI Number: 3746809 NR Desc: adenylate kinase
  misc_feature: Homolog of GI Number: 79332010 NR Desc: ADK1
  misc_feature: Homolog of GI Number: 4138286 NR Desc: adenylate kinase
  misc_feature: Homolog of GI Number: 45201283 NR Desc: AGR187Wp
  misc_feature: Useful for sterility
MAANLEDVPSVDLITEVLRRAKCSSKPDKRIILVGPPGSGKGTQSPLIKDEYCLCHLATGDMLRAAVAAKTPLGIKAKEAMNKGELVSDDLVVGIIDEAMKKPSCQKGFILDGFPRTVVQAQKLDDMLAKQGAKVDKVLNFAIDDAILEERITGRWIHPSSGRSYHTKFAPPKTPGVDDVTGEPLIQRKDDTAAVLKSRLEAFHMQTEPVIDYYSKNGLVANLHAEKPPKEVTVEVQKALS

SEQ ID NO: 8439 - DNA, 720 bp, Zea mays
  misc_feature: Ceres CLONE ID no. 1452371
  misc_feature: Ceres CDNA ID no. 25892882
  CDS (75)..(353): REFERENCED BY SEQ ID NO: 8440
acaatcaacctcccactcccggcgcaccaaaggcaacgacgcgctgctaagttagctacacgcaccaacacataatggcttgcgccttcttcttcgacgccgagccggtcagcgagcccggcgtgcacgccctggacgcgtgcgcactctgcaccaagccgctggcaagggacagcgacatcttcatgtacagaggggacacgcccttctgcagcgacgagtgccgccacgagcagatgcggctcgatgccgcttgcgccagggcggccgcccggaggcagaagcagttctctacgggaactgggtccgggcgtgcacgccgggagtgctgggaggtgtccgtcgccagctaaccggtgacggtgccaggctgcctacgcactagagccaacaagatgtgcgtgcacgaagacgccgccgtcgcccgtggccaactgatcagcgcgggatcgaggagactcgccttggttgaagaagcaagacgcgggccatcggagttgctcccggcaggccggcgatgcatgtgccgccggtcaagtgatttgggcataaacgcagcggaaaaggagctgcactggatctgaacaagtcaactcaaacgagattcaccacgcaatcaggcggccatgtgtggccctcaactcttttttttttcctgcgtttatatgtcacttctgttctgtatgaagcgaatttgcaattgcaaaaaaaaaaaaaaaa

SEQ ID NO: 8440 - protein, 92 aa, Zea mays
  misc_feature: Ceres CLONE ID no. 1452371
  misc_feature: Ceres CDNA ID no. 25892882
  misc_feature: Homolog of GI Number: 50928303 NR Desc: OSJNBa0013K16.16
  misc_feature: Homolog of GI Number: 50928305 NR Desc: OSJNBa0013K16.17
  misc_feature: Homolog of GI Number: 15238001 NR Desc: senescence
  misc_feature: Homolog of GI Number: 50928295 NR Desc: OSJNBa0013K16.12
MACAFFFDAEPVSEPGVHALDACALCTKPLARDSDIFMYRGDTPFCSDECRHEQMRLDAACARAAARRQKQFSTGTGSGRARRECWEVSVAS

SEQ ID NO: 8441 - DNA, 1081 bp, Glycine max
  misc_feature: Ceres CLONE ID no. 1452545
  misc_feature: Ceres CDNA ID no. 35383411
  CDS (79)..(864): REFERENCED BY SEQ ID NO: 8442
gttgttgaagccgcttcttcatcttcttcttcgctgttactcgtcgtcggcagcagcagcttctgaagctcaccaaccatggctgtcgggaagaacaagaggatctcaaaaggtcgtaaaggagggaagaagaagattgttgatccattctccaagaaggattggtatgacatcaaggctccctctatcttcaaacagagaaatgtcggcaagacacttgtttctagaactcagggtaccaagattgcctctgagggtttgaaacacagagttttcgaggtttctcttgctgatctccaaggtgatgaggaccactcttacaggaagatccgtctcagagctgaagatgttcagggcaggaatgtcttgacccagttctggggtatggatttcaccaccgacaagctgaggtcgttggtgaagaagtggcagactttgattgaagctcatgtcgatgtgaagaccactgacagctacaccttgaggttgttctgcattgctttcaccaagaggcgtgctaaccaggtcaagcgtacttgctatgctcagtccagccaaatccgccagatccgcaggaagatgagtgaaatcatggtgaaggaggcttcatcctgtgaccttaaggagcttgtggccaagttcatccctgagtccattggaagagatattgagaaggcgactcagaacatctacccgttgcagaatgtgttcatccgtaaggtcaagatcctcaaggctcccaagtttgaccttggcaagctcatggaggttcatggtgactacacagcagaggatgttggtgtgaaagtagacaggccagatgaaacagtggctgaggaaccaaccgaaatcatcggagcttagaggattatagatttgtagccattgatgtggagttctttgataagagaacttccacttcagtgcgactctttttgtattcgtttttgatggattattattactctcgtttaccctgtttttaatattaagtacctcatttctattcttcattcctggatttgatttaactgttatgaaaaaaatcaatgaaatttgtcgtggaaaaaaaaaaaaaaaa

SEQ ID NO: 8442 - protein, 261 aa, Glycine max
  misc_feature: Ceres CLONE ID no. 1452545
  misc_feature: Ceres CDNA ID no. 35383411
  misc_feature (11)..(222): Pfam Name: Ribosomal_S3Ae PFAM Desc: Ribosomal S3Ae family
  misc_feature: Homolog of GI Number: 7270417 NR Desc: Putative S
  misc_feature: Homolog of GI Number: 21553921 NR Desc: putative 40S ribosomal protein S3A
  misc_feature: Homolog of GI Number: 1350983 NR Desc: 40S ribosomal protein S3a
  misc_feature: Homolog of GI Number: 82400124 NR Desc: 40S ribosomal protein S3a
  misc_feature: Homolog of GI Number: 7441118 NR Desc: ribosomal protein S3a
  misc_feature: Homolog of GI Number: 6714564 NR Desc: cyc07
  misc_feature: Homolog of GI Number: 24817254 NR Desc: ribosomal protein S3a
  misc_feature: Homolog of GI Number: 81074465 NR Desc: cyc07
  misc_feature: Homolog of GI Number: 82623437 NR Desc: 40S ribosomal protein S3a
  misc_feature: Homolog of GI Number: 81074079 NR Desc: cyc07
  misc_feature: Useful for making shorter plants
  misc_feature: Useful for modifying plant structure
  misc_feature: Useful for sterility
MAVGKNKRISKGRKGGKKKIVDPFSKKDWYDIKAPSIFKQRNVGKTLVSRTQGTKIASEGLKHRVFEVSLADLQGDEDHSYRKIRLRAEDVQGRNVLTQFWGMDFTTDKLRSLVKKWQTLIEAHVDVKTTDSYTLRLFCIAFTKRRANQVKRTCYAQSSQIRQIRRKMSEIMVKEASSCDLKELVAKFIPESIGRDIEKATQNIYPLQNVFIRKVKILKAPKFDLGKLMEVHGDYTAEDVGVKVDRPDETVAEEPTEIIGA

SEQ ID NO: 8443 - DNA, 1239 bp, Zea mays
  misc_feature: Ceres CLONE ID no. 1452604
  misc_feature: Ceres CDNA ID no. 40041421
  CDS (122)..(784): REFERENCED BY SEQ ID NO: 8444
agtcctcgacgcacgcccgcgcgcctcggcaaaccaccacgcccgccaccgccagccatactgagctccgccctggttccattccacccagagaggctccaagattgacgccgcgaccacgatgggcttccctgtggggtactcggactcggagacgctgctcccgcgcgtgctgctgcaggcgctcctcctcctgggccacctccaccgcttcctcctctgggccttccacgccgtggggctcggcgacctgatcgacctcggctgcaactacccgccgccgccgccctccgcgtccacggcggcggcggcgcaggagggccgcgacgtggcggccccgctgcggcactggcggccggagttcaggcccgtcccggcggtgcgcatcgaggaggcgctccccgtggtgcggttcgacgagcttgccgccgcggcgcgcggcgacggctacggcgactgtgactgtgactgcgcggtgtgcctcgacggcatcggcggcggcgacgaggtgcggcggctcggcaactgccgccacgccttccaccgcgcctgcctcgaccgctggatggcgcacggccagcgcacctgcccgctctgtcgcgcgccgctcgtccccggcgccgcggccgccggggatccctgggccgaagcgccgtggctcgacgcggccgactacgacgtgctgccctacccgtccacgcctctgctgatggtgcccaccccgacgctgctgcggcctcacgagctgctgctggtcgccggcctgggcggcggcttccagtgagcttctgcgtgtgcgtggctggtgtttgggcagcaggccacgcgaatccggtccgtggcaaggcgaaaaacgtcctcatgtcatgtgcggtgcggcacaccccgcccggtcggtcagacgcgtgaccgccgccatacctgctcgtccttcactcaacaactctgcagcagtcgtttgatcgtgtctccgtcggtgaaaagagaaaccaacggcagaggagggcgcgccctggtttttacagcggctgcggctcccaacttcccaacaagtgagaaaaaaagaagaagaggcgaaacatactaagaccagccctagaaaactagctagccaagtactatgttgatctgtaggccgctttggcgattccgtcttccaaacctgtggagttgtgaatccttttgcagattaaagtaaagttcgttagcaagaaaaaaaaaagaaaaaaaaaaaaaaaa

SEQ ID NO: 8444 - protein, 220 aa, Zea mays
  misc_feature: Ceres CLONE ID no. 1452604
  misc_feature: Ceres CDNA ID no. 40041421
  misc_feature (117)..(159): Pfam Name: zf PFAM Desc: Zinc finger
  misc_feature: Homolog of GI Number: 50253143 NR Desc: putative BRH1 RING finger protein
  misc_feature: Homolog of GI Number: 50928191 NR Desc: OSJNBa0011J08.19
  misc_feature: Homolog of GI Number: 28394017 NR Desc: putative RING zinc finger protein
  misc_feature: Homolog of GI Number: 21554155 NR Desc: RING zinc finger protein
  misc_feature: Homolog of GI Number: 4689366 NR Desc: BRH1 RING finger protein
  misc_feature: Homolog of GI Number: 50928223 NR Desc: OSJNBa0064M23.12
  misc_feature: Homolog of GI Number: 33589712 NR Desc: At1g63840/T12P18_14
  misc_feature: Homolog of GI Number: 50906683 NR Desc: putative EL5
  misc_feature: Homolog of GI Number: 67987177 NR Desc: 4Fe
  misc_feature: Homolog of GI Number: 51090791 NR Desc: putative Avr9/Cf
MGFPVGYSDSETLLPRVLLQALLLLGHLHRFLLWAFHAVGLGDLIDLGCNYPPPPPSASTAAAAQEGRDVAAPLRHWRPEFRPVPAVRIEEALPVVRFDELAAAARGDGYGDCDCDCAVCLDGIGGGDEVRRLGNCRHAFHRACLDRWMAHGQRTCPLCRAPLVPGAAAAGDPWAEAPWLDAADYDVLPYPSTPLLMVPTPTLLRPHELLLVAGLGGGFQ

SEQ ID NO: 8445 - DNA, 674 bp, Zea mays
  misc_feature: Ceres CLONE ID no. 1452719
  misc_feature: Ceres CDNA ID no. 25447068
  CDS (148)..(471): REFERENCED BY SEQ ID NO: 8446
gcatcttggctgctactcctgcctcccttcgtcttcctctgcctccagaaccagatcgccccctccgccgacccgcctccagatcggagcaaagcggccccctgtttgcttcgcggcaccagatcagcattcccattaggagaagcaatgtcggcagtaatcacaaagttcgccgtcacatctatggtgatgtggatggccccagttgcaatcatgtatgggtttatctaccagatttttccaggtgtcggtcagctttccccctcggcgcaaaccatggccagtggattccttgctgtcatctcggtcaatctagtgatcggcttttacatatacatggccatgaaggagactccccatcaagagccccagcctgatccaacctttctggcaaacgccaaagcaagcattaaccagccaacttcttctcaagtgagtgatgattcccatgggaaggggaaggtcgagtaggctgtagcgtaacttgagttgggttttatgtccatgatacacatgctatccagagtcagttgggttatgtgcttttgtaatattacgtccttctagtttgatgtagttgctggaaactttcagagttttggaagctatatgaagatgtatctttgtacccattatcagtagatactgtgttcaacccaaaaaaaaaaaaaaaa

SEQ ID NO: 8446 - protein, 107 aa, Zea mays
  misc_feature: Ceres CLONE ID no. 1452719
  misc_feature: Ceres CDNA ID no. 25447068
MSAVITKFAVTSMVMWMAPVAIMYGFIYQIFPGVGQLSPSAQTMASGFLAVISVNLVIGFYIYMAMKETPHQEPQPDPTFLANAKASINQPTSSQVSDDSHGKGKVE

SEQ ID NO: 8447 - DNA, 723 bp, Zea mays
  misc_feature: Ceres CLONE ID no. 1452758
  misc_feature: Ceres CDNA ID no. 25892883
  CDS (143)..(532): REFERENCED BY SEQ ID NO: 8448
ccatcgtgcatcttcgttcgtcgaaccaaagcggtacggaagggaagcaggcgccgtctccgtcgccgtcgtctcgttcgtccccaaatcttcaccgagcttccgctccgctctcgccccgcgcagcaacgcggaggaaggaatggacaagtatcacagcaacacccgctttgcaccccttagagacgctccatttgctctccgtggtgcctttggtacctccaactcatctttcaacaacatggatggccttagacactcctcaagcattgggcaagcaaagagctacacatcttctcccttaggagctctgcgacagaagatgcctccatctggaaaccgatccctacatacaagtcgtcccctgtctgctcctgttgcgaaccgcccactgtctccccatcttcctctgaagaaaccacagctgagcgccacgttctccatctcacaccgtatatttggcgttgcgctgggtgctgccatcatatccattcctcttgctaccaggtttggcgtcatgtttgaggtctgagtgaaatgcagcctgcgacgaggaggggtaacattgctgtgacggttccgttgttgcgcataatgcaactgtaggtgcagttgtaataactgtcttatcaatcctgcagattttatgaataatgtgggaaactatcctaaacatcagtgtaatgaaaacataattttgggtcttcaaaaaaaaaaaaaaaa

SEQ ID NO: 8448 - protein, 129 aa, Zea mays
  misc_feature: Ceres CLONE ID no. 1452758
  misc_feature: Ceres CDNA ID no. 25892883
  misc_feature (78)..(119): Pfam Name: Sdh_cyt PFAM Desc: Succinate dehydrogenase cytochrome b subunit
  misc_feature: Homolog of GI Number: 32400816 NR Desc: succinate dehydrogenase subunit 3
  misc_feature: Homolog of GI Number: 50937817 NR Desc: succinate dehydrogenase subunit 3
  misc_feature: Homolog of GI Number: 50904863 NR Desc: succinate dehydrogenase subunit 3
  misc_feature: Homolog of GI Number: 14861484 NR Desc: succinate dehydrogenase subunit 3
MDKYHSNTRFAPLRDAPFALRGAFGTSNSSFNNMDGLRHSSSIGQAKSYTSSPLGALRQKMPPSGNRSLHTSRPLSAPVANRPLSPHLPLKKPQLSATFSISHRIFGVALGAAIISIPLATRFGVMFEV

SEQ ID NO: 8449 - DNA, 1054 bp, Zea mays
  misc_feature: Ceres CLONE ID no. 1452946
  misc_feature: Ceres CDNA ID no. 40351888
  CDS (158)..(901): REFERENCED BY SEQ ID NO: 8450
acaggcaccgaacgaacaggacaacgagagaaagcaaagcgagctgctgcttccttatccggttcttcgccgtgagcgctccgcagggaacggtacgggaactgggggatccggacgttcttgtgtgtattatcgaatatcgagcaagctaagcgccatgggcagcgagtgcaagggctacggcgtcggcgtcgccaccagcccgcagcaggagcacgagcaggctggcgccgccgtcgcaccgttcgtggccaagacgttccacatggtgagcgacccggccacggacgccgtcgtgcgctggggcggcgccagcaacaccttcctcgtcctcgacccggccaccttctccgactacctgctgccctcctacttcaagcaccgcaacttcgccagcttcgtccggcagctcaacacctacgggttcaggaaggtggacacggaccggtgggagttcgcgcacgagtcgttcctgcggggccaggcgcgcctgctgccgctggtcgtgcgcaagaggaagacgaaggcgggcgccggcggcggccgggagctgtgcgaggccggggaggaggtgcgcgggaccatccgggccgtgcagcgcctgcgggagcagcagcgcggggtggaggacgagctgcgggccatggaccgccgcctgcgcgccgccgagagccggccggcccagatgatggcgttcctcgccaagctcgccgacgacccgggcctcgtgctgcgcgccatgctcgccaaggaggaggagctggccctgatcgacaaggggtcggaggcgcagccggccaagaggcggcggatcggggctgaagccgtggacctggcgcacagcaggggcgggggcgccgtgccgtttccgttctctgttctcggccaagtgttctactagggtagatacggactggtgtatatatgacttgcactgtattatagctttgcctcggtttcagcagttactgccttccgttttaccgtcggcttcatttttaaatttaaacgcgacaaataaaaaataagttcatttttaaaaaaaaaaaaaaaa

SEQ ID NO: 8450 - protein, 247 aa, Zea mays
  misc_feature: Ceres CLONE ID no. 1452946
  misc_feature: Ceres CDNA ID no. 40351888
  misc_feature (146)..(181): Pfam Name: HSF_DNA PFAM Desc: HSF
MGSECKGYGVGVATSPQQEHEQAGAAVAPFVAKTFHMVSDPATDAVVRWGGASNTFLVLDPATFSDYLLPSYFKHRNFASFVRQLNTYGFRKVDTDRWEFAHESFLRGQARLLPLVVRKRKTKAGAGGGRELCEAGEEVRGTIRAVQRLREQQRGVEDELRAMDRRLRAAESRPAQMMAFLAKLADDPGLVLRAMLAKEEELALIDKGSEAQPAKRRRIGAEAVDLAHSRGGGAVPFPFSVLGQVFY

SEQ ID NO: 8451 - DNA, 564 bp, Zea mays
  misc_feature: Ceres CLONE ID no. 1453073
  misc_feature: Ceres CDNA ID no. 36706471
  CDS (56)..(403): REFERENCED BY SEQ ID NO: 8452
aagagagtcgtcccagactatcccgctcccgccgggtagctaaccttatcttcccatggagccagcgaagctcgcagctttccttgccgtcgctgccgtcgcctacgctgttgccgtcgcaccggctgccgcggaatactccggcggcgcgaccgccccagaaagctgccagacgcaaatcatgtacttcaccaactgcctggcccgtgatgagatccgcgggcagtgctgtagcgtggtcgagagccgcgagtgcctctgccagctgaagcgggaggtggcgctgccctgcagcctgcatcgccaccatcaacgcagatgctccaaggaagggtcgcctccacggtcggtgaagctggccgagctgcagcgcctcccatgcttcaaaacactcaagtgctaggagccgttgcgagttcgtatttatgttttgtgtacgtgtgcttttgtttgtttcacaattgttccttgttactgtttatttccattcagcttgctatggatgtaggtacctgtgcttgtccgttgagaattccttgcgtgctcttaaaaaaaaaaaaaaaa

SEQ ID NO: 8452 - protein, 115 aa, Zea mays
  misc_feature: Ceres CLONE ID no. 1453073
  misc_feature: Ceres CDNA ID no. 36706471
MEPAKLAAFLAVAAVAYAVAVAPAAAEYSGGATAPESCQTQIMYFTNCLARDEIRGQCCSVVESRECLCQLKREVALPCSLHRHHQRRCSKEGSPPRSVKLAELQRLPCFKTLKC

SEQ ID NO: 8453 - DNA, 614 bp, Zea mays
  misc_feature: Ceres CLONE ID no. 1453089
  misc_feature: Ceres CDNA ID no. 40351889
  CDS (3)..(398): REFERENCED BY SEQ ID NO: 8454
atgtgattgattctctcctgctccttctttcttccatctctcctgtctctcttctctctctctctctctgtctgtctgtctggcaaaggccactgacggccgtggcggtgtcgatggagtggtggcagaaggcggtggtggtgccggtgaagcgcgcgtggatcgccgccgccgcccggctgacgacgcgccataagaaagaagacggcggccacggcgtcctggtgaagctccacgacgacgtccagacgtgcgcgtacgaggacgtgcaggtgatgtgggagatgctgcagcgggccgagacggagaggctggcacgcgagccctcgccaaagggcgcccgcgcgctcgtctggctgcgccgccaccacaagatggacccgcgccggcgctgctgaggaggacgacgacgacgacaccctgatgcttttccttcctcctgctgccccttcggctttgcttaccagctgccaccctgtgcagccttgccctgtgatgcgagagccgctcatctgcggctgtgtgtacatattacatgctacatacagggtacagtacagccctgctgctgtgcctttggtttccttcgcccggatgtaaaaaaaaaaaaaaaa

SEQ ID NO: 8454 - protein, 94 aa, Zea mays
  misc_feature: Ceres CLONE ID no. 1453089
  misc_feature: Ceres CDNA ID no. 40351889
MEWWQKAVVVPVKRAWIAAAARLTTRHKKEDGGHGVLVKLHDDVQTCAYEDVQVMWEMLQRAETERLAREPSPKGARALVWLRRHHKMDPRRRC

SEQ ID NO: 8455 - DNA, 680 bp, Zea mays
  misc_feature: Ceres CLONE ID no. 1453095
  misc_feature: Ceres CDNA ID no. 35383412
  CDS (65)..(466): REFERENCED BY SEQ ID NO: 8456
acacttactgacttacacgaccacacgtataatctgtagatcgatcgctgttcgtaccaccacaatggagtaccaggggcagcacggccacgccaccgacaaggtggaggagtacggccagcctgtggccgggcacggcggtttcaccggcaggcccacggggacgcacggcgcgcagctccaggcgacgagggacgaccacaagaccgacggcgtccttcgccgctccggcagctccagctccagctcgtccgaggacgacggcgtgggcggcaggaggaagaaggggatgaaggagaagatcaaggagaagctccccggcggagcccacaaggacgccaccgccgggcagcagcacacggcggtggcgggcgagtacgcgggcacgcacggcaccgaggccaccggcgagaagaagggcgtcatggacaagatcaaggagaagcttcccggcggacagcactgaggcagctatgtgtgtcttctctgtgttccgtccaagctcggcttggctagcatctgcagggatgccgttactagggataaataatggactctggtatacctcgtgtgcacgagcgcgcccgcgtgacgcatttgtgtgttcgtatggtatgatgtgtgtacatcgtaataaaaacgtttatttgtgtttttgtagtacaaaaaaaaaaaaaaaa

SEQ ID NO: 8456 - protein, 133 aa, Zea mays; identical to SEQ ID NO: 4236
  misc_feature: Ceres CLONE ID no. 1453095
  misc_feature: Ceres CDNA ID no. 35383412
  misc_feature (11)..(133): Pfam Name: Dehydrin PFAM Desc: Dehydrin
  misc_feature: Homolog of GI Number: 18966 NR Desc: dehydrin
  misc_feature: Homolog of GI Number: 296198 NR Desc: dehydrin 7
  misc_feature: Homolog of GI Number: 6017930 NR Desc: dehydrin
  misc_feature: Homolog of GI Number: 18968 NR Desc: dehydrin
  misc_feature: Homolog of GI Number: 4105105 NR Desc: dehydrin 2
  misc_feature: Homolog of GI Number: 1771076 NR Desc: dehydrin
  misc_feature: Homolog of GI Number: 59894261 NR Desc: dehydrin 1
  misc_feature: Homolog of GI Number: 59894275 NR Desc: dehydrin 1
  misc_feature: Homolog of GI Number: 59894281 NR Desc: dehydrin 1
  misc_feature: Homolog of GI Number: 59894257 NR Desc: dehydrin 1

SEQ ID NO: 8457 - DNA, 623 bp, Zea mays
  misc_feature: Ceres CLONE ID no. 1453291
  misc_feature: Ceres CDNA ID no. 29191900
  CDS (88)..(480): REFERENCED BY SEQ ID NO: 8458
cttgtaaccctagccgcctgcgcgccgccacacgaaccccccacccaacccgagcgagcaccggccgaggaggaagaggaaggtgagatggctcgcggcacggcggcgacggcggcggcggctgccaagggcaagaagaaggggtccgtctccttcgtgatcgactgcaccaagcccgtggaggacaagatcatggagatcgcgtcgctggagaagttcctccaggagcgcatcaaggtcgccggcggcaaggccgggaatctcggcgactccgtcaccgtcacgcgcgacaagagcaaggtcaccgtcacctccgacggcgccttctccaagaggtacctcaagtacttgacaaagaagtacttgaagaagcacaacgtgcgggactggcttcgtgtgatcgcagccaacaaggagcgcaacgtgtacgagctccggtacttcaacatcgctgagaacgagggcgaggaggaggattagagtgcattgttatattgtagtgcttgttgagttttgatacttgatctgagtacctcctagttatccacctatcttatgttgtgctctgttgaacatgaatggtttaatttgaagaatccttatatttaaaaaaaaaaaaaaaa

SEQ ID NO: 8458 - protein, 130 aa, Zea mays; identical to SEQ ID NO: 4928
  misc_feature: Ceres CLONE ID no. 1453291
  misc_feature: Ceres CDNA ID no. 29191900
  misc_feature (14)..(130): Pfam Name: Ribosomal_L22e PFAM Desc: Ribosomal L22e protein family
  misc_feature: Homolog of GI Number: 50939919 NR Desc: putative 60S ribosomal protein L22
  misc_feature: Homolog of GI Number: 42733478 NR Desc: BRI1
  misc_feature: Homolog of GI Number: 6714454 NR Desc: putative 60S ribosomal protein  L22
  misc_feature: Homolog of GI Number: 12642842 NR Desc: putative 60S ribosomal protein L22
  misc_feature: Homolog of GI Number: 6056419 NR Desc: 60S ribosomal protein  L22
  misc_feature: Homolog of GI Number: 57086899 NR Desc:  similar to ribosomal protein L22
  misc_feature: Homolog of GI Number: 13592059 NR Desc: ribosomal protein L22
  misc_feature: Homolog of GI Number: 33150766 NR Desc: heparin
  misc_feature: Homolog of GI Number: 45383834 NR Desc: ribosomal protein L22

SEQ ID NO: 8459 - DNA, 616 bp, Zea mays
  misc_feature: Ceres CLONE ID no. 1453309
  misc_feature: Ceres CDNA ID no. 25446123
  CDS (64)..(426): REFERENCED BY SEQ ID NO: 8460
ctcttggttcgccgaaccccaaaccctagtttcgctcgttgcggcggctgcggcgagccggcgatggcgaagtctctgcgatccaaacgcgagaagcggcttcggacgttgcgccgggagatagcggagccgttctacgacaagaaggaggccgccaagctcgccgcgcaggccgcagccctagctgctgccccgctcccggtccgcggccccccgccgtcccaggatgccggctcctcccgcgcagctagctcggcctcggctatggctatggatgtggagatgtctggtgcagggaacagcaggtctaagaccttcctgaggccacttggcagcattagcaagaagaaggtgcagcttcatttgaagatcaagaaagacaagagaaaagctaggaagaagggaaagttttcttttaagaagtagacgagtgtatgatgaatcatgcagttttgttcccagtttgtaaaacaaacgcactgcagtcatgtcatgtggtgcacctacctaagtccattcatgggtgacctactaaatatgttgaaatgggtacgaaaaaaggatagtgctgacctatcagctgtttctgttcaaaaaaacaaaaaaaaaaaaaaaa

SEQ ID NO: 8460 - protein, 120 aa, Zea mays; identical to SEQ ID NO: 4836
  misc_feature: Ceres CLONE ID no. 1453309
  misc_feature: Ceres CDNA ID no. 25446123
  misc_feature: Homolog of GI Number: 50928655 NR Desc: OSJNBa0085I10.17

SEQ ID NO: 8461 - DNA, 808 bp, Zea mays
  misc_feature: Ceres CLONE ID no. 1453315
  misc_feature: Ceres CDNA ID no. 25446799
  CDS (151)..(594): REFERENCED BY SEQ ID NO: 8462
gattagttgatagcccagcaaggaagcccaaactcgtgacccctccttcttctattcatttcgccgagaggcgagagaactgcttcgcacctacgttactgctgaagatccagccggcacaccatcggcgaagaagaggccggagagaggatgatactggccgtgctcttcgccaactccgatggaaacatccttgtcgagcgattccatggggttcccgcggaggagaggctccactggcgctccttcctggtgaagctcggatccgagaacctcaaagggtccaagaacgaggagctccacgttgcctcccacaagtctgtgtctattgtttataccacggtcggggatgtctgcctctacattgttggcaaggatgaatatgatgagcttgctttggctgaggtgatctttgcaattacatcagcagtcaaggatgtttgtgcgaaacctcctaccgagcgcctcttccttgacaaatacgggaggatctgcttgtgccttgatgagattgtttggaaggggttgcttgaaaacacggagaaagacagagtgaggaggttgattagactaaagccccctgtggagccataatttgcatgtaaagcttatgttggcgttgctgtaatccaaatccaatcccatttgcatttgtaggcaaattttcagagttttcatctgcactttgtatctacagaattatcatcacttattggaggattgcgtgtgtgacatcaaaaacaatgtatcatctgtgtatttgctatgttgataagtgtgttactgcgttgtaaaaaaaaaaaaaaaa

SEQ ID NO: 8462 - protein, 147 aa, Zea mays
  misc_feature: Ceres CLONE ID no. 1453315
  misc_feature: Ceres CDNA ID no. 25446799
  misc_feature: Homolog of GI Number: 50920221 NR Desc: putative chloroplastic RNA
MILAVLFANSDGNILVERFHGVPAEERLHWRSFLVKLGSENLKGSKNEELHVASHKSVSIVYTTVGDVCLYIVGKDEYDELALAEVIFAITSAVKDVCAKPPTERLFLDKYGRICLCLDEIVWKGLLENTEKDRVRRLIRLKPPVEP

SEQ ID NO: 8463 - DNA, 783 bp, Zea mays
  misc_feature: Ceres CLONE ID no. 1453331
  misc_feature: Ceres CDNA ID no. 25445865
  CDS (61)..(516): REFERENCED BY SEQ ID NO: 8464
attggcacacacgcggacacaccacaggcgcgcaagcccaaccgatcgagcagctctagcatggcgagcggcggctactactacgaccagagcgcgggctacggcggctacagctactcggcggcgccgaggacgacgccgtcccacctcctggtgttcctggccaccgtggcgctgctgggcgccacgtcgctctactcgcgctacgagtccgcggtggagagcctggtggaccaggtgcggttcgccgtggtgctgtccccgctgctgctcctgctcgcggtccagtactgggcggccacggccgggtcccggcggccccggggcggcgccctcccgtcgctgctggccagggaccagccctcctggtacgccggcggcggcggatggggccagcgggacggcgcgtcgtcgtcgccgtggggcgtggcgctcgcgctcgccctggtgctgctcctcgtctcctaccagtcgtgcttccgcgacatgtggttcccgctggtcacccgccggtgagctcacctcagtccaggccaggcccttctggcggcatgtatcaccagcttcttgcagtgccgctggacggagatggaggagaatcatcaaacaccagataggatgctgctgttagcaagtggaggcggtgtggcatcgataaacacactcgctgttcgtctacacgggctgcgatcaatatagtagtatagtgtagttattgtaataatagaatattgaatactactaattaaaaaaagggaaaatggcagaaaaaaaaaaaaaaaa

SEQ ID NO: 8464 - protein, 151 aa, Zea mays
  misc_feature: Ceres CLONE ID no. 1453331
  misc_feature: Ceres CDNA ID no. 25445865
MASGGYYYDQSAGYGGYSYSAAPRTTPSHLLVFLATVALLGATSLYSRYESAVESLVDQVRFAVVLSPLLLLLAVQYWAATAGSRRPRGGALPSLLARDQPSWYAGGGGWGQRDGASSSPWGVALALALVLLLVSYQSCFRDMWFPLVTRR

SEQ ID NO: 8465 - DNA, 805 bp, Zea mays
  misc_feature: Ceres CLONE ID no. 1453522
  misc_feature: Ceres CDNA ID no. 40041422
  CDS (87)..(479): REFERENCED BY SEQ ID NO: 8466
acgtttctctgcgactcgcacggcccgcgcccaccaccgaccaccccacctggttcggtcggcactcggcaccccgccccgcatacatgccgccgcccagcctcaccgtggcgcgcgacccggccgccgccgccaccacgcggcaccgcaaggtccacccgacgccgggcggaggcgcagggacgacgaaggagatgggcgcggcggaggggtgggcgcggcccgagtggtgctcggtggcgggcgccgcggccgtgctgcggcggcacccggcgcccgcgctcctcgggtgcggcctcctgctcttcatggccgtcgagtacaccatccccatggtcaggccggacgcgccgccgctcgacctgggcttcgtcgccaccaggggcttgcacgccgccgtcgccgcgaggccctggctcaactcgctcctcgccgcgctcaacacggtgccatatttgctaaacggatcaatcctataaatcatttacaccactcaaaagcaactcaatacttctcctgccttagcccatcctattccatttaaccagaaacacctgccccttccaccagaaaattcgttctcttgaattatttctgttgcttgaaaagctcaaccgagaattgctcactcccacattggaattcctagcctagtcgctattaactagggtttgatctcacaactacttgtgctgacatgtgcacccacaccagaattgagcttgttgggggcctatcacaattgtgaaataacaacatcagaacaacatgattaatttattagtttccaaaaaaaaaaaaaaaa

SEQ ID NO: 8466 - protein, 130 aa, Zea mays
  misc_feature: Ceres CLONE ID no. 1453522
  misc_feature: Ceres CDNA ID no. 40041422
  misc_feature: Homolog of GI Number: 51091382 NR Desc: phosphatidic acid phosphatase
  misc_feature: Homolog of GI Number: 28416535 NR Desc: At3g15820/MSJ11_22
MPPPSLTVARDPAAAATTRHRKVHPTPGGGAGTTKEMGAAEGWARPEWCSVAGAAAVLRRHPAPALLGCGLLLFMAVEYTIPMVRPDAPPLDLGFVATRGLHAAVAARPWLNSLLAALNTVPYLLNGSIL

SEQ ID NO: 8467 - DNA, 597 bp, Zea mays
  misc_feature: Ceres CLONE ID no. 1453539
  misc_feature: Ceres CDNA ID no. 25892885
  CDS (27)..(470): REFERENCED BY SEQ ID NO: 8468
gaagctttgaagatctaataaaaaaaatggcgacggcgttgaagaagaacaggaagaagagaggccacgtcagcgcggggcacgggcgtatcgggaagcaccgcaagcaccccggaggtcgcggaaacgcgggaggaatgcaccaccaccggatcctcttcgacaagtaccatccgggatacttcgggaaagtagggatgaggtacttccacaagctccgcaacaagttctactgccccatcgtcaacctcgacaggctctggtcgctggttccggaggacgtgaaggccaaggcggggaaggatggtaaggtgccgatgatcgacgtgacgcagcacgggttctttaaagtgttggggaaagggcatttgcctgagggcaagccgtttgtggtgaaggctaagcttatttcgaagactgctgagaagaagattaaggaggctggtggtgctgttgtgctcactgcctaggttataggttgagttttcgttttaattattgtctttatctgtttttgatatcgttgttgaactcaaagtttgttgctttattgatttttggaatgagagatattttgatcgaaaaaaaaaaaaaaaa

SEQ ID NO: 8468 - protein, 147 aa, Zea mays
  misc_feature: Ceres CLONE ID no. 1453539
  misc_feature: Ceres CDNA ID no. 25892885
  misc_feature (108)..(141): Pfam Name: L15 PFAM Desc: Ribosomal protein L15
  misc_feature: Homolog of GI Number: 23308283 NR Desc: At1g23290/F26F24_23
  misc_feature: Homolog of GI Number: 20147177 NR Desc: At1g70600/F5A18_22
  misc_feature: Homolog of GI Number: 21553702 NR Desc: 60S ribosomal protein L27A
  misc_feature: Homolog of GI Number: 3608481 NR Desc: ribosomal protein L27a
  misc_feature: Homolog of GI Number: 7959355 NR Desc: 60S ribosomal protein L27a
  misc_feature: Homolog of GI Number: 76160998 NR Desc: ribosomal protein L27a
  misc_feature: Homolog of GI Number: 50939233 NR Desc: putative 60S ribosomal protein L27a
  misc_feature: Homolog of GI Number: 50916422 NR Desc: putative ribosomal protein L27a
  misc_feature: Homolog of GI Number: 50251205 NR Desc: putative 60S ribosomal protein L27a
  misc_feature: Homolog of GI Number: 22758850 NR Desc: ribosomal protein L22
  misc_feature: Useful for making plants with altered leaf shape eg curled leaves
  misc_feature: Useful for making plants with increased biomass
MATALKKNRKKRGHVSAGHGRIGKHRKHPGGRGNAGGMHHHRILFDKYHPGYFGKVGMRYFHKLRNKFYCPIVNLDRLWSLVPEDVKAKAGKDGKVPMIDVTQHGFFKVLGKGHLPEGKPFVVKAKLISKTAEKKIKEAGGAVVLTA

SEQ ID NO: 8469 - DNA, 1057 bp, Zea mays
  misc_feature: Ceres CLONE ID no. 1453635
  misc_feature: Ceres CDNA ID no. 36698136
  CDS (85)..(831): REFERENCED BY SEQ ID NO: 8470
aaaacgaagccacaagcagcgccgcgagccacagctagcaccaccaccttgcaccgcacccgcaccgagacgaacagatcgaccatggctgccggcggcgacgacaccaccatcgcgcaggtccacagcggcatcgacagcagcaacaagacgctgctcaagagcgaggccctctacaagtacgtgctggacacgtcggtgctgccgcacgagccggagagcatgcgtgagctgcggctggtgaccgacaagcacgagtgggggttcatgcagtcgtccccggacgaggcgtcgctgctgcggatgctgatcaagctgagcggcgcgcggcggacgctggaggtgggcgtgttcacgggctactcgctgctggcgacggctctggcgctgcccgccgacggcaaggtcatcgcattcgacgtgagccgcgagtactacgacatcggccgccccttcatcgagcgcgccggggtggcgggcaaggtagacttccgggagggcccggcgctggagcagctggacgagctcctcgccgacccggccaaccacggcgccttcgacttcgccttcgtcgacgccgacaagcctaactacgtccggtaccacgagcagctgctccgcctggtgcgcgtcgggggtaccgtcgtgtacgacaacacgctgtgggccggtactgtggcgcttccccccgacgcgccgctcagcgacctcgaccgcaggttctccgccgccatcagggaactcaacgtccggctttctcaggatccccgcgtcgaggtctgccagctcgccatcgccgacggcgtcaccatctgccgccgcgtcgtctgatgtgatgatgatccgacgaccaagatcatatatcattcgctcgtcgtctctgtcatctttcaactgcctgcccgccgctgtccgctgccgtcgtcaattaataatgcatggttcttgttctttttttttttgtacttgcactgtgtgtgttgagttgaacatccggcgatgtactgcaacaactggaatgcaatgcaacatcaaaaaaaaaaaaaaaaaaaaaaaa

SEQ ID NO: 8470 - protein, 248 aa, Zea mays
  misc_feature: Ceres CLONE ID no. 1453635
  misc_feature: Ceres CDNA ID no. 36698136
  misc_feature (35)..(247): Pfam Name: Methyltransf_3 PFAM Desc: O
  misc_feature: Homolog of GI Number: 50947279 NR Desc: putative caffeoyl
  misc_feature: Homolog of GI Number: 23506117 NR Desc: At4g34050/F28A23_190
  misc_feature: Homolog of GI Number: 57639629 NR Desc: caffeoyl CoA 3
  misc_feature: Homolog of GI Number: 21595512 NR Desc: caffeoyl
  misc_feature: Homolog of GI Number: 82941443 NR Desc: caffeoyl
  misc_feature: Homolog of GI Number: 32347451 NR Desc: caffeoyl CoA 3
  misc_feature: Homolog of GI Number: 32347487 NR Desc: caffeoyl CoA 3
  misc_feature: Homolog of GI Number: 32347447 NR Desc: caffeoyl CoA 3
  misc_feature: Homolog of GI Number: 32347461 NR Desc: caffeoyl CoA 3
  misc_feature: Homolog of GI Number: 32347437 NR Desc: caffeoyl CoA 3
MAAGGDDTTIAQVHSGIDSSNKTLLKSEALYKYVLDTSVLPHEPESMRELRLVTDKHEWGFMQSSPDEASLLRMLIKLSGARRTLEVGVFTGYSLLATALALPADGKVIAFDVSREYYDIGRPFIERAGVAGKVDFREGPALEQLDELLADPANHGAFDFAFVDADKPNYVRYHEQLLRLVRVGGTVVYDNTLWAGTVALPPDAPLSDLDRRFSAAIRELNVRLSQDPRVEVCQLAIADGVTICRRVV

SEQ ID NO: 8471 - DNA, 807 bp, Zea mays
  misc_feature: Ceres CLONE ID no. 1453672
  misc_feature: Ceres CDNA ID no. 35385347
  CDS (229)..(606): REFERENCED BY SEQ ID NO: 8472
attttctccctatctaaggccacctttcactccgccgttctctgtcacgaccgggaaaaacctcgccgccgccggcctcctctctcttgccttccatcccccgttgcgtcgaaccgtccctctcggtaaacccgcatcgccttgaacccttaacctccaggcggaggatccgccgaaaggctggaccagttacccccatcctgcacggcgcaggggagtagagagaggatgatggagtcggaggtggtgaggatggagatggtgctggcgccgacgctgccgttcaagaaggtgcagacggcggacaagtatcccaagggccagtcccggggccgccagtggaagcacctgcgccacctgctccagtccgctgatgcatcctccatgcccccggaccgccccaattatatgaatatccaatcgcccccatccatttacccaccaaagagatactgtgacttaacaggttttgaggcacggtacgtggatccgaggacaaagttgcgctactctgatccagaggtgttcaagcagatcaggatgcttcctgatgaatacgtccaaaggtacctggccttgagaaatgcagcagttatcctgcgataacaatacctaggggtagcagtcttgttgcctaactatgctgtagtactcagatgtatgtatactctgattgtatggacgaggttgtttctgaacattgatccttctaaatagatctttcttcctccctattttaaacagatgtattttgatggatttccctacgtgattagagacattatgctgtataaaaaaaaaaaaaaa

SEQ ID NO: 8472 - protein, 124 aa, Zea mays
  misc_feature: Ceres CLONE ID no. 1453672
  misc_feature: Ceres CDNA ID no. 35385347
  misc_feature: Homolog of GI Number: 50922311 NR Desc: OSJNBb0058J09.5
  misc_feature: Homolog of GI Number: 68565181 NR Desc: Protein C18orf37
  misc_feature: Homolog of GI Number: 76672705 NR Desc:  similar to CG12659
  misc_feature: Homolog of GI Number: 73961737 NR Desc:  similar to CG12659
  misc_feature: Homolog of GI Number: 50344872 NR Desc: zgc:86850
  misc_feature: Homolog of GI Number: 50736082 NR Desc:  similar to chromosome 18 open reading frame 37
  misc_feature: Homolog of GI Number: 55647215 NR Desc:  similar to chromosome 18 open reading frame 37
  misc_feature: Homolog of GI Number: 29124572 NR Desc: C18orf37 protein
  misc_feature: Homolog of GI Number: 72016369 NR Desc:  similar to CG12659
  misc_feature: Homolog of GI Number: 57222787 NR Desc: nucleus protein
MESEVVRMEMVLAPTLPFKKVQTADKYPKGQSRGRQWKHLRHLLQSADASSMPPDRPNYMNIQSPPSIYPPKRYCDLTGFEARYVDPRTKLRYSDPEVFKQIRMLPDEYVQRYLALRNAAVILR

SEQ ID NO: 8473 - DNA, 538 bp, Zea mays
  misc_feature: Ceres CLONE ID no. 1453695
  misc_feature: Ceres CDNA ID no. 40351890
  CDS (242)..(469): REFERENCED BY SEQ ID NO: 8474
ttttagattcatcagtgttgccttcttcaccgtagcagatctagtaacgctgacattgtggtcccagagtggtgccttggcatacctgaccagctagcaaataggcccagccaactccgatcgcaccagcaccactgcaccagccgcccgcaacccgcaaagctgcttcccggactagctagggtttcgtgtacgccgcttgatctagtcctctctcccggcacgcgagggcgcagcgttgatggcggcggcaccggcggacgctaaggcggaggccgccaagatggacctcctcgaggacgatgacgagttcgaagagttcgagatcgaccaagaatgggatgaccaggaagaaggcaacgaagccgtccagcagtgggaggatgattgggatgacgatgacgtgaacgatgatttctcgctgcagcttaaggaagagctggacggaagcaacggccagaagagctgaaggattatttctccactttatataaatgatttttatatggcagctacttttggaaaaaaaaaaaaaaaa

SEQ ID NO: 8474 - protein, 75 aa, Zea mays; identical to SEQ ID NO: 836
  misc_feature: Ceres CLONE ID no. 1453695
  misc_feature: Ceres CDNA ID no. 40351890
  misc_feature (8)..(70): Pfam Name: DSS1_SEM1 PFAM Desc: DSS1/SEM1 family

SEQ ID NO: 8475 - DNA, 1277 bp, Zea mays
  misc_feature: Ceres CLONE ID no. 1453701
  misc_feature: Ceres CDNA ID no. 40041423
  CDS (88)..(1158): REFERENCED BY SEQ ID NO: 8476
tccaaagtaggtcatcgctcagtcgctcgctcacactcaacgccacgtagcagcagctcggctccggcggggcagaagcaagcagagatggggtcgatcgccgccggcgccgacgaggatgcgtgcatgtacgctctccagctcgtctcgtcgtcgatcctcccgatgacgctgaagaacgccatcgagctggggctcctcgagaccctgatggccgccggcggcaagttcttgactcccgctgaggtggcagccaagctcccgtccgcggcgaatccggaagcgccggacatggtggaccgtatgctccgtctgttggcctcgtacaacgtggtgtcgtgcaggacggaggagggcaaggacggccgcctctcccggcggtacggcgccgcgcccgtgtgcaagtacctcacccccaacgaggacggcgtgtccatgtcggcgctcgcgctcatgaaccaggacaaggtcctcatggagagctggtactatctcaaggatgcggtcctcgacggtggcatcccgttcaacaaggcgtacgggatgtcggcgttcgagtaccacggcacggacccacgcttcaaccgcgtcttcaacgaggggatgaagaaccattccatcatcatcaccaagaagctcctcgagtcctacaagggcttcgagggcctcggcaccctcgtcgacgtgggcggtggcgtcggcgccaccgtggccgccatcaccgctcactaccccaccatcaagggcatcaactttgaccttccccacgtcatcagtgaggcgccgccgttccccggtgtcacccacgtcggcggcgacatgttccagaaggtgccctcgggcgacgccatcctcatgaagtggatcctccacgactggagcgacgagcactgcgcgacgctgctcaagaactgctacgacgcgttgccggcgcacggcaaggtggtgctcgtggagtgcatcctgccggtgaacccggaggcgacgcctaaggcgcagggggtgttccatgtcgacatgatcatgctcgcgcacaacccgggtggcagggagaggtacgagagggagttcgaggccctggccaagggcgccgggttcgccgccatgaagactacttacatctacgccaacgcatgggccatcgagttcactaagtagatgatccatgacaacgagtctacctctctgatgcatccacctgcatgtgtactttctcttcgtttttccttcaaaaaaaatttcactctctgagtcaatctataaaaaaaaaaaaaaaa

SEQ ID NO: 8476 - protein, 356 aa, Zea mays
  misc_feature: Ceres CLONE ID no. 1453701
  misc_feature: Ceres CDNA ID no. 40041423
  misc_feature (27)..(83): Pfam Name: Dimerisation PFAM Desc: Dimerisation domain
  misc_feature (87)..(333): Pfam Name: Methyltransf_2 PFAM Desc: O
  misc_feature: Homolog of GI Number: 2388664 NR Desc: bispecific caffeic acid/5
  misc_feature: Homolog of GI Number: 3341509 NR Desc: caffeic acid 3
  misc_feature: Homolog of GI Number: 14578611 NR Desc: caffeic acid O
  misc_feature: Homolog of GI Number: 14578613 NR Desc: caffeic acid O
  misc_feature: Homolog of GI Number: 14578615 NR Desc: caffeic acid O
  misc_feature: Homolog of GI Number: 14578617 NR Desc: caffeic acid O
  misc_feature: Homolog of GI Number: 30385246 NR Desc: caffeic acid O
  misc_feature: Homolog of GI Number: 4104220 NR Desc: caffeic acid O
  misc_feature: Homolog of GI Number: 4104224 NR Desc: caffeic acid O
  misc_feature: Homolog of GI Number: 77818928 NR Desc: flavonoid O
  misc_feature: Useful for delaying flowering time
  misc_feature: Useful for delaying senescence
  misc_feature: Useful for increasing seed/fruit yield or modifying fruit content
  misc_feature: Useful for making ornamental plants with modified leaves
  misc_feature: Useful for making taller plants and plants with longer inflorescences
  misc_feature: Useful for sterility
MGSIAAGADEDACMYALQLVSSSILPMTLKNAIELGLLETLMAAGGKFLTPAEVAAKLPSAANPEAPDMVDRMLRLLASYNVVSCRTEEGKDGRLSRRYGAAPVCKYLTPNEDGVSMSALALMNQDKVLMESWYYLKDAVLDGGIPFNKAYGMSAFEYHGTDPRFNRVFNEGMKNHSIIITKKLLESYKGFEGLGTLVDVGGGVGATVAAITAHYPTIKGINFDLPHVISEAPPFPGVTHVGGDMFQKVPSGDAILMKWILHDWSDEHCATLLKNCYDALPAHGKVVLVECILPVNPEATPKAQGVFHVDMIMLAHNPGGRERYEREFEALAKGAGFAAMKTTYIYANAWAIEFTK

SEQ ID NO: 8477 - DNA, 531 bp, Zea mays
  misc_feature: Ceres CLONE ID no. 1453717
  misc_feature: Ceres CDNA ID no. 36707116
  CDS (78)..(353): REFERENCED BY SEQ ID NO: 8478
atactatatattagacataccggtattattgttcttagacatcgcacaagactcttgtcaacaagaccaacaacaggatgaggactgccgtgcatgctgcgctttgcattgtgcttgtgataatgtcttcaacactgtcatcttgcgaggacgatgagaaggtatctatcgcatgtgacacaggatgcaatgccgcgatctcccgtctcaaatgcttcctgatggcctattctgaagggaaagtgttggtcagcagcaactgcgaaacgccgaccaggtgcggctgcgtgtttcgtcacaaacaagatgcagcccttatcgccggcgacgttggcaacaaaaagggatactgatggcagacgtgtacttcttggttgaataatactgctagaattaatatgggcaccaacgaaatatctataatgttattcttcagtgtaatgcttccagcatgttctgatttagtttaactaaatatctatctttccccccaatttaagttttttttgttctccaaaaaaaaaaaaaaaa

SEQ ID NO: 8478 - protein, 91 aa, Zea mays; identical to SEQ ID NO: 5620
  misc_feature: Ceres CLONE ID no. 1453717
  misc_feature: Ceres CDNA ID no. 36707116

SEQ ID NO: 8479 - DNA, 723 bp, Zea mays
  misc_feature: Ceres CLONE ID no. 1453979
  misc_feature: Ceres CDNA ID no. 40351891
  CDS (88)..(513): REFERENCED BY SEQ ID NO: 8480
actccacatttccactccaccgtttcagcagcaccagcaacacagccaaagcccaaagaggcggcagcagcagcccggcctgttcccatggctcctctgctgttcagggacatgaaggggctgtcgtgctcgtccccggcgtccacggcgatatgcccgagcctggagcggcagccgatggtccggccacacaaggccattgccagtgccagccccctgtctcacgtccctgccgcgcccaggacacaccggcacgacggcaagaaagggcggcagcaggaggagctgcagcagcgaaaggctgtcgttgtcggaaacgccggtggcctcgtcagtccggctggctcgtcccgctacttgctgagcggccgcttcgccgccaccgaggagatccaggaggtggagtctgccccggccgtcgacgtcaagcccaagcgggaggaagcaggtgaagctgctgatgcgaagagcgcgcaggcgcaagagcaggtgaagttactgaatactcactagtatgagttatgactagcgtgcagtacttgtgtgattctttttattattgttatttttaacttttggccctactcttcttgattagaaaatgataagagaaatcaaaagtgagatgatgtgaccagtgacaacaatcatatcagcgtgggggctttgagattatgtgatacaaaaatcgtagctttatggcttacaaaaaaaaaaaaaaaa

SEQ ID NO: 8480 - protein, 141 aa, Zea mays
  misc_feature: Ceres CLONE ID no. 1453979
  misc_feature: Ceres CDNA ID no. 40351891
MAPLLFRDMKGLSCSSPASTAICPSLERQPMVRPHKAIASASPLSHVPAAPRTHRHDGKKGRQQEELQQRKAVVVGNAGGLVSPAGSSRYLLSGRFAATEEIQEVESAPAVDVKPKREEAGEAADAKSAQAQEQVKLLNTH

SEQ ID NO: 8481 - DNA, 568 bp, Zea mays
  misc_feature: Ceres CLONE ID no. 1454031
  misc_feature: Ceres CDNA ID no. 40351892
  CDS (111)..(326): REFERENCED BY SEQ ID NO: 8482
cccgtctcaccacgaaccaaaaccagaccaaatcttcggcgagcccatcggcacattctgagagcggagaggaagcaggaggcggcggatcaaggagaggagactagaagatgggtggcggcatggaggtgaacaagaaccgctggatcgaggagtggaacgccggccgggagaacctcgagctcaacttccgctttacccgccgcagcctcgccgtcatcggcctcttcggcctcgccgtccccatcctcgtctacaagggcatcgttcgcgaattccatatgcaggacgaggacgccggccggccgtacaggaagttcctgtgagcgtcgcctccggtggatgtcgagactccgagccgtctgcagggtttcggtcagggagaaggaatctccattcggtttgtttcccgtactgttgtagtcagaccggagtattttgttctcacatgttgtgcgatatgtgttaaataagatgtaatgaaatgctgttcttgcaattgctgaaacctgagaagtctgatttggttaatttgaggtgaatatttgtgttaaaaaaaaaaaaaaaa

SEQ ID NO: 8482 - protein, 71 aa, Zea mays
  misc_feature: Ceres CLONE ID no. 1454031
  misc_feature: Ceres CDNA ID no. 40351892
MGGGMEVNKNRWIEEWNAGRENLELNFRFTRRSLAVIGLFGLAVPILVYKGIVREFHMQDEDAGRPYRKFL

SEQ ID NO: 8483 - DNA, 994 bp, Zea mays
  misc_feature: Ceres CLONE ID no. 1454276
  misc_feature: Ceres CDNA ID no. 40351893
  CDS (86)..(610): REFERENCED BY SEQ ID NO: 8484
aggaaaaagcagcagaagaccagaaaatctcttgccgcacaccgcgtccgcgaccgtgacctccctgtccgacgagcgctctacgatggcatctcaggattccaagcccgcgcaagtcccggccgccgccgagctgacggccccgccggctgctgccgcaggggaggcgacgaatcccacttccccgacagcagcccaaaaccctagccctgccgcggccgccgccgccggtggggcagccacggatctagagaagaagatgcgccgcgcggagcggtttgggacgcaggtggtgatgtccgaggacgagaagcgaagcagccgcgccgagaggtttgggaccggatcttccaatgaaaagatggaggagcagaagaagaagtccagggctgagaggtttggccttcccacgccctcctctgatgataccgaggctaagaaaaaagcccgcttagagcgatttggtcagagcacagaagttggcaaggcggaagaagagaagcgaaaggcacgggcccttaggtttgcaggagcacccagtgggtcatctgaaggaaaggacaaagacacctccaagccggatgcggctaccatagctggcacggcatgatggaaaacagtccctgcctttttgagggtcgtctcatatacgcccctcgagacgtcggtgaagccgtagtttgtacaagactaacaacgccaacggcgtcgatgctgtcggagccattcgtgtgctgtttactgtgtagcgcttgatgacttcttgctgtactccgctgggagccatttgagtgctgtttaccgtgtagcactcgaggacttccttgctgtactcgttggcatagtctgtttgctgctcggtctggggacacctgtgtactacagtacttcgtttccctttgtagtgatactacttattagccatgtactcgtgtctgtttagtttctgtgcttgtattgttcgtttcagatgcgtgcaaaaaaaaaaaaaaaa

SEQ ID NO: 8484 - protein, 174 aa, Zea mays
  misc_feature: Ceres CLONE ID no. 1454276
  misc_feature: Ceres CDNA ID no. 40351893
MASQDSKPAQVPAAAELTAPPAAAAGEATNPTSPTAAQNPSPAAAAAAGGAATDLEKKMRRAERFGTQVVMSEDEKRSSRAERFGTGSSNEKMEEQKKKSRAERFGLPTPSSDDTEAKKKARLERFGQSTEVGKAEEEKRKARALRFAGAPSGSSEGKDKDTSKPDAATIAGTA

SEQ ID NO: 8485 - DNA, 656 bp, Zea mays
  misc_feature: Ceres CLONE ID no. 1454295
  misc_feature: Ceres CDNA ID no. 40351894
  CDS (116)..(508): REFERENCED BY SEQ ID NO: 8486
aaaactattctaaaaaatgggctaaaaaaaatcgaccgtcttcctcccaacccaagtggatgtgcaggaccgcgaacacgaggaggcaggggagcagcatccacaaccacaagccatggcggggaggactaacatccccactaacaactccgccctcatcgcaatcatcgccgacgaggacaccgtcactggcttcttgatggccggcgttggcaatgttgatctgcgcaagaaaaccaattacctcctcgtcgacaacaagacgacagttaaacaaatcgaggacgcgttcaaagaatttactgcaagggaggatattgctattgtgctcatcagtcagtatattgccaacatgataagatttctggtggatagctacaacaagccagtccctgctattctggagatcccatccaaggaccatccatatgatccagcgcacgactcggtgctgtctcgagtgaagtatctcttctctgcggaatcggtggcgtctgataggcgatgaaggcatccttgtgtagtagtaccctttggtgtatctgttttgttatgtattgaaaagaagtggcatgcgtccgagcgagacagcaaacaataataatggttgtggaaccaaaccaacacctttttttctttcaaaaaaaaaaaaaaaa

SEQ ID NO: 8486 - protein, 130 aa, Zea mays
  misc_feature: Ceres CLONE ID no. 1454295
  misc_feature: Ceres CDNA ID no. 40351894
  misc_feature (15)..(115): Pfam Name: ATP PFAM Desc: ATP synthase
MAGRTNIPTNNSALIAIIADEDTVTGFLMAGVGNVDLRKKTNYLLVDNKTTVKQIEDAFKEFTAREDIAIVLISQYIANMIRFLVDSYNKPVPAILEIPSKDHPYDPAHDSVLSRVKYLFSAESVASDRR

SEQ ID NO: 8487 - DNA, 922 bp, Zea mays
  misc_feature: Ceres CLONE ID no. 1454381
  misc_feature: Ceres CDNA ID no. 36695241
  CDS (73)..(570): REFERENCED BY SEQ ID NO: 8488
gcttctcgtttcaccgtgcgccacaagcacacaactagggcgaccgccgccgacctacggccagctgtgcccatgtcttcgtcgggccctttgctggcgacgggaacccaccacaccggccgccaacctgaggttttgtgggctcagcgctccgagaagattttcttgactatctcattgccagatgcgaaagatgttgtgttaaagaccgatcctaagggcctctttaccttctctgctgttgtccatggggaaccttttagcttcactttggagctttttgattcaatactgtcagagggaagtaaaacgaagacaaagatgggcctgcgaaacataatctgttcaatccagaaagaaaagaaaggttggtggaagcgcttgctaaagtcagaggaaaagcatccatacatcaaagttgactggaacaaatggtgcgatgaggatgaagagtctgagttctctggggattcagatggtggctttgatgaggcaaatgaaggagatgaaagtgatgatgatgatgggatgctttatctccccgaccttgaaaagctaaggggcaagtgatctggctgcttcggtgaagggagtagggttgatgtaacaagttaccgttgacgtgacagagtaggcttatcatcgacgtagttggggtcttacttgctgagcatctgcgacggcttgagacttttaggcatgtcttctatctccgaagcactctttcggtctttcctgatcagtgagctagcactctgaaaacgtagcgatgagctgtcccattttcgactaactatttagtgccagtgaatggcctaattctacaactatcacgatgtgcctatatgttaggggattatggattctgtggtccgtctttgtggtatgggatttccgttggcagacaaaaaaaaaaaaaaaa

SEQ ID NO: 8488 - protein, 165 aa, Zea mays
  misc_feature: Ceres CLONE ID no. 1454381
  misc_feature: Ceres CDNA ID no. 36695241
  misc_feature: Homolog of GI Number: 50582771 NR Desc: putative ripening regulated protein
  misc_feature: Homolog of GI Number: 50920807 NR Desc: putative ripening regulated protein
  misc_feature: Homolog of GI Number: 76904112 NR Desc: p23
  misc_feature: Homolog of GI Number: 12231292 NR Desc: ripening regulated protein DDTFR8
  misc_feature: Homolog of GI Number: 11934654 NR Desc: p23
  misc_feature: Homolog of GI Number: 50944819 NR Desc: putative p23 co
  misc_feature: Homolog of GI Number: 23308253 NR Desc: At4g02450/T14P8_5
  misc_feature: Homolog of GI Number: 11229591 NR Desc: p23 co
  misc_feature: Homolog of GI Number: 23482571 NR Desc: 34 kDa phosphoprotein
MSSSGPLLATGTHHTGRQPEVLWAQRSEKIFLTISLPDAKDVVLKTDPKGLFTFSAVVHGEPFSFTLELFDSILSEGSKTKTKMGLRNIICSIQKEKKGWWKRLLKSEEKHPYIKVDWNKWCDEDEESEFSGDSDGGFDEANEGDESDDDDGMLYLPDLEKLRGK

SEQ ID NO: 8489 - DNA, 877 bp, Zea mays
  misc_feature: Ceres CLONE ID no. 1454388
  misc_feature: Ceres CDNA ID no. 35383413
  CDS (73)..(615): REFERENCED BY SEQ ID NO: 8490
attcacatctgtagccgcgcctctccgtatcactccgcgcctctctcccgccaggccgccgcccaagcaaccatggtggccgcgctgctccgccgcgcgctccacctccgccgtgtgctcccctcgcccgccgtcaccgccgccgcctcccagcgcctcatccccgccttctcgaccacccccacgccgaccccgaccacctcccagcagaacgccgccaccactacgatcgacctctcctccgacgagagccgccgccgcctcctcaataggttggtgtaccggagcaagcagcgaggttttctggaactggacctggtgctggggacctgggtcgagcagcacgtgcacgccatggacgaggccaacatccgcgccctcctgcaagtgctcgacctcgaaaacccagatttgtggaaatggttgactagccaggagcagccaccagaggatctgaattctaatccggtgtttgctgccatcaaatcaaaggtcacagataacctgaccaagcatgcttctcctgagacccgatctacaccaggtcaaccatgggttagaggatgggacgacataaagaaaggcaaagatggacccaagtatggaaatcagtgataagctgcttgaaatggggatgacggctttccatcctaaataatagctgtccgcccaccccaccccccaatatgcttgttttgtgattgtgtagaataaagtgaactgccaccggcatgtgtgaagtttgttaaattgtagaatcagcttgtaactatggatggtactcctgatgtttgcctggcaattccagccttccaggtatcgtctactacttggaaatatgttatattatgcattgcagtcaaaaaaaaaaaaaaaa

SEQ ID NO: 8490 - protein, 180 aa, Zea mays
  misc_feature: Ceres CLONE ID no. 1454388
  misc_feature: Ceres CDNA ID no. 35383413
  misc_feature (60)..(143): Pfam Name: TPR_div1 PFAM Desc: TPR repeat region
  misc_feature: Homolog of GI Number: 7441828 NR Desc: extensin
  misc_feature: Homolog of GI Number: 7441829 NR Desc: proline
  misc_feature: Homolog of GI Number: 19919 NR Desc: Pistil extensin like protein
  misc_feature: Homolog of GI Number: 539029 NR Desc: cysteine
  misc_feature: Homolog of GI Number: 539030 NR Desc: cysteine
  misc_feature: Homolog of GI Number: 22330504 NR Desc: arabinogalactan
  misc_feature: Homolog of GI Number: 14253159 NR Desc: VMP3 protein
MVAALLRRALHLRRVLPSPAVTAAASQRLIPAFSTTPTPTPTTSQQNAATTTIDLSSDESRRRLLNRLVYRSKQRGFLELDLVLGTWVEQHVHAMDEANIRALLQVLDLENPDLWKWLTSQEQPPEDLNSNPVFAAIKSKVTDNLTKHASPETRSTPGQPWVRGWDDIKKGKDGPKYGNQ

SEQ ID NO: 8491 - DNA, 908 bp, Zea mays
  misc_feature: Ceres CLONE ID no. 1454416
  misc_feature: Ceres CDNA ID no. 25401813
  CDS (72)..(722): REFERENCED BY SEQ ID NO: 8492
acccaagaagcgctccatagctacaccaccaccaagctgatagcaagcaagcaagcattgacaaatccaccatggcgaggcttcagctttccgtcgtggcggcctgcgccgtcctcctcgcgctcgccgccccctccctcgccggcgaccccgacatgctccaggacgtctgcgtcgccgacctggcatccccgatcaagatcaacgggttcccatgcaaggcgaacatcacggccgacgacttcttcttcgccggactcaagaaggccggcaacaccaacaacccggctggttcggtcgtcactgcggctaacgtgctgtcattccccggggtgaacacgctcggcgtgtccatggcgcgcatcgactacgccgtgggagggcagaacccgccacacacccacccgcgcgccaccgagatcatcttcgtcaccgagggaaccctggaggtgggattcatcaccaccgctaacaagctcttcactaaggtcgtcaccgtcggagaggtgttcgtcttcccgcgagggctcgtgcacttccagcagaacaggggcaactgctctgcctccgtcatcgccgccttcaacagccagcttcagggcacccaagccatcgccaccacgctcttggctgccacaccaccagtgccaaccgacgtgctggccaaggccttcagggttgataacgaagacatcgacgccgtcaaggccaggttcaactagggagcctctgccgtctcgcaactctccatccatttcggaagaaaagaatcgtttgtttgttactgaataaatggtattcaagtcatcaagtgagctgtagcgtgtagttgatttgttgttgtgtatgttacatttgttcatctttgagataataaaacttgcttctgtttaaaaaaaaaaaaaaaa

SEQ ID NO: 8492 - protein, 216 aa, Zea mays
  misc_feature: Ceres CLONE ID no. 1454416
  misc_feature: Ceres CDNA ID no. 25401813
  misc_feature (96)..(171): Pfam Name: Cupin_2 PFAM Desc: Cupin domain
  misc_feature: Homolog of GI Number: 34902528 NR Desc: probable germin protein 4
  misc_feature: Homolog of GI Number: 34906612 NR Desc: germin
  misc_feature: Homolog of GI Number: 31712108 NR Desc: germin
  misc_feature: Homolog of GI Number: 50933473 NR Desc: putative cupin
  misc_feature: Homolog of GI Number: 34904670 NR Desc: putative germin protein
  misc_feature: Homolog of GI Number: 57899940 NR Desc: putative Rhicadhesin receptor precursor
  misc_feature: Homolog of GI Number: 40949663 NR Desc: germin
  misc_feature: Homolog of GI Number: 15341550 NR Desc: nectarin I
  misc_feature: Homolog of GI Number: 3482931 NR Desc: germin
  misc_feature: Homolog of GI Number: 51970952 NR Desc: germin like protein
  misc_feature: Useful for increasing chlorophyll and photosynthetic capacity
  misc_feature: Useful for making larger plants
  misc_feature: Useful for making stronger plants
MARLQLSVVAACAVLLALAAPSLAGDPDMLQDVCVADLASPIKINGFPCKANITADDFFFAGLKKAGNTNNPAGSVVTAANVLSFPGVNTLGVSMARIDYAVGGQNPPHTHPRATEIIFVTEGTLEVGFITTANKLFTKVVTVGEVFVFPRGLVHFQQNRGNCSASVIAAFNSQLQGTQAIATTLLAATPPVPTDVLAKAFRVDNEDIDAVKARFN

SEQ ID NO: 8493 - DNA, 633 bp, Zea mays
  misc_feature: Ceres CLONE ID no. 1454470
  misc_feature: Ceres CDNA ID no. 36707528
  CDS (1)..(447): REFERENCED BY SEQ ID NO: 8494
aggctgctagctagtgctacctttcaaaaaacccctacatcctgccatccatccgcggtccgccgccgccgccatctcctcccactctcttccccccactcctaccaaaccctattcaatatccatttctccatccatggcgtggcgcggccccgccacccgggccgtcctcgccgccgtccgccgcccggcagcggccgcgcgcctccacgccccgcgccgccgcgtcccgcccgccttcgccaccacctcctccccgctcccgtccgcgcggcctctggcggcgttgatggggtccccggtgacggtggccgcggtgatggcgcgcctcacggcgcatcccggcgccagcgcgcgcgcgtgctgcgagctttcccagggtacttgaatctgttgtgtagaccccatcctttcgaaaggataaatgatgtatcttttggggaataaaagctattatggcatttcttccacagcaaagttcgaagaaattacccaacaatagctagtttcctcgttaggatttcgagaagccttaataattttaacgttacatggcatggttttggtgtgtaaaacagctattgacgaataattttaatgttggtttcacatgagttaaaaaaaaaaaaaaaa

SEQ ID NO: 8494 - protein, 83 aa, Zea mays
  misc_feature: Ceres CLONE ID no. 1454470
  misc_feature: Ceres CDNA ID no. 36707528
  misc_feature: Homolog of GI Number: 68402242 NR Desc:  similar to Neural Wiskott
  misc_feature: Homolog of GI Number: 6523547 NR Desc: hydroxyproline
  misc_feature: Homolog of GI Number: 46850179 NR Desc: cell wall protein GP2
  misc_feature: Homolog of GI Number: 77556634 NR Desc: retrotransposon protein
  misc_feature: Homolog of GI Number: 76262498 NR Desc: pherophorin
  misc_feature: Homolog of GI Number: 18765764 NR Desc: matrix metalloproteinase
MAWRGPATRAVLAAVRRPAAAARLHAPRRRVPPAFATTSSPLPSARPLAALMGSPVTVAAVMARLTAHPGASARACCELSQGT

SEQ ID NO: 8495 - DNA, 495 bp, Zea mays
  misc_feature: Ceres CLONE ID no. 1454507
  misc_feature: Ceres CDNA ID no. 35383414
  CDS (14)..(304): REFERENCED BY SEQ ID NO: 8496
agggggagagaaaatggcgtatttgtcccgcacagccgccgccgtcgccgtcgccgtgaggtcggcggtccgctccgcacctctcactggccgcgtcctcggagcgccactgccttcccttgcctcgccttccgctgcccggtccgcccgaatcctccgcaggacggcggccgcggcgtcggcggggctggagactctaatgccgctgcacagcgcggtggcggccgcgcggcttaggtcctgcatcgccgtcgactcctcgtgctggagctcgctctcgcaaggatatgctttgcctttatgagaggagaggtgcacctgaagaaaccaatgaacattaggaattacaaacaagggctgtaataatgtgattgttgtaaactaattttacctttgatgttcattgaatcatccacagatgtacaactggcatttgttgatgttgggattttatttacgtggatccatgaattacctgcaaaaaaaaaaaaaaaa

SEQ ID NO: 8496 - protein, 96 aa, Zea mays
  misc_feature: Ceres CLONE ID no. 1454507
  misc_feature: Ceres CDNA ID no. 35383414
  misc_feature: Homolog of GI Number: 34913910 NR Desc: OSJNBa0024F24.29
MAYLSRTAAAVAVAVRSAVRSAPLTGRVLGAPLPSLASPSAARSARILRRTAAAASAGLETLMPLHSAVAAARLRSCIAVDSSCWSSLSQGYALPL

SEQ ID NO: 8497 - DNA, 656 bp, Zea mays
  misc_feature: Ceres CLONE ID no. 1454536
  misc_feature: Ceres CDNA ID no. 25446124
  CDS (3)..(275): REFERENCED BY SEQ ID NO: 8498
cctcagtcctcagtcctcaggacccctcgtcccctccagttgtggaggccgccactgcgccagcgccacagtgcccgtcgaccgccacctgcactctgcgccgcgcctgccgcctgcgccgctgcgcgcagcgcgcaagcaacgccgccggccgcccccacgcacgcaagcagctttgcgccctcgctttgcagcttgctccggcaatggcgctgatctctggcgctcccaacgaagacggtcgttgtaagctaatttatttatgttctacatagttgatgacaaaactaaacagcctgccacattttggtcttgtctccaagacatgcaagagggtcttcaggaacttacaatatgactttcactttgggctcaagagttcagatgatgttcaccttttggctgcaacttgcaaggacaagtcaagtacaagaacaattgactagcatcctgcatcattttggttctcatgccatttgtcagttgtaacttgtaatgaacttgtgattggtgtgcggcgtgtgcttttggatctcatgtcactatgcatttcatttggttatgtaatgaattctggtactatggatttctggtcatgtaggaacttgaaatgacattcagttgtgacttctcagttctcaaaaaaaaaaaaaaaa

SEQ ID NO: 8498 - protein, 55 aa, Zea mays
  misc_feature: Ceres CLONE ID no. 1454536
  misc_feature: Ceres CDNA ID no. 25446124
MTKLNSLPHFGLVSKTCKRVFRNLQYDFHFGLKSSDDVHLLAATCKDKSSTRTID

SEQ ID NO: 8499 - DNA, 432 bp, Zea mays
  misc_feature: Ceres CLONE ID no. 1454683
  misc_feature: Ceres CDNA ID no. 36707117
  CDS (11)..(268): REFERENCED BY SEQ ID NO: 8500
aatttcagtcatgaaggcccaggtcgcagcagcaactgtcttggtcttgctcctcctgacctttgctgcggaggctcgtacgtgcatgtcgcgaagccaggaacagaaagggaggtgctttcacgatacggattgtgccgccgtctgcgtcaaacagagcttcaccggaggcttatgcaacgggcggccgccgttcaagcagtgcttctgcactaagccatgcaagagagagagagctgatgctacactccggtcgtcaggcctctgatcatgttgtgcttgatccgcatgacagcgcgactctcgcttgtatgcctaggttgatgtgtatgtaataaataaacaaaatagtaaatgacatgtttttcttacatgaaagtcaagcgattttgcttatctgaccggcatgtgtccgcaaaaaaaaaaaaaaaa

SEQ ID NO: 8500 - protein, 85 aa, Zea mays; identical to SEQ ID NO: 4822
  misc_feature: Ceres CLONE ID no. 1454683
  misc_feature: Ceres CDNA ID no. 36707117
  misc_feature (23)..(71): Pfam Name: Gamma PFAM Desc: Gamma
  misc_feature: Homolog of GI Number: 7939581 NR Desc: thionin like protein
  misc_feature: Homolog of GI Number: 533692 NR Desc: protease inhibitor
  misc_feature: Homolog of GI Number: 45451621 NR Desc: Kunitz
  misc_feature: Homolog of GI Number: 20067024 NR Desc: gamma thionin
  misc_feature: Homolog of GI Number: 4753797 NR Desc: gamma
  misc_feature: Homolog of GI Number: 60729566 NR Desc: defensin 1 precursor
  misc_feature: Homolog of GI Number: 17066707 NR Desc: defensin protein precursor
  misc_feature: Homolog of GI Number: 1362092 NR Desc: gamma

SEQ ID NO: 8501 - DNA, 758 bp, Zea mays
  misc_feature: Ceres CLONE ID no. 1454846
  misc_feature: Ceres CDNA ID no. 40041424
  CDS (97)..(381): REFERENCED BY SEQ ID NO: 8502
accaataaagcccaccaagcctcaaacgcccacgttggagcagcagcagcaccagcaccgagccggagcccaccagccgtccgataaacagatccgatggctctcgctctctccggctccgctgctgcccgcgcgctcgcccagcggctggccccggccaccaggggctacgcggcggcggcctcctccggggcgatgaggcgcggcgccgcggcggccgcggacgggaaggcggccagggaggccgagaaggccgcggccgacgcctcgtgggtgcccgaccccgtcaccggccactaccgccccgccaaccgcgccgtcggcgccgaccccgccgacctccgcgccgcgcacctcgggcagacctacgcacgggcttgaaggccacgctcgacgaccctcctggccccgccatggaaggaaaactgctatgctacgtaaaaggggaagccaggcggggctcgttcgccgagcgcagcgccgcgggcggctggtgtcgctggcgcggcttaacgacgcatcaatcatcatcgtcgatcctatactacggaggagatgcggcctggatgtttggctgtttcccattgtgtgtgtgtgcgcgtgcgtgcgtgcgtccgggcttggatgccctgctatagtgttcatgtgctcagatcagatgtatttctcgtcgagcagggcttgtaccttttacttttacagctaagtattaataacgaaagaatctagcgttttcttttccaaaaaaaaaaaaaaaa

SEQ ID NO: 8502 - protein, 94 aa, Zea mays; identical to SEQ ID NO: 3534
  misc_feature: Ceres CLONE ID no. 1454846
  misc_feature: Ceres CDNA ID no. 40041424
  misc_feature (1)..(88): Pfam Name: LEA_3 PFAM Desc: Late embryogenesis abundant protein
  misc_feature: Homolog of GI Number: 1129142 NR Desc: ORF1
  misc_feature: Homolog of GI Number: 19347607 NR Desc: Ramy1
  misc_feature: Homolog of GI Number: 2570503 NR Desc: zinc inducible protein
  misc_feature: Homolog of GI Number: 1184112 NR Desc: Zn
  misc_feature: Homolog of GI Number: 21219450 NR Desc: putative secreted proline
  misc_feature: Homolog of GI Number: 599726 NR Desc: Lea5 protein
  misc_feature: Homolog of GI Number: 56900730 NR Desc: putative late
  misc_feature: Homolog of GI Number: 27808634 NR Desc: At4g15910
  misc_feature: Homolog of GI Number: 488731 NR Desc: chitinase
  misc_feature: Homolog of GI Number: 34894580 NR Desc: zinc

SEQ ID NO: 8503 - DNA, 873 bp, Zea mays
  misc_feature: Ceres CLONE ID no. 1454936
  misc_feature: Ceres CDNA ID no. 29191569
  CDS (232)..(738): REFERENCED BY SEQ ID NO: 8504
gttcacggttcacccctctccctctctctctccactttcctttcctggcagcgacgagtgacgacagtggcaggcgggcgggcgggcgttctctaggtcttcgttgtccccttcaccggcggctgccaacgccctttgccaggtcttcgttgtcaccttcgccggcgactgtcacggcccctttgccagctcttcgtctgccccttccccggtaccgggactgaagataagatggctgccttgccattggccaccgcagaagcatgtgatgctaatgctgctttaattatgaatggtgatcttcgttctctccaacctatcttccgaatctatggaggccggcagatttttgctggccctgttgtgacactgaagatctttgaggataacgttctgctccgcgagttccttgaggagaaaggtcacggcagggtcctggtggttgatgccggtgggagcatgcgttgtgcagttttgggtggcaaccttgcccagctgatgcagaacaatgggtgggctggaatcgttgtcaatggctgcatcagggacgttgacgagataaatggctgcgacgttggtgtccgggctctgaactcacaccctatgaagtcaaacaagaagggcgtcggtgagaagcatgtccctgtgacctttgcagggacaagaatctgcgatggagaatggctctatgccgattctgatggcattctcatctcaagatcagaattgagtgtgtaggcctgttcttatgttatgtgtgaacttgtaataatgtatagctgaattacatgactagcgggaatactttggacgttttgtcagtatcgtttggaatatattcctttgaaaattattgcaaaaaaaaaaaaaaaa

SEQ ID NO: 8504 - protein, 168 aa, Zea mays
  misc_feature: Ceres CLONE ID no. 1454936
  misc_feature: Ceres CDNA ID no. 29191569
  misc_feature (21)..(161): Pfam Name: Methyltransf_6 PFAM Desc: Demethylmenaquinone methyltransferase
  misc_feature: Homolog of GI Number: 34910724 NR Desc: S
  misc_feature: Homolog of GI Number: 51964406 NR Desc: PREDICTED P0486G03.12 gene product
  misc_feature: Homolog of GI Number: 50913039 NR Desc: S
  misc_feature: Homolog of GI Number: 21537415 NR Desc: S
  misc_feature: Homolog of GI Number: 6728985 NR Desc: putative S
  misc_feature: Homolog of GI Number: 38603934 NR Desc: At5g56260
  misc_feature: Homolog of GI Number: 53761422 NR Desc: COG0684: Demethylmenaquinone methyltransferase
  misc_feature: Homolog of GI Number: 83655178 NR Desc: regulator of ribonuclease activity A
  misc_feature: Homolog of GI Number: 17546073 NR Desc: PROBABLE S
MAALPLATAEACDANAALIMNGDLRSLQPIFRIYGGRQIFAGPVVTLKIFEDNVLLREFLEEKGHGRVLVVDAGGSMRCAVLGGNLAQLMQNNGWAGIVVNGCIRDVDEINGCDVGVRALNSHPMKSNKKGVGEKHVPVTFAGTRICDGEWLYADSDGILISRSELSV

SEQ ID NO: 8505 - DNA, 564 bp, Zea mays
  misc_feature: Ceres CLONE ID no. 1455224
  misc_feature: Ceres CDNA ID no. 40041425
  CDS (33)..(287): REFERENCED BY SEQ ID NO: 8506
aaaaactgccagcccctcacctcctcctcgccatggctgctccgtgtgcagcaaccgcacactgcaccagcgagccgtcgacaccatcgaacctcatctgcattcgtggtcgctacgccctccgacgccaagattgtaacctcgtggacggagaatacatcctcgtgctagagcaaggagttgctcaggaggtagccccggatctagcaccagagcctgccatcgaggatctgcctgccccagctttggaaggttctctggaggacatggttgttggagtgacttagccgtccatcttgccaccgggttggacagtcgagtgggaccctacctcagctgaggaggagcgtgaggagtgatgggagaggcttccccatctctccatttatcgttagtttatttctgttgcatttcgaacaatgagtactacttttgctaaaactccgatgatgatgtaataaatttaatactcccttaatgtatggttttatgttttaaaaaaaaaaaaaaaaaaaaaaaaaaaaaaaaaaaaaaaaaaaaaaaaaaaaaaaaaaaaaaaaaaaa

SEQ ID NO: 8506 - protein, 84 aa, Zea mays
  misc_feature: Ceres CLONE ID no. 1455224
  misc_feature: Ceres CDNA ID no. 40041425
  misc_feature: Homolog of GI Number: 2292990 NR Desc: microvascular endothelial differentiation gene 2
MAAPCAATAHCTSEPSTPSNLICIRGRYALRRQDCNLVDGEYILVLEQGVAQEVAPDLAPEPAIEDLPAPALEGSLEDMVVGVT

SEQ ID NO: 8507 - DNA, 789 bp, Zea mays
  misc_feature: Ceres CLONE ID no. 1455230
  misc_feature: Ceres CDNA ID no. 36706855
  CDS (90)..(551): REFERENCED BY SEQ ID NO: 8508
aaaccctagccgccgccgccccctcctcttcgtcctgcaagcagcgccgccgccttccaccggcccgagctccagccttcccttcaaccatggctgacgttgatgtcgaccccgaggtggcggccgccggccccaagaagaggacgttccgcaagttcagctaccgcggcgtggacctcgacgctctcctcgacatgtccagcgaggacctcgtcggcctcttccctgcccgcgcccgcagaaggttctcgaggggtctgaagaggaagccgatggcgctcgtcaagaagctgcgcaaggcgaaaagcgaagcccctgctggtgagaagcctgagcaagtgaggacccacctccgcaacatgattatcatgcctgagatgatcggaagcgtcgtgggcatctacaatggcaagtgcttcaaccaggtggagatcaagccggagatgattgggcactacctggcagagttctccctgtcgtacaagccggtgaagcacgggaggcctggtatcggtgccacccactcgtcgaggttcattcctctcaagtgagaatatggtcaggaaaattgtctgagatgtctggaatccagtgttcttatcctagtcaaatgtagcacctgatataccgtctgtcagtctagtggtggagcagctccctttgaaccttgaactaatccagttccagattttgaagttatcatgaggaggatcgaacatgtttctctccttaaaaaaaaaaaaaaaaaaaaaaaaaaaaaaaaaaaaaaaaataaaaaaaaaaaaaaaa

SEQ ID NO: 8508 - protein, 153 aa, Zea mays; identical to SEQ ID NO: 4470
  misc_feature: Ceres CLONE ID no. 1455230
  misc_feature: Ceres CDNA ID no. 36706855
  misc_feature (55)..(136): Pfam Name: Ribosomal_S19 PFAM Desc: Ribosomal protein S19
  misc_feature: Homolog of GI Number: 50919151 NR Desc: putative 40S ribosomal protein S15
  misc_feature: Homolog of GI Number: 50934735 NR Desc: putative 40S ribosomal protein S15
  misc_feature: Homolog of GI Number: 20465567 NR Desc: putative ribosomal protein S15
  misc_feature: Homolog of GI Number: 1107485 NR Desc: 40S ribosomal protein S15
  misc_feature: Homolog of GI Number: 2982268 NR Desc: probable 40S ribosomal protein S15
  misc_feature: Homolog of GI Number: 20147171 NR Desc: At1g04270/F19P19_29
  misc_feature: Homolog of GI Number: 33589676 NR Desc: At5g09500
  misc_feature: Homolog of GI Number: 15425963 NR Desc: 40S ribosomal protein S15
  misc_feature: Homolog of GI Number: 82621162 NR Desc: 40S ribosomal protein S15
  misc_feature: Homolog of GI Number: 79316582 NR Desc: RPS15

SEQ ID NO: 8509 - DNA, 618 bp, Zea mays
  misc_feature: Ceres CLONE ID no. 1455336
  misc_feature: Ceres CDNA ID no. 40351895
  CDS (63)..(416): REFERENCED BY SEQ ID NO: 8510
atcattcatcactacacacttctcattttgcaaacaatcaaaatcccctaaaactaagaaaaatggctggtctaatgaaattggcatgcttggtcttggcctgcatgattgtggtcggtccaatcacaacgaacgcggctctaagctgtggaaccgttagcggtaacttggcagcatgtattggctacttaacccaaaatgggccccttcccagagggtgctgcaccggcgttactaatctaaacaacatggcccgtacaaccccggaccgtcagcaagcttgccgttgtcttgtaggagccgctaactccttccctactctcaacgctgcccgagctgctggacttcctaaggcatgtggagtcaatattccttacaaaatcagcaaaagcaccaactgcaacagcgttagatgagcggcggtcggatgaagaaactcaagcggacgtacgaatctaatataatgtatgagagagtactaaataagatgttgtttttctagtgttttaaaatttcatgtttctcttctgttgtgtcgttcctttactttggttgtatgtactatgttcgtaatcaacgtccgctatatgaagttcatatccaaaaaaaaaaaaaaaa

SEQ ID NO: 8510 - protein, 117 aa, Zea mays
  misc_feature: Ceres CLONE ID no. 1455336
  misc_feature: Ceres CDNA ID no. 40351895
  misc_feature (29)..(113): Pfam Name: Tryp_alpha_amyl PFAM Desc: Protease inhibitor/seed storage/LTP family
MAGLMKLACLVLACMIVVGPITTNAALSCGTVSGNLAACIGYLTQNGPLPRGCCTGVTNLNNMARTTPDRQQACRCLVGAANSFPTLNAARAAGLPKACGVNIPYKISKSTNCNSVR

SEQ ID NO: 8511 - DNA, 893 bp, Zea mays
  misc_feature: Ceres CLONE ID no. 1455437
  misc_feature: Ceres CDNA ID no. 25445866
  CDS (100)..(711): REFERENCED BY SEQ ID NO: 8512
actcgaaggggagaggacagaagagggagatacaggtaccagatcatctgatttctcagaagcaaaatgttgtttggagctcattaacaccatcctgtaatgcctgtgattttacgggaaatggaggatcattctgtccatcccatgtctaagtctaaccatggctccttgtcaggaaatggttacgagatgaaacattcaggccataaagtttgcgataggcattcatcatcggagtctgatcggtctcaccaagaagcatcagcagcaagtgaaagcagtccaaatgaacacacatcaactcaatcagacaatgatgaagatcatgggaaagataatcaggacacaatgaagccagtattgtccttggggaaggaaggctctgcctttttggccccaaaattacattacagcccatcttttgcttgtattccttatactgttgatgcttattatagtggggttggggtcttgacaggatatgctccacatgccattgtccatccccagcaaaatgatacaacgaacactccgggtatgttacctgtggaacctgcagaagaaccaatatatgttaatgcaaaacaataccatgcaatccttaggaggaggcaaacacgtgctaaattggaggcccagaacaagatggtgaaaaatcggaaggtaatacatagtaattttccaattcctgatgctgatttggtaagatgattttcattgttcttcagcatttgaagcatacagagctttgattatcaatacagtagatttttcttgggtcttgaccatattcagagggaggtccctctggctacaatttcagtgggtttgtcataggcttaaattttttattagcaaattgttctggacttgtatcaaaaaaaaaaaaaaaa

SEQ ID NO: 8512 - protein, 203 aa, Zea mays
  misc_feature: Ceres CLONE ID no. 1455437
  misc_feature: Ceres CDNA ID no. 25445866
  misc_feature (154)..(188): Pfam Name: CBFB_NFYA PFAM Desc: CCAAT
  misc_feature: Homolog of GI Number: 50939151 NR Desc: putative transcription factor
  misc_feature: Homolog of GI Number: 57222442 NR Desc: putative CCAAT
  misc_feature: Homolog of GI Number: 50916485 NR Desc: putative CCAAT
  misc_feature: Homolog of GI Number: 2826786 NR Desc: RAPB protein
  misc_feature: Homolog of GI Number: 45861211 NR Desc: CCAAT
  misc_feature: Homolog of GI Number: 45861201 NR Desc: CCAAT
  misc_feature: Homolog of GI Number: 45861203 NR Desc: CCAAT
  misc_feature: Homolog of GI Number: 45861205 NR Desc: CCAAT
  misc_feature: Homolog of GI Number: 45861207 NR Desc: CCAAT
  misc_feature: Homolog of GI Number: 45861221 NR Desc: CCAAT
MPVILREMEDHSVHPMSKSNHGSLSGNGYEMKHSGHKVCDRHSSSESDRSHQEASAASESSPNEHTSTQSDNDEDHGKDNQDTMKPVLSLGKEGSAFLAPKLHYSPSFACIPYTVDAYYSGVGVLTGYAPHAIVHPQQNDTTNTPGMLPVEPAEEPIYVNAKQYHAILRRRQTRAKLEAQNKMVKNRKVIHSNFPIPDADLVR

SEQ ID NO: 8513 - DNA, 886 bp, Zea mays
  misc_feature: Ceres CLONE ID no. 1455472
  misc_feature: Ceres CDNA ID no. 25892886
  CDS (92)..(709): REFERENCED BY SEQ ID NO: 8514
atcacaagcgtccctcccccatcttcttcctccccgcaactcgctgctcctcccacaaccgaagctcagtcccgtggccacgcagaacaaaatgcagcgagcaattcaagctatcggatcacatggcagtgtgctcaaatctgctgtcctgcaacacatcagtgttgtgaagcctgctatgctgcccgctgtgttcccacgcttcatgtcagtatcatctgctcaaatagaggagagtggatttgagagcagcactgttgcagacattttgaagtctaaagggaagagtgccgatggatcatggctctggtgcaccactgatgatagtgtctatgatgctgtcaaatcgatgacacagcacaatgtgggagctttggtggttgttaaacctggggaagataaatcaattgcgggcatcgtcacagagagagattatctccggaaaattatagtgcagggtcgatcctccaagtcaaccaaagttggagatatcatgaccgaagagaacaagctgatcacggtgaaacctgaaaccagagtcctgaaagcaatgcagctgatgacagaaaagcgtatcaggcacatcccggtgatcagcggcacggagatgatggggatggtctccatcggcgacgtggttcgcgcggtggtcagcgagcacaaggaggagctgaaccggctcaacgcctacatccagggtgggtactaggacccagccgttttgcagggcgtccctttgagtgaactctacaataacgaccagggtgatgatgacgaaataggccgtgtttcttcgcggacaatggctgttgaacttgaatttgcgtgtgtgatgttttcctgcttatttagtgcatatttccgtggcagaaaaaaaaaaaaaaaa

SEQ ID NO: 8514 - protein, 205 aa, Zea mays
  misc_feature: Ceres CLONE ID no. 1455472
  misc_feature: Ceres CDNA ID no. 25892886
  misc_feature (65)..(187): Pfam Name: CBS PFAM Desc: CBS domain pair
  misc_feature: Homolog of GI Number: 47027028 NR Desc: CBS1
  misc_feature: Homolog of GI Number: 55296028 NR Desc: CBS domain protein
  misc_feature: Homolog of GI Number: 34913008 NR Desc: P0663E10.18
  misc_feature: Homolog of GI Number: 67666978 NR Desc: CBS
  misc_feature: Homolog of GI Number: 72608229 NR Desc: CBS
  misc_feature: Homolog of GI Number: 46314014 NR Desc: COG0517: FOG: CBS domain
  misc_feature: Homolog of GI Number: 78061876 NR Desc: putative signal
  misc_feature: Homolog of GI Number: 46321816 NR Desc: COG0517: FOG: CBS domain
  misc_feature: Homolog of GI Number: 67548342 NR Desc: CBS
MQRAIQAIGSHGSVLKSAVLQHISVVKPAMLPAVFPRFMSVSSAQIEESGFESSTVADILKSKGKSADGSWLWCTTDDSVYDAVKSMTQHNVGALVVVKPGEDKSIAGIVTERDYLRKIIVQGRSSKSTKVGDIMTEENKLITVKPETRVLKAMQLMTEKRIRHIPVISGTEMMGMVSIGDVVRAVVSEHKEELNRLNAYIQGGY

SEQ ID NO: 8515 - DNA, 694 bp, Zea mays
  misc_feature: Ceres CLONE ID no. 1455684
  misc_feature: Ceres CDNA ID no. 40351896
  CDS (2)..(499): REFERENCED BY SEQ ID NO: 8516
cttgcacaccatacaggtccaagcccgcccgcccgcccatagagctcgccgcctccctccctgtctccttccccgcctctctctcgtcgtcgtcccccgcagcgccggccgaagcaaagcacggggacttaaccgccgccatgagctactacggccagcagcagccgcccgtcggcgcgcctccaccgcaagggtatccaggaaaagaggagtacccgccggcaggctaccctccggccgggtacccaccgccggggcagggacagggctaccctccccagggatacccgccgcagcaggggggttatccgccgcagcaggggtatccgccacagcagggagggtacccgccgcagcaagggtacccgcagcaggggtacccgcctcagtacgcgcagcagccgccgcggcagcagcagagcagtggcccgtccttcatggagggatgcctggccgccctttgttgctgctgtctgttggatgcttgcttctaagttgatttctaagcggcagggaacagacttggtgcagctgctatgtgttccatattggaaattgggattggcttgttgattaatagtagtacttcgtagaggagattacaagaactccttaccgtcatgtttgtatgttcagatgattggtgtaccttttcgcataaaaaaagatgtttgttgcaaaaaaaaaaaaaaaa

SEQ ID NO: 8516 - protein, 117 aa, Zea mays
  misc_feature: Ceres CLONE ID no. 1455684
  misc_feature: Ceres CDNA ID no. 40351896
  misc_feature (43)..(47): Pfam Name: XYPPX PFAM Desc: XYPPX repeat
  misc_feature (48)..(52): Pfam Name: XYPPX PFAM Desc: XYPPX repeat
  misc_feature (55)..(59): Pfam Name: XYPPX PFAM Desc: XYPPX repeat
  misc_feature (61)..(65): Pfam Name: XYPPX PFAM Desc: XYPPX repeat
  misc_feature (68)..(72): Pfam Name: XYPPX PFAM Desc: XYPPX repeat
  misc_feature (79)..(83): Pfam Name: XYPPX PFAM Desc: XYPPX repeat
MSYYGQQQPPVGAPPPQGYPGKEEYPPAGYPPAGYPPPGQGQGYPPQGYPPQQGGYPPQQGYPPQQGGYPPQQGYPQQGYPPQYAQQPPRQQQSSGPSFMEGCLAALCCCCLLDACF

SEQ ID NO: 8517 - DNA, 708 bp, Zea mays
  misc_feature: Ceres CLONE ID no. 1455748
  misc_feature: Ceres CDNA ID no. 36707080
  CDS (68)..(514): REFERENCED BY SEQ ID NO: 8518
agaacacaactcagaagagaaatcgggagagcgagctcgaggtcttaattctccagaaatcgagggcatggaagaagcaaacgagttctacctgaggtactatgtcgggcacaaggggaaatttggacacgagttcctggagttcgagtttagaccggacggtaagctccgatacgccaataactcaaactacaagaacgatacgatgatccggaaggaggtgtttctcacccccgccgttctcaaggaatgcaagcgtatcgtctccgagtgcgagataatgaaagaagatgattttaagtggccggaacctgaccgtgttgggagacaagagcttgagatcgttatgggaaatgagcacatctctttcgctacatctaagattggttctcttgttgatgtccagagcagtgatgatcctgaaggtcttcgcatcttctactatcttgttcaggacttgaaatgtcttgttttttcgctcatctcgctgcacttcaagatcaagcctatttagagaaagaaatcagtcgagttgctgggagtatgtggctgaagtttgtatttttttttttaatgtttctgactcatcaacattactgagattcatgctagtttcttgttctgttgtttcaatgaatcttaaataagcgttggtaatggtttgacaacttataattaggtgagcttttcccaaaaaaaaaaaaaaaa

SEQ ID NO: 8518 - protein, 148 aa, Zea mays
  misc_feature: Ceres CLONE ID no. 1455748
  misc_feature: Ceres CDNA ID no. 36707080
  misc_feature (6)..(148): Pfam Name: Mago_nashi PFAM Desc: Mago nashi protein
  misc_feature: Homolog of GI Number: 3123515 NR Desc: Mago Nashi
  misc_feature: Homolog of GI Number: 42565403 NR Desc: mago nashi
  misc_feature: Homolog of GI Number: 58465200 NR Desc: mago nashi
  misc_feature: Homolog of GI Number: 12802873 NR Desc: mago nashi
  misc_feature: Homolog of GI Number: 13195558 NR Desc: mago nashi
  misc_feature: Homolog of GI Number: 61841311 NR Desc:  similar to mago
  misc_feature: Homolog of GI Number: 45383506 NR Desc: mago
  misc_feature: Homolog of GI Number: 33358223 NR Desc: Chain D
  misc_feature: Homolog of GI Number: 70952123 NR Desc: mago nashi protein homolog
  misc_feature: Homolog of GI Number: 73990748 NR Desc:  similar to mago
MEEANEFYLRYYVGHKGKFGHEFLEFEFRPDGKLRYANNSNYKNDTMIRKEVFLTPAVLKECKRIVSECEIMKEDDFKWPEPDRVGRQELEIVMGNEHISFATSKIGSLVDVQSSDDPEGLRIFYYLVQDLKCLVFSLISLHFKIKPI

SEQ ID NO: 8519 - DNA, 1005 bp, Zea mays
  misc_feature: Ceres CLONE ID no. 1455782
  misc_feature: Ceres CDNA ID no. 40351897
  CDS (244)..(861): REFERENCED BY SEQ ID NO: 8520
agtttagagagtcccagcgacctgtagcctcctcctctctccgtcgacctcgctctcgcctcgccgcctcctacccgcagcagcgcctccattgctctctctcacgagtcccggcgttccagtggggggcattcatggcggggcagtccgacccgcacctctccatcttctcgccctccgaggtaaccaaccccttcccttccacaatcacaggcagggactagactatcttcgtcaaagggaatgtttggagctgtcctgtctgtgctgcaggtggagttcgtggcggaggatgagattgtcgaaatcgtccccaacatccgcatggacgccctcaacatgatctgcggggatttcgggcccttcttcccccagattcccaccaaggtgcctctctggctcgctgtcgcgctcaagaagcgtagcaagtgcaccatccgcaccccggactggatgactgttgaccgcttgacacaggtattggaagcggaaagagagtcgccacgagaattccagccattaccattccactatattgaaatttctaagcttctgtttgatcatgctcgtgatgacatctcagatgcatacctggtaagatctctaattgaggacatcagagatgtcagatttcacaaggttgagactggattagagacgatatctggacgcacccatgctgtaaagctcaaaaatctctctgcaatggaagtgaacattgtccgccctttcatggtgagaactttgcaggcattctataagcacgatagtccacagatgattcagcaagcagataatatagggagcagagcaacactggttacagaccgtggcccgagaagagatctaaggcgcaggtagtccacttgtattctgccaaaaaaatgtatatctgaggacagcagcaagtgcttgctttcttgcaataataccagctaagtatgtgctaatgaaaaaaaaaaaaaaaaaaaaaaaaaaaaaaaaaaattaaaaaaaaaaaaaaaa

SEQ ID NO: 8520 - protein, 205 aa, Zea mays
  misc_feature: Ceres CLONE ID no. 1455782
  misc_feature: Ceres CDNA ID no. 40351897
  misc_feature (14)..(161): Pfam Name: Psf2 PFAM Desc: Partner of SLD five
MFGAVLSVLQVEFVAEDEIVEIVPNIRMDALNMICGDFGPFFPQIPTKVPLWLAVALKKRSKCTIRTPDWMTVDRLTQVLEAERESPREFQPLPFHYIEISKLLFDHARDDISDAYLVRSLIEDIRDVRFHKVETGLETISGRTHAVKLKNLSAMEVNIVRPFMVRTLQAFYKHDSPQMIQQADNIGSRATLVTDRGPRRDLRRR

SEQ ID NO: 8521 - DNA, 839 bp, Zea mays
  misc_feature: Ceres CLONE ID no. 1455829
  misc_feature: Ceres CDNA ID no. 36593759
  CDS (201)..(632): REFERENCED BY SEQ ID NO: 8522
gttactgttctatagcactagaacctgctgattcctcgtcgccagcttctctttcccccaccacaaccccccgccggcgcggctcccggtgtcccttccactctccaccctctccttcccttcggcgccaagtccatccgcccctccgaatctccgattgccgccgtccaggtttggcaggtgccggccgacagttgagaatgggactgaggcgtctgatgagatgctgctgctgcattgcaaagcacgcggacgacggcgacaagatcgatttcggaggtggcaatgttcatgttgtcacaagcaaagaggactgggaccaaagaattgcggaggcaaacaaggatgggaaaaccgtggttgcaaacttcagcgcttcctggtgtgggccgtgccgtgtcatcgcacctgtctacgccgaaatgtcgcagacgtaccctcagctcatgttcctgacgatcgatgttgatgacttgatggagttcagctcgtcgtgggacatccgcgcgaccccgacgttcttcttcctcaagaacgagcagcaggtggacaagctggtcggcgccaacaagcctgagctggagaagaaagtggccgccgtcgccgacgcggccggcagcaagacagtgtagtgtagtgtagtttaggcaaagacccgcgccttgttgacctggctctgtacagcatcgttatatcctgttgctgtgcgtttctttcttggcaccgtgcgcatgcgtcgatctgtcggcggttatgtcttccgccatgtgctgattgtaagagttgcccggtaatggtaatggtaatggtaatggttttttacaaaaaaaaaaaaaaaa

SEQ ID NO: 8522 - protein, 137 aa, Zea mays
  misc_feature: Ceres CLONE ID no. 1455829
  misc_feature: Ceres CDNA ID no. 36593759
  misc_feature (24)..(130): Pfam Name: Thioredoxin PFAM Desc: Thioredoxin
  misc_feature: Homolog of GI Number: 24637227 NR Desc: thioredoxin h
  misc_feature: Homolog of GI Number: 34896158 NR Desc: putative thioredoxin
  misc_feature: Homolog of GI Number: 50933037 NR Desc: putative thioredoxin h
  misc_feature: Homolog of GI Number: 24637229 NR Desc: thioredoxin h
  misc_feature: Homolog of GI Number: 1085952 NR Desc: protein S1
  misc_feature: Homolog of GI Number: 1086147 NR Desc: protein S2
  misc_feature: Homolog of GI Number: 5732705 NR Desc: thioredoxin
  misc_feature: Homolog of GI Number: 5732699 NR Desc: thioredoxin
  misc_feature: Homolog of GI Number: 27543511 NR Desc: thioredoxin h
  misc_feature: Homolog of GI Number: 5732703 NR Desc: thioredoxin
MRCCCCIAKHADDGDKIDFGGGNVHVVTSKEDWDQRIAEANKDGKTVVANFSASWCGPCRVIAPVYAEMSQTYPQLMFLTIDVDDLMEFSSSWDIRATPTFFFLKNEQQVDKLVGANKPELEKKVAAVADAAGSKTV

SEQ ID NO: 8523 - DNA, 780 bp, Zea mays
  misc_feature: Ceres CLONE ID no. 1455839
  misc_feature: Ceres CDNA ID no. 40351898
  CDS (2)..(700): REFERENCED BY SEQ ID NO: 8524
accacacccaaggcagccagtgagccagaaagaagaagaggccattcgaagctgccacgcacgccacgcggaaaccattcgagtccacgaggagcagcagaagaagaaagggcaagggccaggccccaccaccgagaagcgagaagcagagcgaggaacatcctccggtggccgccgccatggccggctgctgcgtgttcctccggtggccgtcggcctcgccgtcgcgcatcggctaccgctccctcgtcgacgcggcggccgacgccgccgccccgccgtcgacggtgacggtcgtggtcgggaaggagcggcgggcgttcgcggtggaccgcctcgtgctcgactcctacccgctccggctgctcctggagacggcggcgcgcagggaggagcgcagggccgggggcggcgccggcgccatcttcgtggacgtcgacgccatcctcttcgagcacatcctctggctcgcctgcgacgcccgctccgtctcccagatcctgcacctcgacctcaaggagatcatcgacttctacgcccaggacgcgtgactggtccgccgccctcagctgcgcggctccggcatgcccgagcccggctcctcctcctccctggacacgtactccgcaccacctgcacgtttcttccatggatggatattcttttttttctttcttcctttcgtcctctcttacgctaatgcgcgtattgatgcgcgggatactattggaaattaatacagaacagaaacggttatgaagttcaaaaaaaaaaaaaaaa

SEQ ID NO: 8524 - protein, 123 aa, Zea mays
  misc_feature: Ceres CLONE ID no. 1455839
  misc_feature: Ceres CDNA ID no. 40351898
MAGCCVFLRWPSASPSRIGYRSLVDAAADAAAPPSTVTVVVGKERRAFAVDRLVLDSYPLRLLLETAARREERRAGGGAGAIFVDVDAILFEHILWLACDARSVSQILHLDLKEIIDFYAQDA

SEQ ID NO: 8525 - DNA, 668 bp, Zea mays
  misc_feature: Ceres CLONE ID no. 1455845
  misc_feature: Ceres CDNA ID no. 25892513
  CDS (294)..(443): REFERENCED BY SEQ ID NO: 8526
atggactggatgcgctcagtgacccctccccctgcctatttattcagtgtgttccacggctgagttcagaaaagcttttctcccttgttctcgagctgtagtcccagtccactacaaaggtgttggagtcctggtattcttgctggtgtgcatcctctctttcagccaccaagtttgttttactctagagctgaatgccaacctcttgcctgtggtgaccaaacccaaccgtttttcacctccccgtggacaaggtttcccacaagtattcttggtcgtgtactacttgttccatgctcggcaaagaactcctaccagaaggagtgaagattcaagctgaagtggtgactgaagaggaatctactccagtggctgctgatcaagtggaggagccatctaactggggtttaatagagggatcgagtacctcttcactgcaataaggcgaagttttattcccttatctttgggttagttacttcatgtggaagacttcaagcttagaaggtttttatatatctcttatgaaaaggcttcacccttccaattattgtagttaagttatgcccttcgagtactatcaggacttgtaataaatacatctctttctaccatgtaaaacttgtgttctagaatgtaaagtgtactttgtaaaaaaaaaaaaaaaa

SEQ ID NO: 8526 - protein, 49 aa, Zea mays
  misc_feature: Ceres CLONE ID no. 1455845
  misc_feature: Ceres CDNA ID no. 25892513
MLGKELLPEGVKIQAEVVTEEESTPVAADQVEEPSNWGLIEGSSTSSLQ

SEQ ID NO: 8527 - DNA, 983 bp, Zea mays
  misc_feature: Ceres CLONE ID no. 1455888
  misc_feature: Ceres CDNA ID no. 40351899
  CDS (110)..(595): REFERENCED BY SEQ ID NO: 8528
cccagccttgtccccgtcccctctctcctttccccaacccaaaccaggagcgccctccctccctcccccagccgcccgccccctccccacccagggaaacccaccagccatgaagggggccaaatccaagggcgccgccaaggccgacaccaagttggcggtgaagagcaagggggcggagaagccggcggccaaggggaagaagggcaaggccggcaaggaccccaacaagcccaagagggcgccctccgccttcttcgtcttcatgggcgagttccgcgaggagttcaagcagaagaaccccaagaacaagtccgtcgccgccgtcggcaaagcggccggtgagaggtggaagagcttgagcgaatcggagaaggccccctacgtggccaaggccaacaagctcaagggcgagtacaacaaggccattgccgcctacaacaagggcgagagcgctgctgctgctgccccaaagaaggcggtggccaaggaggtggaggaggaagatgaggaggagtccgacaagtccaagtcggagatcaatgacgacgacgatgatgagggtagcgatgaggacgaggacgacgacgagtgaagaagacgcatcttgtcaaggctgctggctccggcggacaaaggcgggagcggctgctgcgcgagaaccgacgtgagctgtgtgcggtggtgtcataaggagcctgtccatctccactagagttatcccaagtttcacttcacatcgtgatgttgttttaccttttttttcttgtcgtcgtcccgctgcctgctataacggacagcgctccctgttggcgccgccgccggcgggggtggtgccctggcggcggagggtgtatgtcctctgccgccgggtgctcccctgcttgtacctagatggttggttactctttccgtccattgtcaccggctaacattgtgataatatcagtctgggtaatgttagattaaaaaaaaaaaaaaaa

SEQ ID NO: 8528 - protein, 161 aa, Zea mays
  misc_feature: Ceres CLONE ID no. 1455888
  misc_feature: Ceres CDNA ID no. 40351899
  misc_feature (42)..(111): Pfam Name: HMG_box PFAM Desc: HMG
MKGAKSKGAAKADTKLAVKSKGAEKPAAKGKKGKAGKDPNKPKRAPSAFFVFMGEFREEFKQKNPKNKSVAAVGKAAGERWKSLSESEKAPYVAKANKLKGEYNKAIAAYNKGESAAAAAPKKAVAKEVEEEDEEESDKSKSEINDDDDDEGSDEDEDDDE

SEQ ID NO: 8529 - DNA, 893 bp, Zea mays
  misc_feature: Ceres CLONE ID no. 1455924
  misc_feature: Ceres CDNA ID no. 29191570
  CDS (1)..(453): REFERENCED BY SEQ ID NO: 8530
atctcctcctccatcctcgtcttcccctccgccatgaaggaggtcgcaccctcctcctccacgctccacttcccctctgacatgaacgaggacgaaccctcctcctccaccctcctcttcccctccgccatgaacgaggtcagaccaggcgtggttttggatctcgacgatcctcctagtcgctacaacagattggggaaagtcactaccgtcggggtggagcagggaatcggatgcggaggtgctgaaaaggaggcgggggtggatcttggcagtcatctccgctgtcggtcggggcggagcagagcatcccgggcgcaaggggtgctgaaaaggaggcggcggtcggtcttgggagctcgtcggcactcacggccatgtgcctctcgcccggtaatctcaggttcgttccaatcccaaactacaacttgtatcagtgttatctccatctgattcaggtagtttggctacaacttggtcgtaattccccaagctctgttttggatcagtgttttgtatcagattgcttttggccatgatttcagatccagaacggagacatcgttcctttttacgtgtatgacttgatgcacttgaggggaaacaatggtgtccgcccgaggcaattcattgagactatcgatgacgactgagaaaaaatgtgcctatgcatgatatgggggctgtcaaacatgcgtctggtgcaaataatcaagaaaaaaaagatccgttatgtacccttttgttgcgatttggaatcttggtatgcaaacactactgtttgctttaatcaacaatttgatctgttgtgtatccttttgttgttggacctatatttctcttatgatcttattctgaacgcaagaagcttttgaacaaaaaaaaaaaaaaaa

SEQ ID NO: 8530 - protein, 139 aa, Zea mays
  misc_feature: Ceres CLONE ID no. 1455924
  misc_feature: Ceres CDNA ID no. 29191570
MKEVAPSSSTLHFPSDMNEDEPSSSTLLFPSAMNEVRPGVVLDLDDPPSRYNRLGKVTTVGVEQGIGCGGAEKEAGVDLGSHLRCRSGRSRASRAQGVLKRRRRSVLGARRHSRPCASRPVISGSFQSQTTTCISVISI

SEQ ID NO: 8531 - DNA, 824 bp, Zea mays
  misc_feature: Ceres CLONE ID no. 1455952
  misc_feature: Ceres CDNA ID no. 40351900
  CDS (65)..(583): REFERENCED BY SEQ ID NO: 8532
actcttctccttcactgtcgcagccgccccttgtagaagcttcgaggctgctgctgctgcgcccatggccgcggaaggcaagacgccgtccctcgccgaggagtattcacttccaccacaggaagttccagtggaaaaggcagctgaggagaagccctctagtggtactgagtctgaagctgctccctcaaccaatgatgaaactcctccatctgtagaagacaagaatggaacttctgaagtacaagatgctgctgaaaatccagaggcagaagaaactaacactgctgcagaggaaacacctgctgtagaggaagcaagtgagactaccgaggaggaagaggctgagaaacctgagatcaagatcgaaacagctccagcagattttcgtttcccaacaacaaaccaaacaaggcattgtttcacacgctatgttgaatatcacaggtgtgtggctgcaaaaggtgaggatgcacctgagtgtgataagttcgccaagtactatcgatccctgtgcccaggtgaatgggttgatcgctggaacgagcaacgcgaaaacggcaccttccctggacctctgtaatcctacaatgcaaaagaagtatgaactcacgatgttgtgccggcttctcttccttggtaactggcgccaagttaccttttttggagctctctacagaataagaaatcccttttggcttgaagaatgccctgttgctcttcctaacggtcatgttgtgcgctgctgagaaactagcgtcacagttaacaattttctttatacagttcagaaaatgattcgtgattcaaaaaaaaaaaaaaaa

SEQ ID NO: 8532 - protein, 172 aa, Zea mays
  misc_feature: Ceres CLONE ID no. 1455952
  misc_feature: Ceres CDNA ID no. 40351900
  misc_feature (98)..(171): Pfam Name: COX6B PFAM Desc: Cytochrome oxidase c subunit VIb
MAAEGKTPSLAEEYSLPPQEVPVEKAAEEKPSSGTESEAAPSTNDETPPSVEDKNGTSEVQDAAENPEAEETNTAAEETPAVEEASETTEEEEAEKPEIKIETAPADFRFPTTNQTRHCFTRYVEYHRCVAAKGEDAPECDKFAKYYRSLCPGEWVDRWNEQRENGTFPGPL

SEQ ID NO: 8533 - DNA, 772 bp, Zea mays
  misc_feature: Ceres CLONE ID no. 1455985
  misc_feature: Ceres CDNA ID no. 36706557
  CDS (94)..(525): REFERENCED BY SEQ ID NO: 8534
tcgcgaaaaccctaccgccgccgctctccaaggtcccaaggctccagatctccctctctcgcagctacctcggtggcctttggagcgcacgagatggcggaagaagccccagcaccagttgttgccccagcagaggcacctaccccggttcttggtgagccaatggacttgatgactgctctacagcttgtcatgaagaagtcaagtgctcatgatggccttgtgaaggggctccgtgaggctgccaagtccattgagaagcatgctgctcagctttgtgtgctggctgaggattgtgaccagcctgattacgtgaagctcgttaaggcactatgcgctgagcacaatgttcacctggttactgtgccaagtgctaaaactcttggagagtgggcagggctttgcaagattgactctgagggcaaggcaaggaaggttgtgggctgctcttgcgttgttgtgaaggactacggtgaagaatccgagggccttaacatcgtgcaggagtacgtcaagtctcactagatgagaatgtttcatgatgcaaacacttgtgttgggcattttggtcctcggtttcatttatactttattctcgggcttcctattgttcgaagtttcaagtgtgagcctagcagatatcgtcaatttggacctctgaacctttgtttatcaggcagctgctgcctttagcgtaaatcatcaagagctgataatatatttctctttgcaatattacaattttgatttttgcccaaaaaaaaaaaaaaaa

SEQ ID NO: 8534 - protein, 143 aa, Zea mays
  misc_feature: Ceres CLONE ID no. 1455985
  misc_feature: Ceres CDNA ID no. 36706557
  misc_feature (28)..(123): Pfam Name: Ribosomal_L7Ae PFAM Desc: Ribosomal protein L7Ae/L30e/S12e/Gadd45 family
  misc_feature: Homolog of GI Number: 5106775 NR Desc: ribosomal protein S12
  misc_feature: Homolog of GI Number: 50935291 NR Desc: putative 40S ribosomal protein S12
  misc_feature: Homolog of GI Number: 50934241 NR Desc: putative ribosomal protein S12
  misc_feature: Homolog of GI Number: 21537373 NR Desc: 40S ribosomal protein S12
  misc_feature: Homolog of GI Number: 21536844 NR Desc: 40S ribosomal protein S12
  misc_feature: Homolog of GI Number: 50935293 NR Desc: putative 40S ribosomal protein S12
  misc_feature: Homolog of GI Number: 28566194 NR Desc: 40S ribosomal protein
  misc_feature: Homolog of GI Number: 18845074 NR Desc: 40S ribosomal protein S12
  misc_feature: Homolog of GI Number: 24266978 NR Desc: ribosomal protein S12
  misc_feature: Homolog of GI Number: 30025643 NR Desc: 40S ribosomal protein S12
MAEEAPAPVVAPAEAPTPVLGEPMDLMTALQLVMKKSSAHDGLVKGLREAAKSIEKHAAQLCVLAEDCDQPDYVKLVKALCAEHNVHLVTVPSAKTLGEWAGLCKIDSEGKARKVVGCSCVVVKDYGEESEGLNIVQEYVKSH

SEQ ID NO: 8535 - DNA, 632 bp, Zea mays
  misc_feature: Ceres CLONE ID no. 1456008
  misc_feature: Ceres CDNA ID no. 29191571
  CDS (88)..(429): REFERENCED BY SEQ ID NO: 8536
tagaaccctagctcacgcacgaaccccctccgccgccgtcctcgcgtcttctcctgcgcatctcggaggtgcttcctagtttccacgatgaagctgatcgcagcctaccttctcgcctacctgggcgggaactcttccccaagtgccgctgacgtcaagaacatccttgactcagttggtgctgaggctgatgaagaaaagcttgagttccttcttgctgaactcaaaggcaaggacatcacagaagtgattgcatctggaagggagaagtttgccgctgtgccttcaggtgggggtgccattgctgtgggagctccagctgctgcatctggtggtgccgcagcacctgctgctgagtcaaagaaggaggagaaggttgaagagaaggaagaatctgatgaagacatgggtttcagtctgttcgactaagcgcttcagttcctcccccctaccctctgtttaccctagtatctgtcgtgtgtggcctgccacaacagcgcctgcataatatctagagacctgaagttcgtgctattttgcttgggacaatgtatatgtttagtaccttcgtatgtgagtgtgttactgcttccgcagccttgagaagttgattgagaaaaaaaaaaaaaaaa

SEQ ID NO: 8536 - protein, 113 aa, Zea mays; identical to SEQ ID NO: 3776
  misc_feature: Ceres CLONE ID no. 1456008
  misc_feature: Ceres CDNA ID no. 29191571
  misc_feature (17)..(112): Pfam Name: Ribosomal_60s PFAM Desc: 60s Acidic ribosomal protein
  misc_feature: Homolog of GI Number: 32400796 NR Desc: acidic ribosomal protein
  misc_feature: Homolog of GI Number: 2431771 NR Desc: acidic ribosomal protein P2b
  misc_feature: Homolog of GI Number: 52353712 NR Desc: putative 60S acidic ribosomal protein
  misc_feature: Homolog of GI Number: 32400824 NR Desc: acidic ribosomal protein P2a
  misc_feature: Homolog of GI Number: 42565379 NR Desc: 60s acidic ribosomal protein
  misc_feature: Homolog of GI Number: 24473796 NR Desc: 60s acidic ribosomal protein
  misc_feature: Homolog of GI Number: 47026878 NR Desc: acidic ribosomal protein
  misc_feature: Homolog of GI Number: 790508 NR Desc: 60S acidic ribosomal protein
  misc_feature: Homolog of GI Number: 34906408 NR Desc: putative 60S acidic ribosomal protein P2A
  misc_feature: Homolog of GI Number: 50909175 NR Desc: putative 60S acidic ribosomal protein P2A
  misc_feature: Useful for making plants with altered leaf shape eg curled leaves
  misc_feature: Useful for sterility
  misc_feature: Useful for sterility

SEQ ID NO: 8537 - DNA, 887 bp, Zea mays
  misc_feature: Ceres CLONE ID no. 1456028
  misc_feature: Ceres CDNA ID no. 40041426
  CDS (16)..(624): REFERENCED BY SEQ ID NO: 8538
ctagcagacagcaacatgaccgaggaggaggccaaaaaggtggaggtggaagtggaggtcaccaaggcggcgccggcgaaggagaacgccgccgaagagaaggccgtcatccccgcgaccgagccgccggccgcccaggagaagccgccagcgccggccgacgactccaaggccctggccatcgtcgagattgcagataaatctactcctgagaagcctatcgctgagaagcaagggggctccagtatcagagatctcgctcttgcaagggtggaaacggagaagaggaactctctgattaaagcatgggaagataatgagaaggcaaaagctgataacaaggctactaagaaagtatctgttattctttcatgggagaacacaaagaaagcaaacatagaagctgaaatgaagaagattgaggaacaactggaaaagaagaaagctgaatatgctgagaagatgaaaaacaaggttgcaatgatccacagggaagccgaagagaagcgagcgatggtggaggcaaagcgcggcgaggaggtcctgaaggccgaggagatggctgccaagtatcgggccaccggccacgcccctaagaagcccattgggtgcttcggagcctaagaaatgttccaagtcacaccgagcagaaagtgagaaacctcaaccagtgattgcttggtcacctcgctctatcaagtgtgtagtgtgtgttcgaaagtgtgtaagtcctactgctcctgtatatatagatatcgcttccaagacgtgtacatgttggatgcttgatgtgaaacttttttatgtatagttaaggagtcacactgttgttttcgttgttgttgacatttaagtggatttttttgttgtcaaaaaaaaaaaaaaaa

SEQ ID NO: 8538 - protein, 202 aa, Zea mays
  misc_feature: Ceres CLONE ID no. 1456028
  misc_feature: Ceres CDNA ID no. 40041426
  misc_feature (23)..(86): Pfam Name: Remorin_N PFAM Desc: Remorin
  misc_feature (88)..(197): Pfam Name: Remorin_C PFAM Desc: Remorin
  misc_feature: Homolog of GI Number: 50926698 NR Desc: OSJNBb0039L24.13
  misc_feature: Homolog of GI Number: 34925093 NR Desc: Remorin
  misc_feature: Homolog of GI Number: 56541805 NR Desc: putative remorin 1 protein
  misc_feature: Homolog of GI Number: 4731573 NR Desc: remorin 1
  misc_feature: Homolog of GI Number: 50911126 NR Desc: putative remorin 1
  misc_feature: Homolog of GI Number: 21555669 NR Desc: remorin
  misc_feature: Homolog of GI Number: 42573455 NR Desc: remorin family protein
  misc_feature: Homolog of GI Number: 4883530 NR Desc: remorin 2
  misc_feature: Homolog of GI Number: 17104525 NR Desc: putative DNA
  misc_feature: Homolog of GI Number: 50938461 NR Desc: remorin
MTEEEAKKVEVEVEVTKAAPAKENAAEEKAVIPATEPPAAQEKPPAPADDSKALAIVEIADKSTPEKPIAEKQGGSSIRDLALARVETEKRNSLIKAWEDNEKAKADNKATKKVSVILSWENTKKANIEAEMKKIEEQLEKKKAEYAEKMKNKVAMIHREAEEKRAMVEAKRGEEVLKAEEMAAKYRATGHAPKKPIGCFGA

SEQ ID NO: 8539 - DNA, 758 bp, Zea mays
  misc_feature: Ceres CLONE ID no. 1456051
  misc_feature: Ceres CDNA ID no. 25446125
  CDS (116)..(478): REFERENCED BY SEQ ID NO: 8540
gaggagttcatccacacacacacacacacacacacagagcctaagcccactcttctcagagcagagcctctcccttcaccttcgtcttccttcctctcggcagttcgacctttgcatggcagcagtggctagctccaaggggcgggtgatcgctgggagcctcgtcgcgcgcgtcctcgccggcaaggccaacgcctccccgaggagggcggtgcacgcgtcggcctacgacaagaacgtggacgagcaggtgcgcccggccttcgtgccggacgatgtgatcggcggcgccgggagcccagacaagtactggggccctcacccgaccaccggcgtcttcggccccgccgcggtcgaccccaagctggccgccagcctcgcgccggcgagcgccgctgcgaatggtggcgcctccgtgctggaccagaaggtgtggttccgcccgctcgaggacgtcgagaagccccccgtcgcctgatcatcgccgacggcgacgatagcccagctcgacatctctatcactccgcttagctgggctcgacttcctacttataattacatataatctgtagtggtgtgctcgtgctatagtacagacatggcaggcaccagaaccagtagtagtaacgcggtgttgctgcccggaataagagcgagcagaagatgtgtgatgatgatgacagtgatgttggtggctgtgatgtactcccgtcttaaaccagtgctattgcaagtgtttggcaaaaaaaaaaaaaaaa

SEQ ID NO: 8540 - protein, 120 aa, Zea mays
  misc_feature: Ceres CLONE ID no. 1456051
  misc_feature: Ceres CDNA ID no. 25446125
  misc_feature: Homolog of GI Number: 50900502 NR Desc: OSJNBa0093F12.14
  misc_feature: Homolog of GI Number: 32395571 NR Desc: seed specific protein Bn15D1B
MAAVASSKGRVIAGSLVARVLAGKANASPRRAVHASAYDKNVDEQVRPAFVPDDVIGGAGSPDKYWGPHPTTGVFGPAAVDPKLAASLAPASAAANGGASVLDQKVWFRPLEDVEKPPVA

SEQ ID NO: 8541 - DNA, 1014 bp, Zea mays
  misc_feature: Ceres CLONE ID no. 1456052
  misc_feature: Ceres CDNA ID no. 29191734
  CDS (122)..(757): REFERENCED BY SEQ ID NO: 8542
actggaccggagcagacacgccgctgcttccttcccttcccctttccccacctgcgtgcgagcggccacccagaccaaccgcgtccagatccggcggccgatctctcccgcccgtctccccatggcggccggagccctggtcctggccctcgtagcggcgctcgcggtcgcgctggcgggggcaaactccgagggcgacgcgctctcggcgctgcgccgcagcctgcgggaccccggcggcgtgctgcagagctgggaccccaccctcgtcaacccctgcacctggttccacgtcacctgcgaccgcgacaaccgcgtcacccgcctagatcttggtaacttgaatttatctggtcatctggtgcccgagcttggtaaattggagcatttgcaatacctggaactttacaaaaataatattgaaggaacgatcccatcggaacttggtgatttgaagaacctaattagcttggacttgtacaagaacaatgtttcggggactatacctccaacacttgggaagttgaagtcccttgtattcttgcggctcaacggcaatcgtttgactggaccaattccaagggagctggctggaatatctagcctcaaagttgttgatgtttctggtaataatctgtgtggaacaattcccacgactggaccatttgagcacattcctctcagcaacttcgagaggaacccgcgcttggaaggcccagagctacaaggcctggctgtatatgaaaccaactgctaaacggctacgggaaggtggaaaatgctaggaagtaacgggcgtacaaggtttaccggagatcggggtgatatagatggttatgtccgcagtttgccactttgtaatgttcctccctacatagcgctgtcatgccatgcgtgccttgctctcagcagggaagttgagttgttgtatgttgtgtagcagaacgatgctttctgcctgtggaagtaaaacataagattgcctatgtgtcatgactaaaaaaaaaaaaaaaa

SEQ ID NO: 8542 - protein, 211 aa, Zea mays
  misc_feature: Ceres CLONE ID no. 1456052
  misc_feature: Ceres CDNA ID no. 29191734
  misc_feature (89)..(112): Pfam Name: LRR_1 PFAM Desc: Leucine Rich Repeat
  misc_feature: Homolog of GI Number: 29468122 NR Desc: leucine
  misc_feature: Homolog of GI Number: 27497122 NR Desc: floral organ regulator 1
  misc_feature: Homolog of GI Number: 1619300 NR Desc: LRR protein
  misc_feature: Homolog of GI Number: 30385250 NR Desc: leucine
  misc_feature: Homolog of GI Number: 56783675 NR Desc: putative LRR protein
  misc_feature: Homolog of GI Number: 34896972 NR Desc: putative leucine
  misc_feature: Homolog of GI Number: 52548248 NR Desc: leucine
  misc_feature: Homolog of GI Number: 13897310 NR Desc: SERK2 protein
  misc_feature: Homolog of GI Number: 13897320 NR Desc: somatic embryogenesis receptor
  misc_feature: Homolog of GI Number: 52854318 NR Desc: somatic embryogenesis protein kinase 1
MAAGALVLALVAALAVALAGANSEGDALSALRRSLRDPGGVLQSWDPTLVNPCTWFHVTCDRDNRVTRLDLGNLNLSGHLVPELGKLEHLQYLELYKNNIEGTIPSELGDLKNLISLDLYKNNVSGTIPPTLGKLKSLVFLRLNGNRLTGPIPRELAGISSLKVVDVSGNNLCGTIPTTGPFEHIPLSNFERNPRLEGPELQGLAVYETNC

SEQ ID NO: 8543 - DNA, 421 bp, Zea mays
  misc_feature: Ceres CLONE ID no. 1456055
  misc_feature: Ceres CDNA ID no. 29191572
  CDS (92)..(256): REFERENCED BY SEQ ID NO: 8544
aatccaaatcatccaatccagtcgcctctttcagaagggaaagcagagagaaagaaaggagctagaaggcctcgagtgaagtgagcaagccatgggctcggcaacagtcctggaggtgatcctcgccatcatcctgcctcccgtcggcgtcttcctgcgctacaaactcggcgtggagttctggatctgtctcttgctgaccatactggggtacataccggggatcatctacgcggtgtacgtgctggtagtttaagcaacagcctccgctgcagggtccaggcttggacgagcgagtcgctgtgcaagagcaactgatgctgtctgtgttaagatagcatgtctttgtgtatgcttgtatgtattgaatattgcggatttcatttatttggggagctcggtattaaaaaaaaaaaaaaaa

SEQ ID NO: 8544 - protein, 54 aa, Zea mays; identical to SEQ ID NO: 2696
  misc_feature: Ceres CLONE ID no. 1456055
  misc_feature: Ceres CDNA ID no. 29191572
  misc_feature (4)..(54): Pfam Name: UPF0057 PFAM Desc: Uncharacterized protein family UPF0057
  misc_feature: Homolog of GI Number: 13751167 NR Desc: putative membrane protein
  misc_feature: Homolog of GI Number: 13751169 NR Desc: putative membrane protein
  misc_feature: Homolog of GI Number: 50920613 NR Desc: Putative low
  misc_feature: Homolog of GI Number: 40549120 NR Desc: small hydrophobic protein 2
  misc_feature: Homolog of GI Number: 6714401 NR Desc: low temperature and salt responsive protein LTI6A
  misc_feature: Homolog of GI Number: 35186896 NR Desc: Clt1
  misc_feature: Homolog of GI Number: 40549118 NR Desc: small hydrophobic protein 1
  misc_feature: Homolog of GI Number: 50897020 NR Desc: plasma membrane protein 3
  misc_feature: Homolog of GI Number: 50939439 NR Desc: putative low temperature and salt responsive protein
  misc_feature: Homolog of GI Number: 32414287 NR Desc: predicted protein

SEQ ID NO: 8545 - DNA, 692 bp, Zea mays
  misc_feature: Ceres CLONE ID no. 1456090
  misc_feature: Ceres CDNA ID no. 29191573
  CDS (67)..(468): REFERENCED BY SEQ ID NO: 8546
cactacacccacccacggcaagtcaattgaaaagcccagcaaataagcatagggagaagctcagcaatggccatcaccaaccttgggttcgctgccatgctggtgatactactgcaagtgtccacgttatgcgccgtggcacagcaccacggcgtgatgacgctgaacgggttcgagaaaggccaggacggcggtgggccgtcggagtgcgacggcaagtaccacagcaacaaggaaatgatcgtggcgctgtccacccgctggtacggcggcggccgccggtgccagaagatgatccgcatcaccagcgagcacaacgggcgcaccgcacaggcaaaggtggtggacgagtgcgactccagcaacggatgcaaggacagcatcgtcgacgcctccgccgccgtgtggaaggcgctcgggctcaacaccgacatcggcgaggctcccgtcacctggaccgacgcctgaaaccatgcatccatccaccgttaataaagcagcggccggcgaccgcaaagacgacatgcagtgctcatcggtgcagtcatgtcgagtacgtatatacgcatatatatggcagaataaactacccgtatggatagcagtgcgggtttatcgagtatcttgtaagagtcatgtgagtctcaatttaactagtcggttttttctgttgtgcaaaaaaaaaaaaaaaa

SEQ ID NO: 8546 - protein, 133 aa, Zea mays
  misc_feature: Ceres CLONE ID no. 1456090
  misc_feature: Ceres CDNA ID no. 29191573
  misc_feature (59)..(130): Pfam Name: DPBB_1 PFAM Desc: Rare lipoprotein A
  misc_feature: Homolog of GI Number: 7406671 NR Desc: putative ripening
  misc_feature: Homolog of GI Number: 50923499 NR Desc: OSJNBa0081G05.7
  misc_feature: Homolog of GI Number: 50911016 NR Desc: ripening
  misc_feature: Homolog of GI Number: 44888776 NR Desc: putative ripening related protein
  misc_feature: Homolog of GI Number: 44888775 NR Desc: putative ripening related protein
MAITNLGFAAMLVILLQVSTLCAVAQHHGVMTLNGFEKGQDGGGPSECDGKYHSNKEMIVALSTRWYGGGRRCQKMIRITSEHNGRTAQAKVVDECDSSNGCKDSIVDASAAVWKALGLNTDIGEAPVTWTDA

SEQ ID NO: 8547 - DNA, 528 bp, Zea mays
  misc_feature: Ceres CLONE ID no. 1456105
  misc_feature: Ceres CDNA ID no. 36591758
  CDS (77)..(247): REFERENCED BY SEQ ID NO: 8548
agatttcccatctttttgttcctcgcgccgccgccgccgtgacggaaggaagaggaggagcaaggagcacgacgcgatgggccactccaacgtttggaactcgcaccctaagaactacggccctggctcccgcgtctgccgggtctgcgcgaaccctcacggtctgatcaggaagtacgggctcatgtgctgcaggcagtgcttccgcagcaacgccaaggacattggtttcatcaagtaccgttgaagaggccactgtgctgctgtggagaacttcctacatcaaagaaatgggtccttcattagaaggcctaatttatgtgctttagctttttgttcagaacttgagactcttgtgttaaactcgacttgttaaagttttgatggctacttgttggaccagctatattcagaagattgaaattttctcactcatgatgtttgtccttatccttgatgtatttgttcttattctgctgaagtttaatggtggcactagcccaagttatactaaaaaaaaaaaaaaaa

SEQ ID NO: 8548 - protein, 56 aa, Zea mays; identical to SEQ ID NO: 454
  misc_feature: Ceres CLONE ID no. 1456105
  misc_feature: Ceres CDNA ID no. 36591758
  misc_feature (3)..(56): Pfam Name: Ribosomal_S14 PFAM Desc: Ribosomal protein S14p/S29e
  misc_feature: Homolog of GI Number: 31745220 NR Desc: putative ribosomal protein S29
  misc_feature: Homolog of GI Number: 77555907 NR Desc: ribosomal protein S14p/S29e
  misc_feature: Homolog of GI Number: 57471722 NR Desc: ribosomal protein S29
  misc_feature: Homolog of GI Number: 13194826 NR Desc: putative ribosomal S29 protein
  misc_feature: Homolog of GI Number: 51970282 NR Desc: ribosomal S29 subunit
  misc_feature: Homolog of GI Number: 51971827 NR Desc: ribosomal S29 subunit
  misc_feature: Homolog of GI Number: 61654760 NR Desc: S29
  misc_feature: Homolog of GI Number: 47026945 NR Desc: ribosomal protein S29
  misc_feature: Homolog of GI Number: 32400973 NR Desc: ribosome protein S29

SEQ ID NO: 8549 - DNA, 584 bp, Zea mays
  misc_feature: Ceres CLONE ID no. 1456336
  misc_feature: Ceres CDNA ID no. 40351901
  CDS (46)..(312): REFERENCED BY SEQ ID NO: 8550
gtaggagatactataaggaaagttgatcgagaagtcttggtagacatggagcagatccagtactccgagaagtactacgacgacacctatgaatacaggcacgtcgtcctcccgcccgaggtcgccaagctcctccccaggaacatccttctctccgagaagcagtggcggttggtgggtgtgcagcagagccgcgggtgggtgcactacgcgatccaccggccggagccgcacatcatgctgttccgccgcccgatcaactaccagcagcagcaggaggaagcggctgccgcgcatgtgctgcccaagtgaagcctctgctggcgaccaggaatgttaaaaacccctagccctcttttcatctctaaaaggggcgtagctgttgtgttgattaatccctctggctgttagttggaaacttgggatctagttgggtcgacttggtgtgtgcgtggcgatctgtttgtgctgacatttaatctgtgcgatgtgatctttgtgattgtgattctggttagtagcgctggaatcaggtttaatctgttctatgtgagattaaaattgtcaccaaaaaaaaaaaaaaa

SEQ ID NO: 8550 - protein, 88 aa, Zea mays
  misc_feature: Ceres CLONE ID no. 1456336
  misc_feature: Ceres CDNA ID no. 40351901
  misc_feature: null
  misc_feature: Useful for making plants with altered oil content
  misc_feature (1)..(72): Pfam Name: CKS PFAM Desc: Cyclin
MEQIQYSEKYYDDTYEYRHVVLPPEVAKLLPRNILLSEKQWRLVGVQQSRGWVHYAIHRPEPHIMLFRRPINYQQQQEEAAAAHVLPK

SEQ ID NO: 8551 - DNA, 1226 bp, Zea mays
  misc_feature: Ceres CLONE ID no. 1456366
  misc_feature: Ceres CDNA ID no. 35383415
  CDS (170)..(955): REFERENCED BY SEQ ID NO: 8552
aacggttctccttgaatcttcttcgcaatcgtcgctccccactaacaataaaaaaaaaaataacaaatcttttaataactaaagttctaaaacaaaacactctctcgctctcagatctgattccttccccttgaagctttatctccgatctaccaataaagaaacaaaaatggcctctgccagagaagagttcgtttaccttgcgaagcttgcggagcaagcagagcgatatgaagaaatggttgaattcatggagaaagtcacagaagccgtcgacaaagacgaactcaccgtggaggaacgcaacctcctctccgttgcttacaaaaacgtaatcggcgctcgtcgtgcctcgtggcgcatcatctcctccatcgagcagaaggaagagagccgcggcaacgatgaccacgtcaacacgatccgtgactacagaagcaagatcgaaacggagctctccaaaatctgcgacggtatccttaagcttctggatacgagacttatcccggcttctgcaaacggagattccaaggttttctaccttaagatgaagggagattaccataggtacttggctgagtttaagaccgctcaggagaggaaagacgccgccgagcacaccctcaccgcttacaaagccgctcaggacatcgctaactccgaattggctccaacccacccgatccgtcttggtctggccttgaacttctctgtcttttactatgagattctcaactctccagaccgtgcttgcagtctcgctaagcaggcgtttgatgaagcaattgctgagttggatactctaggcgaggagtcatacaaggacagtaccttgatcatgcagcttctccgtgacaaccttactctctggacttccgacatgcaggacgaaagtactgaggagatcaaagaagatgcagcacccaagcctgctgaagaacagaaggagacctaagtccgtgtcctgctttgttatccagtattctaaaattatccaacaattgtgttttcccgctttgtgtttgttttctaatctctttcgttatgttatcctcgaagcttctaaggccgtctattcttgtcctttgtttgctcttcctaatcctggatgctgctggatttttatctggttttattttcttattcattgcatttcggcttgtgccttgttctgaattcatatcatcttcgtattaatgatttgtcagtcaaaaaaaaaaaaaaaa

SEQ ID NO: 8552 - protein, 261 aa, Zea mays
  misc_feature: Ceres CLONE ID no. 1456366
  misc_feature: Ceres CDNA ID no. 35383415
  misc_feature: Useful for making plants with modulated growth and phenotype characteristics
  misc_feature: null
  misc_feature: The sequence is a functional homolog of  SEQ ID NO 1777 in the  11/479,226 US patent application
  misc_feature: The sequence is a functional homolog of  SEQ ID NO 2350 in the  10/374,780 US patent application
  misc_feature: The sequence is a functional homolog of  SEQ ID NO 342 in the  10/412,699 US patent application
  misc_feature: The sequence is a functional homolog of  SEQ ID NO 344 in the  10/412,699 US patent application
  misc_feature: The sequence is a functional homolog of  SEQ ID NO 782 in the  11/479,226 US patent application
  misc_feature: The sequence is a functional homolog of  SEQ ID NO 786 in the  11/479,226 US patent application
  misc_feature: The sequence is a functional homolog of  SEQ ID NO 789 in the  11/479,226 US patent application
  misc_feature: The sequence is a functional homolog of  SEQ ID NO 790 in the  10/225,066 US patent application
  misc_feature: The sequence is a functional homolog of  SEQ ID NO 797 in the  11/479,226 US patent application
  misc_feature: The sequence is a functional homolog of  SEQ ID NO 801 in the  11/479,226 US patent application
  misc_feature: The sequence is a functional homolog of  SEQ ID NO 805 in the  11/479,226 US patent application
  misc_feature: Useful for making plants with modulated drought sensitivity
  misc_feature (5)..(242): Pfam Name: 14 PFAM Desc: 14
  misc_feature: Homolog of GI Number: 21536593 NR Desc: 14
  misc_feature: Homolog of GI Number: 16974511 NR Desc: At1g35160/T32G9_30
  misc_feature: Homolog of GI Number: 21618266 NR Desc: 14
  misc_feature: Homolog of GI Number: 487791 NR Desc: GF14omega isoform
  misc_feature: Homolog of GI Number: 21554273 NR Desc: 14
  misc_feature: Homolog of GI Number: 13447104 NR Desc: GF14 omega
  misc_feature: Homolog of GI Number: 1361987 NR Desc: 14
  misc_feature: Homolog of GI Number: 1256534 NR Desc: GF14 chi chain
  misc_feature: Homolog of GI Number: 20340229 NR Desc: 14
  misc_feature: Homolog of GI Number: 47558857 NR Desc: 14
MASAREEFVYLAKLAEQAERYEEMVEFMEKVTEAVDKDELTVEERNLLSVAYKNVIGARRASWRIISSIEQKEESRGNDDHVNTIRDYRSKIETELSKICDGILKLLDTRLIPASANGDSKVFYLKMKGDYHRYLAEFKTAQERKDAAEHTLTAYKAAQDIANSELAPTHPIRLGLALNFSVFYYEILNSPDRACSLAKQAFDEAIAELDTLGEESYKDSTLIMQLLRDNLTLWTSDMQDESTEEIKEDAAPKPAEEQKET

SEQ ID NO: 8553 - DNA, 951 bp, Zea mays
  misc_feature: Ceres CLONE ID no. 1456434
  misc_feature: Ceres CDNA ID no. 25445639
  CDS (157)..(747): REFERENCED BY SEQ ID NO: 8554
aagtaactaaccatattggccgtgcgtccgtggctttgcatctgcaaccccgcccgatcaatcttcctcgttccgccgctccctcgcctccggcagcgaggtgaggccaccgatcggaccttccctagcggcggcgcctaccaacctcaaggagcgatggctctgtctgcgacgctacggatttctcttagcgtcgcgttctttggggttctggcgttcgtgcttggtgtcatcgccgaaaacaaaaagcctgcttccgggactcctatcctaggaaaggatgtcgtcatctgcacgtttccaagtgatccgactcttgcgatggggagcctgtccattgtggcacttgtggtagctgccatcgtaggccatgttgccatcttctttccatactcgggcaagtcagttcctcgtggagcgctgtttcaaagcaccagcttgacagtgttctttgttgttgctgagcttgtctcagccctggctcttgcaatgtcgctgtgggcaactgtcaccgagggtcttcaccgcagcaagaacatccaccacgacatggactaccagtgccctactgccaagaccggcctgttcggcggcgccgctttcctcgcccttgacgctgctctcttctggcttgtttgccagatgctggccctcaatgcaagggctgactaccttgacgaggatgacggcaagggagaatatggccagatttatgctgctcaagtcgatgatggctcgaaggtctgagcctatgtggtcatgctcggcagggttctatgattagtgtcatttggctacattatgccatcaacaaagtcgctttagctctcagtaaatttgtatataagttgcaaagtcttacataaggctggtggttattgcactttcgtgtttcagtgtgatcgataaacagtatctcagtacaatcggtttgcaaaaaaaaaaaaaaaa

SEQ ID NO: 8554 - protein, 196 aa, Zea mays
  misc_feature: Ceres CLONE ID no. 1456434
  misc_feature: Ceres CDNA ID no. 25445639
MALSATLRISLSVAFFGVLAFVLGVIAENKKPASGTPILGKDVVICTFPSDPTLAMGSLSIVALVVAAIVGHVAIFFPYSGKSVPRGALFQSTSLTVFFVVAELVSALALAMSLWATVTEGLHRSKNIHHDMDYQCPTAKTGLFGGAAFLALDAALFWLVCQMLALNARADYLDEDDGKGEYGQIYAAQVDDGSKV

SEQ ID NO: 8555 - DNA, 934 bp, Zea mays
  misc_feature: Ceres CLONE ID no. 1456509
  misc_feature: Ceres CDNA ID no. 36591476
  CDS (2)..(688): REFERENCED BY SEQ ID NO: 8556
gtccaacatggcaaacatcgctacttgcagcccacgagcgcaaccgggctacagtgccaccctcacaaacacgccccaactgtcctcaatccagcagccctcgagtctcgtccccgcacatcagcagagagacgccactaccaccaccgcaagcgacgacggggagatgtttctgcgacggatcctgaccggcggaggtggcctggcggcgctgagggcggcgcgcgccgtgaaggagacgacggggatcgtcggccttgaggtggcgcccaacgcgcgggaggttctcatcgggctctacacgcgtacgctcaaggagatcgaggccgtccccaaagacgagggctaccgcaaggccgttgagtccttcaccaatcaccgcctccagatctgccaggaggaggacgactggaagcgcatcgaggaccgaatcggatgcgggcaagtcgaggagctcatcgaggaggccgaggacgagctcaagctcatcgccaaaatgattgaatgggatccgtggggtgtccctgatgactacgaatgtgaggtgattgaagacgacaccccaattcctaagcatgttcctcagcaccggcccgttgctcttcctgaggagttcttcaagacactagatgccgtcaaatcagatcccgccctccaaggcgatgctcctcctcaagtgaaggcgtaaagatgagtcttcccggttatgtcttatgtcatttcacactttgctgcgctgggtagggactagtttcttgtgtcatttgccatttgccagcaatgtgcttgttccgagcagaataaatttctggcgagtaccatcgaagagtgactttgaacgaagtgattcgacacagtaaatttgttgttgtccatgaatacttgctctgaacatcgcttgccgatgaaatattgaatgctaaaaaaaaaaaaa

SEQ ID NO: 8556 - protein, 173 aa, Zea mays
  misc_feature: Ceres CLONE ID no. 1456509
  misc_feature: Ceres CDNA ID no. 36591476
  misc_feature (35)..(91): Pfam Name: ETC_C1_NDUFA5 PFAM Desc: ETC complex I subunit conserved region
  misc_feature: Homolog of GI Number: 16930745 NR Desc: NADH
  misc_feature: Homolog of GI Number: 57095956 NR Desc:  similar to NADH dehydrogenase
  misc_feature: Homolog of GI Number: 28829489 NR Desc: similar to NADH
  misc_feature: Homolog of GI Number: 50728132 NR Desc:  similar to NADH dehydrogenase
  misc_feature: Homolog of GI Number: 233598 NR Desc: 13 kDa
  misc_feature: Homolog of GI Number: 28461281 NR Desc: NADH dehydrogenase
  misc_feature: Homolog of GI Number: 55629282 NR Desc:  similar to NADH
MFLRRILTGGGGLAALRAARAVKETTGIVGLEVAPNAREVLIGLYTRTLKEIEAVPKDEGYRKAVESFTNHRLQICQEEDDWKRIEDRIGCGQVEELIEEAEDELKLIAKMIEWDPWGVPDDYECEVIEDDTPIPKHVPQHRPVALPEEFFKTLDAVKSDPALQGDAPPQVKA

SEQ ID NO: 8557 - DNA, 1143 bp, Zea mays
  misc_feature: Ceres CLONE ID no. 1456573
  misc_feature: Ceres CDNA ID no. 25892890
  CDS (60)..(908): REFERENCED BY SEQ ID NO: 8558
ttccctctccctctcatcgcagcttaccccaaactctcgcaacactctccgactcgaaaatggctgaacgtggaggagaacgcggcgccgagcgaggtggagaccgtggcggtttcggacgtggattcggaggccgtgccggtggaagaggcggtccaagaggacgtggtggaagacgcggaggccgtcccaccgaggaggagaagtggacgccagtgaccaagctcggccgtctcgttcagagcggtaaaatccagaagctagagcagatctacctccactcgctcccagtcaaggagtaccagatcatcgatctcctcgtcggtccgactctcaaagacgaggtgatgaagatcatgccggttcagaaacagaccagagccggtcagaggacgaggttcaaggcctttgttgttgtcggagacacgaatggtcacgtgggtttgggtgtgaaatgctccaaggaggtggctactgctatcagaggtgggattatattggcgaagctgtctgtgattccggtgaggagaggttactgggggaacaagattgggaagcctcatacggttccttgtaaggttacggggaagtgtggttccgttacggtgaggatggttcctgctcccagaggtgctggtattgtggctgctagggttcctaagaaggtgcttcagttcgctgggattgatgatgttttcacttcttcccggggatctactaagactcttggaaacttcgtcaaggctacattcgactgcctccagaagacttacggattcctgacaccagagttctggaaagagacgagttttaaaaaatccccgtatcaagagtacacagatctgttggccgaaaagggaactgcaacttcgaaagccatcaccgaggccgaagaccaagcctcctaaataacaagaatgtcctcccttttctttttggattatactttcatgagtttattatgcttatgctcgaacctttgctattattagtatatgttgctggattgcatcttctgttttcatctcttctcaaacttttacttcttctcagtttttaaattatggattgtaatgttctagtttttttgcctcgagtctaatccagtattttgcttctttctgtacaaaaaaaaaaaaaaaa

SEQ ID NO: 8558 - protein, 282 aa, Zea mays
  misc_feature: Ceres CLONE ID no. 1456573
  misc_feature: Ceres CDNA ID no. 25892890
  misc_feature (174)..(247): Pfam Name: Ribosomal_S5_C PFAM Desc: Ribosomal protein S5
  misc_feature (91)..(157): Pfam Name: Ribosomal_S5 PFAM Desc: Ribosomal protein S5
  misc_feature: Homolog of GI Number: 62318510 NR Desc: ribosomal protein S2
  misc_feature: Homolog of GI Number: 18181932 NR Desc: ribosomal protein S2
  misc_feature: Homolog of GI Number: 21618011 NR Desc: ribosomal protein S2
  misc_feature: Homolog of GI Number: 21539457 NR Desc: ribosomal protein S2
  misc_feature: Homolog of GI Number: 22137092 NR Desc: At2g41840/T11A7.6
  misc_feature: Homolog of GI Number: 21553851 NR Desc: 40S ribosomal protein S2
  misc_feature: Homolog of GI Number: 30017231 NR Desc: At3g57490
  misc_feature: Homolog of GI Number: 50935111 NR Desc: putative 40S ribosomal protein S2
  misc_feature: Homolog of GI Number: 50919281 NR Desc: putative 40S ribosomal protein S2
  misc_feature: Homolog of GI Number: 55626726 NR Desc:  similar to exportin 5
  misc_feature: Useful for increasing chlorophyll and photosynthetic capacity
  misc_feature: Useful for sterility
MAERGGERGAERGGDRGGFGRGFGGRAGGRGGPRGRGGRRGGRPTEEEKWTPVTKLGRLVQSGKIQKLEQIYLHSLPVKEYQIIDLLVGPTLKDEVMKIMPVQKQTRAGQRTRFKAFVVVGDTNGHVGLGVKCSKEVATAIRGGIILAKLSVIPVRRGYWGNKIGKPHTVPCKVTGKCGSVTVRMVPAPRGAGIVAARVPKKVLQFAGIDDVFTSSRGSTKTLGNFVKATFDCLQKTYGFLTPEFWKETSFKKSPYQEYTDLLAEKGTATSKAITEAEDQAS

SEQ ID NO: 8559 - DNA, 824 bp, Zea mays
  misc_feature: Ceres CLONE ID no. 1456710
  misc_feature: Ceres CDNA ID no. 25446126
  CDS (91)..(588): REFERENCED BY SEQ ID NO: 8560
agtagcatccatttgattgttctatcctcttctctgttctcacccccttgcaagcaacaatcgttcaccgatcgatccagtgcgtcctgcatggaaactgccgccgtcgccgcctccagtgccgggcgccgcatcatggtggccgtggacgagggcgaggagagcctgcacgcgctcaactggtgcctcgccaacgtcgtctccccggcaggaggcgacacgctggtgctcgtccacgcccgccgcccgcgcccggtctacgccgccatggacagcgcagggtacatgatgacctcggacgtgctggcgagcgttgagaggcacgccaacgcggtctcggcggcggcggtcgacaaggccaagcgcgtctgcgccgaccacccgcacgtcaaggtggagacgacggtggagagcggggacccgcgggacgtcatctgcgacgcagccaacaagatggccgcggacctgctcgtcatgggcagccatggttacggcttcatccagagggcgttcttgggcagcgtcagcaaccactgcgcgcagaactgcaaatgcccggtcctcattgtcaagaggcccaaggagtagaaggttcctcgcatgtaacgctgcagcttagccaataatgtttcatggcgaccatataggcatatatgtacacacttcacatcccattgcatggcagtgtcttccctagttcaacaactagctttctgctggaataaggtgttcagagttcagacagagtatgtactgtacatactatcttcttgcatttggtactcttgtttagtgaaaagcgttccgtaaaaaaaaaaaaaaaa

SEQ ID NO: 8560 - protein, 165 aa, Zea mays; identical to SEQ ID NO: 6628
  misc_feature: Ceres CLONE ID no. 1456710
  misc_feature: Ceres CDNA ID no. 25446126
  misc_feature (12)..(161): Pfam Name: Usp PFAM Desc: Universal stress protein family
  misc_feature: Homolog of GI Number: 52077479 NR Desc: putative ER6 protein
  misc_feature: Homolog of GI Number: 34905540 NR Desc: B1146F03.27
  misc_feature: Homolog of GI Number: 34914610 NR Desc: P0520B06.18
  misc_feature: Homolog of GI Number: 55792398 NR Desc: universal stress protein
  misc_feature: Homolog of GI Number: 50939901 NR Desc: universal stress protein USP1
  misc_feature: Homolog of GI Number: 20067187 NR Desc: putative universal stress protein USP1
  misc_feature: Homolog of GI Number: 5669654 NR Desc: ER6 protein
  misc_feature: Homolog of GI Number: 18399413 NR Desc: universal stress protein
  misc_feature: Homolog of GI Number: 21594903 NR Desc: ethylene
  misc_feature: Homolog of GI Number: 29376504 NR Desc: universal stress protein family
  misc_feature: Useful for making bigger plants
  misc_feature: Useful for making plants with increased biomass and foliage

SEQ ID NO: 8561 - DNA, 900 bp, Zea mays
  misc_feature: Ceres CLONE ID no. 1456718
  misc_feature: Ceres CDNA ID no. 35383416
  CDS (50)..(586): REFERENCED BY SEQ ID NO: 8562
acaacaccgcgttcagccgctctagaaccctagctccccgccccgcgagatggccactgccgacggcgagccccagcccgtggccaccgaccccgcccaggtccaggctccggcaccggcaccggcaccctacccttccccggccaagcgcaagcccgaggcggatgtggaagccgacgccaaccttgcgccccctaaagccgcgcgtcccgacgtcgacgaggaggccgccgctgtggccgaggctgccagggccagtgctcgcgcggctgacaagggtaagggcaagatggtagtcgaggaggaggaggaggaggaggaggaggaggaagacgacagcgaggagagcagcgacgacgacgagggcggcggcggcggcagcagcgatgacgacgagctcgttgaagacccgatggccgaggtagacctcagcaacatcctcccctcgcggacccgccgccgcgcccccccgcagcccggggcgtacctcgtcactccggaggaggctgccgcggaggacgacgacgacgacgctgacgtggttcctgaggaggatgagggagcggagggagaggagagcgattaaggctgcctcggcacggactcactaggaatgatgaatggtggcttttggtgctgggtatctgtaccatcctgtgcctggggaccctagtagatgaacgtgctttctgttaggttttgttcgtggatagcctaatcttcattcggcaatcattatgagttgtgcctgtcaccatgatttatatggcatcagtagtagggtgttacttgagggacacacgtttagttctaactttgtagtaaggcttagtatctggtgaacgatcatgattgaacagttaacggttcgcctctgcggctccaaaaaaaaaaaaaaaa

SEQ ID NO: 8562 - protein, 178 aa, Zea mays
  misc_feature: Ceres CLONE ID no. 1456718
  misc_feature: Ceres CDNA ID no. 35383416
  misc_feature: Homolog of GI Number: 50923931 NR Desc: OSJNBb0039F02.1
  misc_feature: Homolog of GI Number: 66780099 NR Desc: PE
  misc_feature: Homolog of GI Number: 55243783 NR Desc: ENSANGP00000017440
  misc_feature: Homolog of GI Number: 66776365 NR Desc: PE
  misc_feature: Homolog of GI Number: 66777243 NR Desc: Ribonuclease PH
  misc_feature: Homolog of GI Number: 76682884 NR Desc:  similar to nucleolin
  misc_feature: Homolog of GI Number: 34894890 NR Desc: B1140D12.10
  misc_feature: Homolog of GI Number: 2133786 NR Desc: NF
MATADGEPQPVATDPAQVQAPAPAPAPYPSPAKRKPEADVEADANLAPPKAARPDVDEEAAAVAEAARASARAADKGKGKMVVEEEEEEEEEEEDDSEESSDDDEGGGGGSSDDDELVEDPMAEVDLSNILPSRTRRRAPPQPGAYLVTPEEAAAEDDDDDADVVPEEDEGAEGEESD

SEQ ID NO: 8563 - DNA, 836 bp, Zea mays
  misc_feature: Ceres CLONE ID no. 1456762
  misc_feature: Ceres CDNA ID no. 25891283
  CDS (42)..(605): REFERENCED BY SEQ ID NO: 8564
aaaaccctagaacccacccctacgccgccgccgccgccgccatgggtatcgacctcgtcgccggcggccgtaacaagaggaccaagcgcaccgcgccaaagtcggacgatgtctacctcaagcttctggtgaagctctaccgcttcctggtgaggaggaccaagagccagttcaatgctgtgatcctgaagcgcctcttcatgagcaagaccaaccgcccgccgctctcgcttcgtcgcctcgtcaagttcatggacggcaaggacaaccaaatcgctgtgatcgtgggtaccataaccgacgacaagagagtttacgaggtgccggcgatcaaggtggcagcgctcaggttcactgagacggcaagggcccgcattgtgaatgccggtggagaatgcctcacctttgaccagctggcccttcgtgctcctcttggccagtacacggttctcctgaggggccctaagaacgcccgtgaggcagtgaggcacttcggtaaggctcctggtgtgccgcacagccataccaagccttatgtccgctcgaagggaaggaagtttgagaaggcaagaggaaggaggaacagcagaggcttcaaggtctaggttgttgcttgttcatgtgctacacagctcttgtttgagtctgagttatgttattattaattgctaggatcatctaaattttgttcgaacgtcatgcactgtgtaagaaatttacatctgttttacccgatactgtactgtttaacctctctcaactggaaatctttcaagtatctgatcctcttgaatgaagtatgatggattgtttggttgccaaaaaaaaaaaaaaaa

SEQ ID NO: 8564 - protein, 187 aa, Zea mays
  misc_feature: Ceres CLONE ID no. 1456762
  misc_feature: Ceres CDNA ID no. 25891283
  misc_feature (96)..(117): Pfam Name: L15 PFAM Desc: Ribosomal protein L15
  misc_feature: Homolog of GI Number: 34897628 NR Desc: cytoplasmic ribosomal protein L18
  misc_feature: Homolog of GI Number: 50939929 NR Desc: putative cytoplasmic ribosomal protein L18
  misc_feature: Homolog of GI Number: 57471708 NR Desc: ribosomal protein L18
  misc_feature: Homolog of GI Number: 606970 NR Desc: cytoplasmic ribosomal protein L18
  misc_feature: Homolog of GI Number: 23397141 NR Desc: putative 60S ribosomal protein
  misc_feature: Homolog of GI Number: 6714451 NR Desc: putative 60S ribosomal protein L18
  misc_feature: Homolog of GI Number: 3021348 NR Desc: ribosomal protein L18
  misc_feature: Homolog of GI Number: 25295214 NR Desc: 60S ribosomal protein L18
  misc_feature: Homolog of GI Number: 28798549 NR Desc: 60S ribosomal protein
  misc_feature: Homolog of GI Number: 61654648 NR Desc: L18
MGIDLVAGGRNKRTKRTAPKSDDVYLKLLVKLYRFLVRRTKSQFNAVILKRLFMSKTNRPPLSLRRLVKFMDGKDNQIAVIVGTITDDKRVYEVPAIKVAALRFTETARARIVNAGGECLTFDQLALRAPLGQYTVLLRGPKNAREAVRHFGKAPGVPHSHTKPYVRSKGRKFEKARGRRNSRGFKV

SEQ ID NO: 8565 - DNA, 834 bp, Zea mays
  misc_feature: Ceres CLONE ID no. 1457285
  misc_feature: Ceres CDNA ID no. 25892891
  CDS (80)..(646): REFERENCED BY SEQ ID NO: 8566
ctagccgccgtccgtccccaaccttcaccgccgctccccctcaaccctccgccccccaaaccccgccgccgcctccgccatgcggccgctcgacgagaaggagaccacgatggtcttcgagaagctgttcaagttcaccggccccaacctgaagcacctcctggagcggccctccgtggagggccccgacccggagcccggccgctactgcctccgcctccacaagaaccgcgtcttctacgcctccgagtcgctcgtccgccgcgccaccgccgtgtcccgcacgcgcctcgccggggtcggcacgcccatcggcaagttcacccacggcggcgccttccacctcaccgtccacgcgctcgacctcctcgccgcccacgcgcgccgccgcatctggctcaagcccgacacggagcgctcgttcctcttcggcaactccgtgcccaagtccgcgctcgcgcgcatcacggagaacaccaagtccggcgatggcgtcgtcgtcatgtccatggccgacgtgccgctcgggttcggggtcgccgccaggggcgcgcaggactgcaggaaggccgacaccaacgccgtggtggtgctccaccagtccgacgccggcgagtacctccgcaaggaggaggagctcatgtgaggtgagggtcgaggcttggttgttcttgtgtttgctggtttgaccatatgcgtgaatttagggacccaatgtcttactactatcttgttcgagagttcctgtatatggcatatgaatgtactggatgattaattgagtatgagatgaggcgattgcaaattttcggtgaaagaaaaaaaaaaaaaaaa

SEQ ID NO: 8566 - protein, 188 aa, Zea mays
  misc_feature: Ceres CLONE ID no. 1457285
  misc_feature: Ceres CDNA ID no. 25892891
  misc_feature: Homolog of GI Number: 50939857 NR Desc: putative 60S ribosome subunit biogenesis protein
  misc_feature: Homolog of GI Number: 45752644 NR Desc: At4g15770
  misc_feature: Homolog of GI Number: 50754027 NR Desc:  similar to Saccharomyces cerevisiae Nip7p homolog
  misc_feature: Homolog of GI Number: 37590769 NR Desc: PEachy protein
  misc_feature: Homolog of GI Number: 62737983 NR Desc: Chain A
  misc_feature: Homolog of GI Number: 50368826 NR Desc: MGC83122 protein
  misc_feature: Homolog of GI Number: 76640106 NR Desc:  similar to 60S ribosome subunit biogenesis protein NIP7 homolog
  misc_feature: Homolog of GI Number: 57087185 NR Desc:  similar to Saccharomyces cerevisiae Nip7p homolog
  misc_feature: Homolog of GI Number: 49259260 NR Desc: Chain A
  misc_feature: Homolog of GI Number: 46433942 NR Desc: likely nucleolar ribosomal biogenesis factor NIP7p
MRPLDEKETTMVFEKLFKFTGPNLKHLLERPSVEGPDPEPGRYCLRLHKNRVFYASESLVRRATAVSRTRLAGVGTPIGKFTHGGAFHLTVHALDLLAAHARRRIWLKPDTERSFLFGNSVPKSALARITENTKSGDGVVVMSMADVPLGFGVAARGAQDCRKADTNAVVVLHQSDAGEYLRKEEELM

SEQ ID NO: 8567 - DNA, 984 bp, Zea mays
  misc_feature: Ceres CLONE ID no. 1457341
  misc_feature: Ceres CDNA ID no. 40351902
  CDS (119)..(613): REFERENCED BY SEQ ID NO: 8568
ctggtcctccattcaagctccactactctctcgctctctctccgtcgcctgtggtttggtttgtggagtgagagagaaagagagagagagacatagactcggactcggagagaaggagatgatgtcgagggagcgcaagaaggcggctgctcttcaggagaagctgaagatcctccgctccatcactcactcccacgctctgagcaacacgtcgataatcatggacgcgtcggcgtacatcaaggagctgaagcagaaggtggtgaggctgaaccaggagattgcgtgcgcgcaggacgcgctgagacacaaggcatcatcctatcccacggtgaccgtggaagccctaggagtgcaggggtcgtcgttcctggtgaacgtgttctccgacaagagctgcccggggctgctcgtcgccgtgctggaggccttcgacgagctggggctcagcgtgctccaggccaccgcgtcctgcgccgactccttccgcctcgaggccgtgggcggagagaacgtggcggacaacgtggacgagcacgtcgtgaagcaggccgtcctgcaggccgtcaggagctgctccgagggcggtagcgagcacgacgacgaggagtagtagctagctatagctagaggctgagcgcgcgtaagcacacacgccttctgctacttgcatcggtcgatgtcgtccctgctgctggtgcatggctgcctggacaaccgcgcatgtactcgatcgatcgtcgaccggccggcgccctctatgtgtatggtagtagcagtagctctggctggacaaccgcgcatgtactcgatcgatcgtcgaccggccggcgccctctctgtgtatggtagtagcagtagctccgtttctcagctagctccccctctcgatctttaattcgattttttttactcttctctgtttcctctatctatctatctatctatcggtggcaaagatgaaacagaaaaaaaaaaaaaaaa

SEQ ID NO: 8568 - protein, 164 aa, Zea mays
  misc_feature: Ceres CLONE ID no. 1457341
  misc_feature: Ceres CDNA ID no. 40351902
MMSRERKKAAALQEKLKILRSITHSHALSNTSIIMDASAYIKELKQKVVRLNQEIACAQDALRHKASSYPTVTVEALGVQGSSFLVNVFSDKSCPGLLVAVLEAFDELGLSVLQATASCADSFRLEAVGGENVADNVDEHVVKQAVLQAVRSCSEGGSEHDDEE

SEQ ID NO: 8569 - DNA, 500 bp, Zea mays
  misc_feature: Ceres CLONE ID no. 1457389
  misc_feature: Ceres CDNA ID no. 36707118
  CDS (82)..(330): REFERENCED BY SEQ ID NO: 8570
atagatccattgattgatcggacggacgcgcgtctccggtcccgtccgtaataacactgatccgatccacgccggccggcgatggagctcatcaagtccagggcgaccgtgtgcgcgctcctcctggcgctgctcctgctctcacactacgacggcgggacgacgacgacgatggtggcggaggcccgggtgtgcatgggcaagagccagcaccactcgttcccctgcatctccgaccgcctctgcagcaacgagtgcgtcaaggaggacggcgggtggaccgccggctactgccacctccgctactgcaggtgccagaaggcgtgctaagcaaagctcttgaaacacccttggcttgccagaactgaactgtggtagtactaagtaacacccttggctagctgtgcacaacctacgtaccgtgcatgcatgtaatgtggtgtcatgtaacgtgacagcaataaatattaataacaataataacaaaaaaaaaaaaaaaa

SEQ ID NO: 8570 - protein, 82 aa, Zea mays; identical to SEQ ID NO: 4784
  misc_feature: Ceres CLONE ID no. 1457389
  misc_feature: Ceres CDNA ID no. 36707118
  misc_feature (36)..(82): Pfam Name: Gamma PFAM Desc: Gamma
  misc_feature: Homolog of GI Number: 2130034 NR Desc: gamma
  misc_feature: Homolog of GI Number: 2501197 NR Desc: Gamma
  misc_feature: Homolog of GI Number: 1173436 NR Desc: Small protein inhibitor of insect alpha
  misc_feature: Homolog of GI Number: 7451437 NR Desc: gamma
  misc_feature: Homolog of GI Number: 7451438 NR Desc: omega
  misc_feature: Homolog of GI Number: 533692 NR Desc: protease inhibitor

SEQ ID NO: 8571 - DNA, 1325 bp, Zea mays
  misc_feature: Ceres CLONE ID no. 1457412
  misc_feature: Ceres CDNA ID no. 25447069
  CDS (3)..(1205): REFERENCED BY SEQ ID NO: 8572
aagaatccaaagtcctccacgctcataccccctctgatatgtgcttgctatatccatctcttcaatctcccatacatactacatgttcttgcttcgtagtagttgggctagggctagggaagcccatggaggagatgctcatggctggaaacgcaaatctaaaccagaatccaaacccaccgccggctgcgccctcggctcccggcgcccagagggcaggcgctcccgccgcggttgcggcagcgccgcctagcgctggcgcgaccggaggagcggggccggagcggcgggcgcggccgcagaaggagaaggcgctcaactgcccgcggtgcaactccaccaataccaagttctgctattacaacaactatagcctccagcagccgcgctacttctgcaagacgtgccgtcgctactggaccgagggcggctcgctccgcaacgttccggtgggcggcggctccaggaagaacaagcgctcgtcctcggccgtgtcgtcggcggctgcggccgccgccgcctccacctccgcggctatgtctggcacggtccccttggggctcgcggccaagaaccccaagttgatgcacgagggcgcgcacgacctcaacctggcgttccctcaccacaacggccgcgctctgcagccaccggagttcccggcgttcccgagcctggagagcagcagcgtgtgcaaccccggagctgccatgctgggcaacggcgccgccggcaggggcatgggcgcgctctcgggtttggagctgctgaggagcacgggctgctacgtcccactgcagcactttcagctagggatgcccgcggagtacgcagccgcgggattctcgctgggcgagttccgcgttccgccgccgccgcagtctcagagtgtgttcgggttctcgctggacacgcacggcacggggggagttggcggcgccgggggttacagtgccgggctgcaggagagcgcggctggcaggatgctcttccccttcgaggacttgaagccggcagtgagcgctgctggcggcggcgcgagcaacggagctgatcatcatcactacgagcacagcaaagatcaagcagcaggcgacggcggcggagccagcggcgtcaccggcggccacgaggctccagcaggattctggagcaatagcatgatcgggaatggcagcagcaatggtggcggaggctcttggtaaggcggcgcgccatgcatggctcatgcacgcgccgttgtcagcatgcggagataggggtagagacaaggatcggagttaataagagggtggaggtgattagtgttaaaaaaaaaaaaaaaa

SEQ ID NO: 8572 - protein, 359 aa, Zea mays
  misc_feature: Ceres CLONE ID no. 1457412
  misc_feature: Ceres CDNA ID no. 25447069
  misc_feature (59)..(121): Pfam Name: zf PFAM Desc: Dof domain
  misc_feature: Homolog of GI Number: 4996642 NR Desc: Dof zinc finger protein
  misc_feature: Homolog of GI Number: 50253202 NR Desc: putative Dof zinc finger protein
  misc_feature: Homolog of GI Number: 20372847 NR Desc: dof zinc finger protein
  misc_feature: Homolog of GI Number: 20372895 NR Desc: dof zinc finger protein
  misc_feature: Homolog of GI Number: 4996640 NR Desc: Dof zinc finger protein
  misc_feature: Homolog of GI Number: 50928017 NR Desc: OSJNBa0005N02.10
  misc_feature: Homolog of GI Number: 34899684 NR Desc: putative Dof zinc finger protein
  misc_feature: Homolog of GI Number: 18416267 NR Desc: Dof
  misc_feature: Homolog of GI Number: 3341468 NR Desc: Dof zinc finger protein
  misc_feature: Homolog of GI Number: 1360078 NR Desc: Zn finger protein
  misc_feature: Useful for decreasing plant size
  misc_feature: Useful for delaying flowering time
  misc_feature: Useful for increasing chlorophyll and photosynthetic capacity
  misc_feature: Useful for making ornamental plants with modified leaves
  misc_feature: Useful for making plants with altered leaf shape eg curled leaves
  misc_feature: Useful for making plants with altered leaf shape eg curled leaves
  misc_feature: Useful for making plants with increased biomass
MEEMLMAGNANLNQNPNPPPAAPSAPGAQRAGAPAAVAAAPPSAGATGGAGPERRARPQKEKALNCPRCNSTNTKFCYYNNYSLQQPRYFCKTCRRYWTEGGSLRNVPVGGGSRKNKRSSSAVSSAAAAAAASTSAAMSGTVPLGLAAKNPKLMHEGAHDLNLAFPHHNGRALQPPEFPAFPSLESSSVCNPGAAMLGNGAAGRGMGALSGLELLRSTGCYVPLQHFQLGMPAEYAAAGFSLGEFRVPPPPQSQSVFGFSLDTHGTGGVGGAGGYSAGLQESAAGRMLFPFEDLKPAVSAAGGGASNGADHHHYEHSKDQAAGDGGGASGVTGGHEAPAGFWSNSMIGNGSSNGGGGSW

SEQ ID NO: 8573 - DNA, 682 bp, Zea mays
  misc_feature: Ceres CLONE ID no. 1457614
  misc_feature: Ceres CDNA ID no. 40351903
  CDS (61)..(339): REFERENCED BY SEQ ID NO: 8574
aggttttctctcccctcctcttccacggccgcgcctgcgacacccatccgccgccacgccatggccaagtacaacgtggtgcagaagaacaagcgccagtgcaatcaggaccgcaagcgcgccgcgcatggggagcccgggaccggcaagctcaagcagcggaccgcgcccgtctccatgtccggcaagcggaagaagaagctcgagcgccgcctcaaccggaagcagaaagaggctgcgatgattaaggcgctggagaacaacatgggggatgtcgacatggtctcagttgaaggtgagagagattctagggccgattgcttgtttcgatccaattaggtctgtttctggagaatttggtgtagcggtgattgcaaatgattgacctagatcggctacttggacctggacgtttagtattaattgcaacagttaaagagtgtggttcgtgtatttgtacgatgattagtggctctgtaaagatttgtagcagtcccgtttcaaaagaaagttacacttgagggataactgaatgtagtgagctcattccatcatgtttgcgtctgagagtgcaaacttgaccctacaactggtgagcaaattagatgctcgtattcatggctattgcatcgttgatcatcaaaaaaagttgattgtcttgttgacaaaaaaaaaaaaaaaa

SEQ ID NO: 8574 - protein, 92 aa, Zea mays
  misc_feature: Ceres CLONE ID no. 1457614
  misc_feature: Ceres CDNA ID no. 40351903
MAKYNVVQKNKRQCNQDRKRAAHGEPGTGKLKQRTAPVSMSGKRKKKLERRLNRKQKEAAMIKALENNMGDVDMVSVEGERDSRADCLFRSN

SEQ ID NO: 8575 - DNA, 871 bp, Zea mays
  misc_feature: Ceres CLONE ID no. 1457622
  misc_feature: Ceres CDNA ID no. 40041427
  CDS (30)..(647): REFERENCED BY SEQ ID NO: 8576
gtgggagagagagaaagaggaattaattgatgggcgaggaggccagctgcgacgccgtcagcctgacggaggccggcaccaacgccaagccggtgggcaaggaggtcggccgcgagccggctgcagcccccgccgccgcggccgacccccggctgcagggcatttccgacgccatccgcgtcgtgccgcacttccccaagcaaggcatcatgttcaacgacatcaccacgctgctgctgcgccccagggtgttcaaggacgccgtcgacctgttcgtcgagcggtaccgcgggatgggcatcgacgccgtcgccgggattgaggccaggggcttcgtgttcggcccggcgatcgcgctggctattggcgccaagttcatacctctgcggaagccaaggaagctcccaggtgaggtgatctccgagaagtacgttctcgagtacgggactgattgcctggagatgcgtgtcggggccatcgagcgatccggcgagcgggtgctggtcatcgacgacctggttgcgaccggagggacactctgtgctgcgatcaggcttctagaacgtgctggagccgatgtggtcgagtgcgcgtgtgtcattgggctcccgaaattcaaggtaccgcgttgctggattcacaactaatctgagctaccgatatgcaaaaccagctgtttattattataatgcagggtgccatactgccatatactgtattattacgtattatgataatgtaggttccatatgctgtgtactatttagataatggctgccgcataccctgctagacatgttcggatcagattctaaaatctggatttctgatataaataaataaatatctatgtggaaaaaaaaaaaaaaaa

SEQ ID NO: 8576 - protein, 205 aa, Zea mays
  misc_feature: Ceres CLONE ID no. 1457622
  misc_feature: Ceres CDNA ID no. 40041427
  misc_feature (64)..(199): Pfam Name: Pribosyltran PFAM Desc: Phosphoribosyl transferase domain
  misc_feature: Homolog of GI Number: 50910451 NR Desc: putative adenine phosphoribosyltransferase form 2
  misc_feature: Homolog of GI Number: 50910449 NR Desc: putative adenine phosphoribosyltransferase form 2
  misc_feature: Homolog of GI Number: 32693279 NR Desc: adenine phosphoribosyltransferase
  misc_feature: Homolog of GI Number: 70663925 NR Desc: OSJNBa0014K14.11
  misc_feature: Homolog of GI Number: 50926264 NR Desc: OSJNBa0014K14.10
  misc_feature: Homolog of GI Number: 40019121 NR Desc: adenine phosphoribosyltransferase
  misc_feature: Homolog of GI Number: 50937177 NR Desc: putative adenine phosphoribosyl transferase
  misc_feature: Homolog of GI Number: 18086581 NR Desc: At1g80050/F18B13_14
  misc_feature: Homolog of GI Number: 1402894 NR Desc: adenine phosphoribosyltransferase
  misc_feature: Homolog of GI Number: 28393997 NR Desc: putative adenine phosphoribosyltransferase
MGEEASCDAVSLTEAGTNAKPVGKEVGREPAAAPAAAADPRLQGISDAIRVVPHFPKQGIMFNDITTLLLRPRVFKDAVDLFVERYRGMGIDAVAGIEARGFVFGPAIALAIGAKFIPLRKPRKLPGEVISEKYVLEYGTDCLEMRVGAIERSGERVLVIDDLVATGGTLCAAIRLLERAGADVVECACVIGLPKFKVPRCWIHN

SEQ ID NO: 8577 - DNA, 754 bp, Zea mays
  misc_feature: Ceres CLONE ID no. 1457643
  misc_feature: Ceres CDNA ID no. 35383417
  CDS (75)..(539): REFERENCED BY SEQ ID NO: 8578
agaaccctagaagccgcagcttcccattcctcgccgccgccgccgctccgtacccgctcgaagccgacccgaccatggcggacgtcgacgttgacacggaggtggccgcgggcgcgcagccgaagaagaggacgttccgcaagttcagctaccgtggcgtggatctcgatgccctcctcgacatgtccactgacgaccttgtccagatgttccccgctcgcgcccgcagaaggttcaagaggggtctcaagaggaagcccatggcgctcgtcaagaagctgcgcaaggcgaaaaaggatgctcctgctggtgagaagcctgagccagtgaggacacatctccgcaacatgatcattgtccctgagatgattggcagccttatcggtgtctacaatggcaagaccttcaaccaggttgagattaagcctgagatgattggccattaccttgcagagttctctatctcctacaagccagtgaagcacggtaggcccggtatcggtgccacacactcttcccggttcatccctcttaaatgagttgtgccgctttctactttgaaagaaatcagtacggaccatctgatggcatgtccatcgagctgtctcccttgttttgaaccagttatatatctagtatttggttctgtttagctatataatttcgttatgcacaatgagctgttctatctaaatgctgtgagaatcttatttccgttgtgaaggttcattttgattcaaaaaaaaaaaaaaaa

SEQ ID NO: 8578 - protein, 154 aa, Zea mays
  misc_feature: Ceres CLONE ID no. 1457643
  misc_feature: Ceres CDNA ID no. 35383417
  misc_feature (56)..(137): Pfam Name: Ribosomal_S19 PFAM Desc: Ribosomal protein S19
  misc_feature: Homolog of GI Number: 50934735 NR Desc: putative 40S ribosomal protein S15
  misc_feature: Homolog of GI Number: 50919151 NR Desc: putative 40S ribosomal protein S15
  misc_feature: Homolog of GI Number: 15425963 NR Desc: 40S ribosomal protein S15
  misc_feature: Homolog of GI Number: 20465567 NR Desc: putative ribosomal protein S15
  misc_feature: Homolog of GI Number: 2982268 NR Desc: probable 40S ribosomal protein S15
  misc_feature: Homolog of GI Number: 20147171 NR Desc: At1g04270/F19P19_29
  misc_feature: Homolog of GI Number: 1107485 NR Desc: 40S ribosomal protein S15
  misc_feature: Homolog of GI Number: 82621162 NR Desc: 40S ribosomal protein S15
  misc_feature: Homolog of GI Number: 81076490 NR Desc: 40S ribosomal protein S15
  misc_feature: Homolog of GI Number: 16930761 NR Desc: ribosomal S15 protein
MADVDVDTEVAAGAQPKKRTFRKFSYRGVDLDALLDMSTDDLVQMFPARARRRFKRGLKRKPMALVKKLRKAKKDAPAGEKPEPVRTHLRNMIIVPEMIGSLIGVYNGKTFNQVEIKPEMIGHYLAEFSISYKPVKHGRPGIGATHSSRFIPLK

SEQ ID NO: 8579 - DNA, 443 bp, Zea mays
  misc_feature: Ceres CLONE ID no. 1457646
  misc_feature: Ceres CDNA ID no. 35383418
  CDS (46)..(330): REFERENCED BY SEQ ID NO: 8580
acacgactcagccattgtattgtatgtgcgtgcagtacacgctcgatggctgccgcccttcaagtgttcgtcgctgtcgtcctgatggcgtccgctcttgtgtcggcagagatcggtaagaaggaatgcaccgatgtgaattacgactgcaaccgtttcccaggttcccgaaagtgcggagactcgtgccgggacaaggcccgcgccgagggcagcagcaactacgcgtcagcatgcgagcctgccgtcgcgcccttcaagtgctgctgcaccgtcaaggacccacaccacccctggcctccaagctcctcctccaagaccaacgcctaataaatatgtccagtccaaacattatatttagatagcatgcatatagtgtgcctgctgctatatatatatgtcatcgaattaataatgaaaaaaaaataaaaaaaaaaaaaaaa

SEQ ID NO: 8580 - protein, 94 aa, Zea mays
  misc_feature: Ceres CLONE ID no. 1457646
  misc_feature: Ceres CDNA ID no. 35383418
MAAALQVFVAVVLMASALVSAEIGKKECTDVNYDCNRFPGSRKCGDSCRDKARAEGSSNYASACEPAVAPFKCCCTVKDPHHPWPPSSSSKTNA

SEQ ID NO: 8581 - DNA, 963 bp, Zea mays
  misc_feature: Ceres CLONE ID no. 1457971
  misc_feature: Ceres CDNA ID no. 35383419
  CDS (56)..(796): REFERENCED BY SEQ ID NO: 8582
ccccacacactgtcactgccagcctccccttcgcttcgcttagctcgccgtcaccatggcgacctccaccttctctccgcgccccgccaccctcaagcccctgcgggcacgcgccaagcccgccggcctccagctccacctcctccccttcccgcgcctccgcgtcgcctgcgccaccgccgccggggaggcgccgcccgttgagcagcgggacgaggtggagccggcctctgccgcggcatccaacgggactgccgttaaggtcgaggcgtccgccgcgaagcccgagtccccgcccgcgcccgcgccggtcccggccttccgcgacgccaggtgggtcaacggcacctgggacctcaccaagttcgacaagggcggcggcgtcgactgggacgccgtcatcgacgccgaggccaggagaaggaaatggctcgaagactacccggaggcgacgagcacagacgatgccgtcgtcttcgacacctccattatcccgtggtgggcatggatgaagcggttccaccttcctgaagccgagaagctaaacggtcgggccgccatggttggcttcttcatggcctacttcgtggacagcttgacgggcgtgggcctcgtcgaccagatgggcaacttcttctgcaagacgctgctgttcgtcgccgtcgccggcgtgctgctggtcaggaagaacgaggacgtggagtcgctcaagaagctcatcgacgagactacgttctacgacaggcagtggcaggctacctggcaagatgacccaaccgaggggccaaagaattagttcggcgttgagggtgcaaacgcagaatgctcgcttcttgtggtgtgtctttgcctctttcttcggcccctttttgtttcaccgtttagtcaggcttggaggaactttttgatgaacgtcataatctatctacgtgatcttgtgcaaaaacaaaaaaaaaaaaaaaa

SEQ ID NO: 8582 - protein, 246 aa, Zea mays
  misc_feature: Ceres CLONE ID no. 1457971
  misc_feature: Ceres CDNA ID no. 35383419
  misc_feature: Homolog of GI Number: 51963834 NR Desc: PREDICTED P0482F12.6 gene product
  misc_feature: Homolog of GI Number: 50904941 NR Desc: putative Lil3 protein
  misc_feature: Homolog of GI Number: 23306350 NR Desc: Lil3 protein
  misc_feature: Homolog of GI Number: 21555799 NR Desc: Lil3 protein
  misc_feature: Homolog of GI Number: 38566672 NR Desc: At5g47110
  misc_feature: Homolog of GI Number: 8978078 NR Desc: Lil3 protein
  misc_feature: Homolog of GI Number: 54649970 NR Desc: Lhc
  misc_feature: Homolog of GI Number: 72547041 NR Desc: proteophosphoglycan ppg1
  misc_feature: Homolog of GI Number: 72547018 NR Desc: proteophosphoglycan ppg3
  misc_feature: Homolog of GI Number: 72547036 NR Desc: proteophosphoglycan 5
  misc_feature: Useful for making lethal plants for genetic confinement systems
MATSTFSPRPATLKPLRARAKPAGLQLHLLPFPRLRVACATAAGEAPPVEQRDEVEPASAAASNGTAVKVEASAAKPESPPAPAPVPAFRDARWVNGTWDLTKFDKGGGVDWDAVIDAEARRRKWLEDYPEATSTDDAVVFDTSIIPWWAWMKRFHLPEAEKLNGRAAMVGFFMAYFVDSLTGVGLVDQMGNFFCKTLLFVAVAGVLLVRKNEDVESLKKLIDETTFYDRQWQATWQDDPTEGPKN

SEQ ID NO: 8583 - DNA, 611 bp, Zea mays
  misc_feature: Ceres CLONE ID no. 1458009
  misc_feature: Ceres CDNA ID no. 36706856
  CDS (109)..(447): REFERENCED BY SEQ ID NO: 8584
aagaatataccctgaaatgtactaggccgcaccagcacagatcagaagccaccactgcaacgctgcgccgccgccgaactgtggagaggagacgcggaggacgggaagatgggattcgagaaggagatcctgaaagccggcaccggccccaagcccgtcaagggccagaaggtcaccgtccactgcaccggctacgggaaggatggtgatctgtctaagaagttttggagtaccaaggaccctgggcagcagccattctctttcaacattggtctgggttcagtgatcaaaggatgggatgagggagttatgggcatgcaattgggtgaagtcgcccgtcttacgtgcaccccagactacgcttacggtgaaggtggctttccagcctggggaattcaaccaaactccgtgctgatattcgagatcgaagttcttagcgccaagtgatgtgcagtgcgattcatgatggatctatagaacactgcagcatcgccatgcctctcgattgcaaaaataattgtaacgccacatcatgttaagtgccacattatggtgatgttccaagtgcatcgagtgaaacttttggaaccctatcaaaaaaaaaaaaaaaa

SEQ ID NO: 8584 - protein, 112 aa, Zea mays
  misc_feature: Ceres CLONE ID no. 1458009
  misc_feature: Ceres CDNA ID no. 36706856
  misc_feature (11)..(109): Pfam Name: FKBP_C PFAM Desc: FKBP
  misc_feature: Homolog of GI Number: 54111525 NR Desc: immunophilin
  misc_feature: Homolog of GI Number: 50913003 NR Desc: putative immunophilin
  misc_feature: Homolog of GI Number: 45544871 NR Desc: CONSTANS interacting protein 3
  misc_feature: Homolog of GI Number: 73919361 NR Desc: Peptidylprolyl isomerase FKBP12
  misc_feature: Homolog of GI Number: 20148471 NR Desc: immunophilin
  misc_feature: Homolog of GI Number: 21536548 NR Desc: immunophilin
  misc_feature: Homolog of GI Number: 68129668 NR Desc: peptidyl
  misc_feature: Homolog of GI Number: 70874204 NR Desc: peptidyl
  misc_feature: Homolog of GI Number: 70870933 NR Desc: peptidyl
  misc_feature: Homolog of GI Number: 67083813 NR Desc: FKBP
MGFEKEILKAGTGPKPVKGQKVTVHCTGYGKDGDLSKKFWSTKDPGQQPFSFNIGLGSVIKGWDEGVMGMQLGEVARLTCTPDYAYGEGGFPAWGIQPNSVLIFEIEVLSAK

SEQ ID NO: 8585 - DNA, 711 bp, Zea mays
  misc_feature: Ceres CLONE ID no. 1458049
  misc_feature: Ceres CDNA ID no. 40351904
  CDS (195)..(434): REFERENCED BY SEQ ID NO: 8586
tactttcctctactggagaggcagactgcacactgcctcaagatggtttcctgttcctcatctccacggccacccatccctctcctgctcctcttcctcctccacttctcctctgtcctcgccgtatcagctccttcagcctcacaacaggctggtaccgacggcggcggcggcaatgtgtcggagacggcggcatggacgccgcggctgaggaagacgttcttggacggcggcatcgagcactggcacgggcggcggctggtggggcggttccaggtgtgcgcggtgtgcacctgctgcgggggcccgcacgggatgtgcatcccggcgccgtgctgctacgccatcaactgcaacatccccaaccgtccattcggcgtctgctccttcatcccgcgcacctgcaactgcctcaattgccacctctagcctagccttgccgccaaggatgccaaggtgtggcgaactgctgctggatccatggttttgattgtttcgctttttaagttggttgccgatgcaagggattcgtggtgagagattcgttaatttagggaccaagtggaagattccatcattgcataatactagtattgttagtagtatatactcttgtcctgcattgtagttgtagccatgactcatagtaagtagcagtatggtgatggttggattaattcagcttttttgctcttaaaaaaaaaaaaaaaa

SEQ ID NO: 8586 - protein, 128 aa, Zea mays
  misc_feature: Ceres CLONE ID no. 1458049
  misc_feature: Ceres CDNA ID no. 40351904
MVSCSSSPRPPIPLLLLFLLHFSSVLAVSAPSASQQAGTDGGGGNVSETAAWTPRLRKTFLDGGIEHWHGRRLVGRFQVCAVCTCCGGPHGMCIPAPCCYAINCNIPNRPFGVCSFIPRTCNCLNCHL

SEQ ID NO: 8587 - DNA, 664 bp, Zea mays
  misc_feature: Ceres CLONE ID no. 1458112
  misc_feature: Ceres CDNA ID no. 40351905
  CDS (151)..(483): REFERENCED BY SEQ ID NO: 8588
attttatcaacccactagcgccatatcagaatttgatccaacgccacacctttatcgattgaacttggcgctcgggaactttctcgctcgcgacattctcttaactggctcaagtttgatctcctgtaaatcgtcactgtttcagtagccatggcaaagcatcaccctgatctgatcatgtgccggaaacaacccggcattgccatcggacgactgtgtgagaaatgcgacgggaaatgcgtggtttgtgattcttacgtgcgtccctgcactctggtgcgtatttgcgacgaatgcaactacgggtcgttccaaggccggtgtactatatgcggaggggttgggatctcggatgcttactactgcaaagagtgtacgcagcaggagaaagacagagatggttgtcccaagattgtcaaccttgggagtgctaagacggatctcttctatgaacgtaagaagtatggattcaagaaacgatgaagatgtattggttctcacgattactggatctcttatgctatgtctgttgcataataaaactaatatgtattgggtattaaaaaacccatgcattatgctttcttattcttgataatctagacttgagttgtctttattggacttatcttagtgtctaaatagcctaaaaaaaaaaaaaaaa

SEQ ID NO: 8588 - protein, 110 aa, Zea mays
  misc_feature: Ceres CLONE ID no. 1458112
  misc_feature: Ceres CDNA ID no. 40351905
  misc_feature (1)..(106): Pfam Name: PHF5 PFAM Desc: PHF5
MAKHHPDLIMCRKQPGIAIGRLCEKCDGKCVVCDSYVRPCTLVRICDECNYGSFQGRCTICGGVGISDAYYCKECTQQEKDRDGCPKIVNLGSAKTDLFYERKKYGFKKR

SEQ ID NO: 8589 - DNA, 742 bp, Zea mays
  misc_feature: Ceres CLONE ID no. 1458130
  misc_feature: Ceres CDNA ID no. 29191574
  CDS (39)..(551): REFERENCED BY SEQ ID NO: 8590
aaccaacaataccacagcaatcaagcaagcaagcaacaatggccgcctcgtcgtcggcgctcatcctcctcctggccgtggggctcgtcgccggtgccagcgccaccagcttctccatcaccaaccgctgctccttcacggtgtggccggcggccacccccgtgggcggtggccggcagctcaacagaggcgaaacgtggaacctcgatatccccggcggcaccagctccggcaggatctggggccgcacgggctgcagcttcaacggcaacagcgggagatgcagcaccggcgactgcggcggcgcgctgtcctgcaccctgtccggccagtccccgttgacgctggcggagttcaccctcggctcgcaggacttctacgacatctcggtgatcgacgggtacaacctccccatggacttctcctgcagcaccggcgtcaacatccagtgccgcgaccccagctgccccgacgcctaccaccagcccaacgacgtcaggaccaaagcttgcagcggcaacaggaggttcaatgtcgtcttctgcccatgatgagctactctatcatatgcatgcgtgccatgccacggacgaccataatactatctgaagtgtaatactatgtccgcgcgaaagctaaactatttgtacttccattttccatgtaataatggccgtgcgaatatgtacgagtgcccgataaagtcaataaatacaggtaaggaataaaaaaaaaaaaaaaa

SEQ ID NO: 8590 - protein, 170 aa, Zea mays
  misc_feature: Ceres CLONE ID no. 1458130
  misc_feature: Ceres CDNA ID no. 29191574
  misc_feature (29)..(129): Pfam Name: Thaumatin PFAM Desc: Thaumatin family
  misc_feature: Homolog of GI Number: 56090131 NR Desc: thaumatin
  misc_feature: Homolog of GI Number: 3290006 NR Desc: pathogenesis related protein
  misc_feature: Homolog of GI Number: 75994013 NR Desc: pathogenesis
  misc_feature: Homolog of GI Number: 444344 NR Desc: thaumatin
  misc_feature: Homolog of GI Number: 75993993 NR Desc: pathogenesis
  misc_feature: Homolog of GI Number: 75994017 NR Desc: pathogenesis
  misc_feature: Homolog of GI Number: 662351 NR Desc: thaumatin
  misc_feature: Homolog of GI Number: 1710783 NR Desc: Thaumatin
  misc_feature: Homolog of GI Number: 662349 NR Desc: thaumatin
  misc_feature: Homolog of GI Number: 662353 NR Desc: thaumatin
  misc_feature: Utility: Seed Bleaching Useful for making low fiber seeds with increased digestability
MAASSSALILLLAVGLVAGASATSFSITNRCSFTVWPAATPVGGGRQLNRGETWNLDIPGGTSSGRIWGRTGCSFNGNSGRCSTGDCGGALSCTLSGQSPLTLAEFTLGSQDFYDISVIDGYNLPMDFSCSTGVNIQCRDPSCPDAYHQPNDVRTKACSGNRRFNVVFCP

SEQ ID NO: 8591 - DNA, 729 bp, Zea mays
  misc_feature: Ceres CLONE ID no. 1458157
  misc_feature: Ceres CDNA ID no. 40351906
  CDS (108)..(605): REFERENCED BY SEQ ID NO: 8592
acatcaggtgagactagagtagactaaacacggcgcgcggccgggtcgcgctaccatgcttgccgccgtgcagccgccggcggcctccgccgtcatcaatcttgctcatgctcggcaggcagccacatgtacatatcggagctactgataagcctatttcaaaattcttcaccaagaaatcgactgcctacgatctatcagggaagtatgagaatatgtcacgggagcttgctcatgcttacaaagcagcgaaagtggaatgcgatggatcagtagaaaatcaaggaggggacggcaaccaacaccagtcccgagagaagcaaactactaattgtactataaaggatgaacctgtcaccttggaaccacaagttttcgagacaccgtggagcatcgagcatgaagatactatgactctggctggtgccactttggaaacacaacgtgatttgggattcaagagaaagatcgaggacactcaagtcgaagctagcatgaaaccctctcagcttaccaggaaggaaaaagctgtaaaagcagcttcggatgggcaggcatcgttgctttcatatttcgcaaggaagcagggtcgctcgatgaagtagtttgcggtagccgtgccatgtattcctgtgtaactcaaactttaccagtacctgtcctccgtgttcgggacaaactatttcggttttaattttgttttggctaccactaaaaaaaaaaaaaaaa

SEQ ID NO: 8592 - protein, 165 aa, Zea mays
  misc_feature: Ceres CLONE ID no. 1458157
  misc_feature: Ceres CDNA ID no. 40351906
MLGRQPHVHIGATDKPISKFFTKKSTAYDLSGKYENMSRELAHAYKAAKVECDGSVENQGGDGNQHQSREKQTTNCTIKDEPVTLEPQVFETPWSIEHEDTMTLAGATLETQRDLGFKRKIEDTQVEASMKPSQLTRKEKAVKAASDGQASLLSYFARKQGRSMK

SEQ ID NO: 8593 - DNA, 1244 bp, Zea mays
  misc_feature: Ceres CLONE ID no. 1458165
  misc_feature: Ceres CDNA ID no. 36706472
  CDS (184)..(930): REFERENCED BY SEQ ID NO: 8594
gttggcaagagagaaacccttcctcgtcccgttcaaccggcgccgccgactcgcgtgttcctccccgcgtcctcgttctccttgctgctggacccgctagtggggatcgacctgatttctcctgtgctgtcaattggatattacccaggctttcaaggtagaaaagaagctttttgttccatcatggccttatcaactccagcgtctattttggttgacgagaaccaacagataaatagaggtaagagggccgatggaccaagggccaaagggctgaagccatccgagaatcctggcaatcaagggaggagagctcttaaggatttgtccaacttctctaaaggcactggtttgaaggacacttccaccctgaaagagaagtcccagcagaagcctcgtagtaatgtggccaacactattaaaggcaatgctttgaaggacaagcccatcctgaaagagaagtccacccaggaacagaggtcaaaagctcttaagaacccaatgaaaattttagttgatgaagagatcaaaatgtgccatgagtgggctaaggatggggtggagggatttcactcaacacaaaataattctcaaaagttggataaggatctgctagacaaacgtgtcaagaagaaagtggcggcagtaaactcagccttgtgtggttggccagatacagtatttgattctctaatgtatccatctatggaggttgctgagcttttttatgaacaaaacgtgctggaggtggaacctgagattctcccggacatcagttggcgtctctctagttcagtagatggtaaagcaaagattgatgaagaccgtcttaccgatgctgagcttgaccagtaccattctttggagaacaatccaattatttttgagctgagagacgagccagcgatcccgcagctgggagtgtattgaagaatctgtgccagcaggacagaaagctctgtttgcttgctgcttgctctggagtctggagttgtctagtctagaattctagtaggtcttgaacctggtgttttccccagctatgttctagtgggatgttggtgatgtaggatttcagtttgagtactggtaccagttccagctgaagcgacagccttatggctgctgatgggtgatggttgtggaacaacgggcgatataattctaatattttcagcaaactagtctgtggtctctatatttattctcgtgaatcctaaacagtgcgaaaaaaaaaaaaaaaa

SEQ ID NO: 8594 - protein, 248 aa, Zea mays
  misc_feature: Ceres CLONE ID no. 1458165
  misc_feature: Ceres CDNA ID no. 36706472
MALSTPASILVDENQQINRGKRADGPRAKGLKPSENPGNQGRRALKDLSNFSKGTGLKDTSTLKEKSQQKPRSNVANTIKGNALKDKPILKEKSTQEQRSKALKNPMKILVDEEIKMCHEWAKDGVEGFHSTQNNSQKLDKDLLDKRVKKKVAAVNSALCGWPDTVFDSLMYPSMEVAELFYEQNVLEVEPEILPDISWRLSSSVDGKAKIDEDRLTDAELDQYHSLENNPIIFELRDEPAIPQLGVY

SEQ ID NO: 8595 - DNA, 454 bp, Zea mays
  misc_feature: Ceres CLONE ID no. 1458188
  misc_feature: Ceres CDNA ID no. 25446022
  CDS (65)..(274): REFERENCED BY SEQ ID NO: 8596
cccctactctttccctcgccgccgccgccgcctccttctcctcgggtttgcacagtcgtccaccatgccgaagcagatccacgagatcaaggacttcctgctgacggcgcgccggaaggacgcgcggtcggtgcggatcaagaggaccaaggacgccgtcaagttcaaggtgcgctgctccaggtacctctacacgctctgcgtcttcgacgccgacaaggccaacaagctcaagcagtccctcccaccaggtttgagcgtccaggaggtttaagcatcaagccagacaatgccttttctagtagcgggaatgttctatccatcttgctttagtaactgttagcaggctctccttgtttacccccattaagagagttttgatgtcccaagaatggaatgtaatgttgggagctatgtggttgaacctgtgaaaaaaaaaaaaaaaaaaaaaaaa

SEQ ID NO: 8596 - protein, 69 aa, Zea mays; identical to SEQ ID NO: 4612
  misc_feature: Ceres CLONE ID no. 1458188
  misc_feature: Ceres CDNA ID no. 25446022
  misc_feature (2)..(69): Pfam Name: Ribosomal_L38e PFAM Desc: Ribosomal L38e protein family
  misc_feature: Homolog of GI Number: 50938225 NR Desc: putative 60S ribosomal protein L38
  misc_feature: Homolog of GI Number: 50931949 NR Desc: putative 60S ribosomal protein L38
  misc_feature: Homolog of GI Number: 23507773 NR Desc: At3g59540/T16L24_90
  misc_feature: Homolog of GI Number: 313027 NR Desc: ribosomal protein L38
  misc_feature: Homolog of GI Number: 15825507 NR Desc: ribosomal protein L38
  misc_feature: Homolog of GI Number: 27497793 NR Desc: 60S ribosomal protein L38
  misc_feature: Homolog of GI Number: 7489588 NR Desc: ribosomal protein homolog
  misc_feature: Homolog of GI Number: 49900028 NR Desc: MGC89823 protein
  misc_feature: Homolog of GI Number: 4506645 NR Desc: ribosomal protein L38
  misc_feature: Homolog of GI Number: 61372160 NR Desc: ribosomal protein L38

SEQ ID NO: 8597 - DNA, 755 bp, Zea mays
  misc_feature: Ceres CLONE ID no. 1458203
  misc_feature: Ceres CDNA ID no. 40351907
  CDS (359)..(508): REFERENCED BY SEQ ID NO: 8598
atgctatgcgcttcctccacatacaagaccaccgcggcgcagatcaacacacacatctcactcactcactcgcctcactccactggacatccatccatccatccatggagctcttcgcagcagcagcagcagccgaggatcagaagccgtgcagcagcaggctgttcagcaggaagaggagcggcggcaaggcgggcatgggcgtgcgcggcgccgacaagggccggtcgtccttctccgggcgttgcgcgcggctcgtcaaggagcagcgcgcgcggttctacatcatgcgccgctgcgtcacgatgctggtgtgctggcgcgagtacgcctgagccccctcgctgtccctgatgcaatggcgccggggagggctgcggagccgcatgcaggacacgctagctggacgcgagcagcaagccgtgtggggaggaggaggaggacgaggaggggaagcagacgccgccgagcaggtcaagagacgctcgatccgcctccgcggtcttaattagggaaccacgaacgaaccttgtgtaaagagaagattattattttttattattttctctcctgctttaatgctctcgtagtcttgttcctttagcacctcgatcgagccttatgttcttccttccgttcggggggcggagatttgcaggctagatcgatcgtcacggcgcttctgctgttccaatgtaacgtgagcatctctagtatacaggaactggagctgtagtttaaaaaaaaaaaaaaaa

SEQ ID NO: 8598 - protein, 76 aa, Zea mays; identical to SEQ ID NO: 4858
  misc_feature: Ceres CLONE ID no. 1458203
  misc_feature: Ceres CDNA ID no. 40351907
  misc_feature (53)..(71): Pfam Name: DVL PFAM Desc: DVL family

SEQ ID NO: 8599 - DNA, 668 bp, Zea mays
  misc_feature: Ceres CLONE ID no. 1458218
  misc_feature: Ceres CDNA ID no. 40351908
  CDS (215)..(451): REFERENCED BY SEQ ID NO: 8600
agatatagaacctagctcatgtctataaatacagcacaccccgtcgtcatcttcagtcctcggacacaagcaaataagagcaaatcatagctgaccgatccaaacaacacgcccccgctctctcccaggtccctaagtgaaccaccctgtctggctaggcatggcctattgcgcatttgctccatctgcaccacctcaatattctgagcttaagatgactctatacacaaacaaggaggtgtatcgttctgggccagatcaaaacggagtaaccatcacagagagatcaaacatgggcacaacctgggtcttctcgtggcctgtagccgatgggccaacacctgatgcgaacatcgtcggccaactccagggcactagtgttcaagtagccaatactcccgttgtggtgtaccactactccctgggattagtgttcgaggataaaaggtgagaactgatgcgcagacaaaactaatttgtatagtacgtacttccacaacctctctcaaggatcatgtagtttattcatcttttctgttctcatttttcaagaaagaaagcctactcacggcatttttcgctttccttcaacataccccgcgcgcgtgatgatgtatacctcatttttcaagaaagaagcctactcatgtacaaaaaaaaaaaaaaaa

SEQ ID NO: 8600 - protein, 96 aa, Zea mays
  misc_feature: Ceres CLONE ID no. 1458218
  misc_feature: Ceres CDNA ID no. 40351908
MAYCAFAPSAPPQYSELKMTLYTNKEVYRSGPDQNGVTITERSNMGTTWVFSWPVADGPTPDANIVGQLQGTSVQVANTPVVVYHYSLGLVFEDKR

SEQ ID NO: 8601 - DNA, 858 bp, Zea mays
  misc_feature: Ceres CLONE ID no. 1458309
  misc_feature: Ceres CDNA ID no. 40041428
  CDS (20)..(577): REFERENCED BY SEQ ID NO: 8602
aatctataggctcgagcccatggtgtcacccggctccaacgacgacgacgacgatggccgcgcctccgctgccgccgccgccgtctgctgcatgtgcggcgaccaagggctgccgggcgagctcttccagtgcgccctctgcctccggcggctgcagcacagatactgcagcgccgagtacccaaggacggcggcgtactcggtctgcaactggtgcctgacgacgacagataagcaagtcggcggaggttcgccggcggcggctaagtcgcttacgacgatggcaaaacggagggcgtcatcaaggcagctgaacggttctcgtggtggccatcatggcgacgtggatccgtactctggtggtggtggttctggcggatgctcgaggtcagcgttcccggcggagccccagaagccggtcaagaagcccaagaagagccacgaggaggcggcggcagggaaagggagggaggaggtgccgaccggcgctaggacgaagccgccgttcactgcgaaggcgcgagtgccgcggtataagctcctcgcagaggtgatcagacgaaatgaaaatatataaaacggcgatgaatatcacttgcaagccattattactattagcttgcattgtggagaaaaggttttaggtcactggataatccgatgatcgccggagcatctggtggattgaagataaacaaaaaagagtacaagggagaaagagattgaacaacaatccgcgggggcggcgctcgcgtcaagcagctttgcgtggacccgatctaagagatcgtgtatgtgatcaagagttgctcaaaatagtctaagacatgcatgcttagcctaaaaaaaaaaaaaaaa

SEQ ID NO: 8602 - protein, 185 aa, Zea mays
  misc_feature: Ceres CLONE ID no. 1458309
  misc_feature: Ceres CDNA ID no. 40041428
  misc_feature: Homolog of GI Number: 50924602 NR Desc: OSJNBa0086B14.1
  misc_feature: Homolog of GI Number: 50927791 NR Desc: OSJNBb0034G17.21
  misc_feature: Homolog of GI Number: 38345466 NR Desc: OSJNBa0010H02.4
MVSPGSNDDDDDGRASAAAAAVCCMCGDQGLPGELFQCALCLRRLQHRYCSAEYPRTAAYSVCNWCLTTTDKQVGGGSPAAAKSLTTMAKRRASSRQLNGSRGGHHGDVDPYSGGGGSGGCSRSAFPAEPQKPVKKPKKSHEEAAAGKGREEVPTGARTKPPFTAKARVPRYKLLAEVIRRNENI

SEQ ID NO: 8603 - DNA, 513 bp, Zea mays
  misc_feature: Ceres CLONE ID no. 1458319
  misc_feature: Ceres CDNA ID no. 36707162
  CDS (84)..(278): REFERENCED BY SEQ ID NO: 8604
aaaccctagccgcctgtcttgctgaagctgaactgctgatccgtcttccaagctgtggtgtcatccctgcgttctgatccaagatgtatctccagtattacatcaacgagaagggtgacaaggtctacaccaccaagaaggagtcgcctcttggggtgccgacgcagtctgctcacccagctcgcttctcaccagatgacaagtactctcgccagcggtacctgttgaagaagagatttggacttctgccaacgcagaagccagcactgaagtactgaagcttcaactttccaaccatggatgtgcagtttgtgtcactgcttaatgcttgttggttggaatgtagaaataggtatctgaggaaacatatcaaacactgctaggcactactatgacatctcagcgcattcaggcactatatgtaatgctatgtgtttgacaggtcttgttcttattatgtacttggtgtgtgggccaaagcatcgtttttggcgttcaaaaaaaaaaaaaaaa

SEQ ID NO: 8604 - protein, 64 aa, Zea mays
  misc_feature: Ceres CLONE ID no. 1458319
  misc_feature: Ceres CDNA ID no. 36707162
  misc_feature (3)..(53): Pfam Name: Nop10p PFAM Desc: Nucleolar RNA
  misc_feature: Homolog of GI Number: 50910565 NR Desc: nucleolar RNA
  misc_feature: Homolog of GI Number: 79322535 NR Desc: NOP10
  misc_feature: Homolog of GI Number: 51467984 NR Desc: nucleolar protein family A
  misc_feature: Homolog of GI Number: 24652542 NR Desc: CG7637
  misc_feature: Homolog of GI Number: 55240537 NR Desc: ENSANGP00000015687
  misc_feature: Homolog of GI Number: 19114330 NR Desc: putative requirement for the function of snoRNPs by similarity to human nop10
  misc_feature: Homolog of GI Number: 13384790 NR Desc: nucleolar protein family A
  misc_feature: Homolog of GI Number: 73999753 NR Desc:  similar to nucleolar protein family A
  misc_feature: Homolog of GI Number: 63691694 NR Desc:  similar to nucleolar protein family A
MYLQYYINEKGDKVYTTKKESPLGVPTQSAHPARFSPDDKYSRQRYLLKKRFGLLPTQKPALKY

SEQ ID NO: 8605 - DNA, 695 bp, Zea mays
  misc_feature: Ceres CLONE ID no. 1458335
  misc_feature: Ceres CDNA ID no. 25447528
  CDS (3)..(479): REFERENCED BY SEQ ID NO: 8606
ctcgtctcgtccaccagctgagctgcgcccgttttagcgagcgagacaggtccgcgcgcgtgcgccggcgaggattggattggaaccgtcgcccgtcggtcgtcgatggggatccacctggtggcgttcgtggcggcgaggggcttcctgcaggtgttccaggtgtcggcgccgctgctgtggccgctcaacctctggctgccgctcgcgcgccacctgcccgaggcctgcgccgccttctacgacgccctcgtctcgcacgccgccagcctgcgcgccaccgtccggcgccgccgacgcgacagcggggacgccctcgacgagtacctccgcagcgccatcatgctaaccctctccgactgagactcttgagccgagcgcgcggccactggccagtgccaggcaacggccagtaccggagggtggcgtgcacaggccggccggccggcgcgcgctgtgatgtgagtagccatagctaggatctgtgttatctcgtttgtttgtttgttttttccttggctcgctcttcttttgctgcttttcggtcggtgcttaatctagctatctactactagcactagctagctagcatctcaagactgagcattgaggagctccgtatggtcaatttgtaatgctcgtctgtgactgaactgaagaacaagaccattttaatcgacaaaaaaaaaaaaaaa

SEQ ID NO: 8606 - protein, 85 aa, Zea mays
  misc_feature: Ceres CLONE ID no. 1458335
  misc_feature: Ceres CDNA ID no. 25447528
  misc_feature: Homolog of GI Number: 50929199 NR Desc: OSJNBb0059K02.4
  misc_feature: Homolog of GI Number: 50929197 NR Desc: OSJNBb0059K02.3
MGIHLVAFVAARGFLQVFQVSAPLLWPLNLWLPLARHLPEACAAFYDALVSHAASLRATVRRRRRDSGDALDEYLRSAIMLTLSD

SEQ ID NO: 8607 - DNA, 913 bp, Zea mays
  misc_feature: Ceres CLONE ID no. 1458374
  misc_feature: Ceres CDNA ID no. 25445481
  CDS (133)..(651): REFERENCED BY SEQ ID NO: 8608
atgcttctttaaattctgctgccattctgctaccgtgggcgtcgtacagccccgttcccatagaggacagtctgctgtctgccgcaagcctagcttcgtccaccactgaatcaagaaacaaaacaactaggcatggacgaccgcacctacaagggcggcatcaaggcgtactggaagcgccggggctactaccgcatggacggcgacgccgcgcggcgccgccagccgctccccaccgtggagctcggaagtggcgtcgcccaggcccaggcccaggcccagccgccgacgggggatggctcgggccggcgccgccggtgccgcgggtggcgcgtgcgccgcggccagctggggcggcggctgctccgcgcgctgtcccctcgccggtggctcatgcggctccgcgacgcgtacgtgtccgccatgctgcggctggcctcctcccccgccgtcgggtacggcgccggcgcgcccttctgcgccacggcgacccacggcgcggcggcggcggcggccttcgcgcggccggcgcagctcaaggagtacgacgagaaggcgctggtggagatctacaggtccatactcgcgcgcggcgggcctctcgccggcgcgcctgccgccgccacgctgcggctaccgacggctgtttgagcttgagcggcagaagagacgtgtgttcttcttgcttatttattcttatgtgtcgcgacttgtactgagttgtaacttgcgtgcgccccacaagctagcgtttcttcttcgttcccaattcgatcatcaagtcttatgttatggccttatgggtttggagtccaaagtctggtttgtctgctatactagtgcgagtgcatctatagtgaaaatgtttcaatagatgaagaagaacaaaatttgcttaaaaaaaaaaaaaaaa

SEQ ID NO: 8608 - protein, 172 aa, Zea mays
  misc_feature: Ceres CLONE ID no. 1458374
  misc_feature: Ceres CDNA ID no. 25445481
  misc_feature: Homolog of GI Number: 66776103 NR Desc: LigA
MDDRTYKGGIKAYWKRRGYYRMDGDAARRRQPLPTVELGSGVAQAQAQAQPPTGDGSGRRRRCRGWRVRRGQLGRRLLRALSPRRWLMRLRDAYVSAMLRLASSPAVGYGAGAPFCATATHGAAAAAAFARPAQLKEYDEKALVEIYRSILARGGPLAGAPAAATLRLPTAV

SEQ ID NO: 8609 - DNA, 697 bp, Zea mays
  misc_feature: Ceres CLONE ID no. 1458535
  misc_feature: Ceres CDNA ID no. 35383420
  CDS (101)..(508): REFERENCED BY SEQ ID NO: 8610
aattattaaacctagaattttcactgaagccgccaccacctagggtttctagcggcgataggagagagagggagagagagatctagagaagtgaagcaaaatggtgaagttcttgaagcagaacaaggccgtgatcctccttcaaggccgatacgccggaaagaaggccgtcatcatccgctccttcgacgacggaaaccgtgagcgtccttacggccactgcctcgtcgccggactcaaaaagtacccgagcaaggtcatccgcaaggactcggccaagaagacggcgaagaaatctagggtcaagtgtttcatcaaggtagttaactaccagcatctgatgcctacgcgttacaccctcgacgtggatctcaaggaagtggcgaccctcgaggctctttcgtcaaaggacaagaaggtggcggctctcaaggaggctaaggctaagctcgaggagaggttcaagaccggcaagaacaggtggttcttcaccaagctcaggttctgaagacgttttgatcttctctttttaattgttgattgaatttttcagcgtcattttagtttctactgttgaacaatgttgatcttgttttggaagatgaaagatcttttcttggaattttttttttaattttgattatttacatgttcatttcctttgaatgatctgctcaagtttacaaaaaaaaaaaaa

SEQ ID NO: 8610 - protein, 135 aa, Zea mays; identical to SEQ ID NO: 6270
  misc_feature: Ceres CLONE ID no. 1458535
  misc_feature: Ceres CDNA ID no. 35383420
  misc_feature (5)..(40): Pfam Name: KOW PFAM Desc: KOW motif
  misc_feature (52)..(135): Pfam Name: Ribosomal_L27e PFAM Desc: Ribosomal L27e protein family
  misc_feature: Homolog of GI Number: 20466061 NR Desc: putative ribosomal protein
  misc_feature: Homolog of GI Number: 23198420 NR Desc: putative ribosomal protein L27
  misc_feature: Homolog of GI Number: 21554529 NR Desc: ribosomal protein L27
  misc_feature: Homolog of GI Number: 7441033 NR Desc: ribosomal protein L27
  misc_feature: Homolog of GI Number: 7441035 NR Desc: ribosomal protein L27
  misc_feature: Homolog of GI Number: 20768 NR Desc: ribosomal protein L27
  misc_feature: Homolog of GI Number: 4263697 NR Desc: 60S ribosomal protein L27
  misc_feature: Homolog of GI Number: 7441034 NR Desc: ribosomal protein L27
  misc_feature: Homolog of GI Number: 37536910 NR Desc: putative ribosomal protein L27
  misc_feature: Homolog of GI Number: 50906961 NR Desc: putative 60S ribosomal protein L27
  misc_feature: Useful for making bigger plants
  misc_feature: Useful for making taller plants and plants with longer inflorescences
  misc_feature: Useful for sterility

SEQ ID NO: 8611 - DNA, 708 bp, Zea mays
  misc_feature: Ceres CLONE ID no. 1458567
  misc_feature: Ceres CDNA ID no. 40351909
  CDS (72)..(530): REFERENCED BY SEQ ID NO: 8612
agccgtcttcgcatcgcctcgcgcccgcaccccaggaaggtaagttcaagaggcttttctgagaagctcaaatggctcccaaagttgctgttgccaagaagggcgatgccaaggcccaggccgccaaggttgccaaggctgtgaagtctgggtcaatcaagaagacggcaaagaagatccgcacttctgtgacatttcaccgccccaagaccctgtccaaggccagggaccccaagtaccccaggatcagcacccctggaaggaacaaattagaccagtaccagatcctcaagtacccgcttaccactgagtctgcgatgaagaagattgaagacaacaacacccttgtcttcattgtcgacctcaaggccgacaagaagaaaataaaggctgctgtcaagaaaatgtatgacattcaggccaagaaggttaacaccctcatcaggcctgatggcaagaagaaggcgtacgtgaagctgacaccagactacgatgctcttgacgtggccaacaagatcggcatcatataagccagagggagggtcctgcagtaggcgcttgtgtcgtggtttcttatgttattggaattttgtagttgttacttagcaaagggccttagtggctccattgcctaccatatcgctgcacactttcatgaatttgatgcaatcgaagtgacttgtgttgatgctaaaaaaaaaaaaaaaa

SEQ ID NO: 8612 - protein, 152 aa, Zea mays
  misc_feature: Ceres CLONE ID no. 1458567
  misc_feature: Ceres CDNA ID no. 40351909
  misc_feature (11)..(64): Pfam Name: Ribosomal_L23eN PFAM Desc: Ribosomal protein L23
  misc_feature (70)..(149): Pfam Name: Ribosomal_L23 PFAM Desc: Ribosomal protein L23
MAPKVAVAKKGDAKAQAAKVAKAVKSGSIKKTAKKIRTSVTFHRPKTLSKARDPKYPRISTPGRNKLDQYQILKYPLTTESAMKKIEDNNTLVFIVDLKADKKKIKAAVKKMYDIQAKKVNTLIRPDGKKKAYVKLTPDYDALDVANKIGII

SEQ ID NO: 8613 - DNA, 768 bp, Zea mays
  misc_feature: Ceres CLONE ID no. 1458605
  misc_feature: Ceres CDNA ID no. 40351910
  CDS (97)..(492): REFERENCED BY SEQ ID NO: 8614
gcttcggttcagagttccttcagcagttgccccaccccactgctcgcgctcggtacgacgagaaagacaaaaaaaaaaaaagaaaaaacaaaaaacatgggctccttcctgtcgtcgttgtggacccctcccccgctcgccggcgacgaccccgactccgccgtcgtcgccgtccactccaagcccgcctgggacaagcactgggaggaacaccggaacgcgtccaagctgatggtgatcgacttctccgcctcctggtgcgggccctgccgcttcatcgagcccgccttcaaggagatggcctcccgcttcgccgacgcgctcttcgtcaagatcgacgtcgacgagctcgcggaggttgcaaagacattccgcgtagaggcgatgccgacctttgtactggtgaagggcgggcaggaggtgagtcgcgtggtcggggctaagaaggatgagcttgacaggaagatcaagacgttcatctcatctacctgatcctagcttaattaacctgcactccaattgtagtgccaggttctgtcttgttgatcccagtgtcaaggggctcctatggtttccccatggtgtagcactaccaatcctcctaaaatgctgcaaatccgacgtaaaatggtaataaaggttctgaaacttggatcgtgtaaatgtgtaactctggcctgtctgatcgttatctgtcttcttcggcaatcaagttactgaaataaaaaaaaaaaaaaaaaaaaaaaaaaaagaaaaaaaaaaaaaaaa

SEQ ID NO: 8614 - protein, 131 aa, Zea mays
  misc_feature: Ceres CLONE ID no. 1458605
  misc_feature: Ceres CDNA ID no. 40351910
  misc_feature (23)..(129): Pfam Name: Thioredoxin PFAM Desc: Thioredoxin
MGSFLSSLWTPPPLAGDDPDSAVVAVHSKPAWDKHWEEHRNASKLMVIDFSASWCGPCRFIEPAFKEMASRFADALFVKIDVDELAEVAKTFRVEAMPTFVLVKGGQEVSRVVGAKKDELDRKIKTFISST

SEQ ID NO: 8615 - DNA, 613 bp, Zea mays
  misc_feature: Ceres CLONE ID no. 1458661
  misc_feature: Ceres CDNA ID no. 25445933
  CDS (59)..(442): REFERENCED BY SEQ ID NO: 8616
aagtctcacccgcggcttccgtactcgcacctcgtgctcttggtgctgagattccctcatgttccaccgggtggtgctgcagattctgagggagatcgagggcgacctggccgggttcaagtgcggtctcgcgcatttcttccttcagcacacaagcgcatcgctgaccatcaacgagaactatgactctgatgtgcaggctgacactgagacttttcttaacagaattgttccagagggccacaatgctccttggaaacacactatggaaggacctgatgacatgccagcacatattaaatcttctatgtttggttgttccctaacgattcctataactgatggacgtctcaatacgggcacttggcagggcatatggctgtgcgaacatcgagaccatgccagccctcgcaaaattgtgattactctcaacggtgtgtaacttgaagatcttatatgctgccaggaaatagggccaatgcaatttggacctgaatgtgtttcagttaccatgtactatgttgagttgtaatgtatgctataaattccaataaattcatcgttactatttcgtatgtgattattggcttagcccccaaaaaaaaaaaaaaaa

SEQ ID NO: 8616 - protein, 127 aa, Zea mays
  misc_feature: Ceres CLONE ID no. 1458661
  misc_feature: Ceres CDNA ID no. 25445933
  misc_feature (6)..(125): Pfam Name: UPF0047 PFAM Desc: Uncharacterised protein family UPF0047
  misc_feature: Homolog of GI Number: 58392339 NR Desc: ENSANGP00000023321
  misc_feature: Homolog of GI Number: 48098909 NR Desc: similar to CG31688
  misc_feature: Homolog of GI Number: 54644356 NR Desc: GA16396
  misc_feature: Homolog of GI Number: 24585432 NR Desc: CG31688
MFHRVVLQILREIEGDLAGFKCGLAHFFLQHTSASLTINENYDSDVQADTETFLNRIVPEGHNAPWKHTMEGPDDMPAHIKSSMFGCSLTIPITDGRLNTGTWQGIWLCEHRDHASPRKIVITLNGV

SEQ ID NO: 8617 - DNA, 847 bp, Zea mays
  misc_feature: Ceres CLONE ID no. 1458724
  misc_feature: Ceres CDNA ID no. 35383421
  CDS (104)..(376): REFERENCED BY SEQ ID NO: 8618
agagaaatctaccaccgctctccctctccctcccggcctgcacacgcacaagcagcggcgaagccttctcagctgccttcttcctcctccctctctttctgccatgaagccccctcacttcaccggggaggccgccgccggcgcctcatgggctcacgaggtcaagcaggccctccgtgacaagctccggtgggcacccgccgcgggcaccacgggcaccggcggccacggcgccgcgaggccgccgacggcctcctcggctgtgaccgccgagccggcggcgcagccggcccacggcgccgactgccggggcttggcggccgccgaggaccccatcaggagggtcatgttcttggccccctggggccacacataaacggaaaagcaagtgcacgcacgcacggccatgccctggccggacctgcaattgcacctcaaccaaaatatggactactacatatatatatgtggccgtatggaccatgcatgaactgatgatgaacatgaactcatcaaggaccaactaaaaaccgggactagatcgatcgggagaagaagatgtggtgcttgagttgtttgttcatgtttctcttggagagatgcatgcatgcatgcatggggagatctcgccgtgacggccgggttcgtgcatatatatggcctatgggtgttgctggccctgggttgaagctgcgcaagagctagctgcagctttgttgtagccatgaacctgttttttctttctctccagaaattctgtaccaagagcctgtgaaaagctatgtgtgtatgagactatgagctagttaaaaaaaactcttcctcctttccaaaaaaaaaaaaaaaa

SEQ ID NO: 8618 - protein, 90 aa, Zea mays
  misc_feature: Ceres CLONE ID no. 1458724
  misc_feature: Ceres CDNA ID no. 35383421
MKPPHFTGEAAAGASWAHEVKQALRDKLRWAPAAGTTGTGGHGAARPPTASSAVTAEPAAQPAHGADCRGLAAAEDPIRRVMFLAPWGHT

SEQ ID NO: 8619 - DNA, 792 bp, Zea mays
  misc_feature: Ceres CLONE ID no. 1458728
  misc_feature: Ceres CDNA ID no. 29191575
  CDS (87)..(446): REFERENCED BY SEQ ID NO: 8620
agatcagcagcccccaaatcggcgacccctcgctctctctccgatctccaatcctccacctcgcacacgcgcaccaaccgggcacgatgcgggcgatctcgtcggcggcgggagggatgctgcgggcgcggctgcgcgcggcggtgcgcctccgcggcgggcacggcgacggcgggggccgctggacgacgcccggccacgaggtgcggcccaaggggtacccgatgaaccgcacgccgccgccgccgggcgagtcgcgcaagtgggaggactgggagctcccctgctacgtcacctccttcctcaccgtcgtcatcctcggcgtcgggctcaacgccaagcccgacctcaccctcgagacctgggcgcaccacaaggcgctcgagcgcctccagcagcaggagctcgccgccgcctccgcctcggccgacgccctgtccgagtgatccgcgcgcgcgcgccccaggtcttcctccaagcctaggtcgcttctgttctgttttgcttccaataagggttggttgtgaacttgtgatgtaccaatctgatattgatgggacctgggcggaacactatatttctgtttctgttttgttgttgaaatttatctgatgatgatggcagataccgtatgcatttcgaaatgccctgtggtgtcccaaacattttgaaatgcctctgcattgtattgtcttgtgtatcccttatttatttccttgggcatgatttgctacatgcttttgcgagcgtaattaggaccgattgtacctgtcaataaaaaaaaaaaaaaaa

SEQ ID NO: 8620 - protein, 119 aa, Zea mays
  misc_feature: Ceres CLONE ID no. 1458728
  misc_feature: Ceres CDNA ID no. 29191575
  misc_feature: Homolog of GI Number: 9858777 NR Desc: BAC19.9
  misc_feature: Homolog of GI Number: 61858096 NR Desc:  similar to mKIAA0324 protein
MRAISSAAGGMLRARLRAAVRLRGGHGDGGGRWTTPGHEVRPKGYPMNRTPPPPGESRKWEDWELPCYVTSFLTVVILGVGLNAKPDLTLETWAHHKALERLQQQELAAASASADALSE

SEQ ID NO: 8621 - DNA, 483 bp, Zea mays
  misc_feature: Ceres CLONE ID no. 1458758
  misc_feature: Ceres CDNA ID no. 40351911
  CDS (60)..(272): REFERENCED BY SEQ ID NO: 8622
acaaagaagctccataattaattattgccctttcagttcgccatcggcagccgagcaccatgagctccacaggcggcgacgatggcgccaagaagtcttggccggaagtggtcgggctcagcctggaagaagccaagagggtgatcctgtgcgacaagcccgacgccgacatcgtcgtgctgcccgtcggcacgccggtgaccatggatttccgccccaaccgcgttcgcatcttcgtcgacaccgtcgcggaggcaccccacatcggctgagaatcaaatctataaaatgaataactcggacatgtcatgcgtgcatgtccgtcgccgaataatggatgtgtgtgcttcgttccaataaattgctagtaaaaataatggcatcgtcggtatgcatgaataaaatgtatcataatgttcatcctttcacgattggatatatgaaaatgtgctcagttgtttggttccaaaaaaaaaaaaaaaa

SEQ ID NO: 8622 - protein, 70 aa, Zea mays
  misc_feature: Ceres CLONE ID no. 1458758
  misc_feature: Ceres CDNA ID no. 40351911
  misc_feature (11)..(70): Pfam Name: potato_inhibit PFAM Desc: Potato inhibitor I family
MSSTGGDDGAKKSWPEVVGLSLEEAKRVILCDKPDADIVVLPVGTPVTMDFRPNRVRIFVDTVAEAPHIG

SEQ ID NO: 8623 - DNA, 929 bp, Zea mays
  misc_feature: Ceres CLONE ID no. 1458825
  misc_feature: Ceres CDNA ID no. 29191576
  CDS (8)..(466): REFERENCED BY SEQ ID NO: 8624
acctctaatggacggcttcgatcttcccaccacctccggcccgtctgctacaatcgccggcggcgacgaccggcctccggagatcaccggggacggcggcttggaggatgcggacacgggtcctcatcctgacaggtgcgaggcgctggctgcggccatcgcaggggtgctaggcagcgcgcttgaggagcatgaggtgcgcgccgcggccaccgcccagagccaggccgagctcgccaccgccattgaccgcctcaacggagaactagacaagctattggagaatgcaccctccccggtaatagcacaacatgcagcaaggatttcctctatccgcaagagagtgttagcgctaaacatgctactaaggtccatacaaagacgtatagataatatggatagaatgatttctactggtgttacaagtgatcattcatctcgtgtgcagttgcaaaaccagaattaaacttggattgagtgctatgaactgcaggatctagaaggatatttcctgtgttgcccgtcaattgctcaccatttctgtcagctgaactgtaattcaatagcgatgcaggcggcattttcacaagaggttgtgtataatagtgaagactgaagagtcgtgattgcaactgccctccaaattcgcatcactaggaacgcttcattctttttgtcatatagttgaagtgggattagttcttcggtctgaacaatctcttctccttggtggcgtggaaagtgaaatgcgcttcagatgtaccaattgcactcatgtaccattttctcttggggaatccgtctcaacatgtacaacactagattgcaaggggtaaacaatatttttatctcatgttgtgcaaatttggaataactgtgttgtgaatattgaagatagcaaccgcttgagtccaaaaaaaaaaaaaaaa

SEQ ID NO: 8624 - protein, 152 aa, Zea mays
  misc_feature: Ceres CLONE ID no. 1458825
  misc_feature: Ceres CDNA ID no. 29191576
MDGFDLPTTSGPSATIAGGDDRPPEITGDGGLEDADTGPHPDRCEALAAAIAGVLGSALEEHEVRAAATAQSQAELATAIDRLNGELDKLLENAPSPVIAQHAARISSIRKRVLALNMLLRSIQRRIDNMDRMISTGVTSDHSSRVQLQNQN

SEQ ID NO: 8625 - DNA, 647 bp, Zea mays
  misc_feature: Ceres CLONE ID no. 1458977
  misc_feature: Ceres CDNA ID no. 40351912
  CDS (66)..(425): REFERENCED BY SEQ ID NO: 8626
ctcctctctctccccccactctttgcccaagcccccctactgccggcggcggagacgacggaaacatggtgcagcgtctgacgtaccggaagaggcacagctatgccaccaagtccaaccagacgcgggtcgtcaagaccccaggtggtaagctcgtgtaccagtacaccaagaagagggcgagcggccccaagtgccctgtgaccgggaagaagatccaggggattccccacctcaggcctactgaatacaaaagatcaaggttgtctaggaaccgcaggactgtgaaccgtccctatggtggagtgctctctggaactgcagtgagggaaaggatcatccgcgccttcttggtggaggagcagaagatcgtgaagaaggtgttgaaaatacagaagaccaaggacaagacgacctcaaagtaatctgatcgaaacggaagtgcgaagtgagatggtgttctgtaaacaaggaaaatatttttgttggtggttatgatcaatggtttagtcccttctagctaaatgttttagagtacttgaaatccttctgctgccgtgacatcagagattgtgaaacatttgatacccatttgcagtttcatttctgaatgcatgttgaaaaaaaaacgaaaaaaaaaaaaaaaa

SEQ ID NO: 8626 - protein, 119 aa, Zea mays; identical to SEQ ID NO: 2312
  misc_feature: Ceres CLONE ID no. 1458977
  misc_feature: Ceres CDNA ID no. 40351912
  misc_feature (5)..(103): Pfam Name: Ribosomal_L34e PFAM Desc: Ribosomal protein L34e

SEQ ID NO: 8627 - DNA, 533 bp, Zea mays
  misc_feature: Ceres CLONE ID no. 1459185
  misc_feature: Ceres CDNA ID no. 29191577
  CDS (62)..(322): REFERENCED BY SEQ ID NO: 8628
agataccccaaaggcccaaagacccgacagattcgcgagagctcgagagagtgcgaccaaaatggcgatgagatgcgcgctgacctccctccccgcgcgcctccggtccccggcggtggtcgccagcgggacccggcgccttctgagtgacgggaaggggcgcgtgctcagcgaggaggagcgcgccaaggagaacgtctacatccagaagatggagagggagaggcgggagaagctcaagaaaaagctcgaacaggagaaggatgcggccgacaaggctaagtccggcgccgacggcaagaaggccgagggaactaactaggagcgatcttcgcctgcctgaaggtgaccccatcttggatgcatctgggggacatttgtgtttatagatgtccagagatggaagaataaattctgtaaaacgttgatagcgctagctttgctttgttttcggtttgccgcgcttgttcaggatataatccagggaccataaacattgataactgggaaaaaaaacaaaaaaaaaaaaaaaa

SEQ ID NO: 8628 - protein, 86 aa, Zea mays
  misc_feature: Ceres CLONE ID no. 1459185
  misc_feature: Ceres CDNA ID no. 29191577
  misc_feature: Homolog of GI Number: 50948469 NR Desc: putative F1F0
  misc_feature: Homolog of GI Number: 5106371 NR Desc: F1F0
  misc_feature: Homolog of GI Number: 28416549 NR Desc: At5g04750
  misc_feature: Homolog of GI Number: 9758450 NR Desc: F1F0
  misc_feature: Homolog of GI Number: 1096930 NR Desc: H ATPase inhibitor
  misc_feature: Homolog of GI Number: 52077175 NR Desc: F1F0
MAMRCALTSLPARLRSPAVVASGTRRLLSDGKGRVLSEEERAKENVYIQKMERERREKLKKKLEQEKDAADKAKSGADGKKAEGTN

SEQ ID NO: 8629 - DNA, 966 bp, Zea mays
  misc_feature: Ceres CLONE ID no. 1459238
  misc_feature: Ceres CDNA ID no. 40041429
  CDS (54)..(680): REFERENCED BY SEQ ID NO: 8630
agtgcattgcaagcgtgggaagggaggagatcattggaaggggagaaaagggaatggagcatgatgaagaggaggagctgccttcaccttcttcctccttgggctacctgatgctgtgtaggatctgccacgaggaagaggacggagggcgtgcgaccatggagtccccttgtggatgttccggctctctcaagtacgctcacaggcgatgtgtgcagagatggtgtgatgagaaggggaccgccatctgtgagatttgccttcagaatttcgagccagggtacacaatgcctccaaagaaaactccggtggttgaaacggcggtcacgatcagtgaacacgaggacatgcaatctttggaatctcgggagggcttgagtgggggtgcaggctacaccaggtgctcctacaccgcagatcaatgcgccacatggtgccggtcgctggcgatcacgttcaccattatgctgctggcatggcatctggttgcagtggtgacggttgaagcagcagctcactgcgcgttcagtctcctggcaatgtacttgcttcgcgctgctggtatcctgctgccgctgtgcgttgtcatgcgactgattcgcatcgtccagagtggtcaggagcagcagtatgggctgcagctgctggagcaccaaagaagaaatgtatcaactatatgaattatatgcgtgtccaggaggaggaccagcgagtaattaatattcattaagccaatgaatctcaatgcaagcttgcacaaatgtgcattaagtattaccgtggaaactttcaaacagaacatcatctgtaaacatttagtatacatacagttggtgcagggaaaaacagcaccattttattcctgctttttctgaacgttcattatgctattagggaatgttcaaacagatcattattgcatatcccaatgaaaatattggcggccaaccaaaaaaaaaaaaaaaa

SEQ ID NO: 8630 - protein, 208 aa, Zea mays
  misc_feature: Ceres CLONE ID no. 1459238
  misc_feature: Ceres CDNA ID no. 40041429
  misc_feature (22)..(69): Pfam Name: zf PFAM Desc: Zinc finger
  misc_feature: Homolog of GI Number: 34905532 NR Desc: B1146F03.23
  misc_feature: Homolog of GI Number: 52077476 NR Desc: zinc finger protein
  misc_feature: Homolog of GI Number: 4741923 NR Desc: PIT1
  misc_feature: Homolog of GI Number: 50909823 NR Desc: zinc finger
  misc_feature: Homolog of GI Number: 79316317 NR Desc: protein binding / ubiquitin
  misc_feature: Homolog of GI Number: 50946099 NR Desc: zinc finger protein
  misc_feature: Homolog of GI Number: 30692888 NR Desc: zinc finger
  misc_feature: Homolog of GI Number: 57899808 NR Desc: putative PIT1
  misc_feature: Homolog of GI Number: 42570667 NR Desc: zinc finger
  misc_feature: Homolog of GI Number: 49533771 NR Desc: putative zinc finger protein
MEHDEEEELPSPSSSLGYLMLCRICHEEEDGGRATMESPCGCSGSLKYAHRRCVQRWCDEKGTAICEICLQNFEPGYTMPPKKTPVVETAVTISEHEDMQSLESREGLSGGAGYTRCSYTADQCATWCRSLAITFTIMLLAWHLVAVVTVEAAAHCAFSLLAMYLLRAAGILLPLCVVMRLIRIVQSGQEQQYGLQLLEHQRRNVSTI

SEQ ID NO: 8631 - DNA, 1094 bp, Zea mays
  misc_feature: Ceres CLONE ID no. 1459332
  misc_feature: Ceres CDNA ID no. 25446704
  CDS (256)..(936): REFERENCED BY SEQ ID NO: 8632
ctcgctcgctcgttcttccgcctcgctccaccaccggcgcccgcacgcacgtctggcgtagggatacagccgcacaggaagaccccctcccctcgacggaagcctcctccgagtgggggcatctacctctctttccctttagcttctgggcgcagttaattttccaaactatatttgggggtgttcagcaaaaaaaccgcgtccaactgcgcccgtgcgggtgagggatcactagaggctggactcgcgctagagatggtgaaggcaaaagcaagggtccgctatgagcctggaccggcttttgaggaggtcaaagaagaagccatgcttgatatatcaccaacagactcgacagagttttggttaattcagtggcctaaggaccagatagatgttttggattttcatggcaaagagctttctctcaagctgcatagtgatggaaacttgggcaacttggaaaattcctcagggaaatcttatgagattgcgagctttgcagctcagaaaccagatgcaaccgtcttcctgccttcagggtcagaaacaaaggctgtggggaagatttcacggcgagtatccttagttcgttatcctaaacctgaggaatttacaaaaccaagttttgggagtcttactcctagcataaagaaatctgcaggttctaagaagaccatgtctcggttcaccggtgcatcaaagaatcccagtagccaaggttcggcgctttcactgggccaaaggagcgtagagccaacacccaaacacaaggggaagagaaaggatgaaagcagcctggggcactcaaatgtgtcgggcaaggccacagaaggatctgaggctcgaggcgccgggagcaacacggcttcagagatgccacagtcgccaccggaaaaatcaaagaagaggaggaagaaggataagatcgttgagtagtagtgtcaccttggcagatttttttgctggagtgcccggtgttgtttgacctgggagcaacctgttgcgtggtgctgaaataccgctatgtatcgttctgtttttggtatgtgaaaggttatctttgttgcgctgtaaaaaaaaaaaaaaaaaaaaaa

SEQ ID NO: 8632 - protein, 226 aa, Zea mays
  misc_feature: Ceres CLONE ID no. 1459332
  misc_feature: Ceres CDNA ID no. 25446704
MVKAKARVRYEPGPAFEEVKEEAMLDISPTDSTEFWLIQWPKDQIDVLDFHGKELSLKLHSDGNLGNLENSSGKSYEIASFAAQKPDATVFLPSGSETKAVGKISRRVSLVRYPKPEEFTKPSFGSLTPSIKKSAGSKKTMSRFTGASKNPSSQGSALSLGQRSVEPTPKHKGKRKDESSLGHSNVSGKATEGSEARGAGSNTASEMPQSPPEKSKKRRKKDKIVE

SEQ ID NO: 8633 - DNA, 509 bp, Zea mays
  misc_feature: Ceres CLONE ID no. 1459397
  misc_feature: Ceres CDNA ID no. 25446128
  CDS (45)..(296): REFERENCED BY SEQ ID NO: 8634
accatccaatccaaggagcactcgcaatcgcaccggcggcggagatgggcggcgaccatggcggccacggcccgagcggcggcgacttccggcagaaggtgtggagcatgaccggcgggccttactgccggcccgtccactggcgccgcaacaccgccatcgccatggtcggcatcttcctcgtctgcatccccatcgccatgaaatccgccgagctcgagcaacgcccgcaccacccagtccggccaatcccatcccagctttggtgcaaaaactttggcaagaaggaatactgaaggatgtgccgactttcaaggacaaagccctgtttttacctttgttgtgccttcttttgtcataaccggtcctcagcgatcaaagctggaagaagtacgctaccatagcgttatgtaactcttgtgacttcttattatcacatacaaggagtgcttgtttgtttgcgattcaaataaacttgtgatgcatgagcgccaaaaaaaaaaaaaaaa

SEQ ID NO: 8634 - protein, 83 aa, Zea mays
  misc_feature: Ceres CLONE ID no. 1459397
  misc_feature: Ceres CDNA ID no. 25446128
MGGDHGGHGPSGGDFRQKVWSMTGGPYCRPVHWRRNTAIAMVGIFLVCIPIAMKSAELEQRPHHPVRPIPSQLWCKNFGKKEY

SEQ ID NO: 8635 - DNA, 590 bp, Zea mays
  misc_feature: Ceres CLONE ID no. 1459454
  misc_feature: Ceres CDNA ID no. 40351913
  CDS (9)..(395): REFERENCED BY SEQ ID NO: 8636
actgatgaatgaacgaatgctgtctgttgttttgtttctcgcagcgaagtgcgctcgggatgtgggtgttcaggagcaagagcagtccggtgagcagcgacagcccccggggcgcctgcaagggctacatcttcgcgctggaggtggcggaggagctggagcagtggccggagcaggacacccacggcaggcagtgggtctccccggcggacgcgtaccgcctctgccgctacgactggatgcgcgaggcgctgtcggcactgctcgaccgcctcacggaggagcccgagccccccaagtcccccgccgcggacggcctcggcgagcacgcaggcgtgtgcatgatggtcaaggcgaccacagccgctgcggatcgagcggtggcgctctgctagtggcatcattctgaacatgtgcaaatcctcatcatctgggtcgtcaggctcggctgttcgttcgaacttggtgtggttggtcggtgaatgcagtgtatggaaacttgtctcgtcaatccagggcttgtaaatgatgtcggttacgccacgtgttaaatcaaatggctacaactgtccgtaaaaaaaaaaaaaaaa

SEQ ID NO: 8636 - protein, 128 aa, Zea mays
  misc_feature: Ceres CLONE ID no. 1459454
  misc_feature: Ceres CDNA ID no. 40351913
  misc_feature (40)..(88): Pfam Name: NUDIX PFAM Desc: NUDIX domain
MNECCLLFCFSQRSALGMWVFRSKSSPVSSDSPRGACKGYIFALEVAEELEQWPEQDTHGRQWVSPADAYRLCRYDWMREALSALLDRLTEEPEPPKSPAADGLGEHAGVCMMVKATTAAADRAVALC

SEQ ID NO: 8637 - DNA, 1493 bp, Zea mays
  misc_feature: Ceres CLONE ID no. 1459647
  misc_feature: Ceres CDNA ID no. 35383422
  CDS (68)..(1234): REFERENCED BY SEQ ID NO: 8638
attgttaagagatcatcacgcggcttccctctctctctctctctttctttctccaccgactaaagcaatggcgaacggagccgttagattggatctggacggaaagccgatcaagccgctcacgatctgcatgatcggcgccggaggtttcatcggctctcacctctgcgagaagctcctgaccgagactccgcacaaggtcctcgcgctcgacgtctacaacgacaagatcaagcacttgctcgagcccgatacttccgagtgggccgagaggatccagtttcaccgcatcaacatcaagcacgattcgaggctcgagggactcgtgaagatggcggatctgacgattaatctcgctgcgatttgtactccggctgattacaatacgcgtccgcttgatactatctacagcaacttcatcgatgctctccctgtggttaagtactgctcagagaacaacaagcgtcttattcacttctccacctgtgaggtgtatgggaaaactataggaagctttcttcctaaggatcatcctctgcgtcaggatcctgatttttatgtactcaaagaagatacatccccttgcatttttggctccattgagaagcagaggtggtcatatgcttgtgcgaagcaactgattgagagactcgtctacgctggtgctgagaacggacttgagttcaccattgtaagaccgtttaactggattggacctaggatggacttcatccctggcattgatggtcctagcgagggtgtccctcgtgtcctggcctgctttagcaacaaccttctgcgacgtgaacctctgaagcttgtggatggtggagaatcacagagaaccttcatctacatcaaggatgctattgacgctgtcctcctgatgattgaaaacccagagagagccaatgggcgtatcttcaatgtaggtaacccaaacaatgaagtgacagtaagacaacttgctgaaatgatgactaaggtctactcaaaagtgagtggagagacagcaattgagagtccaacgatagacgtgagctccaaagaattttatggagagggttatgatgacagcgacaagagaatcccagacatgaccatcatcaaccgtcaacttggatggaacccgaagacgtctctttgggacttgcttgagtcgaccttaacttaccagcacaggacctacgctgaagccgttaagaaggccacctcaaaaccagtcgcatcttagaggtggtctatcatcacctcgaatcatttggtggctacttccttttctttcttttttttaatacacccagtattcccttaaaacaggccattctaagcgagtgatatatatcatggtcgttggttctagtttgcgcgttattgcttatatagtatatgctaatgtctttaatttcgttgttgaagcttaatatctttgtactttgtccaaaacttaaaaaaaaaagaatggtttgttcaaaacaaaaaaaaaaaaaaaa

SEQ ID NO: 8638 - protein, 388 aa, Zea mays
  misc_feature: Ceres CLONE ID no. 1459647
  misc_feature: Ceres CDNA ID no. 35383422
  misc_feature: null
  misc_feature: Useful for making plants with altered Lignin content
  misc_feature: Useful for making plants with altered cell wall content and/or composition
  misc_feature (22)..(48): Pfam Name: NAD_binding_4 PFAM Desc: Male sterility protein
  misc_feature: Homolog of GI Number: 34905954 NR Desc: OJ1656_A11.18
  misc_feature: Homolog of GI Number: 42602317 NR Desc: dTDP
  misc_feature: Homolog of GI Number: 21594350 NR Desc: putative dTDP
  misc_feature: Homolog of GI Number: 45935133 NR Desc: putative dihydroflavonol reductase
  misc_feature: Homolog of GI Number: 37379419 NR Desc: putative nucleoside
  misc_feature: Homolog of GI Number: 14596185 NR Desc: similar to dihydroflavonol reductase
  misc_feature: Homolog of GI Number: 17546038 NR Desc: PUTATIVE OXIDOREDUCTASE PROTEIN
  misc_feature: Homolog of GI Number: 83749902 NR Desc: UDP
  misc_feature: Homolog of GI Number: 63256634 NR Desc: Formyl transferase
  misc_feature: Homolog of GI Number: 68344709 NR Desc: UDP
MANGAVRLDLDGKPIKPLTICMIGAGGFIGSHLCEKLLTETPHKVLALDVYNDKIKHLLEPDTSEWAERIQFHRINIKHDSRLEGLVKMADLTINLAAICTPADYNTRPLDTIYSNFIDALPVVKYCSENNKRLIHFSTCEVYGKTIGSFLPKDHPLRQDPDFYVLKEDTSPCIFGSIEKQRWSYACAKQLIERLVYAGAENGLEFTIVRPFNWIGPRMDFIPGIDGPSEGVPRVLACFSNNLLRREPLKLVDGGESQRTFIYIKDAIDAVLLMIENPERANGRIFNVGNPNNEVTVRQLAEMMTKVYSKVSGETAIESPTIDVSSKEFYGEGYDDSDKRIPDMTIINRQLGWNPKTSLWDLLESTLTYQHRTYAEAVKKATSKPVAS

SEQ ID NO: 8639 - DNA, 988 bp, Zea mays
  misc_feature: Ceres CLONE ID no. 1459676
  misc_feature: Ceres CDNA ID no. 40351914
  CDS (86)..(715): REFERENCED BY SEQ ID NO: 8640
ctctctctccctctctgtcgctgcggctctcgcgactcatcctccccatcccaaaaccctcgaaaagcaaaggcggcggcgcgacatggcagaggtcgaagctgcgctcccggtggcggcgacagagaccccggaggtcgcggccgagggcgacgcgggtgcggccgaggcgaaggggccgcacaagctgcagcggcagtggaccttctggtacgacatccagaccaagcccaagcccggcgccgcctggggcacctcgctcaaaaagggctacaccttcgacaccgtcgaagagttctggtgcttgtatgatcagattttccgtccgagtaagctggtaggaagtgctgattttcatttattcaaggctggggtagaaccaaagtgggaagatccagagtgcgcaaatgggggcaaatggactgtgatatctagcaggaaggccaatcttgataccatgtggcttgaaacgtgtatggctctgattggagagcagtttgatgaaagccaggaaatttgtggtgttgttgctagtgtccgccagagacaggataagctttcattatggactaagactgccagtaacgaagctgttcaggtagacattggcaagaaatggaaggaggtgattgactacaatgataagatggtctacagcttccacgatgactcaagaagtcagaaaccaagcagaggtggacgatacacggtgtaaggccgcacacatgatgaagactgcagcttggaaaagtggccgtgtagtgttttactgagattcgaaccgcctcagctaatgttgtttgaggcaattttccaatctactatgtcgttttgctctctgattgcttgtggtatgcagagatgttgtatgcactaaattttcctcgcaatatcccttgattttaacaatccagaggaggaaccccgcctcgtgtgggaagtgggatgcattatcactgttttaagcatatgaaaaaaaaaaaaaaaa

SEQ ID NO: 8640 - protein, 209 aa, Zea mays
  misc_feature: Ceres CLONE ID no. 1459676
  misc_feature: Ceres CDNA ID no. 40351914
  misc_feature (6)..(209): Pfam Name: IF4E PFAM Desc: Eukaryotic initiation factor 4E
MAEVEAALPVAATETPEVAAEGDAGAAEAKGPHKLQRQWTFWYDIQTKPKPGAAWGTSLKKGYTFDTVEEFWCLYDQIFRPSKLVGSADFHLFKAGVEPKWEDPECANGGKWTVISSRKANLDTMWLETCMALIGEQFDESQEICGVVASVRQRQDKLSLWTKTASNEAVQVDIGKKWKEVIDYNDKMVYSFHDDSRSQKPSRGGRYTV

SEQ ID NO: 8641 - DNA, 1149 bp, Zea mays
  misc_feature: Ceres CLONE ID no. 1459728
  misc_feature: Ceres CDNA ID no. 25892375
  CDS (46)..(927): REFERENCED BY SEQ ID NO: 8642
agacgcggatctgcgagatcgatctagaggaagaagaaggaagcaatggcgtccatgggagcaggaccagatcacctcttcaatctgagaaaccaattctacctgggagcttatcaaacggcgatcaacaacagcgagatccctcacctctcgccggaggacgccgtggagcgcgactgcctcgtcttccgctcctacatcgccctcggtagctatcagctcgtcatcagcgagatcgatgaatccgccgctactccactgcaggcagtcaaactcctcgctatgtatctatcgagtcctgctaataaggaatcaaccatctcaagcttgagggaatggttggcagattcaacaataggcaacaatgctactttgcgactggttgctggtattgttttcatgcatgaggaagattatagtgaagctctgaagcacactcatgctggaggaactatggatctgcatgcgttgaacgtccagatattcgttaagatgcacagatcagattatgctgagaagcagcttggagttatgcaacaatatgacgaagaccacactctcactcaacttgcaaccgcttggtttaaccttgcagtgggtggctcgaagatacaagaagcttatctaattttccaggatttctgtgagaagtatcccatgacgtgcttgatcttgaacggtaaagcagtttgctgtatgcaaatgggcaactttgatgaagctgaatcactactccttgaagcactcaacaaggatgcgaaggacccagaaactcttgcaaaccttgtcgtctgcagtcttcatgttggcaagtcctcttcacgttacttaagccagctgaaactatcacacccagaacatgtgctcgtgaagcgagtttcatcagccgaagataacttcgagagagcggttcaatctgtggcctgaaaacgactcgactcttccatggttcaagctgtgcagtatcggtttgctttaccacatagtctcccgtgtttggtaaacccaccagaataacccctttctgtcttgtctttttttgagatcagtatatgaaccagattttgtcattgggtgtgttacatttaccatttcattacttctaagtataaagctccaccgttcactctgttaaaaaaaaaaaaaaaa

SEQ ID NO: 8642 - protein, 293 aa, Zea mays
  misc_feature: Ceres CLONE ID no. 1459728
  misc_feature: Ceres CDNA ID no. 25892375
  misc_feature (207)..(240): Pfam Name: TPR_1 PFAM Desc: Tetratricopeptide repeat
  misc_feature: Homolog of GI Number: 22655446 NR Desc: At2g34840/F19I3.7
  misc_feature: Homolog of GI Number: 21593069 NR Desc: coatomer
  misc_feature: Homolog of GI Number: 13194794 NR Desc: putative coatomer protein
  misc_feature: Homolog of GI Number: 50928673 NR Desc: OSJNBa0070C17.12
  misc_feature: Homolog of GI Number: 7677264 NR Desc: epsilon
  misc_feature: Homolog of GI Number: 7670062 NR Desc: epsilon1
  misc_feature: Homolog of GI Number: 56311392 NR Desc: coatomer epsilon subunit
  misc_feature: Homolog of GI Number: 7670064 NR Desc: epsilon2
  misc_feature: Homolog of GI Number: 50929137 NR Desc: OSJNBa0033G05.19
  misc_feature: Homolog of GI Number: 73985917 NR Desc:  similar to epsilon subunit of coatomer protein complex isoform 2
  misc_feature: Useful for decreasing plant size
  misc_feature: Useful for delaying flowering time
  misc_feature: Useful for increasing chlorophyll and photosynthetic capacity
  misc_feature: Useful for making lethal plants for genetic confinement systems
  misc_feature: Useful for making ornamental plants with modified leaves
  misc_feature: Useful for making plants with increased biomass
  misc_feature: Useful for making plants with increased biomass and foliage
  misc_feature: Useful for making plants with increased biomass and foliage
  misc_feature: Useful for making plants with increased biomass and foliage
  misc_feature: Useful for making shorter plants
MASMGAGPDHLFNLRNQFYLGAYQTAINNSEIPHLSPEDAVERDCLVFRSYIALGSYQLVISEIDESAATPLQAVKLLAMYLSSPANKESTISSLREWLADSTIGNNATLRLVAGIVFMHEEDYSEALKHTHAGGTMDLHALNVQIFVKMHRSDYAEKQLGVMQQYDEDHTLTQLATAWFNLAVGGSKIQEAYLIFQDFCEKYPMTCLILNGKAVCCMQMGNFDEAESLLLEALNKDAKDPETLANLVVCSLHVGKSSSRYLSQLKLSHPEHVLVKRVSSAEDNFERAVQSVA

SEQ ID NO: 8643 - DNA, 1021 bp, Zea mays
  misc_feature: Ceres CLONE ID no. 1459953
  misc_feature: Ceres CDNA ID no. 25446784
  CDS (3)..(794): REFERENCED BY SEQ ID NO: 8644
ctcttccgacacacacacactcgtcgacgaacgacgacgacgagcacgagcacgagcagcgcctgacgctcggctccgacccgcgcgcgtcgatggcgatgagtgacacaggctcgagcttcgcgcagtgggccgcgctctaccaccaccaccaccacgacgccgggccggtcctgctgccccccgacgacgacgccggcaccaccgctgcggccgccgccgtagcgagcccgacgtcgggcgggtccagcggaggaagccccaccaaggccggggcccatctgctgcacggggtagaggggccgcggatcgggaagccggcggcgcggcggcggtcccgcgcgtcgcggcgcgcgcccgtgacgctgctgaacacggacacggccaacttccgtgccatggtgcagcagttcacgggcatccccgcgccccccgcgggggcgttcggggccccggtcatcaacttcgccgccgactacggcttcccgccgtcctcggccgccgtcatgtccttcgaccaccagctgcaccggagccagcaccccgcgccgctccaggagcagctccgcaggcagcagcagcagcagcagtacgccggcgcggcgtcgccattcggctatagcaacggcggcggcggcggcctgctgcaagacggcggcgacgtcttcgcccccgccgcctcccacgggttcgccgcgtcggcggaggagaggatgttcctgcagagcatccaggcggcccagatgccgcacatgcccgccgctaacactagcactaatggcttctttgcttgaccaaggctcgacgggcatccacgccacgtgcatggaatggaagcttgggaaggggaagcgaagattagcagcagccaaaaaaaaaagggtaatcagagtcagttaagtttctcctggttgtgtgtagttagtttgctcctccgcttgcttaattcgcgcagccttgtttctccgctggctgcagagacgatgtaaatatcttgtgtttctgaaaaaaaaaaaaaaaa

SEQ ID NO: 8644 - protein, 233 aa, Zea mays
  misc_feature: Ceres CLONE ID no. 1459953
  misc_feature: Ceres CDNA ID no. 25446784
  misc_feature (86)..(116): Pfam Name: VQ PFAM Desc: VQ motif
  misc_feature: Homolog of GI Number: 67984635 NR Desc: Exodeoxyribonuclease V
  misc_feature: Homolog of GI Number: 67985322 NR Desc: Prolyl
  misc_feature: Homolog of GI Number: 66776365 NR Desc: PE
  misc_feature: Homolog of GI Number: 67988281 NR Desc: N
  misc_feature: Homolog of GI Number: 56283929 NR Desc: CG3047
  misc_feature: Homolog of GI Number: 66776103 NR Desc: LigA
  misc_feature: Homolog of GI Number: 66779249 NR Desc: similar to ATP
  misc_feature: Homolog of GI Number: 66778899 NR Desc: UvrD/REP helicase
  misc_feature: Homolog of GI Number: 29247944 NR Desc: GLP_26_54603_52153
MAMSDTGSSFAQWAALYHHHHHDAGPVLLPPDDDAGTTAAAAAVASPTSGGSSGGSPTKAGAHLLHGVEGPRIGKPAARRRSRASRRAPVTLLNTDTANFRAMVQQFTGIPAPPAGAFGAPVINFAADYGFPPSSAAVMSFDHQLHRSQHPAPLQEQLRRQQQQQQYAGAASPFGYSNGGGGGLLQDGGDVFAPAASHGFAASAEERMFLQSIQAAQMPHMPAANTSTNGFFA

SEQ ID NO: 8645 - DNA, 593 bp, Zea mays
  misc_feature: Ceres CLONE ID no. 1460007
  misc_feature: Ceres CDNA ID no. 25445482
  CDS (61)..(459): REFERENCED BY SEQ ID NO: 8646
aacaccactacaccacaccttggacatatatatggaaaatagcttcacagtctagattccatggcatcaaggatggggatggtggctattctgtccttgtttgtttgtgctcttgttgcttcaacatctgtcaatgctaatgtgtggcagactgatgaggatgctttttatagtacaaataaactgggagtcaatggcaacatggagatggcacaacaacaaggtggatttattggccatcgcccaagacttgcattattcaatagggcatcaaaacaactggaccgtgaaaaaagacctgtgcctagcgggccagaccccatacatcacagcatcccatcacatgctcctcagcatccaccatcatatggcaaagctccttatgaagatgacaagagcatagcatctcctggtctgtccaacccgataggtcctccaccatttttagatagatactagttcatgcaaaagtagtgagtatttatgcacctatgccaatgaataacctctaattacctacatgtattggcctggtgtttggtaaacatgaagcaataactttctcttatcgaaaaaaaaaaaaaaaaaaaaaa

SEQ ID NO: 8646 - protein, 132 aa, Zea mays
  misc_feature: Ceres CLONE ID no. 1460007
  misc_feature: Ceres CDNA ID no. 25445482
  misc_feature: Homolog of GI Number: 2340957 NR Desc: ESR1c1
MASRMGMVAILSLFVCALVASTSVNANVWQTDEDAFYSTNKLGVNGNMEMAQQQGGFIGHRPRLALFNRASKQLDREKRPVPSGPDPIHHSIPSHAPQHPPSYGKAPYEDDKSIASPGLSNPIGPPPFLDRY

SEQ ID NO: 8647 - DNA, 610 bp, Zea mays
  misc_feature: Ceres CLONE ID no. 1460044
  misc_feature: Ceres CDNA ID no. 40351915
  CDS (30)..(296): REFERENCED BY SEQ ID NO: 8648
aactgccacgattcacaagaggtgtcgagatgtctcagaacaacccctcccagctcctcccctcagagctgatcgatcggtgcatcgggtccaagatctgggtgatcatgaagggggacaaggagctcgttggcaccctctgcggctttgatgtctacgtcaatatggtgctggaggacgtcaccgagtatgaatacactgctgaagggcgccgcattacaaaacttgaccagatcctcctaaacggcaacaacatagccattttggttcctggtggttcaccacccgatgtgtaatgagcttttgctccccagagtaaccattcgaggcgaaggcatctccatggactttgcacgttattttggcatggaagctgccttctgtatcgaacttactgacctgaagtagtgtgcttgcatagctgtggttatatgattggctatgctaattctgtgtatgtctgctcgccatcattgtactgcaatgtgaattccaggtaatggattatgcagtaacctgataactggaagtgcatcggttgcatttggcgttcgcttgtcagcattactgatttaagaaatcccatttctattcaaaaaaaaaaaaaaaa

SEQ ID NO: 8648 - protein, 88 aa, Zea mays; identical to SEQ ID NO: 346
  misc_feature: Ceres CLONE ID no. 1460044
  misc_feature: Ceres CDNA ID no. 40351915
  misc_feature (13)..(81): Pfam Name: LSM PFAM Desc: LSM domain

SEQ ID NO: 8649 - DNA, 567 bp, Zea mays
  misc_feature: Ceres CLONE ID no. 1460058
  misc_feature: Ceres CDNA ID no. 35383423
  CDS (90)..(401): REFERENCED BY SEQ ID NO: 8650
atctcatctcacacaccactactcatcttacctgacgcagttcactgctagccaattcacttctcgtaccaccaacctccctcgccaagatgtcgacggtgacccgcgcctacctcgaccagaggctcgccgccgccaagcgctgctccaaagaggctgccatggcgggagccaaggccgcggccgtcgccaccgtcgctgccgcagtccccacactggcgagcgtgaggatgctgccgtgggccaaggcgcacctgaaccccaccgggcaggccctcatcatctccactgtcgctgggatggcctacttcatcgtcgccgacaagaccatcctctccatggccaggaggcactccttcgaggacgcgccggagcacctcaagaacacctccttccactagttagatccattattagtaatgcccaatgaaccgtgtatgccaaagtgcatagcgtacagtgatcagcaaagggaggtcataatataattttcatcatgcaagtagccatgtacagcatcttttgagctagcaatactgaaagatgtacctaaaaaaaaaaaaaaaa

SEQ ID NO: 8650 - protein, 103 aa, Zea mays; identical to SEQ ID NO: 8132
  misc_feature: Ceres CLONE ID no. 1460058
  misc_feature: Ceres CDNA ID no. 35383423
  misc_feature (11)..(89): Pfam Name: ENOD93 PFAM Desc: Early nodulin 93 ENOD93 protein
  misc_feature: Homolog of GI Number: 50948739 NR Desc: putative early nodulin
  misc_feature: Homolog of GI Number: 50948751 NR Desc: putative early nodulin
  misc_feature: Homolog of GI Number: 50948749 NR Desc: putative early nodulin
  misc_feature: Homolog of GI Number: 50948755 NR Desc: putative early nodulin
  misc_feature: Homolog of GI Number: 50948737 NR Desc: putative early nodulin
  misc_feature: Homolog of GI Number: 50948753 NR Desc: putative early nodulin
  misc_feature: Homolog of GI Number: 4809191 NR Desc: early nodulin
  misc_feature: Homolog of GI Number: 218262 NR Desc: early nodulin
  misc_feature: Homolog of GI Number: 4731119 NR Desc: root
  misc_feature: Homolog of GI Number: 50948733 NR Desc: Similar to OsENOD93a gene for early nodulin

SEQ ID NO: 8651 - DNA, 918 bp, Zea mays
  misc_feature: Ceres CLONE ID no. 1460088
  misc_feature: Ceres CDNA ID no. 25401957
  CDS (117)..(602): REFERENCED BY SEQ ID NO: 8652
actgtatccatcccaccacaccagcaccacagccgctcagaccaaaccgcccctgaaagaaggcgcaaattgcagacgggtccacggatcgatccccaatcctccaggccgccgcgatgggcatctccagcatgccggcgcccaaggagagcctcctgatctacctgctctaccacgccgtcgtctcgatcgccgccctggcgggcctcctccgcgccgcgctcgtcttcctcggcctgcccgcgccgccgtcgctgctggccggcgaggacgccgacggtgccgaccagctcacggcggccaccccggcgggccccagcctggccgagaggttcaggagcaggttccgccccgcgcggttcggccgcaggcggggcgcggcggcggtgcctgactgccgcgtctgcctggtgcgcttcgaggcggacgccgtggtgaaccgcctcccctgtggccacctcttccaccgtgcctgcctcgagacctggctggactacgaccacgccacctgcccgctctgccgctcccgcctcctcccggccgccgcggccgccgacgagtcgtggtcgccgccggcccccaccctgacggcctggatttagggacgagtgaagagaagagaagagaagagagattcgccccgtcgcgtcgcccccggctatgtgctagctccgtgtgtggcctctccgtgtgcgcgtaggaatttagatggatcctagcagagggctctgctcctcgcctttcgcatttgccttttggtttcgttttctgtacgcctcgtgccatcgctgtaccgtgtaaatatttttcagcagagagcgctcctacgggtgtagcgctttgtgtgatgagaaatttgtgtacggccttcggctttttttacgagaaacggaaaattgatgaaaaaaaaaaaaaaaa

SEQ ID NO: 8652 - protein, 161 aa, Zea mays
  misc_feature: Ceres CLONE ID no. 1460088
  misc_feature: Ceres CDNA ID no. 25401957
  misc_feature (94)..(135): Pfam Name: zf PFAM Desc: Zinc finger
  misc_feature: Homolog of GI Number: 50947165 NR Desc: zinc finger protein family
  misc_feature: Homolog of GI Number: 20340241 NR Desc: putative RING zinc finger protein
  misc_feature: Homolog of GI Number: 12642858 NR Desc: putative RING zinc finger protein
  misc_feature: Homolog of GI Number: 76446335 NR Desc: RING
  misc_feature: Homolog of GI Number: 37901055 NR Desc: putative C3HC4
  misc_feature: Homolog of GI Number: 67987177 NR Desc: 4Fe
  misc_feature: Homolog of GI Number: 54306636 NR Desc: zinc finger family protein
  misc_feature: Homolog of GI Number: 25403249 NR Desc: protein F21J9.24
  misc_feature: Homolog of GI Number: 29247944 NR Desc: GLP_26_54603_52153
  misc_feature: Homolog of GI Number: 50928223 NR Desc: OSJNBa0064M23.12
MGISSMPAPKESLLIYLLYHAVVSIAALAGLLRAALVFLGLPAPPSLLAGEDADGADQLTAATPAGPSLAERFRSRFRPARFGRRRGAAAVPDCRVCLVRFEADAVVNRLPCGHLFHRACLETWLDYDHATCPLCRSRLLPAAAAADESWSPPAPTLTAWI

SEQ ID NO: 8653 - DNA, 676 bp, Zea mays
  misc_feature: Ceres CLONE ID no. 1460105
  misc_feature: Ceres CDNA ID no. 40351916
  CDS (28)..(480): REFERENCED BY SEQ ID NO: 8654
gaagtgaccttgctgtgatctttaacaatgtcgagaagaaagacgagagagcccaaggaggagacagtgacacttggaccagctgttcgcgatggagagcaagtcttcggtgttgtccacatcttcgcttccttcaacgacactttcattcacgttactgatttgtctggacgtgaaacccttgtccgtatcactggtggaatgaaggtgaaagctgatagggatgagtcctcaccttacgctgctatgcttgctgcgcaagatgttgctcagcgatgcaaggagcttggaatcaccgcaatgcacgtgaagctccgtgccactggtggaaacaagaccaagacacctggtcccggtgctcagtccgctctcagagctcttgcccgttccggcatgaaaattggccgcattgaggatgtgactccgatcccaacggacagtacccgccgaaagggtggtcgaagaggaaggaggctctgagttttctatggctatttaagcactcatgcgtttagaacaatgtttctttgagttttgtgaacgagtttcggattgaatgcttttttgttaaattgaacaacatatatctactgccattagtctatgtcctttgtgaatgacttcattggtgttatcattatcgtcaaaagtcgcttatacaaaaaaaaaaaaaaaa

SEQ ID NO: 8654 - protein, 150 aa, Zea mays
  misc_feature: Ceres CLONE ID no. 1460105
  misc_feature: Ceres CDNA ID no. 40351916
  misc_feature: The plant is abnormally large.
  misc_feature: Useful for making plants with modulated biomass
  misc_feature (28)..(146): Pfam Name: Ribosomal_S11 PFAM Desc: Ribosomal protein S11
MSRRKTREPKEETVTLGPAVRDGEQVFGVVHIFASFNDTFIHVTDLSGRETLVRITGGMKVKADRDESSPYAAMLAAQDVAQRCKELGITAMHVKLRATGGNKTKTPGPGAQSALRALARSGMKIGRIEDVTPIPTDSTRRKGGRRGRRL

SEQ ID NO: 8655 - DNA, 677 bp, Zea mays
  misc_feature: Ceres CLONE ID no. 1460129
  misc_feature: Ceres CDNA ID no. 36593682
  CDS (75)..(458): REFERENCED BY SEQ ID NO: 8656
cacgttgcccttctcttccccactcgcctccgctcaccttgcctcgatcgttccaggagtaataaaacactaaaatggcgatggcggcggcgaggagagcgctcctggcccacctccgcgtgccggtggtccaccctgcagcggcggcagcgaccatccccgcggcagggcggctcctgtcgtcgacgacggagacaaaggggtcgttcctcgacaagggcgaggtcgccgaccgtgtcgtctccgtcgtcaagaacttccagaaggttgaaccctcaaaggtgacacctagtgctcattttcagaaggaccttggacttgatagcctggacactgtggagatcgtgatggcgtttgaggaagaattttcctttgagattcctgacaacgatgcagagaagattgactccatcaagacagcggttgatttcattgcttcgcatcctcaagcaaaataagaggatttcttttttttcgtatttcaaagtgtgttttgcacttttgcatccagaactttatgcgacacgggactagttttatctagcttgccgcagtagataggaagtcatttctttacctttctgaatccgcgtgtaccaaacgattgttgtgttcttgtgacctcattggtacgctaatccataaatccatttgggcttcgaaaaaaaaaaaaaaaa

SEQ ID NO: 8656 - protein, 125 aa, Zea mays
  misc_feature: Ceres CLONE ID no. 1460129
  misc_feature: Ceres CDNA ID no. 36593682
  misc_feature (51)..(118): Pfam Name: PP PFAM Desc: Phosphopantetheine attachment site
  misc_feature: Homolog of GI Number: 21553376 NR Desc: acyl carrier protein
  misc_feature: Homolog of GI Number: 3335337 NR Desc: Similar to acyl carrier protein
  misc_feature: Homolog of GI Number: 34900336 NR Desc: putative acyl carrier protein
  misc_feature: Homolog of GI Number: 3341682 NR Desc: acyl carrier protein
  misc_feature: Homolog of GI Number: 16974477 NR Desc: At2g44620/F16B22.11
  misc_feature: Homolog of GI Number: 34485510 NR Desc: acyl carrier protein 1
  misc_feature: Homolog of GI Number: 58613403 NR Desc: mitochondrial acyl carrier protein
  misc_feature: Homolog of GI Number: 53801502 NR Desc: mitochondrial acyl carrier protein
  misc_feature: Homolog of GI Number: 73544177 NR Desc: acyl carrier protein
MAAARRALLAHLRVPVVHPAAAAATIPAAGRLLSSTTETKGSFLDKGEVADRVVSVVKNFQKVEPSKVTPSAHFQKDLGLDSLDTVEIVMAFEEEFSFEIPDNDAEKIDSIKTAVDFIASHPQAK

SEQ ID NO: 8657 - DNA, 758 bp, Zea mays
  misc_feature: Ceres CLONE ID no. 1460136
  misc_feature: Ceres CDNA ID no. 25445969
  CDS (72)..(467): REFERENCED BY SEQ ID NO: 8658
cactttccccacctcgcaggccaagcaaacgcacgccaggcgaggcagcacaaagaagcagcgaggcagccatgtcgtactacgaccggcgcggggagtcgtcggtgctggaggcgttcacgctgtcgccgctgccgtacccggtgatcctgatcctgatgatggtgacgctgctgctgggggcgtcgtggttcttctcctacgaggagttcatggaggaggcgtcggagcagttcagctggttcctgctgggcgtgcccatcgcgctcgtcctcctcatccgctggatctcctccgtcgacaccttcgagggctacttcggcttctaccccaccgagagccgctggcggggctacccggccgcgccctccgagggcagctccccctggggcgtcgccatggtcgtcctcctcctcctcgtcctcgccagcttccactccaccttccaggacatgtggaaggcttgatggaatgatcggttctccgatccatacctcgtacgtatgtgtgtatgtatgtgattccatcgtgtcgatctgtagtacgcctatgaatgattgattgttgcttccaggcggttgctgcacctgcacgtatgtatgccttgcttttcctcctgtactgtacatagatgatggaggttatattctgctagtagctaaaaactatagagcttgagtgttacccctctgtactggttcttgttctgtgtcttactgaatgaatcaataggtttctgttgaaaaaaaaaaaaaaaa

SEQ ID NO: 8658 - protein, 131 aa, Zea mays
  misc_feature: Ceres CLONE ID no. 1460136
  misc_feature: Ceres CDNA ID no. 25445969
  misc_feature: null
  misc_feature: Useful for making plants with modulated nitrogen use efficiency
MSYYDRRGESSVLEAFTLSPLPYPVILILMMVTLLLGASWFFSYEEFMEEASEQFSWFLLGVPIALVLLIRWISSVDTFEGYFGFYPTESRWRGYPAAPSEGSSPWGVAMVVLLLLVLASFHSTFQDMWKA

SEQ ID NO: 8659 - DNA, 654 bp, Zea mays
  misc_feature: Ceres CLONE ID no. 1460170
  misc_feature: Ceres CDNA ID no. 29191578
  CDS (70)..(438): REFERENCED BY SEQ ID NO: 8660
atttccctatccataaaaaacaaaaggcctccgcaaaccctaacctcaccggcggcggcggcggcagagatggaccccgactcagtggcgaaggcgttcgtcgagcactactaccgcacgttcgacaccaaccgggcggcgctggtggggctgtaccaggagggctccatgctctccttcgagggcgagaagttccagggagccgccgccatcgccaccaagctcacctccctccccttcaccaagtgcgtccacaccgtcgtcactgtcgactgccagcccgccggccccacgggcggtatgctcgtcttcgtctccggatccctccaagtcgacggcgagcaccacatcaagttctcccagatgttccacttgatgccactcggaccagggaacttctatgtgcacaacgacatgttccgcctgaactatggctaagaatcttaccagaggtcgtgcttccccatggaagacagaatgttctgcaaaacaaacaattcggttgtggtttttgtgtttgatggtgaaaaactttgtggtgctttcatgccaacagcttatgagatccaccggggatgaaacataacaaaacgccccgtattatgggtctgggtctgaaattgtatcgtggttattccaaaaaaaaaaaaaaaa

SEQ ID NO: 8660 - protein, 122 aa, Zea mays; identical to SEQ ID NO: 8262
  misc_feature: Ceres CLONE ID no. 1460170
  misc_feature: Ceres CDNA ID no. 29191578
  misc_feature (6)..(119): Pfam Name: NTF2 PFAM Desc: Nuclear transport factor 2
  misc_feature: Homolog of GI Number: 50947933 NR Desc: nuclear transport factor 2
  misc_feature: Homolog of GI Number: 12323001 NR Desc: nuclear transport factor 2
  misc_feature: Homolog of GI Number: 21555203 NR Desc: nuclear transport factor 2
  misc_feature: Homolog of GI Number: 18377444 NR Desc: similar to nuclear transport factor 2
  misc_feature: Homolog of GI Number: 34908774 NR Desc: putative Nuclear transport factor 2
  misc_feature: Homolog of GI Number: 25402667 NR Desc: protein T23J18.22
  misc_feature: Homolog of GI Number: 57228672 NR Desc: nuclear transport factor 2
  misc_feature: Homolog of GI Number: 45187886 NR Desc: ADR013Wp
  misc_feature: Homolog of GI Number: 46226690 NR Desc: similar to NTF2
  misc_feature: Homolog of GI Number: 62651812 NR Desc:  similar to Chain A
  misc_feature: Useful for delaying flowering time
  misc_feature: Useful for increasing chlorophyll and photosynthetic capacity
  misc_feature: Useful for making ornamental plants with modified leaves
  misc_feature: Useful for making plants with increased biomass and foliage
  misc_feature: Useful for making plants with increased biomass and foliage
  misc_feature: Useful for making plants with increased biomass and foliage
  misc_feature: Useful for making shorter plants

SEQ ID NO: 8661 - DNA, 775 bp, Zea mays
  misc_feature: Ceres CLONE ID no. 1460184
  misc_feature: Ceres CDNA ID no. 25892893
  CDS (46)..(579): REFERENCED BY SEQ ID NO: 8662
agagcgagagagcgaaagagtctagaaaaaagtgcagagaccaagatgttcttccacatagtattggagcgaaacatgcaattacacccacgattcttcggtcgcaacctccgtgagaatctcgtctctaagctcatgaaagatgtcgagggcacttgcagtggtcgacacgggttcgtagtggcgataacagggatagaaagtgtagggaaaggattgatccgagacgggactgccttcgtcactttccccgttaagtatcagtgcgttgtcttcaggcctttcaagggagagattttggaagctgttgtgactttggtgaataagatgggtttcttcgctgaagctggacctgttcagatctttgtgtccaagcatttgattccagatgatatggagtttcaggctggagacatgcctaattacaccacatctgatggatcggttaagatccagaaagaatgtgaagtgagactaaagattattggcacaagagtcgatgccactgaaatcttttgtgtgggtaccatcaaagacgattttttgggagtcatcaacgaccctgcagccgctgcataagcaaaagtttcaggcctagttcggttttggtccagaagatggcatgtgataaaagatgtatcatagaccatttacaagttgaaggttatggatatgtttaattcggaataatagtttaattttcattcgagtgtagttgactttgttcctatattataaacgtcttattgtgttagaaataaaaaaaaaaaaaaaa

SEQ ID NO: 8662 - protein, 177 aa, Zea mays
  misc_feature: Ceres CLONE ID no. 1460184
  misc_feature: Ceres CDNA ID no. 25892893
  misc_feature (1)..(77): Pfam Name: RNA_pol_Rpb7_N PFAM Desc: RNA polymerase Rpb7
  misc_feature (78)..(156): Pfam Name: S1 PFAM Desc: S1 RNA binding domain
  misc_feature: Homolog of GI Number: 28973525 NR Desc: putative RNA polymerase II
  misc_feature: Homolog of GI Number: 322700 NR Desc: RNA polymerase II fifth largest subunit
  misc_feature: Homolog of GI Number: 50878367 NR Desc: putative RNA polymerase II subunit 5
  misc_feature: Homolog of GI Number: 72013666 NR Desc:  similar to polymerase
  misc_feature: Homolog of GI Number: 66772833 NR Desc: IP02321p
  misc_feature: Homolog of GI Number: 62858849 NR Desc: POLR2G
  misc_feature: Homolog of GI Number: 62752835 NR Desc: polymerase
  misc_feature: Homolog of GI Number: 54639475 NR Desc: GA16051
  misc_feature: Homolog of GI Number: 66811466 NR Desc: RNA polymerase II core subunit
  misc_feature: Homolog of GI Number: 66540556 NR Desc:  similar to GA16051
MFFHIVLERNMQLHPRFFGRNLRENLVSKLMKDVEGTCSGRHGFVVAITGIESVGKGLIRDGTAFVTFPVKYQCVVFRPFKGEILEAVVTLVNKMGFFAEAGPVQIFVSKHLIPDDMEFQAGDMPNYTTSDGSVKIQKECEVRLKIIGTRVDATEIFCVGTIKDDFLGVINDPAAAA

SEQ ID NO: 8663 - DNA, 722 bp, Zea mays
  misc_feature: Ceres CLONE ID no. 1460200
  misc_feature: Ceres CDNA ID no. 40351917
  CDS (101)..(367): REFERENCED BY SEQ ID NO: 8664
gtacggtttattggcgtctcgctccgtctccgcactgtcctgttgcgccggccaccacagtgcagaagaacacacagcatccgcctgcctcgccgccgcaatggccgccgtggcgagatcctttctccggtccagcggctcatcgtccctccgcagcgcggcggccagagccgcctcgcgggccggaccggttccgctgccgaggcggatacccagttctgggccccgggtactcctaagcgtgtgcctggagtccctgatgcccatgcacagcgccacggcttcggcgctcatgacgtcgctactcgctgccccggcttgcaagggattgggttggctatcagaagctggtaatgatgacttgtgacactctctagatggaatgtagcagattattatcctgtcacctcagatctacaggcctgtggttagtgcgatggaggtcatctttgatgaggactagaccgcgtgctatttgttttgccctctgttgccttgattttgctcattataaatgaaacagagtaaatgtagctttcatcgttgtaacttttatgatgttagtttagagcttgagctgatgaactcagattattgtgtttctatttgtagatggatgatttgtcattattggagacctgcagtgatggtatctggtctggattatgcaatacctcgtgaatttatagtacttggttggcgtctcaaaaaaaaaaaaaaaa

SEQ ID NO: 8664 - protein, 88 aa, Zea mays
  misc_feature: Ceres CLONE ID no. 1460200
  misc_feature: Ceres CDNA ID no. 40351917
MAAVARSFLRSSGSSSLRSAAARAASRAGPVPLPRRIPSSGPRVLLSVCLESLMPMHSATASALMTSLLAAPACKGLGWLSEAGNDDL

SEQ ID NO: 8665 - DNA, 543 bp, Zea mays
  misc_feature: Ceres CLONE ID no. 1460216
  misc_feature: Ceres CDNA ID no. 36707119
  CDS (85)..(249): REFERENCED BY SEQ ID NO: 8666
atcatccaatccagtcgcctctttcagaagggaaagcagagagaaagaaaggagctagaaggcctcgagtgaagtgagcaagccatgggctcggcaacagtcctggaggtgatcctcgccatcatcctgcctcccgtcggcgtcttcctgcgctacaaactcggcgtggagttctggatctgtctcttgctgaccatactggggtacataccggggatcatctacgcggtgtacgtgctggtagtttaagcaacagcctctgctgcagggtccaggcttggacgagcgagtcgctgtgcaagagcaactgatgctgtctgtgttaagatagcatgtctttgtgtatgcttgtatgtattgaatattgcggatttcatttatttggggagctcggtattgtcgatcctgtgatgtcacgagtgtacgtagctcggggactttagggcattcgtcggctgtagtgtttgtgatcttaaatttaaagtattggatgtccaaatgatctttcggaagcaatcgaagttggaggtcaaaaaaaaaaaa

SEQ ID NO: 8666 - protein, 54 aa, Zea mays; identical to SEQ ID NO: 2696
  misc_feature: Ceres CLONE ID no. 1460216
  misc_feature: Ceres CDNA ID no. 36707119
  misc_feature (4)..(54): Pfam Name: UPF0057 PFAM Desc: Uncharacterized protein family UPF0057
  misc_feature: Homolog of GI Number: 13751167 NR Desc: putative membrane protein
  misc_feature: Homolog of GI Number: 13751169 NR Desc: putative membrane protein
  misc_feature: Homolog of GI Number: 50920613 NR Desc: Putative low
  misc_feature: Homolog of GI Number: 40549120 NR Desc: small hydrophobic protein 2
  misc_feature: Homolog of GI Number: 6714401 NR Desc: low temperature and salt responsive protein LTI6A
  misc_feature: Homolog of GI Number: 35186896 NR Desc: Clt1
  misc_feature: Homolog of GI Number: 40549118 NR Desc: small hydrophobic protein 1
  misc_feature: Homolog of GI Number: 50897020 NR Desc: plasma membrane protein 3
  misc_feature: Homolog of GI Number: 50939439 NR Desc: putative low temperature and salt responsive protein
  misc_feature: Homolog of GI Number: 32414287 NR Desc: predicted protein

SEQ ID NO: 8667 - DNA, 804 bp, Zea mays
  misc_feature: Ceres CLONE ID no. 1460308
  misc_feature: Ceres CDNA ID no. 36593696
  CDS (83)..(574): REFERENCED BY SEQ ID NO: 8668
accgcctacgtagaacccctccgctccttccagctcgctctctacctgcaccagcctcgcccgcccttcgctcgccgccgccatggggaggggaaagttcaagggaaagcccaccggccgccgcaacttctccacaccggaggagatcgctgctggtacttcaggtcgccctcgcacctttaagaagaaggaggaagaggaagaggaggaagaagaaagagaagagtcagaggaggaagaatctgaagacgagtctgatgacaaacctaaacataaaggtactgagggtattattcagattgaaaatccgaacttagtaaaagtgaagaatataaaggccaaggaagttgatcttggaaagacaactgaactctcaaggcgtgaaagggaggagcttgagaaacaaaaagctcatgaacgttatatgaaacttcaggagcaaggaaaaacagaacaagcacggaaagatttggaacgtcttgctttaataagacagcaaagggctgatgctgcaaagaaacgcgatgaggagaaagctgccaaggagcagaggaagtcggaagcacggaagtaactgcaatatcatggacgatgagaccacgaaggcatgatctgcgttagttggatatttatttctaatgcatcagttatcttgttataaacctggtccctattctgtatccccataaaatatgcattgacaaaattagtaacagtcttgtgggcgtgtcttcctgtaaacttgagcttgacaaaattagaaagtagtattaaggtcagcttatgctaaaaaaaaaaaaaaaa

SEQ ID NO: 8668 - protein, 163 aa, Zea mays
  misc_feature: Ceres CLONE ID no. 1460308
  misc_feature: Ceres CDNA ID no. 36593696
  misc_feature: Homolog of GI Number: 57899606 NR Desc: putative 28 kDa heat
  misc_feature: Homolog of GI Number: 34909600 NR Desc: P0435B05.20
  misc_feature: Homolog of GI Number: 82899800 NR Desc:  PDGFA associated protein 1
  misc_feature: Homolog of GI Number: 73958089 NR Desc:  similar to PDGFA associated protein 1
  misc_feature: Homolog of GI Number: 7657441 NR Desc: PDGFA associated protein 1
  misc_feature: Homolog of GI Number: 60653313 NR Desc: PDGFA associated protein 1
  misc_feature: Homolog of GI Number: 12018258 NR Desc: PDGFA associated protein 1
  misc_feature: Homolog of GI Number: 55628996 NR Desc:  similar to 28 kDa heat
MGRGKFKGKPTGRRNFSTPEEIAAGTSGRPRTFKKKEEEEEEEEEREESEEEESEDESDDKPKHKGTEGIIQIENPNLVKVKNIKAKEVDLGKTTELSRREREELEKQKAHERYMKLQEQGKTEQARKDLERLALIRQQRADAAKKRDEEKAAKEQRKSEARK

SEQ ID NO: 8669 - DNA, 742 bp, Zea mays
  misc_feature: Ceres CLONE ID no. 1460319
  misc_feature: Ceres CDNA ID no. 25445725
  CDS (85)..(312): REFERENCED BY SEQ ID NO: 8670
aggacaggttgcatttgcatctgagttcctgatcgttgtattccagtttcttccgtgagttttgtgggatcgcgaggaagaaggatgtcgtgctgcggaggcaactgcgggtgcggcgccggctgcaagtgcggcagcggctgcggagggtgcaagatgtacccggacatggctgagcaggtgaccaccacccagactctcatcatgggtgttgcaccatccaagggcgggttcgtggcggccgccggagctgagaacggcgggtgcaagtgcggcgccaactgcacctgcgacccctgcacctgcaagtgagacgacggcggcgatgacgctgcagggcgtgatggggtcctcggaaggactctttatctctagctaattaataagctctagtatataatattgtagcagtgtcgttttttgtgttttgttcgagtcagtcagacagtcagccgcgcgtgccatgggccatggcatagcatgcctcgctctatctgctccatcgccttgttctagtggtggtactgatgggggaacgaataattgtaccgagatgttggcgccgtgtcgtgtcgtgtccttcctggggctcatctagcactagcagtcagactgtgttgtgttgtgctgtgtgggccgagtgtgcagtacagcatcaggccatgccccctgttccatctgtgtgcgattttgtttgtgctgtgtcatctatctatctaactaatcaaaaaaaaaaaaaaaa

SEQ ID NO: 8670 - protein, 75 aa, Zea mays
  misc_feature: Ceres CLONE ID no. 1460319
  misc_feature: Ceres CDNA ID no. 25445725
  misc_feature (1)..(74): Pfam Name: Metallothio_2 PFAM Desc: Metallothionein
  misc_feature: Homolog of GI Number: 55416162 NR Desc: metallothionein
  misc_feature: Homolog of GI Number: 46358913 NR Desc: metallothionein
  misc_feature: Homolog of GI Number: 34895842 NR Desc: putative metallothionein
  misc_feature: Homolog of GI Number: 32400768 NR Desc: metallothionein
  misc_feature: Homolog of GI Number: 13774274 NR Desc: metallothionein
  misc_feature: Homolog of GI Number: 13491970 NR Desc: metallothionein
  misc_feature: Homolog of GI Number: 56549629 NR Desc: metallothionein
  misc_feature: Homolog of GI Number: 71040683 NR Desc: type 2 metallothionein
  misc_feature: Homolog of GI Number: 46850185 NR Desc: metallothionein 2a
  misc_feature: Homolog of GI Number: 74476676 NR Desc: type 2 metallothionein
MSCCGGNCGCGAGCKCGSGCGGCKMYPDMAEQVTTTQTLIMGVAPSKGGFVAAAGAENGGCKCGANCTCDPCTCK

SEQ ID NO: 8671 - DNA, 801 bp, Zea mays
  misc_feature: Ceres CLONE ID no. 1460326
  misc_feature: Ceres CDNA ID no. 29191579
  CDS (98)..(553): REFERENCED BY SEQ ID NO: 8672
acatcaagctagcagcactgcattaaactaatttgacagcgatcccgatccgtcacaactcacacgagacagtcgtcgttcgatccgtcgagcaagcatggcgcagctgatggacaaggccaaggggttcgtggcggagaagatatcgggggtgcagaagccggaggcggacctgtcggacatgtcggtgcagcacgtcggtcgcgacggcgccaccctgtccggccgcctcgacgtgcgcaacccctactcgcacaccatccccatctgcgagatcagctactccctcaagagcgccggccgcgacgtggcctccgggaccatgccggacccagggtcgctggtggccagcgacaccaccagcctcgacatacccgtgaaggtgccgtacgacttcctggtgagccttatgaaggacgccggcaaggactgggacctcgactacgagatgcgcgtcggcctcaccgtcgacctccccatcgtcggcaacttcacgctgccgctcaccaaggccggcgagctcaagctccccaccctctccgacctgttctaaacttaccgccgcacctagctagtaagttcgaccgtaccgtactagctgctgcgctctccatcgcctgtacgggtgatgggtagtactgggctgggcgagcgggacgatcgatcgctacctagctctgtttttacttcggatcgcggtgtgggtgtgcacgacgtaataatgatgtaatgcgtgttgtatttctagacttttcgtgaataaaataaacagacgagtttactgtaaaaaaaaaaaaaaaa

SEQ ID NO: 8672 - protein, 151 aa, Zea mays
  misc_feature: Ceres CLONE ID no. 1460326
  misc_feature: Ceres CDNA ID no. 29191579
  misc_feature (2)..(151): Pfam Name: LEA_2 PFAM Desc: Late embryogenesis abundant protein
  misc_feature: Homolog of GI Number: 61657604 NR Desc: dehydrin
  misc_feature: Homolog of GI Number: 34904186 NR Desc: putative late embryogenesis abundant protein LEA14
  misc_feature: Homolog of GI Number: 1170745 NR Desc: Late embryogenesis abundant protein Lea14
  misc_feature: Homolog of GI Number: 50932867 NR Desc: putative late embryogenesis abundant protein
  misc_feature: Homolog of GI Number: 7488659 NR Desc: desiccation protectant protein homolog
  misc_feature: Homolog of GI Number: 7595792 NR Desc: late
  misc_feature: Homolog of GI Number: 34912834 NR Desc: putative embryogenesis
  misc_feature: Homolog of GI Number: 4585271 NR Desc: seed maturation protein PM22
  misc_feature: Homolog of GI Number: 56554616 NR Desc: Chain A
  misc_feature: Homolog of GI Number: 5823249 NR Desc: water stress
  misc_feature: Useful for sterility
MAQLMDKAKGFVAEKISGVQKPEADLSDMSVQHVGRDGATLSGRLDVRNPYSHTIPICEISYSLKSAGRDVASGTMPDPGSLVASDTTSLDIPVKVPYDFLVSLMKDAGKDWDLDYEMRVGLTVDLPIVGNFTLPLTKAGELKLPTLSDLF

SEQ ID NO: 8673 - DNA, 854 bp, Zea mays
  misc_feature: Ceres CLONE ID no. 1460346
  misc_feature: Ceres CDNA ID no. 40351918
  CDS (8)..(589): REFERENCED BY SEQ ID NO: 8674
gtgaacgatgggctctctgtcggactcgcaggcgaatggcgaccgtcagccgccgccggcggaggcggaggatgctggggcgcaagtcgaggagggagatactggcgagaagatggagggcgtcgcgtccatagcgctgctgccctctggcgccatctccggccacttcatccgccttccggactccgcctgctacggcctccagggcaccccgataccatgcgagagggaatgtagccgaggagatgattaccgccttataaagctctccatcattaattttaagaggaagacagagaaggtggttgtggtggaatgcagggggcatgatgctgctcgattacaaaacattgaccatttgcatggatgggaagatgacgttgttggattggttcaaaagaaacatgggaataagaaagtcttggtctctttcgaatgcgagacgctgaaggccgataaagccgctgaagaacatattagcaagtatatgccaaatctttgcggactggacgcagttgtaaacacagggaagatgagcatctctggcatcaacctcgacgaggacgatgaaccaagcggtaacagctgagagcggaaacactgtgtcagtgtgttagctgcgagccgtcaatgccgtcgacaaaggaggaccacgtgtcgctgttacaacggcatgagttttatgcgacaaatcagcgcttctgtttctgcacttgaaacggtgcgctttgtagcagttctgtttctgcacttgaaacggtgcgctttgtagcaagtctcttaacggaatgtgtgtttgctgttgcttcatctggcatgatcctgatgagggaattacaaaaaaaaaaaaaaaa

SEQ ID NO: 8674 - protein, 193 aa, Zea mays
  misc_feature: Ceres CLONE ID no. 1460346
  misc_feature: Ceres CDNA ID no. 40351918
MGSLSDSQANGDRQPPPAEAEDAGAQVEEGDTGEKMEGVASIALLPSGAISGHFIRLPDSACYGLQGTPIPCERECSRGDDYRLIKLSIINFKRKTEKVVVVECRGHDAARLQNIDHLHGWEDDVVGLVQKKHGNKKVLVSFECETLKADKAAEEHISKYMPNLCGLDAVVNTGKMSISGINLDEDDEPSGNS

SEQ ID NO: 8675 - DNA, 960 bp, Zea mays
  misc_feature: Ceres CLONE ID no. 1460351
  misc_feature: Ceres CDNA ID no. 40351919
  CDS (107)..(634): REFERENCED BY SEQ ID NO: 8676
ctggtgacgcccccaatcgagccgagctcctcgcgattcccaatccccgcacgcctcctcctccggccccgccgccgcctcgccacaggctttacagttattcaagatggaacacaaggaggcgggttgccagcagccggagggcccaatcctatgtgttaataactgtggcttctttggcagcgccgcgaccatgaacatgtgctccaagtgccacaaggagatggtcatgaaggaggagcaggccaagctggctgcctcctccttcgatagcatcgtcaacggtggcgatggtgggaaagcacctgttgttgcggctgtggccgcgagcgcagaggtggcggttgctcaagttgacgtgaaggcgcttgttgtgcagcctgctgctgatgttgcaggcaccagcgaagctgttgccgtgagccccaagaggaaggaggggccgaatcggtgctcaacttgcaggaagagggttgggctgacgggattcaactgccgatgcggtaacatgtactgttcactgcatcgctattccgacaagcatgactgccagttcgactaccggactgcagctagggatgccatcgccaaggccaacccggtggtgaaggcagagaagctcgacaagatttaggtgtcctacagggaagaaatggttgcaatctgccaaggttcatcatccgtctttgctgtgccatccttgcacctccctttcttgttggctgccgcatttcctaaattgtacggcatcgtgatgcacactgcgtcgtggcggctgcaagaactcaatcctcagtattgtggtttgcgtgttgtgtaactttattcatggtggttttttcggtcagtattgtggcttctcattttagctagctctgttatgtactattgtcccatgtgtgttaaattctgatcagtaatagtagccagcaatggttcatcagaaaaaaaaaaaaaaaa

SEQ ID NO: 8676 - protein, 175 aa, Zea mays
  misc_feature: Ceres CLONE ID no. 1460351
  misc_feature: Ceres CDNA ID no. 40351919
  misc_feature (116)..(156): Pfam Name: zf PFAM Desc: AN1
  misc_feature (14)..(38): Pfam Name: zf PFAM Desc: A20
MEHKEAGCQQPEGPILCVNNCGFFGSAATMNMCSKCHKEMVMKEEQAKLAASSFDSIVNGGDGGKAPVVAAVAASAEVAVAQVDVKALVVQPAADVAGTSEAVAVSPKRKEGPNRCSTCRKRVGLTGFNCRCGNMYCSLHRYSDKHDCQFDYRTAARDAIAKANPVVKAEKLDKI

SEQ ID NO: 8677 - DNA, 923 bp, Zea mays
  misc_feature: Ceres CLONE ID no. 1460632
  misc_feature: Ceres CDNA ID no. 36707267
  CDS (26)..(556): REFERENCED BY SEQ ID NO: 8678
ccagtcgccatccgccgccgccgccatgccgggcttcgctcagcgtctcgcgggcatcccgtggcggagcatcgcgaggcaaggcctctcccgcgtgttcctggtggcgaaggcctactgcgtgatccacgtcgtcaacgaccacctctgctcggtgaccttagtgcggggcgccagcatgctgccgtccctgaacctggcgggcgacgcggtggcggtggacagggtcagcgtgaggctcggccgggtcgcgccgggggacatcgtgctgatgatctcccccgaggacccgcgcaagtcggtcgtcaagcgcgtcgtcgggatgcagggggactccgtcacctaccttgtcgaccccggcaaaagcgactcctcctccagaaccgtcgtggtaccgcaagatcatgtctgggtgcagggtgataatatctttgcttctcatgattcgaggcaatttggagccgtgccttatgggctgattacagggaagatcttttgccgggtttggccgccagagagttttggcgcaattgatgacgcaacgaagcagtcttaacgctgaggaggagccgaggaggtactgagagcacatggacccatattgttttgctcgcgcccagagattctataatagccaactgcagggggggcccttccttgagctcgagagctttcgacgacctaccgcagcgcatttctacagcgaagcaaagagcgttatgtgtcttgattgatgtcccgtgtttttatagttttggtgtgtgacaggttccgagatagtttttttttggtgatagtgcaagcctggtgggtttggcaactacactacaacttcacatgcttattcgaaacatttgaactgatttgtcagtcctcgttttgcagaagggcgtgtctgtttgtttatccaaaaaaaaaaaaaa

SEQ ID NO: 8678 - protein, 176 aa, Zea mays
  misc_feature: Ceres CLONE ID no. 1460632
  misc_feature: Ceres CDNA ID no. 36707267
  misc_feature (46)..(126): Pfam Name: Peptidase_S24 PFAM Desc: Peptidase S24
  misc_feature: Homolog of GI Number: 45773848 NR Desc: At1g53530
  misc_feature: Homolog of GI Number: 60543315 NR Desc: At1g23470
  misc_feature: Homolog of GI Number: 42571613 NR Desc: signal peptidase
  misc_feature: Homolog of GI Number: 4056468 NR Desc: Contains similarity to gbX66426 polygalacturonase from Persea americana
  misc_feature: Homolog of GI Number: 8778577 NR Desc: F28C11.10
  misc_feature: Homolog of GI Number: 8671873 NR Desc: Contains similarity to 17.6 KD class I heat shock protein from Arabidopsis thaliana giP13853
  misc_feature: Homolog of GI Number: 56515015 NR Desc: ubiquitin
  misc_feature: Homolog of GI Number: 56112072 NR Desc: signal peptidase
  misc_feature: Homolog of GI Number: 45188142 NR Desc: ADR269Cp
  misc_feature: Homolog of GI Number: 46397603 NR Desc: big signal peptidase
MPGFAQRLAGIPWRSIARQGLSRVFLVAKAYCVIHVVNDHLCSVTLVRGASMLPSLNLAGDAVAVDRVSVRLGRVAPGDIVLMISPEDPRKSVVKRVVGMQGDSVTYLVDPGKSDSSSRTVVVPQDHVWVQGDNIFASHDSRQFGAVPYGLITGKIFCRVWPPESFGAIDDATKQS

SEQ ID NO: 8679 - DNA, 847 bp, Zea mays
  misc_feature: Ceres CLONE ID no. 1460642
  misc_feature: Ceres CDNA ID no. 25401522
  CDS (27)..(680): REFERENCED BY SEQ ID NO: 8680
ccaatcactcgctcttctcaagaacaatggcgagaagaccggaagaagaatacgactacttgttcaaagtggttctcatcggagactccggcgtcggcaagtcgaatctcctctctagattcactcgcaacgagttctgcttggaatccaaatccaccatcggtgtcgaattcgccactcgtactctccaagtggaaggaaggacggtgaaagctcagatatgggacacggctgggcaagaacgatacagagccatcaccagcgcctactacagaggtgcgctcggtgcgctcttggtctacgacgtcaccaaaccaacaacgtttgagaacgttagccggtggttgaaagagctcagagaccatgctgattacaacatcgtcatcatgttgatcggaaacaagacagatctgaagcatctcagagctgttgctacagaggatgctcagagctacgcggagaaagaaggcttatctttcatcgagacgtcggctctcgaggcgttgaacgtggagaaggcctttcagacgattctctctgagatttacaggatcatcagcaagaaatcgatatcttcagaccaggcaagtgccaatgctaacgtcaaggaaggtcaaaccattgatgtcgctgcctcttctgaatcaaacactaagaagccttgttgctcttcttcctgaaaggggctttcacacttcgaagccactatgtatttccttttacggcttgcattgtgttgcactagctaaacaattgcaagtaatgtataactcgaggatcattccatatgaattgtgaatttcaaatgcaagtaaattattgtctttccttaaaaaaaaaaaaaaaa

SEQ ID NO: 8680 - protein, 217 aa, Zea mays
  misc_feature: Ceres CLONE ID no. 1460642
  misc_feature: Ceres CDNA ID no. 25401522
  misc_feature: null
  misc_feature: Useful for making plants with altered Lignin content
  misc_feature (8)..(173): Pfam Name: Arf PFAM Desc: ADP
  misc_feature: Homolog of GI Number: 21553810 NR Desc: putative RAS
  misc_feature: Homolog of GI Number: 50931085 NR Desc: putative GTP
  misc_feature: Homolog of GI Number: 50920025 NR Desc: putative GTP
  misc_feature: Homolog of GI Number: 974778 NR Desc: small G protein
  misc_feature: Homolog of GI Number: 1370146 NR Desc: RAB11C
  misc_feature: Homolog of GI Number: 34897394 NR Desc: Ras
  misc_feature: Homolog of GI Number: 1405561 NR Desc: FSGTP1
  misc_feature: Homolog of GI Number: 15222396 NR Desc: Ras
  misc_feature: Homolog of GI Number: 20465471 NR Desc: putative GTP
  misc_feature: Homolog of GI Number: 14532854 NR Desc: putative GTP
  misc_feature: Useful for sterility
  misc_feature: Utility: Cold Germination Useful for making plants with increased tolerance to cold stress
MARRPEEEYDYLFKVVLIGDSGVGKSNLLSRFTRNEFCLESKSTIGVEFATRTLQVEGRTVKAQIWDTAGQERYRAITSAYYRGALGALLVYDVTKPTTFENVSRWLKELRDHADYNIVIMLIGNKTDLKHLRAVATEDAQSYAEKEGLSFIETSALEALNVEKAFQTILSEIYRIISKKSISSDQASANANVKEGQTIDVAASSESNTKKPCCSSS

SEQ ID NO: 8681 - DNA, 1026 bp, Zea mays
  misc_feature: Ceres CLONE ID no. 1460793
  misc_feature: Ceres CDNA ID no. 29191580
  CDS (360)..(764): REFERENCED BY SEQ ID NO: 8682
attctcaggcccagaccaggcacatattccccgcatagagcccaggtgaccaaccaaacaggccctcccaccgccgctcccgattacttcagccgccggccgccgccactgccgccatccacggctagagcttctccgtcccctacccctatagaccgcgatctcctcctgaaccaccggccgggactgctgctccgcttgctctcccccgtcggagatcagcccggagcgactttcgtctttctgggtagtgcggacgctacagaaagcccaaacccggaaacagagaagacaacgccacatctacatttgcactcccacgcttaaagccggcggcggcggaggaagcagggacagccatggcgtcgtcgttggcaacggcaccggctgctgtacgcgatatgcagcgcgacctcgagtcccaggccaacgccctcagcaagatccagaaagacatctccaagaatcacgaggtccgcaagcagttcaccatccaggtcggcgagaatgaactcgtcctcaaggagctggagctgctgaatgaaggggcgaacgtgtacaagctgatcgggccagttttggtcaagcaggacaacgcggaggcgaaggccaacatcaagaagcgcatcgagtacatcacggctgagctaaagagaatggatcgggcgcttaaggacttggaggagaaacagaatagcaagaaggaattgataatcaagctgcaacagaagatgcaggctgtacaagcaaaggcgcaggcataaatgaagggctccctgcattagggcctttgtcctcccaaatgttgggtctagccttgtgttatctatcccctaaaaaggtgaaagaaatctgtagtgttcagagattgagagaagttcaaggtttgtgtagtgagagattttgtttgggagtggatacttggttgaagatgtacgtcttgctggtttctagtaatatgcttgaattgacttttattttgagaaggaattggatcaatcttttcatgcaaaaaaaaaaaaaaaa

SEQ ID NO: 8682 - protein, 134 aa, Zea mays
  misc_feature: Ceres CLONE ID no. 1460793
  misc_feature: Ceres CDNA ID no. 29191580
  misc_feature (20)..(125): Pfam Name: KE2 PFAM Desc: KE2 family protein
  misc_feature: Homolog of GI Number: 50906623 NR Desc: prefoldin
  misc_feature: Homolog of GI Number: 30691134 NR Desc: prefoldin
  misc_feature: Homolog of GI Number: 12324172 NR Desc: hydrophilic protein
  misc_feature: Homolog of GI Number: 61878681 NR Desc:  similar to MHC class II region expressed gene KE2
  misc_feature: Homolog of GI Number: 57209704 NR Desc: HLA class II region expressed gene KE2
  misc_feature: Homolog of GI Number: 62859569 NR Desc: LOC548662
  misc_feature: Homolog of GI Number: 54641000 NR Desc: GA20575
  misc_feature: Homolog of GI Number: 70876770 NR Desc: prefoldin subunit
  misc_feature: Homolog of GI Number: 71659208 NR Desc: prefoldin subunit
MASSLATAPAAVRDMQRDLESQANALSKIQKDISKNHEVRKQFTIQVGENELVLKELELLNEGANVYKLIGPVLVKQDNAEAKANIKKRIEYITAELKRMDRALKDLEEKQNSKKELIIKLQQKMQAVQAKAQA

SEQ ID NO: 8683 - DNA, 1184 bp, Zea mays
  misc_feature: Ceres CLONE ID no. 1460911
  misc_feature: Ceres CDNA ID no. 25446129
  CDS (261)..(914): REFERENCED BY SEQ ID NO: 8684
agccagctatgggccgctattgctcaaaagagtaaaaaaccagaaagcgacagggcagggagccagggcctctccgctcctgctcctgcagtcctgctctctctctctctcttggcgtcgattgggcgaccgccgccacctcccccaggtcttcgctgcgcccgtcgccggtgacgagcacccaccaggttcggaaacattgctgacattcacctgtaccacagtagttcagtagagtagctgtcggactcggaacacacatgccggcgatggcaactgctcctgtgaaattttctgtggctacgaactccccctgtgtccagcctagcttgcccctgaggcgtacacctgccaccatctccttcccctgtcgtccatggtcagccgcaatgacctcatgtactggattgttgaggcgctctgacgtggttgcagctgcggggcaccacaagttgatgggatctttgaccactaacgagggactcaggtttggggtggttgtggcgcggttcaatgaggttgtgacaaatttgttactacagggtgccctggaaactttcgagcgatactctgttaaagaagaaaatataacagttgttagtgttcccggaagctttgaggttcctataacagcacaaaagcttgggaaatctggaaaatttgatgcaattctgtgcattggagctgtgattagaggtgacacaacccactatgatgctgttgcaaactcagctgcatcaggtgtactcaatgctggattatctgctggtgttccttgtgtatttggtgttctaacctgtgaagacatggatcaggcgctaaaccgcgctggtggcaaggctggaaacaagggtgctgaaactgctcttactgccattgagatggcctctctgttccggcatcacttaggctgacactttgcgtatcctggtttctatacacgaggcaagacatcatttcttcctatcaagagtttcggctaatagagcttttccgccgcggctagtataattattttcaattctgttggtccggtgctgattggttgttttctttctgagatttgaaaagctcacgagacatgtttgtaaacctggcacaatgaataattgtcaccatgaacaaaatatggtcatgaataaggttgcacacttcatgaattgagaccaaaaaaaaaaaaaaaa

SEQ ID NO: 8684 - protein, 152 aa, Zea mays
  misc_feature: Ceres CLONE ID no. 1460911
  misc_feature: Ceres CDNA ID no. 25446129
  misc_feature (7)..(150): Pfam Name: DMRL_synthase PFAM Desc: 6
  misc_feature: Homolog of GI Number: 50925985 NR Desc: OSJNBa0067K08.17
  misc_feature: Homolog of GI Number: 20259133 NR Desc: putative 6
  misc_feature: Homolog of GI Number: 5532608 NR Desc: 6
  misc_feature: Homolog of GI Number: 33312438 NR Desc: 6
  misc_feature: Homolog of GI Number: 5532606 NR Desc: 6
  misc_feature: Homolog of GI Number: 9954993 NR Desc: Chain T
  misc_feature: Homolog of GI Number: 57158688 NR Desc: riboflavin synthase
  misc_feature: Homolog of GI Number: 1710405 NR Desc: 6
  misc_feature: Homolog of GI Number: 32034734 NR Desc: COG0054: Riboflavin synthase beta
  misc_feature: Homolog of GI Number: 33148500 NR Desc: 6
MGSLTTNEGLRFGVVVARFNEVVTNLLLQGALETFERYSVKEENITVVSVPGSFEVPITAQKLGKSGKFDAILCIGAVIRGDTTHYDAVANSAASGVLNAGLSAGVPCVFGVLTCEDMDQALNRAGGKAGNKGAETALTAIEMASLFRHHLG

SEQ ID NO: 8685 - DNA, 693 bp, Zea mays
  misc_feature: Ceres CLONE ID no. 1460918
  misc_feature: Ceres CDNA ID no. 25892894
  CDS (81)..(455): REFERENCED BY SEQ ID NO: 8686
acccattaacacacagcgagctcacctcagagagctccaagatcactagcgcgtgtccgttcaccctagaccaagaataaatgggcatccaggcgagccgcgccctcgccgcgctcctcctggcggcgctggccgccgcgaccccgcgcggcgcctcggcggtggtgcagtgcggccaggtgacgcagctgatggcgccctgcatgccgtacctcagcggcgcccccgggatgacgccctacggcatctgctgcaacagcctcggggtgctcaaccagctcgccgccaccacctccgaccgcatcgccgcctgcaactgcgtcaaggcggccgccagcggcttcccggccgtcgacttcagccgcgccgcggcgctccctgccgcctgcgggctcgccatcaacttcgccgtcacccccaacatggactgcaaccaggttacggatgaaccctgagatcggaccggagaaccacacgcacgcaacgtacacagaggaaaaacttaggtgttggactgaccaaaataaaatcagcaaagatagtactataagattgaatcaagggccttcaatcatgcatgtgccgcactgtttagttgattaatatataattcaattgttatcctgatgtattatttctgtgcttattggaataaagtatatgcatgctagtatgttaaaaaaaaaaaaaaaa

SEQ ID NO: 8686 - protein, 124 aa, Zea mays
  misc_feature: Ceres CLONE ID no. 1460918
  misc_feature: Ceres CDNA ID no. 25892894
  misc_feature (31)..(117): Pfam Name: Tryp_alpha_amyl PFAM Desc: Protease inhibitor/seed storage/LTP family
  misc_feature: Homolog of GI Number: 34904060 NR Desc: P0489G09.18
  misc_feature: Homolog of GI Number: 66271045 NR Desc: FSLTP2
  misc_feature: Homolog of GI Number: 11095210 NR Desc: lipid transfer protein 3 precursor
  misc_feature: Homolog of GI Number: 7012719 NR Desc: lipid transfer protein precursor
  misc_feature: Homolog of GI Number: 7012724 NR Desc: lipid transfer protein precursor
  misc_feature: Homolog of GI Number: 66271047 NR Desc: FSLTP3
  misc_feature: Homolog of GI Number: 7012722 NR Desc: lipid transfer protein precursor
  misc_feature: Homolog of GI Number: 510337 NR Desc: lipid transfer protein
  misc_feature: Homolog of GI Number: 7438281 NR Desc: probable lipid transfer protein precursor
  misc_feature: Homolog of GI Number: 28194084 NR Desc: lipid transfer protein isoform 1
MGIQASRALAALLLAALAAATPRGASAVVQCGQVTQLMAPCMPYLSGAPGMTPYGICCNSLGVLNQLAATTSDRIAACNCVKAAASGFPAVDFSRAAALPAACGLAINFAVTPNMDCNQVTDEP

SEQ ID NO: 8687 - DNA, 1114 bp, Glycine max
  misc_feature: Ceres CLONE ID no. 1461008
  misc_feature: Ceres CDNA ID no. 24726875
  CDS (97)..(873): REFERENCED BY SEQ ID NO: 8688
aaaaagcttagtactctttttttggtctctggagttacaccacagccacggagctctaggactgctcattaggtagttttttatttagaggctaacatgagctttgctgcgccatcacttggttctgctggtggtagatctgctagaaaagcatttgagtttgggagaacctatgttgtcaggcctaaaggtaaacaccaagcaactatagtctggttgcatggcctcggggataatggctccagttggtcccagctattagagacccttcctcttccaaatattaaatggatatgtccgactgctcctactcagccaatatctatatttggtggctttccgtccactgcttggtttgatgttggagatatttcagaagatgctcctgatgatctagaaggtttggatgcttctgctgcacatgttgcaaatttgctgtctacagaacctgcagacattaagcttggtgttggagggttcagtatgggagcagctactgccctgtactccgtgtcctgctttactgctggaaaatatgggaatggcaatccttatccggccaacctaagtgcagctgttggtttaagtggctggcttccatgctcaaagaccttgagtaacaagttacaaggggtagatgaagctacaaggcgtgctcagtcccttcctgttttgctgtgtcatggaaaagttgacgatgttgttccttataagtttggtgagaaatcatcgaagtgcttaagttcaactggatttcaggatgtaacttttaaagcttataatgggcttggacactacacaattccagaagagatggatgaggtttgtgcttggctaacatcaaaattgagccttgaggggaatacagtttagttagcaagcaaatgaagcaaactgtgaaaaataattcttttcgtttttggtccattgtaattttttgttattccagatttgcttagatttctgttgatggtatgcataatatatccgctacccattttgtgaacacttgagtctgagggaatcttcatgacaaggtactgttattgaaacaaaacatggtggttcttaaagcatggtgatggaatgctgctattatgctgaaaaaaaaaaa

SEQ ID NO: 8688 - protein, 258 aa, Glycine max
  misc_feature: Ceres CLONE ID no. 1461008
  misc_feature: Ceres CDNA ID no. 24726875
  misc_feature (22)..(251): Pfam Name: Abhydrolase_2 PFAM Desc: Phospholipase/Carboxylesterase
  misc_feature: Homolog of GI Number: 34910274 NR Desc: OSJNBa0089K24.24
  misc_feature: Homolog of GI Number: 29409364 NR Desc: biostress
  misc_feature: Homolog of GI Number: 34146820 NR Desc: At3g15650
  misc_feature: Homolog of GI Number: 42562707 NR Desc: phospholipase/carboxylesterase family protein
  misc_feature: Homolog of GI Number: 54290844 NR Desc: lysophospholipase 2
  misc_feature: Homolog of GI Number: 5903036 NR Desc: F6D8.5
  misc_feature: Homolog of GI Number: 28932772 NR Desc: FPh1
  misc_feature: Homolog of GI Number: 34912598 NR Desc: P0046B10.16
  misc_feature: Homolog of GI Number: 73950621 NR Desc:  similar to Acyl
  misc_feature: Homolog of GI Number: 15220962 NR Desc: acyl
MSFAAPSLGSAGGRSARKAFEFGRTYVVRPKGKHQATIVWLHGLGDNGSSWSQLLETLPLPNIKWICPTAPTQPISIFGGFPSTAWFDVGDISEDAPDDLEGLDASAAHVANLLSTEPADIKLGVGGFSMGAATALYSVSCFTAGKYGNGNPYPANLSAAVGLSGWLPCSKTLSNKLQGVDEATRRAQSLPVLLCHGKVDDVVPYKFGEKSSKCLSSTGFQDVTFKAYNGLGHYTIPEEMDEVCAWLTSKLSLEGNTV

SEQ ID NO: 8689 - DNA, 607 bp, Zea mays
  misc_feature: Ceres CLONE ID no. 1461124
  misc_feature: Ceres CDNA ID no. 25447012
  CDS (71)..(319): REFERENCED BY SEQ ID NO: 8690
acacacaccacaccagctatatccctccctcccccaacaccctgacatccgagctctagtcggtcgatccatggaggcttcacgcaggctcctctcggcggcgctcctcctcgtgctgctgctcgccgccacaggggagctgggagggccggtgatggtggcggaggcgcggacgtgcgagtcgaggagccacaggttcagggggccctgcgtgcgcaggtccaactgcgccaacgtctgcaagaccgagggcttccccgacggcaagtgccgcggattccgacgccgctgcttctgcaccacccactgccaccattaacaagcctctctcctccgggtgatgccttcttccgcctcggccttcagggtggcctttctgcgagcgtccgtgcgtgtgcgtgtccatgaataaatcttagcttgtctcggcaagctgggtgcgagtcccttgtttgttttttgtatgattattaccagtgtgcatgcgttgttgtttcttgttgggtttatgggattatcccggccggtcaatccttctctcatgtagtaagattttattttgggcaaatcatgaatgttgtatgcttgtccaaaaaaaaaaaaaaaa

SEQ ID NO: 8690 - protein, 82 aa, Zea mays
  misc_feature: Ceres CLONE ID no. 1461124
  misc_feature: Ceres CDNA ID no. 25447012
  misc_feature (34)..(80): Pfam Name: Gamma PFAM Desc: Gamma
  misc_feature: Homolog of GI Number: 32400845 NR Desc: proteinase inhibitor Rgpi9
  misc_feature: Homolog of GI Number: 50948925 NR Desc: ESTs AU069800
  misc_feature: Homolog of GI Number: 28624546 NR Desc: defensin protein 1
  misc_feature: Homolog of GI Number: 16225423 NR Desc: putative gamma
  misc_feature: Homolog of GI Number: 19310811 NR Desc: putative protease inhibitor II
  misc_feature: Homolog of GI Number: 13878185 NR Desc: putative protease inhibitor II
  misc_feature: Homolog of GI Number: 533692 NR Desc: protease inhibitor
  misc_feature: Homolog of GI Number: 8099184 NR Desc: defensin SD2
  misc_feature: Homolog of GI Number: 7488534 NR Desc: proteinase inhibitor II
  misc_feature: Homolog of GI Number: 7939581 NR Desc: thionin like protein
MEASRRLLSAALLLVLLLAATGELGGPVMVAEARTCESRSHRFRGPCVRRSNCANVCKTEGFPDGKCRGFRRRCFCTTHCHH

SEQ ID NO: 8691 - DNA, 708 bp, Glycine max
  misc_feature: Ceres CLONE ID no. 1461218
  misc_feature: Ceres CDNA ID no. 25402290
  CDS (18)..(386): REFERENCED BY SEQ ID NO: 8692
atatcaacgatagagagatggatccagacgcagtggccaaggctttcgtggagcactactacaccaccttcgacgcgaatcgcgcgggcttggtttctctctaccaggaaggatccatgctgaccttcgaagggcagaagatccagggctctcagaacatcgtcgccaagctcaccagcctccctttccagcagtgcaagcacaacatcaccaccgtcgattgccagccctctggtcccgccggcggtatgctcgtcttcgtctccggtaatctccagctcgctggtgaacagcacgctctcaagttcagccagatgttccatttggtgtcgaatcagggaaactactacgtgttcaacgacatattcaggttgaactatgcttgaggaatgtgttggcaggggtattatatgaaccattcttacaaaagccaaaagagactcatggaagttcatgttgggttttagtagatttgagaacataagcttgtttatggtgtttttgaagtctgtctttattttaatcaatggaaggtcttttgttactttggttcagatgactctgtgttcacatgattcagtaagtgcttattgttaaggataaaacaaaaagcttatttgaaagatggttctctgttggaacccttttcatgttaaaacaaactattctttagcaatttcttctgtactctcaaaaaaaaaaaaaaaa

SEQ ID NO: 8692 - protein, 122 aa, Glycine max
  misc_feature: Ceres CLONE ID no. 1461218
  misc_feature: Ceres CDNA ID no. 25402290
  misc_feature (6)..(119): Pfam Name: NTF2 PFAM Desc: Nuclear transport factor 2
  misc_feature: Homolog of GI Number: 18377444 NR Desc: similar to nuclear transport factor 2
  misc_feature: Homolog of GI Number: 12323001 NR Desc: nuclear transport factor 2
  misc_feature: Homolog of GI Number: 21555203 NR Desc: nuclear transport factor 2
  misc_feature: Homolog of GI Number: 50947933 NR Desc: nuclear transport factor 2
  misc_feature: Homolog of GI Number: 34908774 NR Desc: putative Nuclear transport factor 2
  misc_feature: Homolog of GI Number: 19114665 NR Desc: nuclear transport factor
  misc_feature: Homolog of GI Number: 45187886 NR Desc: ADR013Wp
  misc_feature: Homolog of GI Number: 25402667 NR Desc: protein T23J18.22
  misc_feature: Homolog of GI Number: 6320846 NR Desc: Ntf2p
  misc_feature: Homolog of GI Number: 66852210 NR Desc: nuclear transport factor 2
  misc_feature: Useful for delaying flowering time
  misc_feature: Useful for increasing chlorophyll and photosynthetic capacity
  misc_feature: Useful for making ornamental plants with modified leaves
  misc_feature: Useful for making plants with increased biomass and foliage
  misc_feature: Useful for making plants with increased biomass and foliage
  misc_feature: Useful for making plants with increased biomass and foliage
  misc_feature: Useful for making shorter plants
MDPDAVAKAFVEHYYTTFDANRAGLVSLYQEGSMLTFEGQKIQGSQNIVAKLTSLPFQQCKHNITTVDCQPSGPAGGMLVFVSGNLQLAGEQHALKFSQMFHLVSNQGNYYVFNDIFRLNYA

SEQ ID NO: 8693 - DNA, 1150 bp, Zea mays
  misc_feature: Ceres CLONE ID no. 1461253
  misc_feature: Ceres CDNA ID no. 36695231
  CDS (352)..(909): REFERENCED BY SEQ ID NO: 8694
gggtacatggtatcgggttacagtccaaacaggaaattctaaggccgatgaaagataaggatatgggtacagtcacccagtcctgccatgacgcgaaagcttatagaaatcaggtggcataaatactgtgcagggctaaaggttggtgggtcgaacggaccaggccatcaggttatctagaaagctctcatgctcttccatttctaggctagcctaggtctggaccaattaggcacgcaagtatcaatcgattcataagaggaggagaccattgagggagctagccaagtagaaggcagtcacggcaaacaacgaaagctggtgaacaactttgtcaagcctcaagagctcatggaagatggcagtgctccaagacggtctactccacccgcccgcagaagcagatctgccgagttccacaatttttcagaaaggaggagaagggataagatcaacgagaagctgaaagcattacaggagcttcttccaaactgcaacaagaccgacaaagtttcgatgctagacgaagcaatcgactacctaaaatcacttcagctacagcttcagatgctggtcatggggaagggaatgtcaccagtggttcctcttgagctgcagcaatacatgcattacatcacggctgaccctgcccagttgcctccgttgcgcccctccggccagcagcaccggcaatttcagataactcaagccaatccccagagacaatctaacgtcgagtcggatttcttgagccagatgcagaacttgcactcttctgagccgcctcagaactttctcaggccacccaaattgcaactttatacaccggaacagaggggtggcctacccagcacgagccacaacactggatggatttctgggagttcctcgtataacttcatggagtgatgtgctcctaatgacaaaatttgacacggcaggcgtgcagccttgtactgggaagagattattcagtttgggacctgcagcatggttcacctgagagaattccatgaatgtgtagtactagttagctagctagctagttgtgttattaaataaaacgttgtgattgtgatgctgctcattttgctatctgaatcttacggtacaattgtcctccatgttcatgctaaaaaaaaaaaaaaaa

SEQ ID NO: 8694 - protein, 185 aa, Zea mays
  misc_feature: Ceres CLONE ID no. 1461253
  misc_feature: Ceres CDNA ID no. 36695231
  misc_feature (19)..(68): Pfam Name: HLH PFAM Desc: Helix
  misc_feature: Homolog of GI Number: 50928761 NR Desc: OSJNBa0058K23.6
  misc_feature: Homolog of GI Number: 5852091 NR Desc: zwh14.1
  misc_feature: Homolog of GI Number: 30680903 NR Desc: basic helix
  misc_feature: Homolog of GI Number: 26051284 NR Desc: putative bHLH transcription factor
  misc_feature: Homolog of GI Number: 30689224 NR Desc: phytochrome
  misc_feature: Homolog of GI Number: 77556568 NR Desc: BP
  misc_feature: Homolog of GI Number: 77556567 NR Desc: BP
  misc_feature: Homolog of GI Number: 21068661 NR Desc: phytochrome interacting factor 4
  misc_feature: Homolog of GI Number: 56784181 NR Desc: putative BP
  misc_feature: Homolog of GI Number: 28372349 NR Desc: PIF3 like basic Helix Loop Helix protein
MEDGSAPRRSTPPARRSRSAEFHNFSERRRRDKINEKLKALQELLPNCNKTDKVSMLDEAIDYLKSLQLQLQMLVMGKGMSPVVPLELQQYMHYITADPAQLPPLRPSGQQHRQFQITQANPQRQSNVESDFLSQMQNLHSSEPPQNFLRPPKLQLYTPEQRGGLPSTSHNTGWISGSSSYNFME

SEQ ID NO: 8695 - DNA, 773 bp, Zea mays
  misc_feature: Ceres CLONE ID no. 1461265
  misc_feature: Ceres CDNA ID no. 25401815
  CDS (91)..(537): REFERENCED BY SEQ ID NO: 8696
accaaactcagagcattccgccgatccaccaccgccgccgccaacaccacacctcgagagtcctcgccgccggagaagcaggcaagcgagatggccgggaggaagggcggcgagaggaagaagtcggtgacccggtccgtgaaggccgggctccagttccccgtcggccgcatcgggcgcttcctcaagaagggccgctacgcgcagcgcgtcggctccggcgcccccgtctacctcgccgccgtcctcgagtacctcgccgccgaggtcctggagctggccggcaacgcggccaaggacaacaagaagacccgcatcgtgccgcggcacctgctgctggccgtccgcaacgaccaggagctcggcaggctgctcgccggcgtcaccatcgcccacggcggcgtgatccccaacatcaaccccgtgctgctccccaagaagtccgccgccgccgccgagaaggaggccaccaagtcgcccaagaagaaggccgccgccaagtcccccaagaagaagcccgccgccgccaaggagtagcctggcctactacgccgagggaccgtgtcgtgttgcctagttccatgtcttttggttagctggatcttgtatgtagcgcctggtctggagttgcaagctggtagtagtctgtagtgtagtggccctttcatcagatctcgatgagcaaggctggcatggcattgtgtctgtgatttactttctgggaatggctaaagaaagatgcaatcctttcaatcttaaaaaaaaaaaaaaaa

SEQ ID NO: 8696 - protein, 148 aa, Zea mays
  misc_feature: Ceres CLONE ID no. 1461265
  misc_feature: Ceres CDNA ID no. 25401815
  misc_feature (15)..(90): Pfam Name: Histone PFAM Desc: Core histone H2A/H2B/H3/H4
  misc_feature: Homolog of GI Number: 536890 NR Desc: protein H2A
  misc_feature: Homolog of GI Number: 536894 NR Desc: protein H2A
  misc_feature: Homolog of GI Number: 121965 NR Desc: Histone H2A.1
  misc_feature: Homolog of GI Number: 1325968 NR Desc: histone H2A
  misc_feature: Homolog of GI Number: 536888 NR Desc: protein H2A
  misc_feature: Homolog of GI Number: 121982 NR Desc: Histone H2A.2.2
  misc_feature: Homolog of GI Number: 121974 NR Desc: Histone H2A.2.1
  misc_feature: Homolog of GI Number: 34914498 NR Desc: putative histone H2A
  misc_feature: Homolog of GI Number: 122003 NR Desc: Histone H2A
  misc_feature: Homolog of GI Number: 50931693 NR Desc: putative histone H2A
MAGRKGGERKKSVTRSVKAGLQFPVGRIGRFLKKGRYAQRVGSGAPVYLAAVLEYLAAEVLELAGNAAKDNKKTRIVPRHLLLAVRNDQELGRLLAGVTIAHGGVIPNINPVLLPKKSAAAAEKEATKSPKKKAAAKSPKKKPAAAKE

SEQ ID NO: 8697 - DNA, 663 bp, Zea mays
  misc_feature: Ceres CLONE ID no. 1461388
  misc_feature: Ceres CDNA ID no. 40351920
  CDS (83)..(541): REFERENCED BY SEQ ID NO: 8698
tctttagttttgtgttctgaagagatcgtcactgcttgaagacgtcttgctgctttcgcgtatctcatctctgcaaatcacaatgtctttggtcgcaaatgaggagtttcagcatattctccgtgtgctgaacacaaatgttgatggtaagcagaagataatgttcgctcttacctctatcaaaggtattgggaggcgattggctaacatcgtctgcaagaaggctgatgtcgacatgaacaaaagggctggtgagttatcggcagctgaaatcgacaacctgatgacaattgtcgcaaatccaaaacagtacaagatcccagactggttcctgaacagacagaaagattacaaagacggaaagtactcccaagtcgtctccaatgcccttgacatgaagctcagggatgaccttgaacgtctcaagaaaatcaggaaccatcgtggtctgagacactactggggtctccgtgttcgtggacaacacaccaagaccaccggtcgcagaggaaagactgttggtgtgtcaaagaagcgttaagcaagcctattgttgttagttactactttattgaatatgcttcacaaggatcggttttgatttatgtttcttcttcgaactagtttttgagacaccttttgaatctaaaaaaaaaaaaaaaa

SEQ ID NO: 8698 - protein, 152 aa, Zea mays; identical to SEQ ID NO: 6138
  misc_feature: Ceres CLONE ID no. 1461388
  misc_feature: Ceres CDNA ID no. 40351920
  misc_feature (14)..(142): Pfam Name: Ribosomal_S13 PFAM Desc: Ribosomal protein S13/S18

SEQ ID NO: 8699 - DNA, 716 bp, Zea mays
  misc_feature: Ceres CLONE ID no. 1461389
  misc_feature: Ceres CDNA ID no. 40351921
  CDS (79)..(531): REFERENCED BY SEQ ID NO: 8700
aacagcgaacacatctcctcgcatttcttcccatccgatccccccttcgcaaccaaaaccccaactcgccccgcatcgatggcgcccaaggccgagaagaaacccgcggcgaagaagccggcggaggaggagcccgcggccgagaaggcgcccgccgggaagaagccgaaggcggagaagcgggtccccgctggcaagtccgctgccaaggaaggcggcgagggcaagaggggcaagaagaagggcaagaagagcgtggagacctacaagatctacatcttcaaggtgctgaagcaggtgcacccggacattggcatctcctccaaggccatgtccatcatgaactccttcattaacgatatcttcgagaagctcgctgctgaggccgccaagctcgcgcgctataacaagaagcctaccatcacctcccgtgagatccagacctccgtgcgcctcgtccttcccggggagctcgccaagcacgccgtctccgagggcaccaaggccgtcaccaagttcacctcggcctaggctgcgcggccgccgcttgcaggattctctcctgtgttcacgtctcttgctgtagttaggtgctgctgcctgctggcttctatgtatgttatctatctgtctgtagcaactgtgttatctgataggaccgtaatggtgcttattcaacccagctatatgtttctatgtgaaaaaaaaaaaaaaaa

SEQ ID NO: 8700 - protein, 150 aa, Zea mays; identical to SEQ ID NO: 6820
  misc_feature: Ceres CLONE ID no. 1461389
  misc_feature: Ceres CDNA ID no. 40351921
  misc_feature: No seed is being produced by the plant
  misc_feature: The plant flowers significantly late compared to wild-type.
  misc_feature: Useful for biocontainment applications
  misc_feature: Useful for making plants with modulated flowering time
  misc_feature (57)..(129): Pfam Name: Histone PFAM Desc: Core histone H2A/H2B/H3/H4

SEQ ID NO: 8701 - DNA, 670 bp, Zea mays
  misc_feature: Ceres CLONE ID no. 1461395
  misc_feature: Ceres CDNA ID no. 40351922
  CDS (155)..(526): REFERENCED BY SEQ ID NO: 8702
atctgagaactcagtctggagacgacccagcgtcccagctgctggccaactttcgcctttcttcgccatcatcgcctcctctcccattccttccttccttccttccttccttccacacgagagcctgccttttcccgatccgcatcgtcatcaaatgggccatcttttcctcctcctggtagccctcctcctgctcacctccacgcgtgccgccgccgccgtccacgccagagcttcggtcattgaggaggcgagcttcgctggcatcagaggcgtgatcggatccaggccgccgacctgcgaggggaggtgcaggtcctgtggccattgcgaggcagtgcaggtgcccgtatctccgcagcagcttcagaggaggaagaaggagggtctcggccttggcagagctgctgctgctgctgccaccggtggaagagcaagagcaatgccggcctcctactacgaccactccaactacaagcccctgagctggcgatgcaagtgtgggcggcacatcctggacccttgaaagatgaaacgccagcgctggtcgatcggaaccagtcttctgcgcttgtggatataatgtactaatagtacaggatcacttttgggtttggtgattgttttcatctttcctcttatattatgatcaagaaaaaaaaaaaaaaaa

SEQ ID NO: 8702 - protein, 123 aa, Zea mays
  misc_feature: Ceres CLONE ID no. 1461395
  misc_feature: Ceres CDNA ID no. 40351922
MGHLFLLLVALLLLTSTRAAAAVHARASVIEEASFAGIRGVIGSRPPTCEGRCRSCGHCEAVQVPVSPQQLQRRKKEGLGLGRAAAAAATGGRARAMPASYYDHSNYKPLSWRCKCGRHILDP

SEQ ID NO: 8703 - DNA, 563 bp, Zea mays
  misc_feature: Ceres CLONE ID no. 1461497
  misc_feature: Ceres CDNA ID no. 25446130
  CDS (199)..(375): REFERENCED BY SEQ ID NO: 8704
aaaagggtaaaaaaaggaaacgatactaaatcgtctagatctaaacgtggtttttttttaacaaaaatgggctaaaataaaaacatttcggtctcatctccgtccacatccgtcctccagcactccagctgcatcgacgaggaccgccgtagcgatttgcgaagcaagggacgggagaggaacccgaggaaggcgaaaatgatctaccgcaactggtcgctgctctcgtccacagtcgtcatttggggcggcgtcgccaccgccggcctcgccggtatcttcctcttgggcggcaaggagaaattcaatggttatctgtgccgcgaaggcgagaggcttaggcagcaggacagagccacgatgggccgaagctaagcgttagcttctttggtatctcaagggagcaatagcccttggaaatttcacaagattcctgcgtccctaccagaacaagtccctatctaggatggaatccatccttctgcaggctttcactttcctgataataacagtaacaataaattgacaatggtttgtgttcttctgcaaaaaaaaaaaaaaaa

SEQ ID NO: 8704 - protein, 58 aa, Zea mays
  misc_feature: Ceres CLONE ID no. 1461497
  misc_feature: Ceres CDNA ID no. 25446130
MIYRNWSLLSSTVVIWGGVATAGLAGIFLLGGKEKFNGYLCREGERLRQQDRATMGRS

SEQ ID NO: 8705 - DNA, 719 bp, Zea mays
  misc_feature: Ceres CLONE ID no. 1461499
  misc_feature: Ceres CDNA ID no. 40351923
  CDS (88)..(546): REFERENCED BY SEQ ID NO: 8706
aaaccctagacgcgaacgcacctcctcccttcctgcccccgaccgccccagccgccgccgccgtcgccgccgccgccgactgcagccatgtcgctgatcgcgggtgaggagttccagcacatcctgcgtgtgctcaacaccaacgtcgatggtaagcagaagatcatgttcgcgctgacctccatcaagggtgtgggccgccgcttctccaacatcgtctgcaagaaggccgacatcgacatgaacaagagggccggagagctttccgcggaggagatggaccgtctgatggcggtggtgcacaacccgcgccagttcaaggtgccggattggttcctcaacaggaagaaggattacaaggacgggaggttctcccaggtcgtgtccaacgccgtggacatgaagctcagggatgaccttgagaggctcaagaagatcaggaaccatcgcggtctgcggcactactggggcgtgcgtgtccgtggtcagcacaccaagactacaggcaggagaggaaagactgttggtgtctccaagaagcgataagctgcttgacaaagatcctgcatagctttgtattactgtgttggtccatttccagaatcttaaggagtgttcttgtttagatgattaccttggatgatgttttgccctagataatgttttggttctggaacctttaatatattgtatcttgaattccaaaaaaaaaaaaaaaa

SEQ ID NO: 8706 - protein, 152 aa, Zea mays; identical to SEQ ID NO: 2664
  misc_feature: Ceres CLONE ID no. 1461499
  misc_feature: Ceres CDNA ID no. 40351923
  misc_feature (14)..(142): Pfam Name: Ribosomal_S13 PFAM Desc: Ribosomal protein S13/S18

SEQ ID NO: 8707 - DNA, 797 bp, Zea mays
  misc_feature: Ceres CLONE ID no. 1461728
  misc_feature: Ceres CDNA ID no. 40351924
  CDS (189)..(581): REFERENCED BY SEQ ID NO: 8708
ctccctcctccggttctgcccctgcgccgagtccccttctaacccgcctctccgcccccatatttttctcctgcgccaccggatctccaacccgctctttcttctgtctggatccgtgcctgtgatttctgcttgcatatctactgcaagattccttgcagccggcaggtttttgacaggaaccagtaatggcggggaggtccaatatcccggcgaacaactccgccctcatcgccatcatcgccgatgaggacactgtcactgggtttttgatggctggggttggcaatgttgatctgcgcaagaaaacaaattaccttcttgtagataacaaaacgacagtgaaacagattgaagatgcatttaaagagtttactgcaagggaggatattgctattgtgctcatcagccaatatattgcaaacatgattaggtttctggtggatagctacaacaagccaatccctgcgatattggaaattccatccaaggaccatccatatgatccagcgagtgactcggtcctttctcgtgtgaaatatctgttttctgctgactcggttgcttctgataggcgttgagtagcaaccttgtgataacaggggcatcacactttgattgagttcttcgtggacttgctccgtgtatctgtattaaattattcataccattctgttgtgggcgcacgaataaggagtaaacaatttggattggaccaacgggttaatgtaataaattcttactttttttggagtttgtatctaagaacaagggaaacaggaaaaaaaaaaaaaaaa

SEQ ID NO: 8708 - protein, 130 aa, Zea mays
  misc_feature: Ceres CLONE ID no. 1461728
  misc_feature: Ceres CDNA ID no. 40351924
  misc_feature (15)..(115): Pfam Name: ATP PFAM Desc: ATP synthase
MAGRSNIPANNSALIAIIADEDTVTGFLMAGVGNVDLRKKTNYLLVDNKTTVKQIEDAFKEFTAREDIAIVLISQYIANMIRFLVDSYNKPIPAILEIPSKDHPYDPASDSVLSRVKYLFSADSVASDRR

SEQ ID NO: 8709 - DNA, 1025 bp, Zea mays
  misc_feature: Ceres CLONE ID no. 1461823
  misc_feature: Ceres CDNA ID no. 40351925
  CDS (391)..(945): REFERENCED BY SEQ ID NO: 8710
tgtttatctgcagtttgtaaattgtgatttacgtgtatctcagcgatcaagaattgctttggtgctaacagttggagtctctttgatcagaatggaacctcaccttactttggctgcattgttggtcgagttgcaaatagaatcaaggatggaaagttcactctaaatggggtgcagtacaatctgagtatcaacaacccacctaacactcttcatggtgggtttaaagggtttgacaaaactatatgggaagttgccgagtataacaaaggggacaagccctcaatcaccttcaagtattacagtaaagatggagaggaaggttacccaggtgatgtttctgtcactgcgagatactcgcttctcccaagcgcgacactgaagcttgagatggaagctataccactgaacaaggccacacccatcagcctagcacagcacacctactggaacctggcaggccacagctcaggagacgtgctctcgcactcggtccagatctggggctctcagataaccccggtagaccagacctcaatacctacaggcgagctcatgccagtgactggcacccccttcgattttctgaccgggaccaggatcggaagcaggatcgaccgggtccccggcggttacgatcacaactacatgctcgactccggcgaagtgaggtcaggcctgcggcatgtggcgcacgtcgtggacccgtccagctcgagggccctggacatctgggccgacgcgcctggcgtgcagttctacaccggaaattctcttggtggcgtcgtgggcaaaacaggcgcggtctatgggaagcacgctagcctctgcctcgagacgcagggtttccccaacgctgttaaccagccgagctttccctcggtcgtgtttggccccggtgagaggtacagccatacgatgctgttcgagctctctaccgagtgagtcatgtagcccgtctgcccgtgtagatagatagatatacaccgtttttaaaaaaaaaaaaaaaaaaaaaaaaaaaaaaa

SEQ ID NO: 8710 - protein, 184 aa, Zea mays
  misc_feature: Ceres CLONE ID no. 1461823
  misc_feature: Ceres CDNA ID no. 40351925
  misc_feature (2)..(180): Pfam Name: Aldose_epim PFAM Desc: Aldose 1
MEAIPLNKATPISLAQHTYWNLAGHSSGDVLSHSVQIWGSQITPVDQTSIPTGELMPVTGTPFDFLTGTRIGSRIDRVPGGYDHNYMLDSGEVRSGLRHVAHVVDPSSSRALDIWADAPGVQFYTGNSLGGVVGKTGAVYGKHASLCLETQGFPNAVNQPSFPSVVFGPGERYSHTMLFELSTE

SEQ ID NO: 8711 - DNA, 651 bp, Zea mays
  misc_feature: Ceres CLONE ID no. 1462098
  misc_feature: Ceres CDNA ID no. 40351926
  CDS (88)..(492): REFERENCED BY SEQ ID NO: 8712
aatgcggtttcgtatttttttgctgcgaagtgcgaaggaccaactctttcgaagggaaattatatctcaggtgcttaggagtctgccatggccagcgagaataaggtatttaggttcgaggaagtcgccaagcacaacgtcaccaaggactgctggatcatcatcgccggcaaggtgtatgatgtcactccttttatggatgagcatcctggtggagatgaggttttgctagctgtaactgggaaagatgctacagctgattttgaagatattggccacagtgattccgcaagggacatgatggagaagtaccacatcgggcagatagatgcttcaacaatcccagcaaagcgaacttatgtgcacccccagcaagcgcccagccactcagacaagaataatgatctcctcatcaagatcctgcagttccttgtgcccattatgatcctgggccttgcatttggtatacgtcagtacaccaaatcagagtagtactgttcttgaagacttgcctttggagtctgttttatggtaatggtttggatgagaacagttcagtaattgcttagtgtatttgtcaggtggatgttatctcattggtcatatactatgtattatggacatccatgtgttgccgaaaaaaaaaaaaaa

SEQ ID NO: 8712 - protein, 134 aa, Zea mays
  misc_feature: Ceres CLONE ID no. 1462098
  misc_feature: Ceres CDNA ID no. 40351926
  misc_feature (7)..(81): Pfam Name: Cyt PFAM Desc: Cytochrome b5
MASENKVFRFEEVAKHNVTKDCWIIIAGKVYDVTPFMDEHPGGDEVLLAVTGKDATADFEDIGHSDSARDMMEKYHIGQIDASTIPAKRTYVHPQQAPSHSDKNNDLLIKILQFLVPIMILGLAFGIRQYTKSE

SEQ ID NO: 8713 - DNA, 663 bp, Zea mays
  misc_feature: Ceres CLONE ID no. 1462127
  misc_feature: Ceres CDNA ID no. 36706814
  CDS (65)..(514): REFERENCED BY SEQ ID NO: 8714
ctccgacggcgccgacaaaaccagaccatcaaacaagtgccagcgccctctcgcagtcgccgcaatggagagcaccttcatcatgatcaagcctgacggcgtccagaggggcctcattggtgagatcatcagccgttttgagaagaagggcttctacctcaaggccttgaagcttgtgaacgtggagaggtcgtttgctgagaagcactacgccgatctcgcctccaagcccttcttccagggcctcgtggactacatcatctctggccctgtggtggccatggtctgggagggcaagagcgtcgtcacaactggccgcaagatcattggcgccaccaaccccctggcttctgagcccggcaccatccgtggcgactttgctgtcgacattggcaggaatgtcattcatggaagtgacagcattgagagtgctaataaggagattgccctgtggttccccgagggccctgctgattggcagagcagccagcacccctggatctacgagaagtaaacatggaaagtttcacatcaaaccttgagagccagaggaagcatgtcaccatttgtgctttagcaatgttttcgaaaagattatgatctgtatcttggaaccttatttcaatggaccaaatttctttctttgcaaaaaaaaaaaaaaaa

SEQ ID NO: 8714 - protein, 149 aa, Zea mays
  misc_feature: Ceres CLONE ID no. 1462127
  misc_feature: Ceres CDNA ID no. 36706814
  misc_feature (2)..(134): Pfam Name: NDK PFAM Desc: Nucleoside diphosphate kinase
  misc_feature: Homolog of GI Number: 1777930 NR Desc: nucleoside diphosphate kinase
  misc_feature: Homolog of GI Number: 37536898 NR Desc: putative nucleoside diphosphate kinase
  misc_feature: Homolog of GI Number: 1389640 NR Desc: PNDKN1
  misc_feature: Homolog of GI Number: 296174 NR Desc: nucleoside
  misc_feature: Homolog of GI Number: 1236951 NR Desc: nucleoside diphosphate kinase
  misc_feature: Homolog of GI Number: 9652119 NR Desc: nucleoside diphosphate kinase
  misc_feature: Homolog of GI Number: 71040669 NR Desc: nucleoside diphosphate kinase I
  misc_feature: Homolog of GI Number: 18413214 NR Desc: nucleoside diphosphate kinase 1
  misc_feature: Homolog of GI Number: 7267574 NR Desc: nucleoside
  misc_feature: Homolog of GI Number: 26245403 NR Desc: nucleoside diphosphate kinase
MESTFIMIKPDGVQRGLIGEIISRFEKKGFYLKALKLVNVERSFAEKHYADLASKPFFQGLVDYIISGPVVAMVWEGKSVVTTGRKIIGATNPLASEPGTIRGDFAVDIGRNVIHGSDSIESANKEIALWFPEGPADWQSSQHPWIYEK

SEQ ID NO: 8715 - DNA, 595 bp, Zea mays
  misc_feature: Ceres CLONE ID no. 1462150
  misc_feature: Ceres CDNA ID no. 25401524
  CDS (86)..(331): REFERENCED BY SEQ ID NO: 8716
atcgcgagatcgaccatcatcacagatcatccacagagaccatcttccgtgtaagagacaagagagtgggagagaggggggatatatggcagacatcgcgttgctggtgacggagcagttcgacaagaagctgaagcgaggcgcccccggcgaggacatcggcggcggcgccggcgaatataggaggaacttcggggccgtggccaaggtgtggagctcgtgggtggagtccgccgccgtcgcgtccggggtgaggttcagcgtcgcggtgcacctggagcccaagaccgcgctcgccctggccgccgccgacggcctcttctccgcctagctagctagctagctactagtgtcgcctagctgcttccaggcccttctcctgagtgagcagcagtagtcgagttcttctggaccatataatacaatgcgcggttcacctgtacattcattcttcgcttctcctgcgctcattgatatgcgcattctgcttgattgttttctccttgtcgtgacgttttttttttgtatgctcgaacgacaatcgctgtgctactacgaacacccagcgcttcacaggttaaaaaaaaaaaaaaaa

SEQ ID NO: 8716 - protein, 81 aa, Zea mays
  misc_feature: Ceres CLONE ID no. 1462150
  misc_feature: Ceres CDNA ID no. 25401524
  misc_feature: Homolog of GI Number: 7638400 NR Desc: OSE3
  misc_feature: Homolog of GI Number: 7249267 NR Desc: leucine zipper protein
  misc_feature: Homolog of GI Number: 7489465 NR Desc: DNA binding protein
MADIALLVTEQFDKKLKRGAPGEDIGGGAGEYRRNFGAVAKVWSSWVESAAVASGVRFSVAVHLEPKTALALAAADGLFSA

SEQ ID NO: 8717 - DNA, 798 bp, Zea mays
  misc_feature: Ceres CLONE ID no. 1462180
  misc_feature: Ceres CDNA ID no. 36593510
  CDS (91)..(522): REFERENCED BY SEQ ID NO: 8718
aaaccctccagacctgccgccgccgccccctgcaccaaccagcgccctgccgccgccgccgccggagaaggagagggagcagccgcagccatgggtcgcgtccgcaccaagaccgtgaagaagacctcccgccaggtcatcgagaagtactattctcggatgaccctcgacttccacaccaacaagaaggtgctcgaggaggtctccatcctccagtcgaagcgcctccgcaacaaggtggccggcttcaccacccatctgatgcgccgcatccagcgcggccccgtgcgcggcatctccctcaagctgcaggaggaggagcgtgagcgccgcatggacttcgtgccggagaagtcggcgctcgaggtcgacgagatccgcgtcgacaaggagaccatggacatgctggcgttcctcggcatggccgacctccccggcgtcgagcgcgcccccgaagtcacctcctccgccgccccctaccgccagccgttcaacgggccccgtggtggcaaccgcgcctaggttcctccgcatcgtcgtcgtacccctatattatgctttatgtcatttagatctgttacttgtggcaagtaatgttttgaactcagagcttaagttcgaggtgttttgatctgcgtatggtggacatgatctgtttatctcaccgtttatctgaagtgattcgatatattactgtttttctttgaagtttatgctcgttactagatgattgattgatttatgatctatctacatattgttaattatatatatgtatatccaaaaaaaaaaaaaaaa

SEQ ID NO: 8718 - protein, 143 aa, Zea mays
  misc_feature: Ceres CLONE ID no. 1462180
  misc_feature: Ceres CDNA ID no. 36593510
  misc_feature (2)..(122): Pfam Name: Ribosomal_S17e PFAM Desc: Ribosomal S17
  misc_feature: Homolog of GI Number: 31432043 NR Desc: contains similarity to 40S ribosomal protein S17
  misc_feature: Homolog of GI Number: 50916209 NR Desc: Putative 40S ribosomal protein S17
  misc_feature: Homolog of GI Number: 23507769 NR Desc: At5g04800/MUK11_12
  misc_feature: Homolog of GI Number: 21593447 NR Desc: 40S ribosomal protein S17
  misc_feature: Homolog of GI Number: 8567795 NR Desc: 40S ribosomal protein S17
  misc_feature: Homolog of GI Number: 21595522 NR Desc: 40S ribosomal protein S17
  misc_feature: Homolog of GI Number: 25295117 NR Desc: 40S ribosomal protein S17
  misc_feature: Homolog of GI Number: 30102846 NR Desc: At2g05220
  misc_feature: Homolog of GI Number: 5758304 NR Desc: 40S ribosomal protein S17
  misc_feature: Homolog of GI Number: 76573345 NR Desc: 40S ribosomal protein S17
MGRVRTKTVKKTSRQVIEKYYSRMTLDFHTNKKVLEEVSILQSKRLRNKVAGFTTHLMRRIQRGPVRGISLKLQEEERERRMDFVPEKSALEVDEIRVDKETMDMLAFLGMADLPGVERAPEVTSSAAPYRQPFNGPRGGNRA

SEQ ID NO: 8719 - DNA, 739 bp, Zea mays
  misc_feature: Ceres CLONE ID no. 1462224
  misc_feature: Ceres CDNA ID no. 36706558
  CDS (59)..(607): REFERENCED BY SEQ ID NO: 8720
ttttttcgattccagctttcccttcccggccggagttctctcgcaacccgaatcccaaatggcgtcggagaagaagctatcgaatccaatgagggacatcaaagtgcagaagcttgtcctcaacatctccgtcggtgagagtggagatcgtctcaccagagcctccaaggtcttggaacagttgagtggccagactcctgttttctccaaagcgagatacactgttcgttctttcggtatcagacgtaacgagaagattgcttgctacgtcaccgtcaggggagacaaggcaatgcaactccttgaaagtggactcaaggttaaagagtatgagctcttgagaaggaactttagcgacactggttgcttcggtttcggtattcaggagcacattgatttgggtatcaagtatgacccgtcgactggaatctacggtatggatttctatgttgttcttgagcgtcctggttaccgtgtggcgcgtcgcagaagatgcaaggctcgtgttggtatccagcacagagtcaccaaagatgatgccatgaaatggttccaagttaagtatgaaggagtcatcctcaacaagtctcagaacattactggttgaaaccatctgtctcgaacagagatctataaactgtgtttttgtttgtcccctcggctcgaatcttgttttgttttgcttttatgttctctatacatttgaatatcattcttgcctctaaaaaaaaaaaaaaaa

SEQ ID NO: 8720 - protein, 182 aa, Zea mays; identical to SEQ ID NO: 8098
  misc_feature: Ceres CLONE ID no. 1462224
  misc_feature: Ceres CDNA ID no. 36706558
  misc_feature (66)..(165): Pfam Name: Ribosomal_L5_C PFAM Desc: ribosomal L5P family C
  misc_feature (9)..(62): Pfam Name: Ribosomal_L5 PFAM Desc: Ribosomal protein L5
  misc_feature: Homolog of GI Number: 21542441 NR Desc: 60S ribosomal protein L11
  misc_feature: Homolog of GI Number: 624938 NR Desc: ribosomal protein L16
  misc_feature: Homolog of GI Number: 12642874 NR Desc: putative ribosomal protein L11
  misc_feature: Homolog of GI Number: 550544 NR Desc: ribosomal protein L16
  misc_feature: Homolog of GI Number: 7268667 NR Desc: ribosomal protein L11
  misc_feature: Homolog of GI Number: 24817256 NR Desc: ribosomal protein RL5
  misc_feature: Homolog of GI Number: 47027024 NR Desc: 60S ribosomal protein L11
  misc_feature: Homolog of GI Number: 463252 NR Desc: RL5 ribosomal protein
  misc_feature: Homolog of GI Number: 10799832 NR Desc: ribosomal protein L11
  misc_feature: Homolog of GI Number: 78191444 NR Desc: ribosomal protein L11

SEQ ID NO: 8721 - DNA, 665 bp, Zea mays
  misc_feature: Ceres CLONE ID no. 1462226
  misc_feature: Ceres CDNA ID no. 29191460
  CDS (105)..(383): REFERENCED BY SEQ ID NO: 8722
gccgcattcctgacgccgagccctaaacgcttctactctcctcggtcctcgcccgcccgcctctccctttcccatctccctccgccttccccaaaccctcagagatggcctcgacctgcttccgcgccgccgcccgcgccgccacggcggcctgccgctcggcggcctcccgctccatgccctccgtcggccgctccgccgcccgccgcgccccgttaatctccagggtgccgctggagctggggtgctgcgcgggaatgtcgctgctgccgctgcacagcgcggtggccgcggcgaggctgacttcgcggctgagcacggcgtcccggagctcctccgctctctctcagggtatcctctgtcgcacctatcccggactttaacaatcgtaccatcgatgaagctgttgtctgtcttttcggtttggatgaaaatgatgatacgtgaaacatttacgcaatgtcttaaggtgggcgcttggctattgtggatatgctccaaacatattgctcgacatctgtcttagccgtagtgttatgtcttagacagtcaatttcttgtaacattattatttctagtaacaggaacacttcaacgctgtatgcttccatgcttaaatttaaagaataaaggtgccattgcgatgtccaaaaaaaaaaaaaaaa

SEQ ID NO: 8722 - protein, 92 aa, Zea mays; identical to SEQ ID NO: 4488
  misc_feature: Ceres CLONE ID no. 1462226
  misc_feature: Ceres CDNA ID no. 29191460
  misc_feature: Homolog of GI Number: 6523547 NR Desc: hydroxyproline
  misc_feature: Homolog of GI Number: 42570779 NR Desc: arabinogalactan
  misc_feature: Homolog of GI Number: 7800642 NR Desc: PspA
  misc_feature: Homolog of GI Number: 7800640 NR Desc: PspA
  misc_feature: Homolog of GI Number: 7800644 NR Desc: PspA
  misc_feature: Homolog of GI Number: 7800648 NR Desc: PspA
  misc_feature: Homolog of GI Number: 7800638 NR Desc: PspA
  misc_feature: Homolog of GI Number: 322747 NR Desc: extensin
  misc_feature: Homolog of GI Number: 77553157 NR Desc: transposon protein

SEQ ID NO: 8723 - DNA, 950 bp, Zea mays
  misc_feature: Ceres CLONE ID no. 1462251
  misc_feature: Ceres CDNA ID no. 25445970
  CDS (85)..(753): REFERENCED BY SEQ ID NO: 8724
gaccgagcgctgccgtggtccacttcttccctggccgccggccacgaatccgcgcctccgagaccgagctgctgctagctccgaatggcttcggcggaggctccgacggcaaggccgattctctactcgtactggcgcagctcctgctcccaccgcgtccgcatcgcgctcaacctcaaaggtatcgattatgagtacaaggcggtgaacctcctcaagggcgagcagtctgatcctgagttcatgaagcttaatcctatgaagttcgtccctgccttggtcgacggcgacgcagtaatcggcgactcttacgcaatagcattgtatttggaggacaagtaccctcagcgccctcttttgccccaagaccttaaaaagaaggccctgaatatccagatagcaagcattgtgtgttctggtattcaacctcttcacaatctcaccttggtgagatttatcgagcaaaaagttggaacaggggagagcatcccgtgggtcaaacaacagattgatagaggtttcacagctgttgagaacatgatcaaaggctgtgctgggaagtttgctatgggagatgaagtccaactggcagatgtattccttgcaccccagatttttgctgcggtgactcgttatcaaatcgacatgtcgaactatcccaccctcgcgaggctctacgatcaatatatgacacaccctgcatttgaagctgcgctccctgaccggcagccggatgccccttcctctgcctagacataggccgggggtgaatcagtagttctcactgctttgtctgtacctgtgtgtgtcctgtcccgttacttcaaactctgtaacaataagcacagaacttcctgcaccaagtgtaaagtaactactgtagtctgtatcaaaacagtgaaataattgtgatcactagcctttggatatctcgaaaaaaaaaaaaaaaa

SEQ ID NO: 8724 - protein, 222 aa, Zea mays
  misc_feature: Ceres CLONE ID no. 1462251
  misc_feature: Ceres CDNA ID no. 25445970
  misc_feature (100)..(205): Pfam Name: GST_C PFAM Desc: Glutathione S
  misc_feature (11)..(84): Pfam Name: GST_N PFAM Desc: Glutathione S
  misc_feature: Homolog of GI Number: 50909573 NR Desc: putative glutathione s
  misc_feature: Homolog of GI Number: 46243593 NR Desc: glutathione S
  misc_feature: Homolog of GI Number: 11385485 NR Desc: glutathione S
  misc_feature: Homolog of GI Number: 20975738 NR Desc: glutathione s
  misc_feature: Homolog of GI Number: 62701857 NR Desc: maleylacetoacetate isomerase
  misc_feature: Homolog of GI Number: 11177839 NR Desc: putative glutathione S
  misc_feature: Homolog of GI Number: 28932696 NR Desc: glutathione S
  misc_feature: Homolog of GI Number: 24061762 NR Desc: glutathione S
  misc_feature: Homolog of GI Number: 11385487 NR Desc: glutathione S
  misc_feature: Homolog of GI Number: 28932692 NR Desc: glutathione S
  misc_feature: Useful for delaying flowering time
  misc_feature: Useful for making ornamental plants with modified leaves
  misc_feature: Useful for making plants with increased biomass
  misc_feature: Useful for making plants with increased biomass and foliage
  misc_feature: Useful for sterility
MASAEAPTARPILYSYWRSSCSHRVRIALNLKGIDYEYKAVNLLKGEQSDPEFMKLNPMKFVPALVDGDAVIGDSYAIALYLEDKYPQRPLLPQDLKKKALNIQIASIVCSGIQPLHNLTLVRFIEQKVGTGESIPWVKQQIDRGFTAVENMIKGCAGKFAMGDEVQLADVFLAPQIFAAVTRYQIDMSNYPTLARLYDQYMTHPAFEAALPDRQPDAPSSA

SEQ ID NO: 8725 - DNA, 1111 bp, Zea mays
  misc_feature: Ceres CLONE ID no. 1462264
  misc_feature: Ceres CDNA ID no. 35391378
  CDS (89)..(958): REFERENCED BY SEQ ID NO: 8726
acaaccaagccaaagctccccactcctccccattccacgccgccgcaccccgaaccctagcgccccatccatccagcgagcggtagccatgccggcggacgcgaagatccggtggggggagctcgaggaggacgacgggggcgacctcgacttccttctcccgccgcgggtggtcatcgggcccgacgagaacggcttcaagaagacgatcgagtaccgcttcgacgacgacggcaacaaggtcaaggtcaccaccaccacccgcgtccgcaagctcgcccgcgcgcgcctctccaaggccgctgtcgagcgccgcaactgggccaagttcggcgacgccgccagcggcgacgacgcctccgcgcgcctcaccgtcgtctccaccgaggagatcctcctcgagcgcccgcgcgccccagggagcaaagctgatgaaccaagtgcttctggtgacccactggcaatggcaagcaagggaggtgctgttctcatggtttgcagaacctgtggtaagaagggtgaccactggacctcaaagtgcccctacaaggacctcgctccaccaactgatgcatcggacatgcctcctacttctgacggccctgcagcactgagtggccctgccaagggctcatacgttgctccaaggctgagggctggtgctgttcataccgatgctgggcacgacatgaggcgcaggaacgatgagaactctgtccgtgttaccaatctgtcggaggacacccgcgagcccgacctccttgagctgttccgcacgtttggcccggtcagccgtgtctacgttgcggtggatcagaagactggaatgagcaggggctttgggttcgtcaacttcgttcacagggaggacgccgagaaggccatcagcaagctcaatgggtatggttatgataacctcatcctccatgtggagatggctgcacctaggcctacttagttactgcctattaagcatccagatttcctacaagtgtcgtatcattatggtctccgaaataccagtacttttgtgtcgtgggcttgtgtcgtgttttgccttgttgagaataactacactctgttgatgaaaaagtcaaaaaaaaaaaaaaaa

SEQ ID NO: 8726 - protein, 289 aa, Zea mays
  misc_feature: Ceres CLONE ID no. 1462264
  misc_feature: Ceres CDNA ID no. 35391378
  misc_feature: null
  misc_feature: Useful for making plants with altered alkaloid content
  misc_feature (210)..(281): Pfam Name: RRM_1 PFAM Desc: RNA recognition motif.
  misc_feature: Homolog of GI Number: 50915436 NR Desc: putative initiation factor 3g
  misc_feature: Homolog of GI Number: 21593472 NR Desc: putative eukaryotic translation initiation factor 3 subunit
  misc_feature: Homolog of GI Number: 22137220 NR Desc: AT3g11400/F24K9_7
  misc_feature: Homolog of GI Number: 10177573 NR Desc: eukaryotic translation initiation factor 3 subunit
  misc_feature: Homolog of GI Number: 50915434 NR Desc: putative initiation factor 3g
  misc_feature: Homolog of GI Number: 18252945 NR Desc: eukaryotic translation initiation factor 3 subunit
  misc_feature: Homolog of GI Number: 66521803 NR Desc:  similar to ENSANGP00000021554
  misc_feature: Homolog of GI Number: 49619137 NR Desc: eukaryotic translation initiation factor 3 subunit 4
  misc_feature: Homolog of GI Number: 19112519 NR Desc: eukaryotic translation initiation factor 3 rna
  misc_feature: Homolog of GI Number: 55648221 NR Desc:  DNA
  misc_feature: Useful for making bigger plants
  misc_feature: Useful for making ornamental plants with modified leaves
  misc_feature: Useful for making plants with increased biomass and foliage
  misc_feature: Useful for making shorter plants
MPADAKIRWGELEEDDGGDLDFLLPPRVVIGPDENGFKKTIEYRFDDDGNKVKVTTTTRVRKLARARLSKAAVERRNWAKFGDAASGDDASARLTVVSTEEILLERPRAPGSKADEPSASGDPLAMASKGGAVLMVCRTCGKKGDHWTSKCPYKDLAPPTDASDMPPTSDGPAALSGPAKGSYVAPRLRAGAVHTDAGHDMRRRNDENSVRVTNLSEDTREPDLLELFRTFGPVSRVYVAVDQKTGMSRGFGFVNFVHREDAEKAISKLNGYGYDNLILHVEMAAPRPT

SEQ ID NO: 8727 - DNA, 703 bp, Zea mays
  misc_feature: Ceres CLONE ID no. 1462285
  misc_feature: Ceres CDNA ID no. 29191581
  CDS (77)..(559): REFERENCED BY SEQ ID NO: 8728
aaaccaagcagctctaagccattacaactacagctcaacacatcatttgcaccggtcgtccttgatcatcacagcaatggcctccaccgacagctggacccacgagatcgaatcgccggtggccgcagcgcgcctcttccgcgccggcgtcatggactggcacacactggcccctaagctcgcaccgcacatcgtcgccagcgcccaccctgttgagggcgaaggcggcatcggcagcgtcaggcagttcaacttcacctcagccatgcccttcagcctcatgaaagagaggctcgagttcatcgacgccgacaagtgcgagtgcaagtccaccctcatcgagggcggcggcatcggcaccgccatcgagacgaccacctcgcacatcaaggtggagccggcggccaacggtgggagcgtcgttaaggtggagtcgacctacaagctgctgccgggcgtggaggtaaacgatgagatcaccaaggccaaggagtctgtcacggccatcttcaaggccgccgaggcctacctcgtcgccaacccggacgcctacaactgaaccagctgagagggaacacatatggttatgattatgattatgctggccctggtatgatttttgtgtgcttttttcctgatctaataaagccgctccaatcgcaagtagtgacgcgggagcactgagcgaaaaaaaaaaaaaaaa

SEQ ID NO: 8728 - protein, 160 aa, Zea mays
  misc_feature: Ceres CLONE ID no. 1462285
  misc_feature: Ceres CDNA ID no. 29191581
  misc_feature (2)..(155): Pfam Name: Bet_v_I PFAM Desc: Pathogenesis
  misc_feature: Homolog of GI Number: 18539471 NR Desc: JIOsPR10
  misc_feature: Homolog of GI Number: 58978027 NR Desc: pathogenesis
  misc_feature: Homolog of GI Number: 58978057 NR Desc: pathogenesis
  misc_feature: Homolog of GI Number: 58977980 NR Desc: pathogenesis
  misc_feature: Homolog of GI Number: 58978001 NR Desc: pathogenesis
  misc_feature: Homolog of GI Number: 1408222 NR Desc: pathogenesis
  misc_feature: Homolog of GI Number: 1572683 NR Desc: early flowering protein 1
  misc_feature: Homolog of GI Number: 42565393 NR Desc: pathogenesis
  misc_feature: Homolog of GI Number: 939857 NR Desc: pathogenesis related protein
  misc_feature: Homolog of GI Number: 4325333 NR Desc: intracellular pathogenesis
MASTDSWTHEIESPVAAARLFRAGVMDWHTLAPKLAPHIVASAHPVEGEGGIGSVRQFNFTSAMPFSLMKERLEFIDADKCECKSTLIEGGGIGTAIETTTSHIKVEPAANGGSVVKVESTYKLLPGVEVNDEITKAKESVTAIFKAAEAYLVANPDAYN

SEQ ID NO: 8729 - DNA, 1000 bp, Zea mays
  misc_feature: Ceres CLONE ID no. 1462331
  misc_feature: Ceres CDNA ID no. 25402221
  CDS (38)..(823): REFERENCED BY SEQ ID NO: 8730
acagttgttgaagccgcttcgtcacactctctaaaccatggctgtcgggaagaacaagaggatctccaagggtcgtaaaggaggcaagaagaagattgttgatcctttctccaagaaggattggtatgatatcaaggctccctctaacttcactcacagaaatgtcggaaagacacttgtttccagaactcagggtaccaagattgcctctgaggggttgaaacacagggtttttgaggtctctcttgctgatcttcaaagcgacgaggatcattcttacaggaagatccgtctcagagctgaagatgttcagggcaggaatgtgttgacccagttctggggtatgaacttcacaaccgacaagctgaggtcgttggtgaagaagtggcagactttgattgaagcccatgtcgatgtgaagaccacagacagctacaccttgaggatgttctgcattggtttcaccaagaggcgtgctaaccaggtgaagcgtacttgctatgctcagtccagccaagtccgccagattcgcagaaagatgagtgagattatggtgaaggaggcttcatcatgtgaccttaaggagcttgtggccaagttcatcccggaggccattggaaaggagattgagaaggcgacgcagaacatctacccgttgcagaatgtgttcatccgtaaagtcaagatcctcaaggctcctaagtttgaccttggaaagctcatggaggttcatggtgactacacagcagaggatgttggtgtgaaggtagacaggccagcggatgagacagctgaggaaccaactgaaatcatcggagcttagaaaactagtgttaggtcgccattgttgtggagtttttgttaagagagcttctacttctttttgtacttctttttgatggattattactcttgtttatcgtaatttttatattgttttcattcctggattttctttaaatattaagaagaaagtttatatttaaaaaaaaaaaaaaaa

SEQ ID NO: 8730 - protein, 261 aa, Zea mays
  misc_feature: Ceres CLONE ID no. 1462331
  misc_feature: Ceres CDNA ID no. 25402221
  misc_feature (11)..(222): Pfam Name: Ribosomal_S3Ae PFAM Desc: Ribosomal S3Ae family
  misc_feature: Homolog of GI Number: 7270417 NR Desc: Putative S
  misc_feature: Homolog of GI Number: 21553921 NR Desc: putative 40S ribosomal protein S3A
  misc_feature: Homolog of GI Number: 7441118 NR Desc: ribosomal protein S3a
  misc_feature: Homolog of GI Number: 1350983 NR Desc: 40S ribosomal protein S3a
  misc_feature: Homolog of GI Number: 82400124 NR Desc: 40S ribosomal protein S3a
  misc_feature: Homolog of GI Number: 24817254 NR Desc: ribosomal protein S3a
  misc_feature: Homolog of GI Number: 483431 NR Desc: cyc07
  misc_feature: Homolog of GI Number: 6714564 NR Desc: cyc07
  misc_feature: Homolog of GI Number: 50907013 NR Desc: putative ribosomal protein S3a
  misc_feature: Homolog of GI Number: 77554756 NR Desc: Ribosomal S3Ae family
  misc_feature: Useful for making shorter plants
  misc_feature: Useful for modifying plant structure
  misc_feature: Useful for sterility
MAVGKNKRISKGRKGGKKKIVDPFSKKDWYDIKAPSNFTHRNVGKTLVSRTQGTKIASEGLKHRVFEVSLADLQSDEDHSYRKIRLRAEDVQGRNVLTQFWGMNFTTDKLRSLVKKWQTLIEAHVDVKTTDSYTLRMFCIGFTKRRANQVKRTCYAQSSQVRQIRRKMSEIMVKEASSCDLKELVAKFIPEAIGKEIEKATQNIYPLQNVFIRKVKILKAPKFDLGKLMEVHGDYTAEDVGVKVDRPADETAEEPTEIIGA

SEQ ID NO: 8731 - DNA, 1012 bp, Zea mays
  misc_feature: Ceres CLONE ID no. 1462337
  misc_feature: Ceres CDNA ID no. 40351927
  CDS (277)..(753): REFERENCED BY SEQ ID NO: 8732
cccgacgcaaaagtcgacgacgcgtgcgccttgctcgctcgctcgctcgccgtctgccgtcgttctaggtttagagccaggtcaccactcaccagcgctaggagggcgcgaagtcgagtagacggccgggcctctcccgttctccacggacggctagcgctactggaggcgacgcctggacggcgaccccgcagagccgcccggccaatcgccgtccgccggaccgctgaggaatttttctttctcgtcaaaagttactgcattcattttacagtaatggctatggggttgattaatgctaatcctataatccatgagaaaaaagagaggcgtgccagacaggcaccagagaccacagatgaaaatgcagcagagcccatagatcagctggaaatatttgatcacattagagatataaaggatccagagcacccgtactcactggaacagctgaatgtggtgactgaagattcaattgaactcaatgatgaaagtaattatgtcagggttacattcaccccaacagtggagcactgcagtatggcaactattattggcctttgcatacgcgtgaaacttgtacggagtctccctcctcgttacaaggtggacataagggttgcccctggatcacatgcaactgaagctgctgtgaataagcaactgaacgacaaagaacgtgttgcggctgcattggagaacccaaacctactggacatggtcgaagagtgcttatcaccaacatttgattgaggcctgaatatcaatatatcggtgtgacatggtgttgatgttcaggagccacacatgctcattgccaatggagttcactcctgtctttcgagaaccaaaatgccttgggtgttaagtgacgtgttgcatgattttttttcctccgccccgttcagttattatatatgctactacggcgctaccatttttggacgtttttggtgcttgtgacctcactgatcaatgcgagatgtaatcagctctaaaaaaaaaaaaaaaa

SEQ ID NO: 8732 - protein, 158 aa, Zea mays
  misc_feature: Ceres CLONE ID no. 1462337
  misc_feature: Ceres CDNA ID no. 40351927
MAMGLINANPIIHEKKERRARQAPETTDENAAEPIDQLEIFDHIRDIKDPEHPYSLEQLNVVTEDSIELNDESNYVRVTFTPTVEHCSMATIIGLCIRVKLVRSLPPRYKVDIRVAPGSHATEAAVNKQLNDKERVAAALENPNLLDMVEECLSPTFD

SEQ ID NO: 8733 - DNA, 771 bp, Zea mays
  misc_feature: Ceres CLONE ID no. 1462375
  misc_feature: Ceres CDNA ID no. 25892895
  CDS (66)..(551): REFERENCED BY SEQ ID NO: 8734
accttcgcaaacccctcaaccctcgccgccgccgcgccggccgctcagcccccgccgccgacgccatgggcaagttccgcaagctcgggcgccacgccgcgcaccgcgtgtccatgctcaggacgatggtgtcgcagctggtgaagcacgagcgcatcgagaccaccgtcgccaaggcgaaggaggtgcggcgcaaggcggatcagatggtgcagctcggcaaagatggtacactggatgcagcaagacgtgcttctgcttttgttcgcggagatgatgttgtccataagctgttcacagagctggcctaccgctataaagatcgagcaggcggatatacaagacttttgcgaactaggatacgaataggtgatgctgcaccaatggcatacattgagtttgtggacagagagaacgaactccgagaggccaaacctgcaacgccgccgctgcctcagcgggttccacttgatccatgggccaagtctcgtgctagccaacagtgggcaggacctaaagttaccgtgaaccccaaatcagaaggcttatgagagcagcatctgcactgtgtttctatctggtgaatcacagtattcatttcgttcgtgggactatgcacgaggcttgtcatgcaggaggatttttgtcagcgtataattgtcaatagaataattcaacttagatttgctatccctccagcgaatattgatatatgattgaatggggatgcggtgttatccgcgcgacagtatggcaaaaaaaaaaaaaaaa

SEQ ID NO: 8734 - protein, 161 aa, Zea mays; identical to SEQ ID NO: 3256
  misc_feature: Ceres CLONE ID no. 1462375
  misc_feature: Ceres CDNA ID no. 25892895
  misc_feature (17)..(113): Pfam Name: Ribosomal_L17 PFAM Desc: Ribosomal protein L17
  misc_feature: Homolog of GI Number: 56784661 NR Desc: putative 50S ribosomal protein L17
  misc_feature: Homolog of GI Number: 50931683 NR Desc: putative 50S ribsomal protein L17
  misc_feature: Homolog of GI Number: 21592350 NR Desc: ribsomal protein
  misc_feature: Homolog of GI Number: 18424850 NR Desc: ribosomal protein L17 family protein
  misc_feature: Homolog of GI Number: 72384434 NR Desc: 52O08_5
  misc_feature: Homolog of GI Number: 21555473 NR Desc: 50S ribosomal protein L17
  misc_feature: Homolog of GI Number: 7671412 NR Desc: ribsomal protein
  misc_feature: Homolog of GI Number: 10178068 NR Desc: 50S ribosomal protein L17
  misc_feature: Homolog of GI Number: 26451578 NR Desc: putative 50S ribosomal protein L17
  misc_feature: Homolog of GI Number: 9759008 NR Desc: 50S ribosomal protein L17

SEQ ID NO: 8735 - DNA, 852 bp, Zea mays
  misc_feature: Ceres CLONE ID no. 1462793
  misc_feature: Ceres CDNA ID no. 40351928
  CDS (97)..(630): REFERENCED BY SEQ ID NO: 8736
aagtcccctttcgcagtggttggcctcccgacccctatcttctcccactaatccccccattcccctcgccgccgccgccgccgtcgcctgccaaagatgaatgtcgacaagctgaagaagatggccggtgccgtgcgcaccggcggcaagggcagcgtgcgcaggaagaagaaggcagtgcacaagaccacgacaaccgatgacaagaggctccagagcaccttgaaaagagtaggagtgaacaccattcctggtattgaagaggtcaatattttcaaggatgacgttgtcatccaatttcagaacccgaaagtgcaagcatcaattgccgcaaacacatgggtagtcagtggaacaccacagacgaaaaagctgcaagatttactgccgacaattatcaaccaactgggcccggataacttggacaacctgcggaggcttgctgagcagttccagaagcagatgcctggtggtgaggctggcggcgccagcatcggtgctgcccaggacgatgacgacgatgtcccagagctcgtcccaggagagaccttcgaagaggccgcggaggagaagaaggaacccgaggcgaagaaggaacctgagccggaggagaagaaagagtcgtcgtaatcttgtcacgccattcattgttgtgaagggttccttgttggttcagggttgattggcatcttattactgtatatgccagagacatggtcctgtgagaactctggcccatctttcatttctagcgctcctccggttggttttgtctcggccgtgggttctgtccgaaccgacggcggaactgagttttacgacaattatcgtttaccaaaaaaaaaaaaaaaa

SEQ ID NO: 8736 - protein, 177 aa, Zea mays
  misc_feature: Ceres CLONE ID no. 1462793
  misc_feature: Ceres CDNA ID no. 40351928
  misc_feature: The plant is abnormally large.
  misc_feature: Useful for making plants with modulated growth and phenotype characteristics
  misc_feature: The sequence is a functional homolog of  SEQ ID NO 1614 in the  11/479,226 US patent application
  misc_feature: The sequence is a functional homolog of  SEQ ID NO 1617 in the  11/479,226 US patent application
  misc_feature: The sequence is a functional homolog of  SEQ ID NO 784 in the  10/412,699 US patent application
  misc_feature: The sequence is a functional homolog of  SEQ ID NO 786 in the  10/412,699 US patent application
  misc_feature: Useful for making plants with modulated biomass
  misc_feature (35)..(92): Pfam Name: NAC PFAM Desc: NAC domain
MNVDKLKKMAGAVRTGGKGSVRRKKKAVHKTTTTDDKRLQSTLKRVGVNTIPGIEEVNIFKDDVVIQFQNPKVQASIAANTWVVSGTPQTKKLQDLLPTIINQLGPDNLDNLRRLAEQFQKQMPGGEAGGASIGAAQDDDDDVPELVPGETFEEAAEEKKEPEAKKEPEPEEKKESS

SEQ ID NO: 8737 - DNA, 572 bp, Zea mays
  misc_feature: Ceres CLONE ID no. 1462837
  misc_feature: Ceres CDNA ID no. 36706306
  CDS (107)..(259): REFERENCED BY SEQ ID NO: 8738
gcgcgtcgcgatgaaagaggcgcaggcttgagcgagaggaccgcgctggacaccaccgcatgctagggtggcagggaggggagagaggggagccgagccgaggacgatggcgctgggcgtgttgttccacggcgcgcagctagcgctggatctggcggtggccgggatgtcgctggcggtggcgctcgggttcttcgccctcatcactaccttgctctgctccgcggcgttcctccaccactccaagcccgccgcgtagtcatagcctccacagcgaccaacgcgtctcaacctctggggatcgtaatactgttgctggtataattcctccacatcaattgcagaggaggtgctttaatcaactgctttatagcacttacagatgcaaagagtagtcgattgcacacatcaggtgatagctataggctcttgtaccacgtgtatgtttctttatgctggtttgtaaacgagatgtttgtactttgtactatagtttttgtaatcagtctctctttcaagatttacgtctcatataaatagtatgtgcattgtttaaagaaaaaaaaaaaaaa

SEQ ID NO: 8738 - protein, 50 aa, Zea mays
  misc_feature: Ceres CLONE ID no. 1462837
  misc_feature: Ceres CDNA ID no. 36706306
MALGVLFHGAQLALDLAVAGMSLAVALGFFALITTLLCSAAFLHHSKPAA

SEQ ID NO: 8739 - DNA, 529 bp, Zea mays
  misc_feature: Ceres CLONE ID no. 1462897
  misc_feature: Ceres CDNA ID no. 25445869
  CDS (82)..(291): REFERENCED BY SEQ ID NO: 8740
ctccgcatttccatcctgtcgtgggatcccagccaccgccgctagaagaagagctcggcgattcccaggtcccgcgagaagatgccgaagcagatctatgagattaaggacttcctcctcaccgcgaggaggaaggatgcccgctcagtgaagatcaagaggagcaaggatgttgtcaagttcaaggtgcgctgctccaagtacttgtacacgctctgcgtcttcgatgctgagaaggcaaacaagttgaagcaatctcttcccccaggtttgaccgtcgaggaggtctgattggatacatggcaacgccgggttgaactacccaagcttctttatcagtagcagagcatgctactcatgtacttttggaacctaagctattagacctgtcagtgttggatgtgtggatcttgcatttttgtggagaaataccaatttacctcgttcaaggatgcacctttcagtatatttcttgtttaactgcacattactttatatttatgcctgtttcataaaaaaaaaaaaaaaa

SEQ ID NO: 8740 - protein, 69 aa, Zea mays
  misc_feature: Ceres CLONE ID no. 1462897
  misc_feature: Ceres CDNA ID no. 25445869
  misc_feature (2)..(69): Pfam Name: Ribosomal_L38e PFAM Desc: Ribosomal L38e protein family
  misc_feature: Homolog of GI Number: 50938225 NR Desc: putative 60S ribosomal protein L38
  misc_feature: Homolog of GI Number: 23507773 NR Desc: At3g59540/T16L24_90
  misc_feature: Homolog of GI Number: 50931949 NR Desc: putative 60S ribosomal protein L38
  misc_feature: Homolog of GI Number: 313027 NR Desc: ribosomal protein L38
  misc_feature: Homolog of GI Number: 15825507 NR Desc: ribosomal protein L38
  misc_feature: Homolog of GI Number: 27497793 NR Desc: 60S ribosomal protein L38
  misc_feature: Homolog of GI Number: 49900028 NR Desc: MGC89823 protein
  misc_feature: Homolog of GI Number: 82895480 NR Desc:  similar to ribosomal protein L38
  misc_feature: Homolog of GI Number: 4506645 NR Desc: ribosomal protein L38
  misc_feature: Homolog of GI Number: 61372160 NR Desc: ribosomal protein L38
MPKQIYEIKDFLLTARRKDARSVKIKRSKDVVKFKVRCSKYLYTLCVFDAEKANKLKQSLPPGLTVEEV

SEQ ID NO: 8741 - DNA, 1095 bp, Zea mays
  misc_feature: Ceres CLONE ID no. 1462902
  misc_feature: Ceres CDNA ID no. 29191736
  CDS (109)..(927): REFERENCED BY SEQ ID NO: 8742
caaaaaaaaatacccctaccgaagcgcaaaaagaaactcgaagcacaggaacacgaagcaagctgccccccctcctcacctccgactcactcacgatccgggatcaggatggccggatcgacggaactccctaccaagggcggcttcagcttcgacctgtgccgcaggaacgccatgctggagaagaatggcctcaagatgcccgggttcaggaagaccgggactaccatcgtcggcctcgtgtttgcggatggagttgttcttggggcagacacaagggcaaccgagggtcctatagttgctgataagaactgcgagaaaattcattttatggcaccaaacatatattgctgcggtgctggaactgctgctgacacagaggctgtgacagatatggtcagctcccagctacaacttcaccgttatgctactagccgtgagtcaagagttgtaaccgctcttacactactgaagacacatctttttaactaccaaggtcatgtcagtgctgctctcgttcttggcggagtagatgtcactggaccacatctacacactgtttatccgcatggctccaccgatactcttccttttgccacgatgggttctggatcccttgctgcaatgtcagtgtttgagtcgaagtacagagaaggcctcacaagggaggagggaattgcacttgtagctgaggcaatccgtgctggtatcttcaatgacttgggaagtggcagcaacgtggatgtttgtgtgataaccaaggggaacacagagtacttgagaaaccacgagttaccaaacccaaggacttttgtcagctcgaagggatacagcttcaacaaggggcataccgaggtattgtctacaaagatcacgcagctgaagctgaagccagaggtcgctgatggtgatgcaatggaagagtgatcttgtgtgcttacgctcggtcaagtagtcatgctaaaaatttgcgccatttcttcttttttctcagcgtgggtgctagaacagaaaaatggatgtattttgttgtacttgctgaatttgatgcagacctttatgttaaactgtctctggacaaaaaaaaaaaaaaaa

SEQ ID NO: 8742 - protein, 272 aa, Zea mays
  misc_feature: Ceres CLONE ID no. 1462902
  misc_feature: Ceres CDNA ID no. 29191736
  misc_feature (35)..(216): Pfam Name: Proteasome PFAM Desc: Proteasome A
  misc_feature: Homolog of GI Number: 50933089 NR Desc: 20S proteasome beta subunit
  misc_feature: Homolog of GI Number: 30023762 NR Desc: At3g27430
  misc_feature: Homolog of GI Number: 9758084 NR Desc: 20S proteasome beta subunit PBB2
  misc_feature: Homolog of GI Number: 2511578 NR Desc: multicatalytic endopeptidase
  misc_feature: Homolog of GI Number: 21387013 NR Desc: 20S proteasome beta subunit PBB2
  misc_feature: Homolog of GI Number: 21593337 NR Desc: 20S proteasome beta subunit PBB2
  misc_feature: Homolog of GI Number: 30688785 NR Desc: 20S proteasome beta subunit B
  misc_feature: Homolog of GI Number: 2511576 NR Desc: multicatalytic endopeptidase
  misc_feature: Homolog of GI Number: 24664391 NR Desc: CG3329
  misc_feature: Homolog of GI Number: 54641939 NR Desc: GA17382
MAGSTELPTKGGFSFDLCRRNAMLEKNGLKMPGFRKTGTTIVGLVFADGVVLGADTRATEGPIVADKNCEKIHFMAPNIYCCGAGTAADTEAVTDMVSSQLQLHRYATSRESRVVTALTLLKTHLFNYQGHVSAALVLGGVDVTGPHLHTVYPHGSTDTLPFATMGSGSLAAMSVFESKYREGLTREEGIALVAEAIRAGIFNDLGSGSNVDVCVITKGNTEYLRNHELPNPRTFVSSKGYSFNKGHTEVLSTKITQLKLKPEVADGDAMEE

SEQ ID NO: 8743 - DNA, 968 bp, Zea mays
  misc_feature: Ceres CLONE ID no. 1463025
  misc_feature: Ceres CDNA ID no. 25446684
  CDS (221)..(508): REFERENCED BY SEQ ID NO: 8744
cccaacaccaaccccaaccccaaacctcctcctccgccacaggcttatcatcgagctctggttccccttgttcgtatgctctactgtatactgagctgggtacttggctccattaacttgccaggccgctaggtacgacgacttggaggacgtcgtcgccctgttctccgctggtgtctcgctggactccacagattcgcaaggccgcacagctcttcacatggcttctgccaatggtcaccttgctgtggtggaatacttgattcaaaatggagcgaatgttaacgccaccaacatggagaagaacacaccactccactgggcatgccttaatggacgtatagaggtaatcagggctttgatctcagcgggggctagcgtgagtgctctgaacagccacgagaaaacgccaatggacgaagcggtgaccacaggcaagatgcacgtgatcgacgcgatcggtgcggcagtagctcaagccgagctcaacggcgttactgtctcctaaaaggacctgatgagtacctggagctttgaatgacttgcagccttgttcttatctcccagcggttctgtctgtatcactcgcgaacctgaatccccgacggcccagtatccgggcaatatctatactgacggcaatcgcctgttagtgtcattggcttgaggacatgggaggccgacccgacctgtcgttgtaaaccagatgtgcagatgtcaaagatcaggattttctcctacaaatgttgtagggccgttgcttgttctccctggcaaccttcgttttccctttgggttcccttggctccaagtagcagcgaaatgggatccgcacctccaccctctgtgtgtgtttttttcgtcttctccaaattcagcttttgttgcctttaaaattggaatgcaatgtcgtgtccctgtttgagggttgtttttattgatgaaacgctgcaaaaaaaaaaaaaaaa

SEQ ID NO: 8744 - protein, 95 aa, Zea mays
  misc_feature: Ceres CLONE ID no. 1463025
  misc_feature: Ceres CDNA ID no. 25446684
  misc_feature (1)..(26): Pfam Name: Ank PFAM Desc: Ankyrin repeat
  misc_feature: Homolog of GI Number: 28373837 NR Desc: Chain A
  misc_feature: Homolog of GI Number: 28274848 NR Desc: ankyrin repeat protein E3_5
  misc_feature: Homolog of GI Number: 28274854 NR Desc: ankyrin repeat protein E4_8
  misc_feature: Homolog of GI Number: 19263876 NR Desc: Ankyrin repeat and SOCS box
  misc_feature: Homolog of GI Number: 15420875 NR Desc: ankyrin repeat
  misc_feature: Homolog of GI Number: 34868134 NR Desc: similar to ankyrin repeat and SOCS box
  misc_feature: Homolog of GI Number: 73996668 NR Desc:  similar to ankyrin repeat and SOCS box
  misc_feature: Homolog of GI Number: 48146789 NR Desc: ASB8
  misc_feature: Homolog of GI Number: 49899703 NR Desc: Ankhd1
  misc_feature: Homolog of GI Number: 30690372 NR Desc: ankyrin repeat family protein / AFT protein
MASANGHLAVVEYLIQNGANVNATNMEKNTPLHWACLNGRIEVIRALISAGASVSALNSHEKTPMDEAVTTGKMHVIDAIGAAVAQAELNGVTVS

SEQ ID NO: 8745 - DNA, 685 bp, Zea mays
  misc_feature: Ceres CLONE ID no. 1463205
  misc_feature: Ceres CDNA ID no. 25402452
  CDS (88)..(435): REFERENCED BY SEQ ID NO: 8746
attttcaaatcatcgaaaccctaataaatctacatcaggcttcagcgtcctttgtcgagtttgctcccttgtttcagataaaggttcatgtcagatcttgaagttcaagtccccactgcctttgatccgtttgctgatgcaaatgctgaggacgctggagctggagctggaacaaaggaatacgtgcacatacgtgttcagcagcgtaatggtagaaaaagcctgaccactgtccagggccttaagaaagagtatagctataccaagatcctcaaagacctcaagaaagagttttgctgcaatggcaccgtcgtccaagactctgagctaggacaggttattcagcttcaaggtgatcagaggaagaacgtgtccaccttccttgttcaggctggtcttgtgaagaaggataacatcaagatccatggtttttgagcaaattctagatacttgttgttcatctttgcacaacatcttcagtttgcagcatcaatcagccactactattaactatcacttatgtattaattattaatgttctgatatatatattctgtttttgaaaaaaaaaaatcaagtggtttgcttatgagtgtattgaaaaaatgtatgaacttttcatttgcgtttgtagtgtgagatcatcaataaaacttgctccgatttgtgaaaaaaaaaaaaaaaa

SEQ ID NO: 8746 - protein, 115 aa, Zea mays
  misc_feature: Ceres CLONE ID no. 1463205
  misc_feature: Ceres CDNA ID no. 25402452
  misc_feature: The plant flowers significantly earllier than wild-type.
  misc_feature: The plant is abnormally small.
  misc_feature: null
  misc_feature: Useful for making plants with modulated biomass
  misc_feature: Useful for making plants with modulated flowering time
  misc_feature (27)..(108): Pfam Name: SUI1 PFAM Desc: Translation initiation factor SUI1
  misc_feature: Homolog of GI Number: 4585973 NR Desc: translation initiation factor
  misc_feature: Homolog of GI Number: 21593860 NR Desc: translation initiation factor
  misc_feature: Homolog of GI Number: 29028784 NR Desc: At5g54760
  misc_feature: Homolog of GI Number: 6165638 NR Desc: translation initiation factor nps45
  misc_feature: Homolog of GI Number: 21070377 NR Desc: translation initiation factor
  misc_feature: Homolog of GI Number: 53791638 NR Desc: putative translation initiation factor
  misc_feature: Homolog of GI Number: 2668740 NR Desc: translation initiation factor
  misc_feature: Homolog of GI Number: 50937977 NR Desc: translational initiation factor eIF1
  misc_feature: Homolog of GI Number: 6478142 NR Desc: putative translation initiation factor eIF
  misc_feature: Homolog of GI Number: 57091083 NR Desc:  similar to Eukaryotic translation initiation factor 1
  misc_feature: Useful for accelerating flowering time
  misc_feature: Useful for increasing chlorophyll and photosynthetic capacity
MSDLEVQVPTAFDPFADANAEDAGAGAGTKEYVHIRVQQRNGRKSLTTVQGLKKEYSYTKILKDLKKEFCCNGTVVQDSELGQVIQLQGDQRKNVSTFLVQAGLVKKDNIKIHGF

SEQ ID NO: 8747 - DNA, 805 bp, Zea mays
  misc_feature: Ceres CLONE ID no. 1463236
  misc_feature: Ceres CDNA ID no. 25891285
  CDS (52)..(636): REFERENCED BY SEQ ID NO: 8748
aaattctattaccgaagtaccgccgtcgcatttcacactcagagacgaaagatgaagacgatcttgtcatccgagacgatggacatccccgaaggcgtcaccatcaaggtccacgctaaggtgatcgaagtcgaaggcccacgcgggaagctcactcgtgacttcaagcatctcaacctcgatttccagctcatcaaagacgccgtcaccggaaagcgacagctcaagatcgactcgtggttcggctctcgcaaagccagtgcttcgatcagaaccgctctaagccacgttagcaacctcatcgctggtgtcactcaaggtttcctttacaagatgaggttcgtgtatgctcatttccctatcaacgcttcaatctccggtaacaacaagtctatcgagatccgtaacttccttggcgagaagaaggttaggaaggttgatatgttggatggtgttaccattgttcggtctgagaaagtcaaggatgagattactcttgagggtaatgatatcgagcttgtctcacgttcgtgcgctctaattaatcagaaatgccatgtgaagaagaaggatattaggaagtttcttgatggtatctatgtgagcgagaagggaaagatcgctgttgaagaatgaagctatctattatattcatatggtggaagagtgatttagttgtagcgttttgtttacatctcttatggatttgtagttttgtttcttttggaccatcattatatgcaaactcattgtcctttatgtttgggtttttatttactctgttcttgcaaaaaaaaaaaaaaaa

SEQ ID NO: 8748 - protein, 194 aa, Zea mays
  misc_feature: Ceres CLONE ID no. 1463236
  misc_feature: Ceres CDNA ID no. 25891285
  misc_feature (102)..(181): Pfam Name: Ribosomal_L6 PFAM Desc: Ribosomal protein L6
  misc_feature: Homolog of GI Number: 21436441 NR Desc: putative ribosomal protein L9
  misc_feature: Homolog of GI Number: 12642868 NR Desc: putative ribosomal protein L9
  misc_feature: Homolog of GI Number: 21554945 NR Desc: ribosomal protein L9
  misc_feature: Homolog of GI Number: 20727 NR Desc: GA
  misc_feature: Homolog of GI Number: 6015604 NR Desc: ribosomal protein L9
  misc_feature: Homolog of GI Number: 1107489 NR Desc: 60S ribosomal protein L9
  misc_feature: Homolog of GI Number: 51963784 NR Desc: PREDICTED OJ1435_F07.31 gene product
  misc_feature: Homolog of GI Number: 33087067 NR Desc: ribosomal L9
MKTILSSETMDIPEGVTIKVHAKVIEVEGPRGKLTRDFKHLNLDFQLIKDAVTGKRQLKIDSWFGSRKASASIRTALSHVSNLIAGVTQGFLYKMRFVYAHFPINASISGNNKSIEIRNFLGEKKVRKVDMLDGVTIVRSEKVKDEITLEGNDIELVSRSCALINQKCHVKKKDIRKFLDGIYVSEKGKIAVEE

SEQ ID NO: 8749 - DNA, 567 bp, Zea mays
  misc_feature: Ceres CLONE ID no. 1463270
  misc_feature: Ceres CDNA ID no. 25447070
  CDS (130)..(339): REFERENCED BY SEQ ID NO: 8750
tcccctccatccctcctcttctccacatccacccgaacggaaccctagtctcccatcacttggatccggtctttgacattctccggtgcaggacgccgtaagaatttcgctagagatcttgcagctgccatggcggacaatgaacctgttgacccaaagaattaccttgaggaacgctgcaagccgcaatgtgtaaaatcattgtatgactatgagagatgtgtgaagagagtcgagaatgatgaaactgggcagaagcactgcaccgggcaattcttcgactactggtcatgcgtcgacaaatgtgtagcaccaaagctctttgagaagctcaaatgatggatgggatggcgctgattgccccagatcccaataaatcgatccactgtcctgatttctggttgtgctgaacctgtaacaaggagcttcgttctatctgttgctaaaacttgtcaaaacaagcaaacacaattattttggcagtgggaacaattacttttattttgctcatgtaatgcattctgttctgttatacttggacagatgaaagcaaaaaaaaaaaaaaaa

SEQ ID NO: 8750 - protein, 69 aa, Zea mays
  misc_feature: Ceres CLONE ID no. 1463270
  misc_feature: Ceres CDNA ID no. 25447070
  misc_feature (7)..(69): Pfam Name: UCR_hinge PFAM Desc: Ubiquinol
  misc_feature: Homolog of GI Number: 62732974 NR Desc: ubiquinol
  misc_feature: Homolog of GI Number: 21554004 NR Desc: putative ubiquinol
  misc_feature: Homolog of GI Number: 15218058 NR Desc: ubiquinol
  misc_feature: Homolog of GI Number: 488712 NR Desc: ubiquinol
  misc_feature: Homolog of GI Number: 50252217 NR Desc: putative ubiquinol
  misc_feature: Homolog of GI Number: 5103810 NR Desc: Similar to gbX79273 cytochrome c reductase hinge protein subunit from Solanum tuberosum.
  misc_feature: Homolog of GI Number: 14532878 NR Desc: putative ubiquinol
  misc_feature: Homolog of GI Number: 23509470 NR Desc: ubiquinol
  misc_feature: Homolog of GI Number: 56496460 NR Desc: ubiquinol
  misc_feature: Homolog of GI Number: 56522690 NR Desc: ubiquinol
MADNEPVDPKNYLEERCKPQCVKSLYDYERCVKRVENDETGQKHCTGQFFDYWSCVDKCVAPKLFEKLK

SEQ ID NO: 8751 - DNA, 437 bp, Zea mays
  misc_feature: Ceres CLONE ID no. 1463312
  misc_feature: Ceres CDNA ID no. 35383425
  CDS (83)..(337): REFERENCED BY SEQ ID NO: 8752
actcttctaggattatagtatatatataagtatacactcttctaggatcaatcgtgaggagttccttaaattgtcttgcgacatggagtacagaaagagggtggatgcgctagtgtttttctcgttacttctcctcggatactttgctgctcatgcacatgggaaggatgatgtcggtgtttctactccagctaaagaaggaattatgcaaggaaacggagcacgatgtgttgtagggtttcctccatgcaaagataacaagtgctactgctgcattggggggcgaactcatgctcgctactctacgatggttgagtgtagacatgcctgcttctaaacaaaattaagatcgctgttattatatacattgtaatggtaggtaatgctattaataatatatgggaattttagttttggtattaaaaaaaaaaaaaaaa

SEQ ID NO: 8752 - protein, 84 aa, Zea mays
  misc_feature: Ceres CLONE ID no. 1463312
  misc_feature: Ceres CDNA ID no. 35383425
  misc_feature: Homolog of GI Number: 47078325 NR Desc: MEG2
  misc_feature: Homolog of GI Number: 47078329 NR Desc: MEG4
  misc_feature: Homolog of GI Number: 47078327 NR Desc: MEG3
  misc_feature: Homolog of GI Number: 47078333 NR Desc: MEG6
  misc_feature: Homolog of GI Number: 47606607 NR Desc: MEG1
  misc_feature: Homolog of GI Number: 47078331 NR Desc: MEG5
MEYRKRVDALVFFSLLLLGYFAAHAHGKDDVGVSTPAKEGIMQGNGARCVVGFPPCKDNKCYCCIGGRTHARYSTMVECRHACF

SEQ ID NO: 8753 - DNA, 1067 bp, Zea mays
  misc_feature: Ceres CLONE ID no. 1463419
  misc_feature: Ceres CDNA ID no. 25446786
  CDS (238)..(1023): REFERENCED BY SEQ ID NO: 8754
acgtctagctgcagcacttccacatcggctcccagatctcgaccactttcctgctctccgacggcgtcggcgaggccgcgcagatctatccattcccatcccagcgatctcgagctcgctctcacggaccacggtcacgcactcacgccccattgtccctgctccagtaagagtaggcgaggatgagcctcccccatcttgggtgttggtgcctgacccattttctcaagttttgctatggatatgagcaatagagatcaccttaggaggagggaggaggatgatgatgacctcttccttttcattctcccttccctacatctcttgggctatcttggacgtagtaaaaagaaattgaggcatacatcagcgctgaccggggaggaaaaggttcgagagctacttgaaggccatatcaagaactgcagggtatcatttagaatggaaccttacattttcaaatccttggcgaactatcttagaatggaaggattggttaaagatacaagaatcaaagttgaggaaaaacttggcttcttcctatacatgattagccacaatgcgacatttgaagatctccaagtcttttttggtcatagcaatgatacatttcaccgtgtcatcaaacatttcttcgacattgttatccctggccttagcatgcggttcctaaagcctccttccaatcaagttcatcctaaaattcatggagacaaccgattttatccatacttcaagaattgcataagttcaatagatggaacccatgttccagtatcaatgtcacccgatcaagccgcaccattcaggaataggttgggagtagttgtacttggttccctgcagctgacaggaaatattggtcatatggagacagttctgcacagcgttctgagtgccgatatgagctatatatatgttgcatttctccatgtttgggctcagcatgtaatagaactgaaggaaggttgttgtgagacttgtatgacatgcttaaatttctggataaaatctagcatataataagtctattacatgcttaaatttctacaaaaaaaaaaaaaaaa

SEQ ID NO: 8754 - protein, 259 aa, Zea mays
  misc_feature: Ceres CLONE ID no. 1463419
  misc_feature: Ceres CDNA ID no. 25446786
  misc_feature: Homolog of GI Number: 31430128 NR Desc: putative transposase
  misc_feature: Homolog of GI Number: 77554714 NR Desc: transposon protein
  misc_feature: Homolog of GI Number: 31429980 NR Desc: putative transposase
  misc_feature: Homolog of GI Number: 77556217 NR Desc: transposon protein
  misc_feature: Homolog of GI Number: 34907580 NR Desc: B1078G07.31
  misc_feature: Homolog of GI Number: 38605912 NR Desc: OSJNBb0088C09.6
  misc_feature: Homolog of GI Number: 62701733 NR Desc: transposon protein
  misc_feature: Homolog of GI Number: 77553815 NR Desc: transposon protein
  misc_feature: Homolog of GI Number: 81051977 NR Desc: zinc transporter
  misc_feature: Homolog of GI Number: 62734530 NR Desc: transposon protein
MSNRDHLRRREEDDDDLFLFILPSLHLLGYLGRSKKKLRHTSALTGEEKVRELLEGHIKNCRVSFRMEPYIFKSLANYLRMEGLVKDTRIKVEEKLGFFLYMISHNATFEDLQVFFGHSNDTFHRVIKHFFDIVIPGLSMRFLKPPSNQVHPKIHGDNRFYPYFKNCISSIDGTHVPVSMSPDQAAPFRNRLGVVVLGSLQLTGNIGHMETVLHSVLSADMSYIYVAFLHVWAQHVIELKEGCCETCMTCLNFWIKSSI

SEQ ID NO: 8755 - DNA, 921 bp, Zea mays
  misc_feature: Ceres CLONE ID no. 1463468
  misc_feature: Ceres CDNA ID no. 25892897
  CDS (95)..(787): REFERENCED BY SEQ ID NO: 8756
atcaagccagtacccagcaaatcacaaacagctaaaacgatctcagccttcacgcacacacacacatccatcgttctaggctagctagttggagatggccggaggagatgacctcaagctgctcggcgcatggccaagcccgtttgttaccagggtgaagctggcgctcgccttcaagggcgtgagctacgaggacgtggaggagaacctgtacaacaagagcgagcttctcctcaagtccaacccggtgcacaagaagatacccgtgctcatccacaacggcgccccggtctgcgagtccatgatcattgtgcagtacatcgacgacgtgttcaccggcaccggcccgtcgcttctgcccgtggacccctacgaacgcgccgttgctcgcttctgggtggcctacgttgacgacaagctggtagccccatggaggcagtggttgaagggcaagacagagaaggagaaatccgagggaaagaagcaggcgttcgcggcggtggaggtcctggaaggggccctgagggagtgctccaagggagggggtttcttcggcggggacggcgtcgggctcgtcgacgttgcgctgggaggcgtgctgtcgtggatgaaggtaaccgaggtgctgtccggtgacaagatcttcgacgctgccaagaccccgctcctggccgcgtgggtggagcacttcagcgggctcgacgcggccaaggcagccctgccggacgtgggcaggctgcttgagttcgccaaggcacgagaggttgccgctgcagcgtctaactgagcgagcacacatccaaaataattaaaatttgttatttttaaatgttgtttgttcggttgcttgatgtagtagtgtaccagtaactcatgttgtccatttattcagtattgattatgtcaaaaaaaaaaaaaaaa

SEQ ID NO: 8756 - protein, 230 aa, Zea mays
  misc_feature: Ceres CLONE ID no. 1463468
  misc_feature: Ceres CDNA ID no. 25892897
  misc_feature (7)..(78): Pfam Name: GST_N PFAM Desc: Glutathione S
  misc_feature (88)..(203): Pfam Name: GST_C PFAM Desc: Glutathione S
  misc_feature: Homolog of GI Number: 22038178 NR Desc: glutathione
  misc_feature: Homolog of GI Number: 22038179 NR Desc: glutathione S
  misc_feature: Homolog of GI Number: 21956482 NR Desc: glutathione
  misc_feature: Homolog of GI Number: 20143569 NR Desc: putative glutathione S
  misc_feature: Homolog of GI Number: 33304610 NR Desc: tau class GST protein 4
  misc_feature: Homolog of GI Number: 22038181 NR Desc: glutathione S
  misc_feature: Homolog of GI Number: 11385535 NR Desc: glutathione S
  misc_feature: Homolog of GI Number: 4127348 NR Desc: glutathione transferase
  misc_feature: Homolog of GI Number: 20143572 NR Desc: putative glutathione S
  misc_feature: Homolog of GI Number: 20143570 NR Desc: putative glutathione S
  misc_feature: Useful for making plants with altered leaf shape eg curled leaves
  misc_feature: Useful for sterility
MAGGDDLKLLGAWPSPFVTRVKLALAFKGVSYEDVEENLYNKSELLLKSNPVHKKIPVLIHNGAPVCESMIIVQYIDDVFTGTGPSLLPVDPYERAVARFWVAYVDDKLVAPWRQWLKGKTEKEKSEGKKQAFAAVEVLEGALRECSKGGGFFGGDGVGLVDVALGGVLSWMKVTEVLSGDKIFDAAKTPLLAAWVEHFSGLDAAKAALPDVGRLLEFAKAREVAAAASN

SEQ ID NO: 8757 - DNA, 688 bp, Zea mays
  misc_feature: Ceres CLONE ID no. 1463543
  misc_feature: Ceres CDNA ID no. 25891198
  CDS (36)..(464): REFERENCED BY SEQ ID NO: 8758
aaaaccgatctcagattcgtaacttccaatcatcaatggcgcccaaggcagagaagaagcccgcggaggagaaatcgaaagccgagaaggctccggcggagaagaaaccaaaggccgggaagaagctcccgaaggaggccggagcaggcgcaggcggagacaagaagaagaagacgaagaagaagagcgtcgagacgtacaagatctacatcttcaaggtcctgaagcaggttcacccggacatcggaatctcgagcaaggccatggggatcatgaacagcttcatcaacgatatcttcgagaagctcgctggtgaggcctcgaagctcgcgaggtacaacaagaagccaaccatcacttctagggagattcagaccgcggttaggcttgtgcttcctggagagttggcgaaacacgccgtgtcggaagggaccaaggctgtcacgaagttcaccagttcctagactatggggttgaattagagttcctttcttgttttttttcagtattgcaaatttgcaatttcacggtttgtatgtagtgcctattgcttttgttaaatcagttttcatgtccttgtttgtctctaatgttgctgtctgcttttgtggcattcgatcctccctccatagttgatatttatttgtttgtttaagatgctctttttttttcgaaaaaaaaaaaaaaa

SEQ ID NO: 8758 - protein, 142 aa, Zea mays
  misc_feature: Ceres CLONE ID no. 1463543
  misc_feature: Ceres CDNA ID no. 25891198
  misc_feature: No seed is being produced by the plant
  misc_feature: The plant flowers significantly late compared to wild-type.
  misc_feature: Useful for biocontainment applications
  misc_feature: Useful for making plants with modulated flowering time
  misc_feature (49)..(121): Pfam Name: Histone PFAM Desc: Core histone H2A/H2B/H3/H4
  misc_feature: Homolog of GI Number: 21536602 NR Desc: histone H2B
  misc_feature: Homolog of GI Number: 30102580 NR Desc: At3g45980
  misc_feature: Homolog of GI Number: 21554180 NR Desc: histone H2B
  misc_feature: Homolog of GI Number: 2558962 NR Desc: histone H2B1
  misc_feature: Homolog of GI Number: 82400146 NR Desc: histone H2B
  misc_feature: Homolog of GI Number: 3021485 NR Desc: histone H2B
  misc_feature: Homolog of GI Number: 21553526 NR Desc: putative histone H2B
  misc_feature: Homolog of GI Number: 3021489 NR Desc: histone H2B
  misc_feature: Homolog of GI Number: 10177235 NR Desc: histone H2B like protein
  misc_feature: Homolog of GI Number: 7635498 NR Desc: histone H2B
MAPKAEKKPAEEKSKAEKAPAEKKPKAGKKLPKEAGAGAGGDKKKKTKKKSVETYKIYIFKVLKQVHPDIGISSKAMGIMNSFINDIFEKLAGEASKLARYNKKPTITSREIQTAVRLVLPGELAKHAVSEGTKAVTKFTSS

SEQ ID NO: 8759 - DNA, 545 bp, Zea mays
  misc_feature: Ceres CLONE ID no. 1463570
  misc_feature: Ceres CDNA ID no. 36707067
  CDS (100)..(309): REFERENCED BY SEQ ID NO: 8760
atccacacccgccgtcgtctccgcatttccatcctgtcgtgggatcccagccaccgccgctagaagaagagctcggcgattcccaggtcccgcgagaagatgccgaagcagatctatgagattaaggacttcctcctcaccgcgaggaggaaggatgcccgctcagtgaagatcaagaggagcaaggatgttgtcaagttcaaggtgcgctgctccaagtacttgtacacgctctgcgtcttcgatgctgagaaggcaaacaagttgaagcaatctcttcccccaggtttgaccgtcgaggaggtctgattggatacatggcaacgccgggttgaactacccaagcttctttatcagtagcagagcatgctactcatgtacttttggaacctaagctattagacctgtcagtgttgaatgtgtggatcttgcatttttgtggagaaataccaatttacctcgttcaaggatgcacctttcagtatatttcttgtttaactgcacattactttatatttatgcctgtttcataaaaaaaaaaaaaa

SEQ ID NO: 8760 - protein, 69 aa, Zea mays; identical to SEQ ID NO: 8740
  misc_feature: Ceres CLONE ID no. 1463570
  misc_feature: Ceres CDNA ID no. 36707067
  misc_feature (2)..(69): Pfam Name: Ribosomal_L38e PFAM Desc: Ribosomal L38e protein family
  misc_feature: Homolog of GI Number: 50938225 NR Desc: putative 60S ribosomal protein L38
  misc_feature: Homolog of GI Number: 23507773 NR Desc: At3g59540/T16L24_90
  misc_feature: Homolog of GI Number: 50931949 NR Desc: putative 60S ribosomal protein L38
  misc_feature: Homolog of GI Number: 313027 NR Desc: ribosomal protein L38
  misc_feature: Homolog of GI Number: 15825507 NR Desc: ribosomal protein L38
  misc_feature: Homolog of GI Number: 27497793 NR Desc: 60S ribosomal protein L38
  misc_feature: Homolog of GI Number: 82895480 NR Desc:  similar to ribosomal protein L38
  misc_feature: Homolog of GI Number: 49900028 NR Desc: MGC89823 protein
  misc_feature: Homolog of GI Number: 4506645 NR Desc: ribosomal protein L38
  misc_feature: Homolog of GI Number: 61372160 NR Desc: ribosomal protein L38

SEQ ID NO: 8761 - DNA, 552 bp, Zea mays
  misc_feature: Ceres CLONE ID no. 1463638
  misc_feature: Ceres CDNA ID no. 36707158
  CDS (52)..(351): REFERENCED BY SEQ ID NO: 8762
aattcgtttatagcgagcacaccagcgaaccagagattcatcagagtggcgatggccccgagcgcgtcgatgctgttcctgagctaccaccagctccacaggccgacggaggtggggacgccgccgccgccgccgcgcagggaggcggctgcccccggtggcttctggaggaggatgagcgtgagcagcgtgctctcacccgctttgttgcagtggcggccggagggggaggcgacactgcacgaacgcgacgccggcgaggagatcaagtcatcggcgccggccgacgctgataaggagctggaaagcaagttcgaggaggcgctgcgcctcagctgctggtcttcatgagcatccatccatcatggggaacggagagacgcgagcgtgccgctgaatcgaagcgacctctcctctaaacagccgtcctgtatatcttcctccgtgtatcaaaatccatccttttgctttagatttttgtacatttgtaatcgtcacatccgctcaaatatgttatatatattttagtttggagcaaaaaaaaaaaaaaaa

SEQ ID NO: 8762 - protein, 99 aa, Zea mays; identical to SEQ ID NO: 6916
  misc_feature: Ceres CLONE ID no. 1463638
  misc_feature: Ceres CDNA ID no. 36707158

SEQ ID NO: 8763 - DNA, 614 bp, Zea mays
  misc_feature: Ceres CLONE ID no. 1463800
  misc_feature: Ceres CDNA ID no. 25445680
  CDS (218)..(430): REFERENCED BY SEQ ID NO: 8764
tttttttctccttacctcctgggctcaggcctcaggcgcacagccttctgcttctcttcctctcctcgcgtccccccaccaaaccctaacccgagcacccagcccctcctcgcgtctgctcgcgccggcctttggggctctcactctgagcggcagggacccgcagggctccggttgtgtccaggaaacatcccagttgttggcgagagaccaagaaatggcggagaaggagggagcgaaggttggagcggaagagatggaagagcgggagcaggaaggggaggcagaggaggtggaggtgaagtttcgtctcttcgatggctctgacatcggtcccgtgcgctgcaacgccgccgccactaccgtagccgccctcaaggatcgcgtcgtcgccgattggcccaaaggtcttaaaagttccgttttttgagttgaggaactcttgtgaggcgtaatgagccggccccgcccatgctgtgaagtcttgtgatatatactgctaaatttgcttatatttttgttgctattcttagtccctatgtctatgtgtcgcaaggaggaacatagggctttaaagggaatgagctcagattttcttaaaaaaaaaaaaaaaa

SEQ ID NO: 8764 - protein, 70 aa, Zea mays
  misc_feature: Ceres CLONE ID no. 1463800
  misc_feature: Ceres CDNA ID no. 25445680
  misc_feature: Homolog of GI Number: 50923895 NR Desc: OSJNBa0055C08.14
  misc_feature: Homolog of GI Number: 4097567 NR Desc: ATGP4
  misc_feature: Homolog of GI Number: 27765070 NR Desc: At4g24990
MAEKEGAKVGAEEMEEREQEGEAEEVEVKFRLFDGSDIGPVRCNAAATTVAALKDRVVADWPKGLKSSVF

SEQ ID NO: 8765 - DNA, 673 bp, Zea mays
  misc_feature: Ceres CLONE ID no. 1464090
  misc_feature: Ceres CDNA ID no. 36707254
  CDS (185)..(394): REFERENCED BY SEQ ID NO: 8766
tttttcgacttacctgattgtgatgccaatattgcgaaacaccatattgaagactcaaatatacaattgtctcgtcctcgtaaccctagacaacccataaggccataccctccaaccgctggatcgggtatcggcattactgggcgcacgagactagggatttcccccttgcaatcacgaatccatggcggatgctgaacctgttgatcagaagaattaccttgaggaacgttgcaagccgcaatgtgtaaaaacattgtatgattatgagaaatgcgtcaagagagtcgagagcgacggaagtgggcagaagcactgcaccggccaatacttcgactactggtcatgcgttgacaagtgtgttgcaccaaagctcttcgacaaactgaaatgataacggaacgcaactttgaaggcgcggctcctttcaggaagtcaaatagctccaataaacccatgccttggcctctggaatttgtttgctgaacctgtggcagggagcctcattttgatacgttttgctgaaccgtctttgttttttttttccccctgaatctgtgtggtatcccaagcgtcgagcccaatttcttttgtataagaataatgaggtgcccataaaaaataggccccaagaagattgttcgaatgtacacaagcaaaaaaaaaaaaaaaa

SEQ ID NO: 8766 - protein, 69 aa, Zea mays; identical to SEQ ID NO: 746
  misc_feature: Ceres CLONE ID no. 1464090
  misc_feature: Ceres CDNA ID no. 36707254
  misc_feature (7)..(69): Pfam Name: UCR_hinge PFAM Desc: Ubiquinol
  misc_feature: Homolog of GI Number: 62732974 NR Desc: ubiquinol
  misc_feature: Homolog of GI Number: 21554004 NR Desc: putative ubiquinol
  misc_feature: Homolog of GI Number: 15218058 NR Desc: ubiquinol
  misc_feature: Homolog of GI Number: 488712 NR Desc: ubiquinol
  misc_feature: Homolog of GI Number: 5103810 NR Desc: Similar to gbX79273 cytochrome c reductase hinge protein subunit from Solanum tuberosum.
  misc_feature: Homolog of GI Number: 50252217 NR Desc: putative ubiquinol
  misc_feature: Homolog of GI Number: 14532878 NR Desc: putative ubiquinol
  misc_feature: Homolog of GI Number: 68128316 NR Desc: ubiquinol

SEQ ID NO: 8767 - DNA, 647 bp, Zea mays
  misc_feature: Ceres CLONE ID no. 1464222
  misc_feature: Ceres CDNA ID no. 25446131
  CDS (70)..(303): REFERENCED BY SEQ ID NO: 8768
aaaacaccaccatcactccaccagatctccccgccccgcggccgtggcagcgtcggcgaggaagtcggcatgagcgtgttcggcggcgacagctgggcgcgtgatgcgcagcagcggaagcggcgtctcgacgagctcttgctacccatcacggcgccctcgtctccctcgacgcctgattccttcaagaagctccccaacggcaagctcgcctgcctcgtctgcccccaccgccccgtcctcgacaccccgctcatgctctccgtaagctggcatcacataccccgggttctcctttactagactcctcttgttaatttctgatgaatgtcctacgatggcgtgaatctgtacattagggaggattagctcgtgtaacttctattttcttcctacagaagcccattttcgtccttccactagtaaacagatcttccccgaactttcttctataattcaaatagtgtctggagtgacacgttgtaccgtcttaagatgttaaagataaatgagccagagactatgacgctgtttgggagggctccggctcctccgaaaacggctccggctccgactcctttaaaggagtagctcttccgtaggagccgatgtcttttacaaatcgtttgacaaaaaaaaaaaaaaaa

SEQ ID NO: 8768 - protein, 77 aa, Zea mays
  misc_feature: Ceres CLONE ID no. 1464222
  misc_feature: Ceres CDNA ID no. 25446131
MSVFGGDSWARDAQQRKRRLDELLLPITAPSSPSTPDSFKKLPNGKLACLVCPHRPVLDTPLMLSVSWHHIPRVLLY

SEQ ID NO: 8769 - DNA, 487 bp, Zea mays
  misc_feature: Ceres CLONE ID no. 1464224
  misc_feature: Ceres CDNA ID no. 40351929
  CDS (52)..(339): REFERENCED BY SEQ ID NO: 8770
atcaacacatttttggtattagactattgtagctcatatcatctgtcacccatggcgaagtgcagcagcttccaaggattattctggttgctttccatgattcttctagcatcctttgttgctcatgcacgcacaacaagtgggcacaccaaagaggacagcaatgctaggaacatgacgatgaccaagacgagggcatcgggcaacatacttgttagccgtaatgacgacgggccatgctatctagattccggtcttaatgagtacgtctgcagaaagactaataagtgctataagagcttggtgctctgcgtggcgagttgtcaaccatcatcatgaattcatgatactgcggagacatcatgatactgcggagacagacggcgagagatgaggctagctagatgctgtttcaccaaaatattatgtaacacccaaatctcccattttaagaaataaataagattttccaaaaaaaaaaaaaaaa

SEQ ID NO: 8770 - protein, 95 aa, Zea mays
  misc_feature: Ceres CLONE ID no. 1464224
  misc_feature: Ceres CDNA ID no. 40351929
  misc_feature (16)..(91): Pfam Name: BAP PFAM Desc: Basal layer antifungal peptide
MAKCSSFQGLFWLLSMILLASFVAHARTTSGHTKEDSNARNMTMTKTRASGNILVSRNDDGPCYLDSGLNEYVCRKTNKCYKSLVLCVASCQPSS

SEQ ID NO: 8771 - DNA, 1447 bp, Zea mays
  misc_feature: Ceres CLONE ID no. 1464226
  misc_feature: Ceres CDNA ID no. 35383426
  CDS (136)..(1116): REFERENCED BY SEQ ID NO: 8772
actctgtgctagactgtcatcccttcctccttccccgcgcgtacacactcccgcggcggcagccaccatcccggagctcgagaccagcggcaccaggagggtgacgggccggcgactcagtcgagcaccactcccatggcggacaagatctccacgatcgtcctcaaggttgaccttgaatgcgagagatgctacaggaagatcagaaaagtcctctgcaagatccaagacaagatgaacatcaagacgatctcgttcgacgagaagagcaatgccgtgaccatctccgggccgttcgacgccgacacggtctgcaacaagctctgctgcaaggctggccgggtcatcaaggcgatggacgtcaagggcaaggacaaggacaaggacaaggacggcggcaaggccaaggagggcggcggcgacaagcccaaggacgccggcaaaccggcggcggccgagaaggacgcaggcaaggccgggaaggagggcggcgccaaggcggagaagaaggaggagaaggccgagaagaagaaggaggagaaggccgataagaaggaggggggcaagggcgacaaggaggcgaagccggcggagaagggcaacaaggacgggaaggcggaggccaagaaggtgaagttcgccgaggtccccgcggcggacgcgaagcccggcaaggccatgccgcccggcatgaccaaggccgacctgggcccgctcctggagaagatgatggcggccaaggccgggtccgagccgcagccgatcgcgccgccgccgggcgccgcgcagggcgtggccgtgccgtccgtctggcccgcgcccgccgggtccgtgtccggctacggctacggctacaacccaggctacgaggcgccgccgccgccgtcctactacgccgctggcgccgggggcggctacggctgcggctgcggcggctacaacggctactgccggtgcggcaagccggccgcgcccgggcccggcgggtactacggcgtgccggtgtacgatagccaggggtggtactacggcggtggcggcggcgcccggcagccgtactacccgcagcagcagaactgctgcgaggaccccaatgccgggtgcagcgtcatgtgatggcgatgcccgccagcccgtggattggatggacagacagagcaatcagtgtgtggtcacagtcacacagccatagtgccatggccagtgccggagtcggggagaaaggaacttctatttttttttcccgcgtgtcgtcttgttcttgtttatgccccgtggattctgtttatttatttattttagggagttgagttgtgcatgtgaacagtcgatgctcatggtgtgtctatctagtgtgggtgatgaaagtataacgacagtacagtaccagtagtttgtttagatgaaagcatggaacaccttgagtgctctaaaaaaaaaaaaaaaa

SEQ ID NO: 8772 - protein, 326 aa, Zea mays
  misc_feature: Ceres CLONE ID no. 1464226
  misc_feature: Ceres CDNA ID no. 35383426
  misc_feature: Homolog of GI Number: 23480318 NR Desc: Drosophila melanogaster CG8797 gene product
  misc_feature: Homolog of GI Number: 66776813 NR Desc: Phosphoribosylaminoimidazole
  misc_feature: Homolog of GI Number: 62655768 NR Desc:  similar to serine/arginine repetitive matrix 2
  misc_feature: Homolog of GI Number: 5821151 NR Desc: RNA binding protein
  misc_feature: Homolog of GI Number: 6649242 NR Desc: splicing coactivator subunit SRm300
  misc_feature: Homolog of GI Number: 71891780 NR Desc: KIAA0324 protein
  misc_feature: Homolog of GI Number: 19923466 NR Desc: splicing coactivator subunit SRm300
  misc_feature: Homolog of GI Number: 28972153 NR Desc: mKIAA0324 protein
  misc_feature: Homolog of GI Number: 5821145 NR Desc: RNA binding protein
  misc_feature: Homolog of GI Number: 47124032 NR Desc: SRRM2 protein
MADKISTIVLKVDLECERCYRKIRKVLCKIQDKMNIKTISFDEKSNAVTISGPFDADTVCNKLCCKAGRVIKAMDVKGKDKDKDKDGGKAKEGGGDKPKDAGKPAAAEKDAGKAGKEGGAKAEKKEEKAEKKKEEKADKKEGGKGDKEAKPAEKGNKDGKAEAKKVKFAEVPAADAKPGKAMPPGMTKADLGPLLEKMMAAKAGSEPQPIAPPPGAAQGVAVPSVWPAPAGSVSGYGYGYNPGYEAPPPPSYYAAGAGGGYGCGCGGYNGYCRCGKPAAPGPGGYYGVPVYDSQGWYYGGGGGARQPYYPQQQNCCEDPNAGCSVM

SEQ ID NO: 8773 - DNA, 1234 bp, Zea mays
  misc_feature: Ceres CLONE ID no. 1464266
  misc_feature: Ceres CDNA ID no. 40351930
  CDS (78)..(1127): REFERENCED BY SEQ ID NO: 8774
gcccttggaaactagtcaagttcagtgcccccatacttccgtcgcggcggagatcgagtcgagcgcccgccacggcgatggcggctagagtcctgccgccgccgccgctccctctcgtactcctcttgctgctgctcccgctctcagcccgggacaccgtcgccgcgggcgaggatttcccacgcgacgggcgggtgatcgacctcgacgagagcaacttcgaggcggcgctgggcgtcatcgacttcctcttcgtcgatttctacgcgccatggtgcggccactgcaagcgccttgcgcccgagttagatgaagctgcaccaatgttggcagggttgagtgagcccattgttgttgccaaagttaatgctgataaatacaggaaacttggatcaaaatatggagttgatgggttccctaccctcatgctttttatccacggtgttccaattgaatacactggttcgaggaaggctgatcagcttgtccgcaatctgaagaagtttgttgcgccagatgtttctatccttgagtcagactctgcgataaagaactttgttgagaatgctggtacaagctttcctatgttccttggttttggggtgaatgactcattgattgctgaatatggaaggaaatacaagaaaagagcatggtttgctgttgctaaagatttctctgaggacgtcatggtagcctatgaatttgacaaggttccggcgctagttgcaatccatccaaagtataaggaacaaagcttgttctatggcccatttgaagaaaatttcttggaagattttgtacgacaatcccttctccctttggttgtcccaatcaatacagagacgataaaaatgttgaatgatgatcagaggaaagttgttctcacaattttggaggatgattcagatgaaaattctacacagctggtaaagattttgagatctgctgctagcgcaaaccgtgatttggtgtttggatatgttggaatcaagcaatgggatgagtttgtggagacttttgatgtttccaaaagctcacagctgccaaagctacttgtgtgggatagaaatgaggagtatgagctcgtaagtacagtatcctcagtaattaattctattttctaataccaccatccatataaagtgttactggcatgtttctgactaatgatgcaaaagtttttctatcaataaaggtattgcttttataggttccaaaaaaaaaaaaaaaa

SEQ ID NO: 8774 - protein, 349 aa, Zea mays
  misc_feature: Ceres CLONE ID no. 1464266
  misc_feature: Ceres CDNA ID no. 40351930
  misc_feature (39)..(145): Pfam Name: Thioredoxin PFAM Desc: Thioredoxin
MAARVLPPPPLPLVLLLLLLPLSARDTVAAGEDFPRDGRVIDLDESNFEAALGVIDFLFVDFYAPWCGHCKRLAPELDEAAPMLAGLSEPIVVAKVNADKYRKLGSKYGVDGFPTLMLFIHGVPIEYTGSRKADQLVRNLKKFVAPDVSILESDSAIKNFVENAGTSFPMFLGFGVNDSLIAEYGRKYKKRAWFAVAKDFSEDVMVAYEFDKVPALVAIHPKYKEQSLFYGPFEENFLEDFVRQSLLPLVVPINTETIKMLNDDQRKVVLTILEDDSDENSTQLVKILRSAASANRDLVFGYVGIKQWDEFVETFDVSKSSQLPKLLVWDRNEEYELVSTVSSVINSIF

SEQ ID NO: 8775 - DNA, 804 bp, Zea mays
  misc_feature: Ceres CLONE ID no. 1464294
  misc_feature: Ceres CDNA ID no. 25445870
  CDS (91)..(588): REFERENCED BY SEQ ID NO: 8776
agtagcatccaattgattgttctatcctcttctctgttctcacccccttgcaagcaacaatcgttcaccgatcgatccagtgcgtcctgcatggaaactgccgccgtcgccgccgccggtgccgggcgccgcatcatggtggccgtggacgagggcgaggagagcctgcacgcgctcaactggtgcctcgccaacgtcgtctccccggcaggaggcgacacgctggtgctcgtccacgcccgccgcccgcgcccggtctacgccgccatggacagcgcagggtacatgatgacctcggacgtgctggcgagcgtcgagaggcacgccaacgcggtctcggcggcggcggtcgacaaggccaagcgcgtctgcgcggaccacccgcacgtcaaggtggagacgatggtggagagcggggacccgcgggacgtcatctgcgacgccgccaacaagatggccgcggacctgctcgtcatgggcagccatggttacggcttcatccagagggcgttcttgggcagcgtcagcaaccactgcgcgcagaactgcaaatgcccggtcctcattgtcaagaggcccaaggagtagaaaggctcctcgcatgtacgctgcagcttagccaataatgtttcatgggcgaccatataggcatatatgtacacacttcacatcccattgcatggcagtgtcttcccttccctagttcaacaactagctttctgctggaataaggtgttcagacaaatcttcttgcatttggtactcttgtttagagagaagcgttccctaaaaaaaaaaaaaaaa

SEQ ID NO: 8776 - protein, 165 aa, Zea mays
  misc_feature: Ceres CLONE ID no. 1464294
  misc_feature: Ceres CDNA ID no. 25445870
  misc_feature (12)..(161): Pfam Name: Usp PFAM Desc: Universal stress protein family
  misc_feature: Homolog of GI Number: 52077479 NR Desc: putative ER6 protein
  misc_feature: Homolog of GI Number: 34905540 NR Desc: B1146F03.27
  misc_feature: Homolog of GI Number: 34914610 NR Desc: P0520B06.18
  misc_feature: Homolog of GI Number: 20067187 NR Desc: putative universal stress protein USP1
  misc_feature: Homolog of GI Number: 55792398 NR Desc: universal stress protein
  misc_feature: Homolog of GI Number: 50939901 NR Desc: universal stress protein USP1
  misc_feature: Homolog of GI Number: 5669654 NR Desc: ER6 protein
  misc_feature: Homolog of GI Number: 18399413 NR Desc: universal stress protein
  misc_feature: Homolog of GI Number: 77556730 NR Desc: universal stress protein family
  misc_feature: Homolog of GI Number: 21594903 NR Desc: ethylene
  misc_feature: Useful for making bigger plants
  misc_feature: Useful for making plants with increased biomass and foliage
METAAVAAAGAGRRIMVAVDEGEESLHALNWCLANVVSPAGGDTLVLVHARRPRPVYAAMDSAGYMMTSDVLASVERHANAVSAAAVDKAKRVCADHPHVKVETMVESGDPRDVICDAANKMAADLLVMGSHGYGFIQRAFLGSVSNHCAQNCKCPVLIVKRPKE

SEQ ID NO: 8777 - DNA, 643 bp, Zea mays
  misc_feature: Ceres CLONE ID no. 1464356
  misc_feature: Ceres CDNA ID no. 40351931
  CDS (223)..(372): REFERENCED BY SEQ ID NO: 8778
acacattcagttgtacttgtccatatccagtacccttcgcttgggttcagtaaagcttccccttgccctcaggttttagctcgagaccactgcgtaagtgctggaattcctgtgttcacgctagtactcacctctccccagtcaccaaacttcgcccctcacagaaacttgcacgccatcttcctgccagtggtgaccatagcagcagtttacatcctcaccatggccaagattcgtcggaggttgtctcggtcgtgtggtgcccgttccttgttcctcatagaattcccagaagaagatgaaattcaagaagtagtttctaaaaaggagtttgctccagtgcctattcagcaagtggatggagctatctaactggttattgggtagaaaggtcttgagcctcttcactgcaacaaaggtgatgaggagtactctatgtgttcgtgaggctggagggcgcttccagttctagaggaggattagttaggcttatgtataagctttggagggttcctaccttcctgctattgtattaagttatgcactttaagtatatcaggacttgtaataaatgtaactcttcctatgtaataaccttcagttttagaaataaaaagaattttttgtaaaaaaaaaaaaaaaa

SEQ ID NO: 8778 - protein, 49 aa, Zea mays
  misc_feature: Ceres CLONE ID no. 1464356
  misc_feature: Ceres CDNA ID no. 40351931
MAKIRRRLSRSCGARSLFLIEFPEEDEIQEVVSKKEFAPVPIQQVDGAI

SEQ ID NO: 8779 - DNA, 1746 bp, Zea mays
  misc_feature: Ceres CLONE ID no. 1464366
  misc_feature: Ceres CDNA ID no. 40351932
  CDS (46)..(1257): REFERENCED BY SEQ ID NO: 8780
atcgcaaggagtcctccacttcactcctcctgcccacttccggtgatggccggccgcctcacgggcgccgccgcgtcctcaccgctttcccgcgcgctcctcctcctcgccgcgctcgggctcttctccatctccttcctctcactccgctccctccgccccgcggcggaccccgcgctcgcggccgccgccgacaagtcccgccccctcctccggctccactcctcttcgacggtgtatcactctccggaggcgttcgcggtggggtacgcggagatggagcggagcttcaaggtgtacatctacccggacggcgaccccaaaacattctaccagactcctcgcaagctcacggggaagtacgccagcgagggctacttcttccagaacatccgagagagccggttccgcaccgatgaccccgaccaggcgcacctctttttcgtccccatatcgccccacaagatgcgcggcaagggtacttcatatgagaatatgacggtgatagttaaggactacgtagaaggtttgataaacaagtatccttactggaacaggacactaggagcagaccacttcttcgtcacctgccatgatgtgggtgtgagagcatttgaaggacttaaattcatggtgaaaaactctattagagttgtatgttcgccaagctataatgttgactttataccgcataaggatattgcccttcctcaagtactgcagccgtttgccctacacgaaggaggaaatgatattgacaacagggtaattcttggcttttgggctggccatcgcaattccaaaataagggttatcctagcacgagtttgggagaatgacacagaacttgctatcagcaacaatcggatcagtagagctattggagagctagtttatcagaagcagttttaccgtaccaagttctgtatctgtcctggtggttcacaagttaacagtgcacgtatatctgactcaatacactatggttgtgttcctgttattctgtcagactactatgatctgcctttcaatgatgcccttgactggagaaagtttgcagttatacttagggagagagatgtgtatcaactgaagaatatcttgaaatctatatcacaggaggagtttatttcattgcataaatcgctagttcaggtgcagaaacactttgtgtggcattcacctcccgtctcctacgatgcattccacatggttatgtatgaactgtggttgcgtcataatgtaattaagtactgaagcctctcagcctcttgagttttgattgataacccaaatgactgatctatcagaaagacactaccaagtctgacagcctgctgttgctaccttgaaaacggcaatttggttatttgctctttgaatatccagctggatggatcattgaatataatgttagctatgcatggtgcaacgaagagcatgtccaagaaagagttggccgctgtccagcatatatgacaaaactgtagtcctggttaattgatagattagctgattcttttaacaatagttagccttctcatatttcaatcttttcttatatttcacagaacagcttggttgattgtatgtagtttccccgtgcatttttttttgttcaatggcttcaggcatgtaaggttgtctcacataacaacgttttgcacggctatatgtacggtctgctggagagagcctaagtaatgcatgtataatacaatattattgataaaaaaaaaaaaaaaa

SEQ ID NO: 8780 - protein, 403 aa, Zea mays
  misc_feature: Ceres CLONE ID no. 1464366
  misc_feature: Ceres CDNA ID no. 40351932
  misc_feature: null
  misc_feature: Useful for making plants with altered cell wall content and/or composition
  misc_feature (84)..(368): Pfam Name: Exostosin PFAM Desc: Exostosin family
MAGRLTGAAASSPLSRALLLLAALGLFSISFLSLRSLRPAADPALAAAADKSRPLLRLHSSSTVYHSPEAFAVGYAEMERSFKVYIYPDGDPKTFYQTPRKLTGKYASEGYFFQNIRESRFRTDDPDQAHLFFVPISPHKMRGKGTSYENMTVIVKDYVEGLINKYPYWNRTLGADHFFVTCHDVGVRAFEGLKFMVKNSIRVVCSPSYNVDFIPHKDIALPQVLQPFALHEGGNDIDNRVILGFWAGHRNSKIRVILARVWENDTELAISNNRISRAIGELVYQKQFYRTKFCICPGGSQVNSARISDSIHYGCVPVILSDYYDLPFNDALDWRKFAVILRERDVYQLKNILKSISQEEFISLHKSLVQVQKHFVWHSPPVSYDAFHMVMYELWLRHNVIKY

SEQ ID NO: 8781 - DNA, 811 bp, Zea mays
  misc_feature: Ceres CLONE ID no. 1464375
  misc_feature: Ceres CDNA ID no. 36591025
  CDS (116)..(565): REFERENCED BY SEQ ID NO: 8782
ataaaagcgttcccctcctgtctgtccgctctatacgccgccatcttcgcaagccaccgcaaccgaagcccgccttcgccgccgccgcctctgcgatccccgcaaggtcgcaaacatgtctaccgtgctccagcgcccgacccccggcacggtccagtgcttcggccgcaagaagacggctgtggccgtcgcctacaccaagccggggcgcgggctgatcaaggtgaacggcgtcccgattgagctcatcaggccggagatgctccgcctcaaggccttcgagcccatcctgctggcggggcgctccaggttcaaggacatcgacatgaggatccgcgtccgaggcggcgggaagacgtcgcagatctacgccatccgccaggccgtcgccaaggggctcgtcgcctactaccagaagtacgtcgacgaggccgccaagaaggaggtcaaggacatcttcacccggtacgaccgcacccttctcgtcgccgaccccaggcgctgcgagccgaagaagttcggtggtcgtggcgcccgcgccaggttccagaagtcctaccgttgagcgctcggctgcccgcgcttgccggaccgttgcctgtgttgtcccaacctgccagttcgatgcctgtacccgtggcttaattttctatcatcggagctacttatgtggttctataactagatgctgttttaccttcaacttatgctgttgtaccttcatatttggacttcttaagccttgtgtcggacgcctttggcattgtgatatgaaacatgagagattttgaaggcaaaaaaaaaaaaaaaa

SEQ ID NO: 8782 - protein, 149 aa, Zea mays; identical to SEQ ID NO: 190
  misc_feature: Ceres CLONE ID no. 1464375
  misc_feature: Ceres CDNA ID no. 36591025
  misc_feature (17)..(149): Pfam Name: Ribosomal_S9 PFAM Desc: Ribosomal protein S9/S16
  misc_feature: Homolog of GI Number: 77552917 NR Desc: ribosomal protein S9
  misc_feature: Homolog of GI Number: 7440266 NR Desc: probable ribosomal protein S16
  misc_feature: Homolog of GI Number: 2641209 NR Desc: ribosomal protein S16
  misc_feature: Homolog of GI Number: 6984222 NR Desc: 40S ribosomal protein S16
  misc_feature: Homolog of GI Number: 439654 NR Desc: RS16 protein
  misc_feature: Homolog of GI Number: 21555842 NR Desc: 40S ribosomal protein S16
  misc_feature: Homolog of GI Number: 4574242 NR Desc: ribosomal protein S16
  misc_feature: Homolog of GI Number: 16323500 NR Desc: putative 40S ribosomal protein S16
  misc_feature: Homolog of GI Number: 6721162 NR Desc: putative 40S ribosomal protein S16
  misc_feature: Homolog of GI Number: 62083431 NR Desc: ribosomal protein S16

SEQ ID NO: 8783 - DNA, 831 bp, Zea mays
  misc_feature: Ceres CLONE ID no. 1464385
  misc_feature: Ceres CDNA ID no. 29191582
  CDS (99)..(545): REFERENCED BY SEQ ID NO: 8784
ctctgtttttcctctcctgccagtccccacatcgcctccgctcctcgcagcgcaacccaggcgatccgcgccggcccctccccggcgcttcagggaaaatggcagagcatctctttgaggacatcttccacgtgaccaggattgatcccgatggcaagaagttcgacagagttaaccgcattgaggctagaagtgagcagttggagatgtacatgcaattagatatcgctaccgatgtctacccaatgcatatgggtgacaagttcaccatggttttagctccgacactgaatctggacgggactccagacactggctactatacacaggctggcaggaaaacacttgctgacaagtatgactatgtcatgcatggaaagctttacaagatttcagaggacaattccagcaaggataaaggacctactaaagtggagatctatgcatcttttggcggcctcctgatgttgctcaaaggtgatccttcaagtgctgctaacctcgagctggatcaaaagctgttcctcctcatccgaaaggtgtaaacgtgtcatctacctgataaccagcgcttgtagttcactcaaggctataccaagcctgtgatcgtttggaggctaatcgtcctacaccctcatgtactcttttggcggtaatacaactctagattggtaccatggcttctctgtagcaccagtcgcttattcctgttcccctggagcgcattatgcgtgttactaacttatgctgtcgatgttccgggtaaattatgatgaaacacgaatgttatctctggtaataattattatcactggaaaaaaaaaaaaaaaa

SEQ ID NO: 8784 - protein, 148 aa, Zea mays
  misc_feature: Ceres CLONE ID no. 1464385
  misc_feature: Ceres CDNA ID no. 29191582
  misc_feature (7)..(147): Pfam Name: RNA_pol_Rpb8 PFAM Desc: RNA polymerase Rpb8
  misc_feature: Homolog of GI Number: 53793231 NR Desc: putative RNA polymerase I
  misc_feature: Homolog of GI Number: 50920087 NR Desc: putative  RNA polymerase
  misc_feature: Homolog of GI Number: 4585968 NR Desc: RNA polymerase I
  misc_feature: Homolog of GI Number: 13094965 NR Desc: RNA polymerase I
  misc_feature: Homolog of GI Number: 66816149 NR Desc: RNA polymerase I core subunit
  misc_feature: Homolog of GI Number: 14193247 NR Desc: RNA polymerase subunit
  misc_feature: Homolog of GI Number: 21358365 NR Desc: CG11246
  misc_feature: Homolog of GI Number: 62657461 NR Desc:  similar to polymerase
MAEHLFEDIFHVTRIDPDGKKFDRVNRIEARSEQLEMYMQLDIATDVYPMHMGDKFTMVLAPTLNLDGTPDTGYYTQAGRKTLADKYDYVMHGKLYKISEDNSSKDKGPTKVEIYASFGGLLMLLKGDPSSAANLELDQKLFLLIRKV

SEQ ID NO: 8785 - DNA, 1268 bp, Zea mays
  misc_feature: Ceres CLONE ID no. 1464451
  misc_feature: Ceres CDNA ID no. 36706700
  CDS (21)..(863): REFERENCED BY SEQ ID NO: 8786
ccgctgcagcctttcgaattatggcagctgccgcagccgcgggcggagctgcatcagccgccgtcgccagccaagaacctatgaaggctctcggcacaggcatcctccgccgctccgcgccgcactggtccacagccgccgcttccttcttttccccacccttccgcccccgccgctgccgtcgcgcgcccgctcctgcagccgccgcgcgtaccccgcggtcccgcgcgagtgccaaggcccgggcgaagctcctggcggaggttgaggcccgggacccctggctcgcctccctctcgctgcttccgaccgacgacatccccagtgctgacgccaccaccaacgggtgggtgattggggtggatcctgacattggaggcgccatcgccgtcctctcgcctgacggctcgtctcaggtgtttgacaacccgttcgtgcacattgtggtgtcagaagtcatccgtaagcgactggacaccaagtcaattatccaactgctccgtggccttgatgcgcctcctggaactacggcatacattgagaagtctagcccatttccaactgatggaaagcagggatggtggagcactggtttctcatatggcttgtggattgcttctctagtggcttcggggttttcggttgtcccgattgcatctcagacatggaaggcttactttgggctaatgcgaagtgaaacaccaaaggatgatagcagacaagctgcttcaattttgttccctgacaaagatcagtccttgaagttgaaaaaacaccatgggcgagcagaggctcttctgttagcagcctatgggaaaggccttgtgctgccatcggggaagttcagcaaaacctcagtttgatgtctatggtgattgcagattgacttgccttttttttgggggtaaacagaggctcttctgttagcagcctatgggaaaggccttgtacgatgcctatggtgattgccgactgacttaccatttcctgtattgatggtactgcaaattttcatttcgcttaggaggccccaatcaagacattaaggttgaatctgctgtaagtttgcaaaccgtaatagagatcatagctaacccatcatttttcgtggaatgcattacagcattagacatttcccattgtgtccttagtgtggcaggctacctagatgaaatctggatgttgtaaacatgtaatgatggaaactggaatgaactggtcgtcttttcggtgaaagtggactcgtttgctcaaaaaaaaaaaaaaaa

SEQ ID NO: 8786 - protein, 280 aa, Zea mays
  misc_feature: Ceres CLONE ID no. 1464451
  misc_feature: Ceres CDNA ID no. 36706700
MAAAAAAGGAASAAVASQEPMKALGTGILRRSAPHWSTAAASFFSPPFRPRRCRRAPAPAAAARTPRSRASAKARAKLLAEVEARDPWLASLSLLPTDDIPSADATTNGWVIGVDPDIGGAIAVLSPDGSSQVFDNPFVHIVVSEVIRKRLDTKSIIQLLRGLDAPPGTTAYIEKSSPFPTDGKQGWWSTGFSYGLWIASLVASGFSVVPIASQTWKAYFGLMRSETPKDDSRQAASILFPDKDQSLKLKKHHGRAEALLLAAYGKGLVLPSGKFSKTSV

SEQ ID NO: 8787 - DNA, 661 bp, Zea mays
  misc_feature: Ceres CLONE ID no. 1464537
  misc_feature: Ceres CDNA ID no. 36706815
  CDS (63)..(491): REFERENCED BY SEQ ID NO: 8788
acgaactcaaagctcgagcctttcgcagttgcagcttctccgtctatctcgccgtcgtcaacatgggtaagacacgtggtatgggagctgggcgaaagctgaagaggcttaggataaaccagaggtgggcggacaagcagtacaagaagtctcaccaaggcaatgagtggaagaagccttttgctggatcttctcacgccaagggaatcgtccttgagaagattggtattgaggccaagcagcctaactctgccattcgtaaatgtgctagagttcagttgatcaagaacggcaaaaagattgctgctttcgttcctaatgatggttgcttgaactacattgaagagaacgacgaggtgttgattgctgggtttgggcgtaagggtcatgccgtcggagatattcccggagttagattcaaggtggtgaaggtctctggtgtctcactcttggctcttttcaaggagaagaaggagaagcctaggtcttaaagttgtctactactgcttctcacgcttattttgttaatggattttgatatctgaatacattcctctgttctgctttaaagataaatctgtttggattcagtttacactttttgagtattctctctccctgcattaaagctttcttaatttctctaaaaaaaaaaaaaaaa

SEQ ID NO: 8788 - protein, 142 aa, Zea mays; identical to SEQ ID NO: 5580
  misc_feature: Ceres CLONE ID no. 1464537
  misc_feature: Ceres CDNA ID no. 36706815
  misc_feature (9)..(141): Pfam Name: Ribosomal_S12 PFAM Desc: Ribosomal protein S12
  misc_feature: Homolog of GI Number: 21536723 NR Desc: putative 40S ribosomal protein S23
  misc_feature: Homolog of GI Number: 50919443 NR Desc: 40S ribosomal protein S23
  misc_feature: Homolog of GI Number: 1362041 NR Desc: ribosomal protein S23.e
  misc_feature: Homolog of GI Number: 62287478 NR Desc: 40S ribosomal protein S23
  misc_feature: Homolog of GI Number: 6682246 NR Desc: putative 40S ribosomal protein S23
  misc_feature: Homolog of GI Number: 58395907 NR Desc: ENSANGP00000012229
  misc_feature: Homolog of GI Number: 11121260 NR Desc: 40S ribosomal protein S23
  misc_feature: Homolog of GI Number: 30025641 NR Desc: 40S ribosomal protein S23
  misc_feature: Homolog of GI Number: 50344514 NR Desc: S23e ribosomal protein

SEQ ID NO: 8789 - DNA, 725 bp, Zea mays
  misc_feature: Ceres CLONE ID no. 1464802
  misc_feature: Ceres CDNA ID no. 29191583
  CDS (128)..(505): REFERENCED BY SEQ ID NO: 8790
acaaccctacaccaaaaccaagcccacgctcgccgagttgtttgcgtctccgccgccgacgacgacgagcacacccgcaggcgcagatctgagattgagtgagtgtgtgagagagaaatcggtggagatggccgtgaggctgactgcgatgggatcccgcatcatgggcggccacggcgcagccgcacgcgccgcggcctccgccctccgcaaccgcgccggcatgggcctccccgccggcaggcacatcgtccccgacaagcccctgcctgtgaacgacgagctggtgtgggacaatggcacacccttccctgagccctgcgtcgaccgcctggcgccgcacatcggcaagtacgaggctctggcgtggctgtgtggaggtctgagcttcttcgcggctctcggcctggctgccgttgtgaatgacaaggcctccaagatgccttatacaccaaaagtctacccgttcggcaatttgagagcggaacttggtgatagatcataaaatatttccccccaccttttcaagtgttgcgaggaactgaactcagcacacctcctttcatcgggatggtgtttgttgtcgtttgtcatgtcataaacattggtcttgtagtttgctgaatcgagataatcgatcccagtttgcgcatatctatgcattgatccatgtaataaacaatattgggtatcgtgttgatttcagatcaaaaaaaaaaaaaaaa

SEQ ID NO: 8790 - protein, 125 aa, Zea mays
  misc_feature: Ceres CLONE ID no. 1464802
  misc_feature: Ceres CDNA ID no. 29191583
  misc_feature: Useful for sterility
MAVRLTAMGSRIMGGHGAAARAAASALRNRAGMGLPAGRHIVPDKPLPVNDELVWDNGTPFPEPCVDRLAPHIGKYEALAWLCGGLSFFAALGLAAVVNDKASKMPYTPKVYPFGNLRAELGDRS

SEQ ID NO: 8791 - DNA, 512 bp, Zea mays
  misc_feature: Ceres CLONE ID no. 1464812
  misc_feature: Ceres CDNA ID no. 36707120
  CDS (74)..(322): REFERENCED BY SEQ ID NO: 8792
attgattgatcggacggacgcgcgtctccggtcccgtccgtaataacactgatccgatccacgccggccggcgatggagctcatcaagtccagggcgaccgtgtgcgcgctcctcctggcgctgctcctgctctcacactacgacggcgggacgacgacgacgatggtggcggaggcccgggtgtgcatgggcaagagccagcaccactcgttcccctgcatctccgaccgcctctgcagcaacgagtgcgtcaaggaggacggcgggtggaccgccggctactgccacctccgctactgcaggtgccagaaggcgtgctaagcaaagctcttcaaacacccttggcttgccagaactgaactctagtagtactaagtaacacccttggctagctgtgcacaacctacgtaccgtgcatgcatgtaatgtggtgtcatgtaacgtgacagtaataaatagtattaataataataacacggcatgtagccaagcaacaaaaaaaaaaaaaaaa

SEQ ID NO: 8792 - protein, 82 aa, Zea mays; identical to SEQ ID NO: 4784
  misc_feature: Ceres CLONE ID no. 1464812
  misc_feature: Ceres CDNA ID no. 36707120
  misc_feature (36)..(82): Pfam Name: Gamma PFAM Desc: Gamma
  misc_feature: Homolog of GI Number: 2130034 NR Desc: gamma
  misc_feature: Homolog of GI Number: 2501197 NR Desc: Gamma
  misc_feature: Homolog of GI Number: 1173436 NR Desc: Small protein inhibitor of insect alpha
  misc_feature: Homolog of GI Number: 7451437 NR Desc: gamma
  misc_feature: Homolog of GI Number: 7451438 NR Desc: omega
  misc_feature: Homolog of GI Number: 533692 NR Desc: protease inhibitor

SEQ ID NO: 8793 - DNA, 512 bp, Zea mays; identical to SEQ ID NO: 8791
  misc_feature: Ceres CLONE ID no. 1464815
  misc_feature: Ceres CDNA ID no. 36707120
  CDS (74)..(322): REFERENCED BY SEQ ID NO: 8794

SEQ ID NO: 8794 - protein, 82 aa, Zea mays; identical to SEQ ID NO: 4784
  misc_feature: Ceres CLONE ID no. 1464815
  misc_feature: Ceres CDNA ID no. 36707120
  misc_feature (36)..(82): Pfam Name: Gamma PFAM Desc: Gamma
  misc_feature: Homolog of GI Number: 2130034 NR Desc: gamma
  misc_feature: Homolog of GI Number: 2501197 NR Desc: Gamma
  misc_feature: Homolog of GI Number: 1173436 NR Desc: Small protein inhibitor of insect alpha
  misc_feature: Homolog of GI Number: 7451437 NR Desc: gamma
  misc_feature: Homolog of GI Number: 7451438 NR Desc: omega
  misc_feature: Homolog of GI Number: 533692 NR Desc: protease inhibitor

SEQ ID NO: 8795 - DNA, 590 bp, Zea mays
  misc_feature: Ceres CLONE ID no. 1464927
  misc_feature: Ceres CDNA ID no. 36707122
  CDS (17)..(406): REFERENCED BY SEQ ID NO: 8796
aacacccttcgccaaaatgcagatcttcgtcaagaccctcacggggaagaccatcaccctcgaggttgagagcagcgataccatcgacaatgtcaaggccaagatccaggacaaggaggggatcccgccggaccagcagcggctgatcttcgccggcaagcagttggaggacggccgcacccttgccgactacaacatccagaaggagtcgaccctccatctcgtcctcaggctccgcggaggcatcatcgagccatccctgcaggcgcttgcccgcaagtacaaccaggagaagatgatctgccgcaaatgctatgcgcgcctgcaccctagggctgtcaactgccgcaagaagaagtgtggccacagcaaccagctgaggcccaagaagaagatcaagaactagagtgccactagtcagtttcatgggccggttgaatccatcgcgtgtcggagtttatgctattatcgtctcgtttgtcgttgaaccttattttactttgctttcagcctcgtatcgttgtggtgataattgacagtattggtatatggtagcagacctataattttgccgaaaaaaaaaaaaaaaa

SEQ ID NO: 8796 - protein, 129 aa, Zea mays; identical to SEQ ID NO: 3710
  misc_feature: Ceres CLONE ID no. 1464927
  misc_feature: Ceres CDNA ID no. 36707122
  misc_feature (1)..(74): Pfam Name: ubiquitin PFAM Desc: Ubiquitin family
  misc_feature (77)..(128): Pfam Name: Ribosomal_L40e PFAM Desc: Ribosomal L40e family
  misc_feature: Homolog of GI Number: 52077170 NR Desc: ubiquitin / ribosomal protein CEP52
  misc_feature: Homolog of GI Number: 71040673 NR Desc: ubiquitin fusion protein
  misc_feature: Homolog of GI Number: 322750 NR Desc: ubiquitin / ribosomal protein CEP52
  misc_feature: Homolog of GI Number: 395079 NR Desc: ubiquitin/ribosomal protein
  misc_feature: Homolog of GI Number: 16323384 NR Desc: putative ubiquitin extension protein UBQ1
  misc_feature: Homolog of GI Number: 76559884 NR Desc: TPA: ubiquitin
  misc_feature: Homolog of GI Number: 50920549 NR Desc: Putative ubiquitin / ribosomal protein CEP52
  misc_feature: Homolog of GI Number: 73954303 NR Desc:  similar to ubiquitin A
  misc_feature: Homolog of GI Number: 73986078 NR Desc:  similar to ubiquitin A
  misc_feature: Homolog of GI Number: 13569612 NR Desc: ubiquitin A

SEQ ID NO: 8797 - DNA, 798 bp, Zea mays
  misc_feature: Ceres CLONE ID no. 1464944
  misc_feature: Ceres CDNA ID no. 36707072
  CDS (131)..(607): REFERENCED BY SEQ ID NO: 8798
ctcgctccctgcctccctcagttccgctcttcgtctttgggggccattgcccgtgcggccgtgcgtcacccgagcccgtgcccggaatctttgtagaagcgtctggaggactcccacccggctgccagccatggctgagaatctggcgcccgagaagcgccactccttcgtgcacaacgggcagaaggtgttcgagtgggaccagacgctggaggaggtcaacatgtacatcgagctcccgaagggtgtgccaaccaagctatttcactgcaacattcaggctagccacgtcgaggtcggcatccgcggcaacccgccatacctcaaccatgacctgacacacccagtgaagactgactcgtcgttctggacaatagaagatggtgagatgcatatcacactgcaaaaaagagagaaggggaaaacatggtcatctccaatacaagggcaagggattttggatccatatgctgcagatcaagagcaaaagcggcttatgctccaaaggtttcaggaagagaaccctgggttcgacttttcacaggctcagttcagtggaacctgccctgacccaagaaccttcatgggagggatacgctccgagtgaagcaccctacctgcctatgtacgtttctactatatcctcggcatcttgatagatgcagcaggcgtgcttattatgtctgtaaatcggttggtgtctgttatggagataattgtcatggaaataattgtgatgtgtgaccatttgtgtgcaagcacattttgcgtgcttaattctaaaaaaaaaaaaaaaaa

SEQ ID NO: 8798 - protein, 158 aa, Zea mays; identical to SEQ ID NO: 4880
  misc_feature: Ceres CLONE ID no. 1464944
  misc_feature: Ceres CDNA ID no. 36707072
  misc_feature (14)..(157): Pfam Name: Nuclear_move PFAM Desc: Nuclear movement protein
  misc_feature: Homolog of GI Number: 34910948 NR Desc: OSJNBb0063G05.19
  misc_feature: Homolog of GI Number: 73954084 NR Desc:  similar to NudC domain containing protein 2
  misc_feature: Homolog of GI Number: 61822779 NR Desc:  similar to NudC domain containing 2
  misc_feature: Homolog of GI Number: 76670465 NR Desc:  similar to NudC domain containing protein 2
  misc_feature: Homolog of GI Number: 51535412 NR Desc: putative salt tolerance protein 5
  misc_feature: Homolog of GI Number: 65302936 NR Desc: spliceosome
  misc_feature: Homolog of GI Number: 30524691 NR Desc: salt tolerance protein 5
  misc_feature: Homolog of GI Number: 50912681 NR Desc: putative salt tolerance protein 5

SEQ ID NO: 8799 - DNA, 535 bp, Zea mays
  misc_feature: Ceres CLONE ID no. 1465004
  misc_feature: Ceres CDNA ID no. 29191584
  CDS (74)..(346): REFERENCED BY SEQ ID NO: 8800
agggttcttcccactccaaaaacgatcgatctatctgaatcatatcatctccgtttcaattgctagagaagagatgggtcagatccagtactctgacaaatacttcgacgacactttcgagtacaggcacgtcgtgcttcctcctgacaccgctaagcttctcccgaagaatcgtcttctctccgaaaatgagtggcgtgcgataggagtgcagcagagccgtggatgggtccattacgccattcatcgtccagagccacacatcatgctcttcaggaggactctcaattaccagcagccgcagcagcagcaggagaaccatgctcaaaacgtgctcgctaagtgattctgagttgttgtgctacaaaaacattggctgttgttacttgttatgtttcttgtaaacattgtttgtgagccacctctaataactttgttggagttggagaaaaacttgtgagtgataaaactgactactttgatgttatgcattgtttgatataatcgtgtttcttcttcaaaaaaaaaaaaaaaa

SEQ ID NO: 8800 - protein, 90 aa, Zea mays
  misc_feature: Ceres CLONE ID no. 1465004
  misc_feature: Ceres CDNA ID no. 29191584
  misc_feature: null
  misc_feature: Useful for making plants with altered oil content
  misc_feature (1)..(72): Pfam Name: CKS PFAM Desc: Cyclin
  misc_feature: Homolog of GI Number: 21593913 NR Desc: putative cyclin
  misc_feature: Homolog of GI Number: 45935118 NR Desc: putative CDK regulatory subunit
  misc_feature: Homolog of GI Number: 42362268 NR Desc: cyclin
  misc_feature: Homolog of GI Number: 38566522 NR Desc: At2g27970
  misc_feature: Homolog of GI Number: 50919707 NR Desc: Putative cyclin
  misc_feature: Homolog of GI Number: 40641585 NR Desc: putative cyclin
  misc_feature: Homolog of GI Number: 27435806 NR Desc: CKS1 protein
  misc_feature: Homolog of GI Number: 55978016 NR Desc: cyclin
  misc_feature: Homolog of GI Number: 2493727 NR Desc: Probable cyclin
  misc_feature: Homolog of GI Number: 58376047 NR Desc: ENSANGP00000018659
MGQIQYSDKYFDDTFEYRHVVLPPDTAKLLPKNRLLSENEWRAIGVQQSRGWVHYAIHRPEPHIMLFRRTLNYQQPQQQQENHAQNVLAK

SEQ ID NO: 8801 - DNA, 670 bp, Zea mays
  misc_feature: Ceres CLONE ID no. 1465013
  misc_feature: Ceres CDNA ID no. 40351933
  CDS (62)..(541): REFERENCED BY SEQ ID NO: 8802
aattcggctgcaaacaattttttccccagaacctcagccttccgacatcaccgccgacgccatggccggctctccccgccacctctccctctttcccctgcgcctcctgttacttcttccgctgctcgctgcgggtaaacccgtcctcgaggacggttacacggtcaccaccttcgccgacctcaacccgctcccggcctccgggccacacccctacgcagtcctcccgcggtcccgcgccggcgacctcctcctcctcgactccgccggctccgcgctctacactatctccctctcctcctcccccggcgagccgcgcaggctggcagggggcaaacgaggctccgggttcaacgacggcgggcccggcgacgccgcctttgaccgcccgcgcagcgtcgccgtcgatgccgccgacaacgtatacgtcgccgaccgcctccatggtgccgtccgcaaggtcgcgccctccggtgagcgaacccgcgcgtcccctcctccgtgcttcttttgttcccctgtgtcatggatcaaggggtgaatcagtaaggaatagtaagattcagtatgattctttgtttcttttgcatataaatggatggatgtaagcaccatcagagaacgattacgaaatgaataaaccagttacaaatcaaaaaaaaaaaaaaaa

SEQ ID NO: 8802 - protein, 159 aa, Zea mays
  misc_feature: Ceres CLONE ID no. 1465013
  misc_feature: Ceres CDNA ID no. 40351933
  misc_feature: null
  misc_feature: Useful for making plants with altered alkaloid content
  misc_feature (107)..(134): Pfam Name: NHL PFAM Desc: NHL repeat
MAGSPRHLSLFPLRLLLLLPLLAAGKPVLEDGYTVTTFADLNPLPASGPHPYAVLPRSRAGDLLLLDSAGSALYTISLSSSPGEPRRLAGGKRGSGFNDGGPGDAAFDRPRSVAVDAADNVYVADRLHGAVRKVAPSGERTRASPPPCFFCSPVSWIKG

SEQ ID NO: 8803 - DNA, 844 bp, Zea mays
  misc_feature: Ceres CLONE ID no. 1465086
  misc_feature: Ceres CDNA ID no. 25891199
  CDS (99)..(737): REFERENCED BY SEQ ID NO: 8804
atgcctctcggagctagccaaacagggttgcgatccttcaatttcttcgctgtttcgcccaggtatccaaacagattgcaagtccggaagtcggcaacatgaaccaccaggaccagcccgtccgcaccggcaacgtctacccaccgacggccgtcaagcgagaggcgaggcacgagcgggacaagatcattgaacaaggagatcagctgggcggcgccctccacgtcgaccagacagatcttcccgccggcagacgtatggtcaccgccagcgcaggcggccaggtgatggcacagttcaccgtgcccgtgccgggcaccaaggtcgcggaggccacggacgcggtcaccctcggcgaggccctccatgcggcggcgcagacgtcggcgggcgacaagccggtgggcctcgccgacgctgcggcgctgcaggccgcggaggcgcgcgcgacggggctgggcggcaacgtccgcggcggcgtggcggccgccgagcagcaggccgcggagacgaacgcgaagcgagcggaggacggaggcggtggcgacagggtgacgctcagggacgtggtgggcggcgacgccgcggcggcgatggccgccgacaaggtggccacgagggaggacgccgagaaggtggcggctgccgcggcgcgcaacgtggggaagggggccggcggcggcgtcgccgaggctgtcgtggcggcggcggatatgaacgaggggaggatgatgtaacagcgtagacgcgtagtatatagttgacgtctgtacttgtatcctagtacagttttagcgttaataataaaatcgactcgtttggaccgtcaaaaaaaaaaaaaaaa

SEQ ID NO: 8804 - protein, 212 aa, Zea mays
  misc_feature: Ceres CLONE ID no. 1465086
  misc_feature: Ceres CDNA ID no. 25891199
  misc_feature (151)..(212): Pfam Name: SMP PFAM Desc: Seed maturation protein
  misc_feature: Homolog of GI Number: 77997745 NR Desc: seed maturation protein
  misc_feature: Homolog of GI Number: 81554 NR Desc: embryonic abundant protein gD
  misc_feature: Homolog of GI Number: 28394023 NR Desc: putative LEA protein
  misc_feature: Homolog of GI Number: 6648966 NR Desc: seed maturation protein PM25
  misc_feature: Homolog of GI Number: 57506542 NR Desc: ECP31 protein
  misc_feature: Homolog of GI Number: 66780099 NR Desc: PE
  misc_feature: Homolog of GI Number: 66776103 NR Desc: LigA
  misc_feature: Homolog of GI Number: 18337 NR Desc: embryonic cell protein
  misc_feature: Homolog of GI Number: 6648964 NR Desc: seed maturation protein PM24
  misc_feature: Homolog of GI Number: 23507757 NR Desc: At3g22500/F16J14_6
MNHQDQPVRTGNVYPPTAVKREARHERDKIIEQGDQLGGALHVDQTDLPAGRRMVTASAGGQVMAQFTVPVPGTKVAEATDAVTLGEALHAAAQTSAGDKPVGLADAAALQAAEARATGLGGNVRGGVAAAEQQAAETNAKRAEDGGGGDRVTLRDVVGGDAAAAMAADKVATREDAEKVAAAAARNVGKGAGGGVAEAVVAAADMNEGRMM

SEQ ID NO: 8805 - DNA, 723 bp, Zea mays
  misc_feature: Ceres CLONE ID no. 1465111
  misc_feature: Ceres CDNA ID no. 25447014
  CDS (112)..(426): REFERENCED BY SEQ ID NO: 8806
cccggttttctagggtttaaagagcttgccgagcccgccgtgcgccggccggcacatctccactactttccgccatcgccggagccgaccccttcgtctccgcacgcggcaatggcattctccttcgcctcgccggctgcgtcgaaccctttccagacgccggcgacgccgaatctctttcaaacaccggctccggccacctcgcaggcgccatccctatcgccttcgccgttccagttcagcttccagcagcagccgcagccacagcagcaggtggcgccggcggcgcaacctccgcagccgcagccgcagccgcagccgcagaagctgatgctgtacacgacagatatgaaatctgcgggatacagcaccaagtgggaggagctgcacgccgagtcgcagaaggccttactccagatcgagtagggttcttcctctgaatgttcacttttccttcttttggtttccttgcacaggagcgcgcggttattgcttagatgtaactcgctgtcgatttacgcccacaactagaattgctccacccaattactaggccagattagtggaatcaaatgtgctctccactgattctttacggtgaaatgaatgtgtgatttaaattaaaggtattgtgggatgacgtatttaaattgttcccttcctgtatggggcaaaatgtttttttatttaaggttgctgtcataatcaaaaaaaaaaaaaaaa

SEQ ID NO: 8806 - protein, 104 aa, Zea mays
  misc_feature: Ceres CLONE ID no. 1465111
  misc_feature: Ceres CDNA ID no. 25447014
  misc_feature: Homolog of GI Number: 51535945 NR Desc: putative nucleoporin p58
  misc_feature: Homolog of GI Number: 4006864 NR Desc: nucleoporin
  misc_feature: Homolog of GI Number: 1362587 NR Desc: spermatid
MAFSFASPAASNPFQTPATPNLFQTPAPATSQAPSLSPSPFQFSFQQQPQPQQQVAPAAQPPQPQPQPQPQKLMLYTTDMKSAGYSTKWEELHAESQKALLQIE

SEQ ID NO: 8807 - DNA, 931 bp, Zea mays
  misc_feature: Ceres CLONE ID no. 1465683
  misc_feature: Ceres CDNA ID no. 29191585
  CDS (137)..(667): REFERENCED BY SEQ ID NO: 8808
acacaaacccaaacccacccacctctcctctcaagccttcgtctgccaccgacgcgacccaaaaaccccaagcccccaaccctagcgagtactgaaagaggaggaggcggcggcaaccccgtcggccggaggggagatggtgttcttcgcgctgctcgtgggggcagagctcgacggcctcaccaacctgcagccccgcggcggctgcgacgaccccagctacccttactacttcaagctgcggtgcgagagctgcggggagacgagcgccaagaccacctgcgtctccctcgacgaggtcgtccaactgcccaccggcaaaggcaccgccaatctcctccagaagtgcaagttatgttcgagggagggatcagttgtgatgattcctgggcagggaacaccactgactgctgagcagagccagaaaggagagatgacttgtttgatggtctttgaatgcagaggctatgaacctattgagttcgcttttggtaatggctggaaggctgaatctgtacatgggacaccatttgacattgatctttccgaaggagagtttgatgagtatgatgagaagggagagtgccctgttgctctatccaagctgcagtcaacattcaaagtggtgaagaagcagggttttcatgggaagaccagatatgtctaagatccagtttctcttgggctcttcaagcattggagtcagagatgtataaagcgcatctacaaggtcgaatcctcaatgttgattttgtattcgaactaagttcgtgcccatgattaggtggatttgccatgaatttggttaagcttgcagtgatgtggcctcctgtttggaaaaaaatgaatattctgcctatcagtggtttcaaacttagatctatggctctaccatatcaatcataaaattatgccaaaaaaaaaaaaaaaa

SEQ ID NO: 8808 - protein, 176 aa, Zea mays
  misc_feature: Ceres CLONE ID no. 1465683
  misc_feature: Ceres CDNA ID no. 29191585
  misc_feature: Homolog of GI Number: 34914208 NR Desc: OSJNBb0049O23.17
  misc_feature: Homolog of GI Number: 54635942 NR Desc: GA18326
  misc_feature: Homolog of GI Number: 73956444 NR Desc:  similar to CG4646
  misc_feature: Homolog of GI Number: 72136995 NR Desc:  similar to CG4646
  misc_feature: Homolog of GI Number: 24653302 NR Desc: CG4646
MVFFALLVGAELDGLTNLQPRGGCDDPSYPYYFKLRCESCGETSAKTTCVSLDEVVQLPTGKGTANLLQKCKLCSREGSVVMIPGQGTPLTAEQSQKGEMTCLMVFECRGYEPIEFAFGNGWKAESVHGTPFDIDLSEGEFDEYDEKGECPVALSKLQSTFKVVKKQGFHGKTRYV

SEQ ID NO: 8809 - DNA, 637 bp, Zea mays
  misc_feature: Ceres CLONE ID no. 1465743
  misc_feature: Ceres CDNA ID no. 25446732
  CDS (46)..(501): REFERENCED BY SEQ ID NO: 8810
atcgaaatctccgcctcctccagtcctgctcgctccccacctctcatggcggcgccggcggccacccgcctccactccccgttcctcctgcttccttccccaccgcacccccacccttcacttcgcctccgcttcctcctgccgtccccgccgccgctccgcctccgccgccacttcccgctgctggctgccgccgccgtatccgccgcagccggcgccggcggtggcggggaggaggtcgccgctaggaaggacgacaaggccaggcagctgcagaagcgggtcctcgtgggcgtcgccatcggggtgggcgccggcggcatcgtggtcgccggcggccgggtgttcgccgccgccgtcgcggccgccgttcttgccggctcccgggagtacttcgagctcgtccgcagcactgtagccggaggcgggaccccgccgccgcgctacgtgtcccgcgtctgttccgccatctgcgctctcatgcccatccttacgctgtaagggcgcgtcacgttccttcttcgtgcgttgcttgtctgattgtctcccatagctgaaatttgctccgagcggaggtgaaattcagctacggttttgaacgaagcatccatcttctaccccaaaaaaaaaaaaaaaa

SEQ ID NO: 8810 - protein, 151 aa, Zea mays
  misc_feature: Ceres CLONE ID no. 1465743
  misc_feature: Ceres CDNA ID no. 25446732
  misc_feature (77)..(151): Pfam Name: CTP_transf_1 PFAM Desc: Cytidylyltransferase family
  misc_feature: Homolog of GI Number: 50904961 NR Desc: putative phosphatidate cytidylyltransferase domain
  misc_feature: Homolog of GI Number: 42571237 NR Desc: phosphatidate cytidylyltransferase family protein
  misc_feature: Homolog of GI Number: 42571235 NR Desc: phosphatidate cytidylyltransferase family protein
  misc_feature: Homolog of GI Number: 15292689 NR Desc: putative phosphatidate cytidylyltransferase
  misc_feature: Homolog of GI Number: 4895237 NR Desc: putative phosphatidate cytidylyltransferase
  misc_feature: Homolog of GI Number: 16323392 NR Desc: putative phosphatidate cytidylyltransferase
  misc_feature: Homolog of GI Number: 48763929 NR Desc: COG2812: DNA polymerase III
  misc_feature: Homolog of GI Number: 6523547 NR Desc: hydroxyproline
  misc_feature: Homolog of GI Number: 55234580 NR Desc: ENSANGP00000028786
MAAPAATRLHSPFLLLPSPPHPHPSLRLRFLLPSPPPLRLRRHFPLLAAAAVSAAAGAGGGGEEVAARKDDKARQLQKRVLVGVAIGVGAGGIVVAGGRVFAAAVAAAVLAGSREYFELVRSTVAGGGTPPPRYVSRVCSAICALMPILTL

SEQ ID NO: 8811 - DNA, 812 bp, Zea mays
  misc_feature: Ceres CLONE ID no. 1465965
  misc_feature: Ceres CDNA ID no. 25446787
  CDS (105)..(569): REFERENCED BY SEQ ID NO: 8812
aaaaaaacaatcttgccgctccaaccaattcgtcttggttgccgacacggcacctcgtcggaatcaggtggcgcgacctcctcgccggccggcgcgacaccaccatgggcccggaagcagtgcggaaaagcctggagcccaccgcaaccgccgaggaaatcactggctccacccctgcgcggctccacttctacgaccccttcgtcctcagcggcgtccgtatcgaagccgccgagcacggccgcctcctctgctctttcgtcgtcacccctcgcctcgcgagtcccgtgggatacctccgcagcggtgtcacagcgacgctcgccgaccagctgggatcggctgtgttcttctgcagtgggatccccagcagcggggtctccatcgagatcagcgtctcctttgtcgactcggctgccgtcggggaggaaatagaggttgagggaaagttattgcgtgctggaaaatcagtcggtgtcgtctccgtagatttcaggaagaaaaagacagggaaattgatggcacaggcccgtcacaccaagtatcttgtggcatcaagcaaactgtgaggcgctccccttttgttagcaagatatcaacatcaattgcgcccagactctccatactggtgccattattagtagtcagcaatcatgcaatgtttctggcatatcttttttttttcaaaaaaaatcctgtatattatatatatgaaattcaagtaagtatcattggtgcctctgtgatgcaaaaaaaaaaaaaaaaaaaaaaaaaaaaaaaaaaaaaaaaaaaaacgaaaaaaaaaaaaaaaa

SEQ ID NO: 8812 - protein, 154 aa, Zea mays
  misc_feature: Ceres CLONE ID no. 1465965
  misc_feature: Ceres CDNA ID no. 25446787
  misc_feature (62)..(139): Pfam Name: 4HBT PFAM Desc: Thioesterase superfamily
  misc_feature: Homolog of GI Number: 50924440 NR Desc: OSJNBa0006B20.3
  misc_feature: Homolog of GI Number: 13605902 NR Desc: At1g04290/F19P19_27
  misc_feature: Homolog of GI Number: 50902184 NR Desc: B1065E10.13
  misc_feature: Homolog of GI Number: 74004150 NR Desc:  similar to thioesterase superfamily member 2
  misc_feature: Homolog of GI Number: 13385260 NR Desc: thioesterase superfamily member 2
  misc_feature: Homolog of GI Number: 27685797 NR Desc: similar to thioesterase superfamily member 2
  misc_feature: Homolog of GI Number: 50736242 NR Desc:  similar to thioesterase superfamily member 2
MGPEAVRKSLEPTATAEEITGSTPARLHFYDPFVLSGVRIEAAEHGRLLCSFVVTPRLASPVGYLRSGVTATLADQLGSAVFFCSGIPSSGVSIEISVSFVDSAAVGEEIEVEGKLLRAGKSVGVVSVDFRKKKTGKLMAQARHTKYLVASSKL

SEQ ID NO: 8813 - DNA, 875 bp, Zea mays
  misc_feature: Ceres CLONE ID no. 1466170
  misc_feature: Ceres CDNA ID no. 40351934
  CDS (336)..(605): REFERENCED BY SEQ ID NO: 8814
atagattgggccatcccgcgctaaaaagcctgcctaattaaaccctagcacttttcttttcacaactatctcagccgccactcgttgctttccaatcgacgccgtcgtacgctgcaaccagggatccacggccaccgtcgcgcgtcggccggggagcgcgtcaccgtcgtcgggccgtggacttcgccgtcgtcgaggagcgcgccaccgtcgtcgggccgtggagctcgccgttgtcgaggagtgcgccaccgtcgtcgggccgaagattctgctctgccattgctatagcagtgcacaagttccaggttggggaagatgtgatactctatgcaatgttgagatctgatcctgtggcaaagggaacaattacttcaactaatccaaacactgtgctaggaggtgaaaatcttggaacacaattttgtgaagtagttgtgaatgttgtgctaaaaagggacgcagatctgcctcgcccttatgaccatatggagaccatgggtgatgcttatatgatgcctgttgcatggccatacaagagaatgaaggtcagcaaggcttccaaatcatcccatgttgctactggtaattctgggatatgctaggtagcacatttgatggaccagctgacagcaacttgttcaaacagcaagcatatggtgtaatggagaagggttgtcttcttagtttgcagcttttgggtttcctacattaagactgtagttgtagcttttgggttgcaagcatatggtgtaatggagaatggttatagcttttgggttgttgtgttgacaactgtaatagtactgactgtgtgctgtttggaagcgacaatgcacttttgctgcttgtgcttggcaaaaaaaaaaaaaaaa

SEQ ID NO: 8814 - protein, 89 aa, Zea mays
  misc_feature: Ceres CLONE ID no. 1466170
  misc_feature: Ceres CDNA ID no. 40351934
  misc_feature (1)..(61): Pfam Name: Transposase_23 PFAM Desc: TNP1/EN/SPM transposase
MLRSDPVAKGTITSTNPNTVLGGENLGTQFCEVVVNVVLKRDADLPRPYDHMETMGDAYMMPVAWPYKRMKVSKASKSSHVATGNSGIC

SEQ ID NO: 8815 - DNA, 631 bp, Zea mays
  misc_feature: Ceres CLONE ID no. 1466187
  misc_feature: Ceres CDNA ID no. 25892898
  CDS (85)..(459): REFERENCED BY SEQ ID NO: 8816
gtctcctcagctaaaagacgccgctcgtctcttcagacaagttccaccttctacgatttgttaaagagagaagagggttgaaagatgagtcgtggaagcgcagccgttgccaagggaaagaagaagggagtctccttctccattgactgctccaagcctgtcgatgacaagatcatggagattgcttccctcgagaagttccttcaggagaggatcaaagtcggtggcaaagccggtgcactcggtgactctgtcacgatcacacgtgacaagaacaagatcactgtcacttctgatggtcagttctccaaaaggtatctcaagtacttgacgaagaagtatttgaagaagcacaacgtgagggattggctcagagtgattgcagccaacaaggaccgtaacctctacgagttgaggtacttcaacatcgctgagaacgagggagaggaagaagactagaagatctttatactcttcttgtattggtttctgctcgttcgttgttgctcaatacaatttatatttcttgtttcacagatcttatctagttttggttgaagttaaaacttttgttttcagacaattatttgagaaaaaaaatatcgtatgattcccaaaaaaaaaaaaaaaa

SEQ ID NO: 8816 - protein, 124 aa, Zea mays; identical to SEQ ID NO: 7588
  misc_feature: Ceres CLONE ID no. 1466187
  misc_feature: Ceres CDNA ID no. 25892898
  misc_feature (9)..(124): Pfam Name: Ribosomal_L22e PFAM Desc: Ribosomal L22e protein family
  misc_feature: Homolog of GI Number: 6714454 NR Desc: putative 60S ribosomal protein  L22
  misc_feature: Homolog of GI Number: 12642842 NR Desc: putative 60S ribosomal protein L22
  misc_feature: Homolog of GI Number: 50939919 NR Desc: putative 60S ribosomal protein L22
  misc_feature: Homolog of GI Number: 42733478 NR Desc: BRI1
  misc_feature: Homolog of GI Number: 6056419 NR Desc: 60S ribosomal protein  L22
  misc_feature: Homolog of GI Number: 73956651 NR Desc:  similar to 60S ribosomal protein L22
  misc_feature: Homolog of GI Number: 33150766 NR Desc: heparin
  misc_feature: Homolog of GI Number: 13592059 NR Desc: ribosomal protein L22
  misc_feature: Homolog of GI Number: 57086899 NR Desc:  similar to ribosomal protein L22

SEQ ID NO: 8817 - DNA, 766 bp, Zea mays
  misc_feature: Ceres CLONE ID no. 1466238
  misc_feature: Ceres CDNA ID no. 36706816
  CDS (98)..(433): REFERENCED BY SEQ ID NO: 8818
accactctctcgcccgaaccacgcgccgcaccgagcccgcacccgcacagcccatcggcgacctcgccggagcggagaagagagaagaaggtgagtgatggaagaggcggcggcggcggccggcgtgcagctgggcacctcgaagccgcagatcgcgacccaggcggagatggcggaggcgcgcctgccgatcccctaccgcgaccagtgcgcgcacctcctcatcccgctcaacaagtgccgcgtcgccgagttctacctcccctggaagtgcgagcccgagcgccactcctacgagaagtgccagtacgagctcgtcatggagcggatgctccagatgcagaagatccgcgaggcgcaggcgggcgccaaggtcaagggcagcgtcaccatcggcgtgcccctcgccccctccaccgccaagctcgcctgatccgtcagattcaggaggggttggtggctagagctcgaagggcgctgtgctcgcaaggatcatgaatgttgttcttgtatgaacgaaacatctgtttgaattcggcataaagttaactctttctttcttggtcttgttcccctccgccttccctcctttggttcaagtttaagtttgatggaataaggaaccagctgtcttcctatactctgacgagtgaaatggcaagcttgaagttttgaatgcagtgcatggcctctgcttttgcatctgccttgatgtagtaggagcctattttacaacatgaatatctctccaaaaaaaaaaaaaaaa

SEQ ID NO: 8818 - protein, 111 aa, Zea mays
  misc_feature: Ceres CLONE ID no. 1466238
  misc_feature: Ceres CDNA ID no. 36706816
  misc_feature (19)..(72): Pfam Name: NDUF_B7 PFAM Desc: NADH
  misc_feature: Homolog of GI Number: 50948919 NR Desc: ESTs AU078175
  misc_feature: Homolog of GI Number: 66851870 NR Desc: NADH
  misc_feature: Homolog of GI Number: 11359723 NR Desc: proteophosphoglycan
MEEAAAAAGVQLGTSKPQIATQAEMAEARLPIPYRDQCAHLLIPLNKCRVAEFYLPWKCEPERHSYEKCQYELVMERMLQMQKIREAQAGAKVKGSVTIGVPLAPSTAKLA

SEQ ID NO: 8819 - DNA, 585 bp, Zea mays
  misc_feature: Ceres CLONE ID no. 1466299
  misc_feature: Ceres CDNA ID no. 25445871
  CDS (3)..(383): REFERENCED BY SEQ ID NO: 8820
attacctgggcttgggttattgtgcgcgtgcctatcttcctgcttcggacagttgtgagagagaggggaagggatcgagagcgcggcggaggcgatggcgagcggagggaagggactcaacgcgactggggagttcttccggcggagggacgagtggaggaggcaccctatggcggggaaccagctgcgccacgccacacccgggctcggcatcgccatcgtcgccttcgggatctacctcgtcggcgaggccgcctacaaccgcctctaccgcccctccggcgacaaccaccactagatcgccggcaggatccgtgactcggtcaagaagctggagccaactttaccaagcactggtgctgttgatgtttttacagttttgagctcataaggtcagccatgaccatattgtaatctgtgaccaggtagacttgcccactggtccgtccaactattgtcttgggaccctgtgttaatccttgctatatggatctgacagtgctcatgtaattcaagaatcctggactatcttttatgtgcttatttgagtttgcaagtgcgtttccgttaaaaaaaaaaaaaaaa

SEQ ID NO: 8820 - protein, 67 aa, Zea mays; identical to SEQ ID NO: 5558
  misc_feature: Ceres CLONE ID no. 1466299
  misc_feature: Ceres CDNA ID no. 25445871

SEQ ID NO: 8821 - DNA, 966 bp, Zea mays
  misc_feature: Ceres CLONE ID no. 1466346
  misc_feature: Ceres CDNA ID no. 36593753
  CDS (3)..(461): REFERENCED BY SEQ ID NO: 8822
accctaaccgacagcagccgccgtttcttcatcttcctcgcagcggcggctctccgtcttccgctcctccctcccacgacacgcgctcggcacgcaggcgacggcggcagcgctcaggctcgggctctcagcgacggtggggcagtcccagactcggcggcggcgtcagcggctccccctcccgaatctcgccaatcgccttgcgccctcgcctccggtcctccgcccaacggccggcgaccctgcgtgcgcgcttcccgctcccctgccgcctccggtggaccgtagacggcgctcgaccccggcggctgcactgcgcgccgcgtgcgaccggcgggcagcgggatccagctgctgctgctccacctaggcggctgcgccgatttggtagcgcttatgccccaaacgaagtgttacccgtccgcttagggctgaagcgtgcgcttagtgacgctttttagaacctaggcaattaatcagtttggggttctcatatatctctttggagatgcatccacatctgactttacataggcatcctatgtgtgccgagattattgaagaattccagaagtgccatctggatcaccctgtcaagaagttcttcggagagtgcacagaccttaaaatcaagctagatcgctgcttccgacaggagaaagctttgaagagaaaggcaaactttgaagagagcaagagatttaaagaacagttgaaggcttacaaaagggaaattgcagagaaaagcgaggaatgataacttggaacggaggacaaggccgtagaggctcttaatctgtgatgacctgcccttgattttgtgaaggatctgtcgagtgtttttgaatataatgtttctaaaaaaatattatactcttttcctagtagcagctaaactttaacagcttaaagtttcttccatgactaccgaatatgtttccaatttgttcaaaaaaaaaaaaaaaa

SEQ ID NO: 8822 - protein, 82 aa, Zea mays
  misc_feature: Ceres CLONE ID no. 1466346
  misc_feature: Ceres CDNA ID no. 36593753
  misc_feature: Homolog of GI Number: 50540296 NR Desc: DC13 protein
MHPHLTLHRHPMCAEIIEEFQKCHLDHPVKKFFGECTDLKIKLDRCFRQEKALKRKANFEESKRFKEQLKAYKREIAEKSEE

SEQ ID NO: 8823 - DNA, 520 bp, Zea mays
  misc_feature: Ceres CLONE ID no. 1466371
  misc_feature: Ceres CDNA ID no. 36707123
  CDS (78)..(353): REFERENCED BY SEQ ID NO: 8824
atactattagacataccggtatatattattgttcttagtcatcgcacaagactcttgtcaacaagaccaacaacaggatgaggactgccgtgcatgctgcgctttgcattgtgcttgtgataatgtcttcaacactgtcatcttgcgaggacgatgagaaggtatctatcgcatgtgacacaggatgcaatgccgcgatctcccgtctcaaatgcttcctgatggcctattctgaagggaaagtgttggtcagcagcaactgcgaaacgccgaccaggtgcggctgcgtgtttcgtcacaaacaagatgcaacccttatcgccggcgacgttggcaacaaaaagggatattgatggcagacgtgtatttcttggttgaataatatatactgctagaattaatatgggcaccaacaacgaaatatctataatgttattcttcagtgtaatgcttccagcatgttctgttttagtataactaaatatctatctttcccccccaaacaaaaaaaaaaaaaaaa

SEQ ID NO: 8824 - protein, 91 aa, Zea mays
  misc_feature: Ceres CLONE ID no. 1466371
  misc_feature: Ceres CDNA ID no. 36707123
MRTAVHAALCIVLVIMSSTLSSCEDDEKVSIACDTGCNAAISRLKCFLMAYSEGKVLVSSNCETPTRCGCVFRHKQDATLIAGDVGNKKGY

SEQ ID NO: 8825 - DNA, 724 bp, Zea mays
  misc_feature: Ceres CLONE ID no. 1466372
  misc_feature: Ceres CDNA ID no. 40351935
  CDS (46)..(564): REFERENCED BY SEQ ID NO: 8826
atcaccaccactactaacacagcctcctctcctctttcaatcaaaatggctaacccaagagtcttcttcgacatgaccctcgacggcgcccccgccggccgcatcgtgatggagctttacaaagacacgacgccgaacaccgccgagaacttccgcgccctctgcaccggcgagaaaggcgtcggaaagaagggaaagccgctccacttcaagggatcggccttccaccgcgtgatccccgggttcatgtgccagggaggcgatttcaccgccgggaacgggaccggcggggagtcgatctacggcgataagttcaaggacgagaactttgttaagaagcacaccggggcggggatcctctccatggcgaactctggtcccaacactaacggatctcagttttttatctgcaccgcggagacgtcgtggctcgatgggaagcacgtggtgtttgggaaggttgttgaaggtatggaggttgtgaaggcgattgagaaggttggatcgtcttctgggacgactaagaagaaggttgttgttgctgattgtggtcaggttgcttagatctgagtgatttgatgattatgaatgttatctttgcttttttaatgttttttttgtttctgatcgttcgagtttgtaaaaccctgagggttttttggatttgactgcctttgaataattatgaataactatgagctttttatttaaaaaaaaaaaaaaa

SEQ ID NO: 8826 - protein, 172 aa, Zea mays
  misc_feature: Ceres CLONE ID no. 1466372
  misc_feature: Ceres CDNA ID no. 40351935
  misc_feature (5)..(171): Pfam Name: Pro_isomerase PFAM Desc: Cyclophilin type peptidyl
MANPRVFFDMTLDGAPAGRIVMELYKDTTPNTAENFRALCTGEKGVGKKGKPLHFKGSAFHRVIPGFMCQGGDFTAGNGTGGESIYGDKFKDENFVKKHTGAGILSMANSGPNTNGSQFFICTAETSWLDGKHVVFGKVVEGMEVVKAIEKVGSSSGTTKKKVVVADCGQVA

SEQ ID NO: 8827 - DNA, 737 bp, Zea mays
  misc_feature: Ceres CLONE ID no. 1466379
  misc_feature: Ceres CDNA ID no. 40351936
  CDS (81)..(542): REFERENCED BY SEQ ID NO: 8828
gaaatccaattttctactcacggacgccgcccctgtgcctcgccatcgcctcagtgaggcagcaagacgtgaggtccaggatgatgaacaacaacagtggcggcggtgccggaggccctggagggggcatgggtacgggagtgggtggagggggggacgggcggcacgacgacgaggctgcgctcaccgagtttctctcatccctcatggactacacccccacgattcccgacgagctggtggagcactacctcggccgcagcgggttccactgccccgacctgcgcctaacgagactggttgctgtagccacccagaagttcctatcagacattgctagcgattctcttcagcactgcaaggccagggtagcagcacctatcaaagacaataagagcaaacagccgaaggatagacgtcttgtattaaccatggatgatctttctaaagctttgcgcgagcacggcgtgaacttgaaacacgcggagtacttcgcagacagcccttcagctggaatggctccttcgaccagagaggagtagactggattaggccaacttgtacggaactagggagggatcgcgtggaatggatgggcatgttggcattcttgcccgatcagatcgatgggatgtattactattaagtactgctactatgactagtatatttctcaattaccattgtcactgagagaatccagacacaagtcgttttgcccaaaaaaaaaaaaaaaa

SEQ ID NO: 8828 - protein, 137 aa, Zea mays
  misc_feature: Ceres CLONE ID no. 1466379
  misc_feature: Ceres CDNA ID no. 40351936
  misc_feature: null
  misc_feature: Useful for making plants with altered Lignin content
  misc_feature: Useful for making plants with altered terpenoid content
  misc_feature (31)..(81): Pfam Name: TFIID_30kDa PFAM Desc: Transcription initiation factor TFIID 23
MGTGVGGGGDGRHDDEAALTEFLSSLMDYTPTIPDELVEHYLGRSGFHCPDLRLTRLVAVATQKFLSDIASDSLQHCKARVAAPIKDNKSKQPKDRRLVLTMDDLSKALREHGVNLKHAEYFADSPSAGMAPSTREE

SEQ ID NO: 8829 - DNA, 747 bp, Zea mays
  misc_feature: Ceres CLONE ID no. 1466487
  misc_feature: Ceres CDNA ID no. 40351937
  CDS (111)..(530): REFERENCED BY SEQ ID NO: 8830
ctctgctataagtagctccactctctctcctccaagcctaccccagccgccgccgccgccaccgccaccgccaccgccacctgccccagcgcgccgccgccgcagccaccatgggtcgcgtccgcaccaagaccgtgaagaagacctccaggcaggtgatcgagaagtactactcccgcatgaccctcgacttccacaccaacaagaaggtgctggaggaggtctcgattctgccctcgaagcgcctccgcaacaaggtggctggcttcagtacccacctgatgcgccgcatccagcgcggcccagtccgcggcatctcgctcaagctgcaggaggaggagcgcgagcgccgcatggacttcgtgccggagaagtccgcgctcgaggtcgaagagatccgcgtcgacaaggagaccatggagatgctcgctgccctcggcatggccgacctgcccggcgttgagcgccaggctgaggtctccaacgccccccgcctacggccgcccgcagtacggtggtccccgccgtgaccgcgtttagacttcgcggtggttgcctcttgatcgcactgctattcgtagttgttgtcctactatgctaaacttcttttagatctttggttgcatctgtggcggttaagttttgaacttgcctgttatggtataaattctgaagtgtttggttctgcgtgtgatgaacatgataatttatattcttgcgctttataagttaaaaaaaaaaaaaaaa

SEQ ID NO: 8830 - protein, 139 aa, Zea mays
  misc_feature: Ceres CLONE ID no. 1466487
  misc_feature: Ceres CDNA ID no. 40351937
  misc_feature (2)..(122): Pfam Name: Ribosomal_S17e PFAM Desc: Ribosomal S17
MGRVRTKTVKKTSRQVIEKYYSRMTLDFHTNKKVLEEVSILPSKRLRNKVAGFSTHLMRRIQRGPVRGISLKLQEEERERRMDFVPEKSALEVEEIRVDKETMEMLAALGMADLPGVERQAEVSNAPRLRPPAVRWSPP

SEQ ID NO: 8831 - DNA, 590 bp, Zea mays
  misc_feature: Ceres CLONE ID no. 1466531
  misc_feature: Ceres CDNA ID no. 36593768
  CDS (120)..(416): REFERENCED BY SEQ ID NO: 8832
cttgcggaataagaagaggagtcgcggcccgagcctaggttccccaaacacgcacaggcgcacagcacacgaacacacaccgcgcccagctccgaggtgatcttccggcggccggcgagatgagccgtggcacaggcgcgggctatgaccgccacatcaccatcttctcccccgagggacgcctgtaccaagtcgagtacgcgttcaaggcggtgaagtcggcgggtgtcacgtcgatcggcgtccgcggcgcggactccgtctgcgttgttacgcagaagaaagtcccggataagttgctggatcagacgagcgtgacacacctgttcccgatcaccaagtacgtcggattgcttgccactggccttacaggtagtgttattttgctttggtgcacatcattgttcagtcagtagtgatattatggtatggagagcttgttttagatgccgtaggctatggaaagttgccccctcctcctccagtttgattgtgggttcttggtatcaattttgcgatagatcagtgaaattttactagtggtattgatggaactaaatataggattaggaataaaaaaaaaaaaaaaa

SEQ ID NO: 8832 - protein, 98 aa, Zea mays
  misc_feature: Ceres CLONE ID no. 1466531
  misc_feature: Ceres CDNA ID no. 36593768
  misc_feature (32)..(85): Pfam Name: Proteasome PFAM Desc: Proteasome A
  misc_feature: Homolog of GI Number: 11967891 NR Desc: maize 20S proteasome alpha subunit
  misc_feature: Homolog of GI Number: 50920359 NR Desc: Putative alpha 1 subunit of 20S proteasome
  misc_feature: Homolog of GI Number: 3421070 NR Desc: 20S proteasome subunit PAA1
  misc_feature: Homolog of GI Number: 10176805 NR Desc: multicatalytic endopeptidase complex alpha subunit
  misc_feature: Homolog of GI Number: 4539545 NR Desc: PRCI
  misc_feature: Homolog of GI Number: 23505817 NR Desc: At2g05840/T6P5.4
  misc_feature: Homolog of GI Number: 21386959 NR Desc: multicatalytic endopeptidase complex alpha subunit
  misc_feature: Homolog of GI Number: 79322198 NR Desc: PAA2
  misc_feature: Homolog of GI Number: 2511588 NR Desc: multicatalytic endopeptidase complex
  misc_feature: Homolog of GI Number: 3377794 NR Desc: proteasome IOTA subunit
MSRGTGAGYDRHITIFSPEGRLYQVEYAFKAVKSAGVTSIGVRGADSVCVVTQKKVPDKLLDQTSVTHLFPITKYVGLLATGLTGSVILLWCTSLFSQ

SEQ ID NO: 8833 - DNA, 1197 bp, Zea mays
  misc_feature: Ceres CLONE ID no. 1466602
  misc_feature: Ceres CDNA ID no. 36707530
  CDS (179)..(934): REFERENCED BY SEQ ID NO: 8834
gccctagtaaccctagccgcctgaggccgacgccaactctctcctgaccgcaacggggaactcgacccccgcctccgccaccgccaccgcgccggtcgccgacccactcagatgaacacgtctccgtccagatacagtgaacgcagggagcccactggatgtctcaaagagggcaaggatgatggaaccaggtgctccctattttggggctatgggaagcagcgccagcggtgccggcggtggcttctaccagccctttaacagcaacctagctggtgcagggtctagcaccggtatccaaagcttcccatgtgtccggctgcgaggcctcccctttgattgcaacgacattgacgtctgcaagttctttgtggggctggacatagtggactgcctcctggtcaacaagaacgggcgcttcaccggcgaggctttcgtggtcttcccaacagccatgcaggcagagtttgcgctgcatcgcgacaggcagaacatggggcggaggtatgtcgaggtgttcaggtgcaagaagcacgagtactactgtgcaatagccaatgaggtgaaccagggcggttattttgagccggagtaccgccgctccccgcctcctccgaggcctaggaagccgtctgaagataagggcagcatggagtacacagaggttctgaagctccgcgggcttccctactctgccaccactgaggacatcatcaagttcttcctggagtacgagctggcagaggagaacgtgcatatcgcctaccgctccgatgggaaggccacgggtgaagccttcgttgagtttccgacagctgaagtcgcgaagacggccatgtgcaaggataagatgactattgggacgaggtacgtggagctgttcccgtcgaccccagaggaggccagcagggcgaaatcccgaggcaggcattgaagaaacgtgttccagtgatcttctgtatgcatgcatgcggccgcgttcgagctcagttttcattttgcatgcttgcctctgtgtgtcgctgttaggtggtgttaacctgagctgtcatgtttcgctactgatcgtgcagtgatttgttatatctgaagttctgaactgaattgtaacagttgtcttctgttggatgcacttgtatggcatatcgttttctataaaaacacgaaggttgcttgtcattaaaaaaaaaaaaaaaa

SEQ ID NO: 8834 - protein, 251 aa, Zea mays
  misc_feature: Ceres CLONE ID no. 1466602
  misc_feature: Ceres CDNA ID no. 36707530
  misc_feature (46)..(113): Pfam Name: RRM_1 PFAM Desc: RNA recognition motif.
  misc_feature: Homolog of GI Number: 22328141 NR Desc: heterogeneous nuclear ribonucleoprotein
  misc_feature: Homolog of GI Number: 15232397 NR Desc: heterogeneous nuclear ribonucleoprotein
  misc_feature: Homolog of GI Number: 68361080 NR Desc:  similar to G
  misc_feature: Homolog of GI Number: 68369368 NR Desc:  similar to G
  misc_feature: Homolog of GI Number: 1085318 NR Desc: GRSF
  misc_feature: Homolog of GI Number: 517196 NR Desc: G
  misc_feature: Homolog of GI Number: 53759145 NR Desc: G
  misc_feature: Homolog of GI Number: 55977848 NR Desc: G
  misc_feature: Homolog of GI Number: 14141159 NR Desc: heterogeneous nuclear ribonucleoprotein H3 isoform b
MMEPGAPYFGAMGSSASGAGGGFYQPFNSNLAGAGSSTGIQSFPCVRLRGLPFDCNDIDVCKFFVGLDIVDCLLVNKNGRFTGEAFVVFPTAMQAEFALHRDRQNMGRRYVEVFRCKKHEYYCAIANEVNQGGYFEPEYRRSPPPPRPRKPSEDKGSMEYTEVLKLRGLPYSATTEDIIKFFLEYELAEENVHIAYRSDGKATGEAFVEFPTAEVAKTAMCKDKMTIGTRYVELFPSTPEEASRAKSRGRH

SEQ ID NO: 8835 - DNA, 730 bp, Zea mays
  misc_feature: Ceres CLONE ID no. 1466621
  misc_feature: Ceres CDNA ID no. 40351938
  CDS (2)..(415): REFERENCED BY SEQ ID NO: 8836
atcacaacgattagcaagcggaccatcaatttctagcgcatctatccatccatcaaactgcgacgcaaacattttatctgacagcactagcagaggctggttcagcgacaacaatggcgttcgtgccgatctgcgtgcagtgcgggacgaggagcaacccgtgccggtgcaaggtggtcggcccgacgctgggattcgtggcgctcgtcgtggccggagtggtggagtggccgctgggtgctgccgtgtaccttttccgccaccgcaagggccgccgcatcatgggtcacccggccagggtcgtgtaccctcgcgtcaccggcgcaatccccatctaatcgaccgcagcatcttcgtcttcggtggtgatctgtcacgaggtaccgccgttggcttgtcaagctgtgtcatgtaatctgggagattcgtctccccgactttcagcgtttgtttaataaagcgaggtttttgttgttgtagtatttgcaaggcttcgccgtggttgtaccaaatatttgttcgtcgatgtaaagtagagtagcctttttggttaccccgagtgctgtgtaatagcatcgatcaacttgactcctcttttcggaaaatgctctttatgtagtgctccctccgatcttctctttttcgaaaaatgctccttatgtaatgtttcctcctataccaaataaaataagtgtcatggtttttttattaatcaaaaaaaaaaaaaaaa

SEQ ID NO: 8836 - protein, 74 aa, Zea mays
  misc_feature: Ceres CLONE ID no. 1466621
  misc_feature: Ceres CDNA ID no. 40351938
MAFVPICVQCGTRSNPCRCKVVGPTLGFVALVVAGVVEWPLGAAVYLFRHRKGRRIMGHPARVVYPRVTGAIPI

SEQ ID NO: 8837 - DNA, 828 bp, Zea mays
  misc_feature: Ceres CLONE ID no. 1466941
  misc_feature: Ceres CDNA ID no. 25445872
  CDS (76)..(618): REFERENCED BY SEQ ID NO: 8838
ataaccctctgttcccacgccccctctgccccactcccaaaatcttgacgcctgacgtccccacaagtgatcagcatgagtaacacagctgaggaaaacactggcggcggcggcagcagcagcaccccgacgcgcgttgtggtagtcgagcgcgtggtgacggtggagtacctggagccgtccatgtcgcgggagctgctgggcaagttcccggacccatccgccttcgacttcgactactcgcagagcggcatctggtcgccgctcaacaaggtcccgcgcggcggcgcgtgcgagcccgagacggccgacgccaccaactcctcgaccgacttcctcgtcgccaacccgaagcgcagggcgagggccggcggtcggcccaaggactccgccggcggcgggaggtccaggtggaggcgcaggcggctgcggcgagacgggtccttcctcgacctccacgagactggcagggccaggctcgacttctcgccgccggcaccttcccccgcgaaggaggggtggaggtgggtgctcaaggcggccatcaagaagttcaaggcgcggcagcggcggtcccggcagactcccctgctccaaatggtcctccccatgctgtgatgatcgatcgatctcgcgcgctcacacgaattgtgcttgccttttgttttcacttgttccatcacagttctattcattgaatccggacgctggtccatgccttgcctgtattattgttgagttcggatttgcttcaagttgtattgtaaccgtgtaatgctcttgctggagaaatatattggggtacatcttttcaaaaaaaaaaaaaaa

SEQ ID NO: 8838 - protein, 180 aa, Zea mays
  misc_feature: Ceres CLONE ID no. 1466941
  misc_feature: Ceres CDNA ID no. 25445872
  misc_feature: Homolog of GI Number: 50926268 NR Desc: OSJNBa0014K14.12
  misc_feature: Homolog of GI Number: 70663927 NR Desc: OSJNBa0014K14.13
  misc_feature: Homolog of GI Number: 27764958 NR Desc: At4g15140/dl3615c
MSNTAEENTGGGGSSSTPTRVVVVERVVTVEYLEPSMSRELLGKFPDPSAFDFDYSQSGIWSPLNKVPRGGACEPETADATNSSTDFLVANPKRRARAGGRPKDSAGGGRSRWRRRRLRRDGSFLDLHETGRARLDFSPPAPSPAKEGWRWVLKAAIKKFKARQRRSRQTPLLQMVLPML

SEQ ID NO: 8839 - DNA, 656 bp, Zea mays
  misc_feature: Ceres CLONE ID no. 1467071
  misc_feature: Ceres CDNA ID no. 25445495
  CDS (137)..(418): REFERENCED BY SEQ ID NO: 8840
aagagaaacaaaaagaaggctatcgaaaaaggaaaggaaaatggcaggaagactgagcggtgtggcctcacgaatcatggggggaaacggcgtcgttgcccgatctggcgcctcttctctgcgccaacgcgccggcatgggtctccccgtcggcaaacacatcgtccccgacaagccgctttcggttaacgacgagctgatgtgggacaacgggactgcgttcccagagccttgcattgatcgaatcgctgatactgttgggaagtatgaagcattgggatggttgtgtggcggtctagggttctttgcgactctaggtctcctcgctgttgtcaacgataaagcttcaaaggttccctttacaccacgagtgtatccgtatgacaacctgagagtggagcttggaggagagccatagagacacgatcaagtgatctgctcatcaaaactctaagcgtgttttcttcactgctttcttcttcaaaatcttttcatttcctgctcacaacttggtgacaaaagaataaatagatccttttcattgtctgttgtctctgtaattaacagtgaccttttgggtgtattcataagagaagacatgtacttttcagtcaatctaaacttgtgtttggttgtgtataaaaaaaaaaaaaaaa

SEQ ID NO: 8840 - protein, 125 aa, Zea mays
  misc_feature: Ceres CLONE ID no. 1467071
  misc_feature: Ceres CDNA ID no. 25445495
  misc_feature: Useful for sterility
MAGRLSGVASRIMGGNGVVARSGASSLRQRAGMGLPVGKHIVPDKPLSVNDELMWDNGTAFPEPCIDRIADTVGKYEALGWLCGGLGFFATLGLLAVVNDKASKVPFTPRVYPYDNLRVELGGEP

SEQ ID NO: 8841 - DNA, 715 bp, Zea mays
  misc_feature: Ceres CLONE ID no. 1467106
  misc_feature: Ceres CDNA ID no. 40351939
  CDS (79)..(519): REFERENCED BY SEQ ID NO: 8842
gtgaacgccaaacagtgtctcttttccaattccagacctgaagaaactccgaccggtggcggcaggatctgtgccgcgatggcgacgtcgaacaccgcgcggatggaggacggcggcggcgacctgagaagcaccatcaagaagtggaacatcatctaccctgtctacctcaactccaagaagacggtcgccgagggccgccgcatcgccgctgccaaggcctgcccggaccccacctgcatcgagatcgctgactgctgttcgcacctcaagatcccccacgccatcgagttggataaggcgtaccctcgggatttcttccaggtggggagggtcagggtgcagcttaagaaagatgacggctcccccgtcaatcctgctattaaaacgaagaagcagctgatgatccaagtagcagagctagttcccaagcatcacggaaggacaaagaagcaggagccagcgcccaatcccggtggcagttcaaagaacacaaaaggcgggaaaaagaaaaagtgatgcagtatcattgtgttgttttttattctgttcgtcatcatacactaagcttctgtgaaaaaggaaaagtcttggacgttgttgttatgttgccattatgccattttttcatgtataagaacttactaagaatcttccattgactcggtaaaatgcaacttaaaaaaatttggcgtcgctaaaaaaaaaaaaaaaa

SEQ ID NO: 8842 - protein, 138 aa, Zea mays
  misc_feature: Ceres CLONE ID no. 1467106
  misc_feature: Ceres CDNA ID no. 40351939
  misc_feature (16)..(112): Pfam Name: SRP19 PFAM Desc: SRP19 protein
MEDGGGDLRSTIKKWNIIYPVYLNSKKTVAEGRRIAAAKACPDPTCIEIADCCSHLKIPHAIELDKAYPRDFFQVGRVRVQLKKDDGSPVNPAIKTKKQLMIQVAELVPKHHGRTKKQEPAPNPGGSSKNTKGGKKKK

SEQ ID NO: 8843 - DNA, 523 bp, Zea mays; identical to SEQ ID NO: 8435
  misc_feature: Ceres CLONE ID no. 1467118
  misc_feature: Ceres CDNA ID no. 36707115
  CDS (82)..(357): REFERENCED BY SEQ ID NO: 8844

SEQ ID NO: 8844 - protein, 91 aa, Zea mays; identical to SEQ ID NO: 8436
  misc_feature: Ceres CLONE ID no. 1467118
  misc_feature: Ceres CDNA ID no. 36707115

SEQ ID NO: 8845 - DNA, 1031 bp, Zea mays
  misc_feature: Ceres CLONE ID no. 1467130
  misc_feature: Ceres CDNA ID no. 36705168
  CDS (386)..(766): REFERENCED BY SEQ ID NO: 8846
accctgctccctctcccaagccaccgccactccttctccctcttgcgcaaccagagcgcacaaacccaatgcggcgccggcccctcctccctcttgcgcaatttggctgtgtggccacggactatcaagaacaggcagtggatcctgacccctttttctctcattccagcagcagcggtggagaagatcctgcaggtagtgcagcagtgaggcggtggatctccagacagtgcagcagttgggtggcaggtggagcagccccagccagtttcgtttctagtggggagcgtgttgtgctggcgaggtcgagcagcagaggacgccggcgacaactaacttgctctccggagcggagggcgaggaggtcgaaaggaggaaggagaccatggagctgttcccgcagagcgtcgggttcagcatcaaggatgctgctgcccctagggaggagcaaggagataaagagaagcctaagcagctcacaatcttctatggcgggaaggtgctggtatttgacgatttccccgccgacaaggcaaaggatctgatgcagctggccagcaagggcagcccagtggtacagaacgttgttttgcctcaaccctctgcagctgctgctgtcagtactgacaaggccgtgctggacccggtcatcagcttggccgctgctaagaagcctgctcgcacaaatgcttctgatgcattacatcaagaaaaagatttagtgaaactgtttagaaagctattgatgatattgatgctcggatgatatggaagcaacgatagcagtaccagttgaagatggacagtttgcgaagtcttctacataaatttcacatgtcttgcttttgtgactgatcagctctggagtagctagagtgatgtagttgtgggcttttgaacaatagctggagtgatatgaaacattagtgatgtagttgtgggctttataattgtgaatgatattagtaaatgatctagttgtgaatgatattataattgtgatgcttttgtgaataaaaaaaaaaaaaaaa

SEQ ID NO: 8846 - protein, 126 aa, Zea mays
  misc_feature: Ceres CLONE ID no. 1467130
  misc_feature: Ceres CDNA ID no. 36705168
  misc_feature (24)..(59): Pfam Name: Zim PFAM Desc: ZIM motif
  misc_feature: Homolog of GI Number: 16604489 NR Desc: At1g19180/T29M8_5
MELFPQSVGFSIKDAAAPREEQGDKEKPKQLTIFYGGKVLVFDDFPADKAKDLMQLASKGSPVVQNVVLPQPSAAAAVSTDKAVLDPVISLAAAKKPARTNASDALHQEKDLVKLFRKLLMILMLG

SEQ ID NO: 8847 - DNA, 684 bp, Zea mays
  misc_feature: Ceres CLONE ID no. 1467181
  misc_feature: Ceres CDNA ID no. 25445873
  CDS (63)..(455): REFERENCED BY SEQ ID NO: 8848
cccagcaatccccatcttcccctccaagcttccgatcttccctctcgcctgccgctgccgagatgacggtggagaagatcgacgcgacggtggccgacttcgacggccacttcgagaggctcttcgccggcgacgacggcggcaagctgaagctgctgctcttcctcgccgaccgcgagccctcctcctccctcacctggtgccccgattgcaacgtggcggagccggtgatctacgagaagctggagtcgctgggcaaggacgtggtgctcctgcgcgcgttcgtcggcgacaagcccacgtggagggacccggcccacccgtggagggtggacccgcggttcgcgctcaagggcgtgccgacgctgctgcggtgggacaagggcgccgccgccggccgcctcgaggacgacgaggccaacgtcggggacaagatcgatgccctgctcaattgagtggtgaattattatgtgctgaccgccagtatcgtctgcttaatccaagtgccaatagaatgcttttgctttggcggcagatgttagctatctgaagtcgtgctgttcttctaaccagtcagcttgagccatgaaccaaataaaacaggggaacacttgaactcaatgtctactgccatacctagttggtgataatcaacgttggtgaatgttaaaaaaaaaaaaaaaa

SEQ ID NO: 8848 - protein, 130 aa, Zea mays
  misc_feature: Ceres CLONE ID no. 1467181
  misc_feature: Ceres CDNA ID no. 25445873
  misc_feature: Homolog of GI Number: 72167626 NR Desc:  similar to thioredoxin
  misc_feature: Homolog of GI Number: 51247915 NR Desc: Chain A
  misc_feature: Homolog of GI Number: 15216179 NR Desc: putative 42
MTVEKIDATVADFDGHFERLFAGDDGGKLKLLLFLADREPSSSLTWCPDCNVAEPVIYEKLESLGKDVVLLRAFVGDKPTWRDPAHPWRVDPRFALKGVPTLLRWDKGAAAGRLEDDEANVGDKIDALLN

SEQ ID NO: 8849 - DNA, 913 bp, Zea mays
  misc_feature: Ceres CLONE ID no. 1467225
  misc_feature: Ceres CDNA ID no. 40351940
  CDS (194)..(517): REFERENCED BY SEQ ID NO: 8850
gaccgcatcttttctccgcgccgccgctcgcctgcacttctacgtgtgaaccgcgtccgcgcctatggcctgcccgtgcccagctgccccctctccacacgagcctctctaggcgtcaagcgtgccattaagcaaccgtggcccccacccctcctcggctctctgcgtgagcacaagcacgtctctgtagcccatgttcaacggaagcgaaagtgccgctggaccacatacgattgttgatggtaaagaagttgtgaactttgcatcagcaaactacctcggtttaattggcaacgaaaagattattgattcttgcatcagttcattggagaaatatggtgttggttcttgtggtccacgtggcttttatggaacaattgatgtccatcttgactgtgagtcaaagatagctaaatttttggggactccagactccattctttattcatatgggatttctacaatattcagtgtgatacctgccttctgtaagaaagaagatatcatagtcgcttaactgtacatgggtagtttgatgtgattgcggtgacgagggtgttgactgtttggtgaaatgcttgggacaaagtggccaacaagaatggagtcatggaacatcgacaggaggggtgcggcagcagcaaccgatgtatcccttggacaatctggttttgacaagatgcaaatcaatccgctgtacactgtattccgcacttgcacagattgtttggttaattacaagattatctcagtgttttgattggtacacttatgtatgaaatattgattggtactcatctatattatatgaattatattattattaaatatatgtgtgtgtaaaaaaaaaaaaataaaaaaaaaaaaaaaaaaaaaaaaaaaaaaaaataaaaaaacaaaaaaaaaaaaaaaa

SEQ ID NO: 8850 - protein, 107 aa, Zea mays
  misc_feature: Ceres CLONE ID no. 1467225
  misc_feature: Ceres CDNA ID no. 40351940
  misc_feature (18)..(107): Pfam Name: Aminotran_1_2 PFAM Desc: Aminotransferase class I and II
MFNGSESAAGPHTIVDGKEVVNFASANYLGLIGNEKIIDSCISSLEKYGVGSCGPRGFYGTIDVHLDCESKIAKFLGTPDSILYSYGISTIFSVIPAFCKKEDIIVA

SEQ ID NO: 8851 - DNA, 985 bp, Zea mays
  misc_feature: Ceres CLONE ID no. 1467373
  misc_feature: Ceres CDNA ID no. 35383427
  CDS (130)..(699): REFERENCED BY SEQ ID NO: 8852
acatcccaccccccacagccatccgttcacagagtaaccacagccacaccgcaacttcaccttcaccatccatcatcgtcaacgagaagcagcagcacccggccaagagacgagacaacaagtgttgccatggcagcggtggagagcaagagcaggaggttcgcgctggcgtgcggcgtcctcagccagtacgtcaaggcggagcagaagatgtcctccgtcgccgtcgccccgcgcgcgcccccggccaccacgctcagcctcatgcccggcgccgacgtcggccaggagcacgcggccgcggcggccgctgaggaggcgggtcccgccacggccacgccgctcaccatcttctacggcggcagggtggtcgtcttcgaggacttccccgcggacaaggcggccgaggtgatgcgcatggccgccgccgccggcgtcgagcgcgcggctgtcgtgcccgcccccgccctcctcccggcggacaagacggcgctcgcggacctgcccatcatgcgcaaggcgtcgctgcagaggttcttcgagaagcgcaaggaccgcctcggcgcgcgcgcgccctacgcccgcccggcgccggccgccgcggccatcaaggactcggaggagaagtcggcgtcggcgtcggcgtcgtcctcctcgtggctcgggctggccagcaccgacggcgccttcgccctctgatctgcacggacggacggagcaagacggcttgcccgcttcaagagatcgtttgtagagcacttttaaatgtattctttgcgtaaaaattcgagtagggaaagaaagaaggaaggaagattgagatcatagtaagccctttttgtttgattgattggttgacaaattcttttgatctctgcgcggctcatcatcatgggtcgcccagagattgagttcatgaaccgaataataacttgaaataaagacaagtacgtagtactagcttgaaacaaaaaaaaaaaaaaaa

SEQ ID NO: 8852 - protein, 189 aa, Zea mays
  misc_feature: Ceres CLONE ID no. 1467373
  misc_feature: Ceres CDNA ID no. 35383427
  misc_feature (65)..(100): Pfam Name: Zim PFAM Desc: ZIM motif
  misc_feature: Homolog of GI Number: 66776813 NR Desc: Phosphoribosylaminoimidazole
  misc_feature: Homolog of GI Number: 55243783 NR Desc: ENSANGP00000017440
  misc_feature: Homolog of GI Number: 67987177 NR Desc: 4Fe
  misc_feature: Homolog of GI Number: 55665385 NR Desc: serine\/arginine repetitive matrix 1
  misc_feature: Homolog of GI Number: 7949115 NR Desc: Ser/Arg
  misc_feature: Homolog of GI Number: 73950203 NR Desc:  similar to serine/arginine repetitive matrix 1 isoform 1
  misc_feature: Homolog of GI Number: 6649242 NR Desc: splicing coactivator subunit SRm300
  misc_feature: Homolog of GI Number: 62655768 NR Desc:  similar to serine/arginine repetitive matrix 2
  misc_feature: Homolog of GI Number: 61826057 NR Desc:  similar to serine\/arginine repetitive matrix 1
MAAVESKSRRFALACGVLSQYVKAEQKMSSVAVAPRAPPATTLSLMPGADVGQEHAAAAAAEEAGPATATPLTIFYGGRVVVFEDFPADKAAEVMRMAAAAGVERAAVVPAPALLPADKTALADLPIMRKASLQRFFEKRKDRLGARAPYARPAPAAAAIKDSEEKSASASASSSSWLGLASTDGAFAL

SEQ ID NO: 8853 - DNA, 910 bp, Zea mays
  misc_feature: Ceres CLONE ID no. 1467407
  misc_feature: Ceres CDNA ID no. 36585862
  CDS (142)..(534): REFERENCED BY SEQ ID NO: 8854
ctttttatttcttaacggaaaaggttgaaaggattcgtcgtccatttaagtgccgtggcccagaaccgtcttcgacgccaaggaaacagtcacgtctcccagatctaactccccccgactcacgaatcccagagagcctccatggcgacgcaccgccactgcctcccactcctcctcgtggccgccgccctcgccctcgccgccgtccctgctcgcgcggcgctgggcggcgggcgcggcccgctgctgggcgggtggaacccgatccctgacgtgagcgactcgcacatccaggagctaggcgggtgggcgctggggcaggcgaagcaccagaagctggccgccgacgggctgcggttccgccgcgtggtgcgcggcgagcagcaggtcgtgtccgggatgaactaccgcctctacgtcgacgccgccgaccccgccggccgcaccgtgccctacgtcgccgtcgtgtacgagcaggtctggacccgcacccgccagctcgcctccttcaacccggtgccccgcgccccctgaaaccatacggacacgggtgggccgaagcgaccacgacgatgttctccgtcaattacgtgttgagctaatcttattattgtttctattattataataatgcttctccctgttcctatggacctatagtagtatactagtatgttgcgagggagcgagtagaccgtgtgtttcgctatcgtgggactagaataagccatgccaatgaacatgagccgaatagaggctacgtactgttattgtatcagtactagtaccctatatatatgggcgcactacagttctgtgatgtaatggattctgctagtatttgactcttgtgcttttgtacagaattattattattttatatggtgttctaggaaaaaaaaaaaaaaaa

SEQ ID NO: 8854 - protein, 130 aa, Zea mays
  misc_feature: Ceres CLONE ID no. 1467407
  misc_feature: Ceres CDNA ID no. 36585862
  misc_feature (37)..(97): Pfam Name: Cystatin PFAM Desc: Cystatin domain
  misc_feature: Homolog of GI Number: 71061126 NR Desc: TPA: putative cystatin
  misc_feature: Homolog of GI Number: 71794645 NR Desc: putative cystatin
  misc_feature: Homolog of GI Number: 51964266 NR Desc: PREDICTED OSJNBa0083F15.4 gene product
  misc_feature: Homolog of GI Number: 71794643 NR Desc: putative cystatin
  misc_feature: Homolog of GI Number: 71061132 NR Desc: TPA: putative cystatin
  misc_feature: Homolog of GI Number: 71794647 NR Desc: putative cystatin
  misc_feature: Homolog of GI Number: 18029187 NR Desc: cystatin
  misc_feature: Homolog of GI Number: 21592712 NR Desc: cystatin
  misc_feature: Homolog of GI Number: 11596186 NR Desc: cystatin
  misc_feature: Homolog of GI Number: 71061128 NR Desc: TPA: putative cystatin
MATHRHCLPLLLVAAALALAAVPARAALGGGRGPLLGGWNPIPDVSDSHIQELGGWALGQAKHQKLAADGLRFRRVVRGEQQVVSGMNYRLYVDAADPAGRTVPYVAVVYEQVWTRTRQLASFNPVPRAP

SEQ ID NO: 8855 - DNA, 675 bp, Zea mays
  misc_feature: Ceres CLONE ID no. 1467615
  misc_feature: Ceres CDNA ID no. 36593813
  CDS (181)..(501): REFERENCED BY SEQ ID NO: 8856
aaattccgtgctctcgagaaagttcatcccctttcacctctgtcccgagagccaatccgcccacagatcaagccttacaaaaccccacttaccatgataccacctcgaccctaaccggctaatcgacctgagatcgatctcgagtgacgaaattgacgacaggaagtaagatccggcaagatgttcttcttcttcgtaggcggcgtagagcagggggccgggcgggtgctcaaggaagcggcggggcggtgcctccggtgcggcggcgccgcggacctggtggagacggagaaggtcctcaagctcttcttcgtccccgtctggcggtggccggggaaggaccccgcgtacctctgtcgcgagtgcggcctcctcgcaccgggctccctcggcgcggagtcgggaccctcgctgctgctccgggaggcaaggtgcggcgcgtgcagccgcgctgtcgatccgcagttccggttctgccccttctgcggctccgccctctgaagtgattgccggtggcgaactggcgatggcgactacatgtctacatagcagaggtgacgccttttgccaatttggttttactagtttgtacactcaggttttactcgtttaaaaactatgtatattatcgcaaaaaataaaggaaaaacaccaccaccaaaaaaaaaaaaaaaa

SEQ ID NO: 8856 - protein, 106 aa, Zea mays
  misc_feature: Ceres CLONE ID no. 1467615
  misc_feature: Ceres CDNA ID no. 36593813
MFFFFVGGVEQGAGRVLKEAAGRCLRCGGAADLVETEKVLKLFFVPVWRWPGKDPAYLCRECGLLAPGSLGAESGPSLLLREARCGACSRAVDPQFRFCPFCGSAL

SEQ ID NO: 8857 - DNA, 741 bp, Zea mays
  misc_feature: Ceres CLONE ID no. 1467656
  misc_feature: Ceres CDNA ID no. 25445971
  CDS (1)..(672): REFERENCED BY SEQ ID NO: 8858
aatcgaaaaacttcagacttgagtccacccagccagccaagacacgcagcgcaggcgcatcccagccagattcaacccgagttcgcgacgagagcacgagatggcgatgcggacagcgctgacctccctccccgcgcgcctgcgcgcccctgcgccccccgcggcgacgggcggccggcgcctcctcagcgacgggaaggggcgtgtgctcagcgaggaggagcgcgccaaggagagcatctacatccagaagatggagagggagcggcaggagaagctgaagaagaggctcgagcaggagaaggccgactccgacaaggccaagcccgccgacgccgacaagaaggccgagggatctacctagctaggattggcatggcactgttggaaggcaatcacgtttcgcatgtatccgaatccgatggtcagctttcggcgtgtttggttctcgtgctcgccccgcccaagctcatcaggtgcgttgaccgcatgcaaaccggtgattggttgcctgaacgcttggatgtcggcctgtatctgtggatgcaactcaggtgttttctcatgtgtctgcctgcgcgcgtggagacgtggggagagagcatctctagccgcccaggccgctacgagcccggcgcccgtgaacgcggcaaccaaacatgccgtttgtgaatgaataaattctgtaaaacgtcaacagcactggatatgctgtggcttcggttaaaaaaaaaaaaaaaa

SEQ ID NO: 8858 - protein, 87 aa, Zea mays
  misc_feature: Ceres CLONE ID no. 1467656
  misc_feature: Ceres CDNA ID no. 25445971
  misc_feature: Homolog of GI Number: 50948469 NR Desc: putative F1F0
  misc_feature: Homolog of GI Number: 5106371 NR Desc: F1F0
  misc_feature: Homolog of GI Number: 28416549 NR Desc: At5g04750
  misc_feature: Homolog of GI Number: 9758450 NR Desc: F1F0
  misc_feature: Homolog of GI Number: 1096930 NR Desc: H ATPase inhibitor
  misc_feature: Homolog of GI Number: 50948471 NR Desc: putative F1F0
MAMRTALTSLPARLRAPAPPAATGGRRLLSDGKGRVLSEEERAKESIYIQKMERERQEKLKKRLEQEKADSDKAKPADADKKAEGST

SEQ ID NO: 8859 - DNA, 759 bp, Zea mays
  misc_feature: Ceres CLONE ID no. 1467795
  misc_feature: Ceres CDNA ID no. 25446132
  CDS (1)..(675): REFERENCED BY SEQ ID NO: 8860
acaccccgcacagccaaaaaacgcgagacgccggatacgaaacgcgccgaaacccttacgcgcacggcgcaccgcgtcctgctctgccgaacacacaccacacaccccgacgggcagcaaagcaagctgctctcgcctcccccacaccccgtctccaccacagagccgcccgcccgctcgctcgccaccagacgccacacgcccccagcccaagaggcagccgcccgcatctggttggggccagctcctgtcgatcgatcgcgggggcgccaagggaacgtgttcttccaagatgctgcagctgctgatggctctggccttctcggcggccccgctgacgctgtacgtgccgccggtgcgcagcctcagcctcttcgtcgaggccatggaggccgtctgccgcgactgcgcgccctactcccacggcgccgtcgcccgcttccgcctcggcctctcccgcgtcctcgccggcctagcgcgcgccctccgctaggcacccccgccccgccccgcatcgccgccgccgccgggtcccttctttcctctgtcctcctttctacccataccgagcaggtggtttctagcgcaggcagcacagctagcaatatactgtactatacatgcaggactagcgcgaaatctttctgtttttttttgtttgaggtttgggtgtagcatgtagggtgaggacaggttaataaatcaatccgaatgaaggggagattttgcacgagatgctgaggaaaaaaaaaaaaaaaa

SEQ ID NO: 8860 - protein, 66 aa, Zea mays
  misc_feature: Ceres CLONE ID no. 1467795
  misc_feature: Ceres CDNA ID no. 25446132
MLQLLMALAFSAAPLTLYVPPVRSLSLFVEAMEAVCRDCAPYSHGAVARFRLGLSRVLAGLARALR

SEQ ID NO: 8861 - DNA, 1055 bp, Zea mays
  misc_feature: Ceres CLONE ID no. 1467851
  misc_feature: Ceres CDNA ID no. 40041431
  CDS (91)..(849): REFERENCED BY SEQ ID NO: 8862
atcatactagcatacagcaccaccacagggaaagccagcaagggaatcacatcctacctagtgtagagtacgtgcttgtgctcaccggcaatgtgcagagggacggtggacgacctccgcccgctcgggccccggcggctcgacgtccgcgccttctacctccgcctctcctcctcctcccactcatccgcgtcgccgccgcccgcggagctcacgctcgtctaccgcccggccatcggcggcgccgcgctggagctggccggccgcgcgctcccgccggcgtgccccgccgaggccaccctcctgcgcgtccgcggcgcggccgacggtgcggacgacgcgccggcgtacgcgagcgccgaccgcgtctcggccgccgagggcgcgcgcttcgaggtgtacgccgggcaggagctcgcggcggagggcgccttcttcccgcggcgccggctcgacggaggcgggtggcacgtcgagtgccgccggccggtcgggtcgcgctcgcactcgcgggtggcggaggtgctggtcctcgcggagggcggcgtgctcataagggccagggccagggcggcgaggcgggccgggtgcgcgacgccgctggaggggataccggaggaggacgcgtcctcgtgggggtcgtgcgagtgcggggcttgcggggacgggtggcagatggtcggagacagcagcagcgatgatgacgacggcgacaagttgaaggaggaagaggtggaggccgagacgatgcggtgggcgctggagatgggcgcctgggcggtgtgcgtcggggtcggcctgctcgccaccgcccgccggttcagccggaggagggccgcgctccggtgatccctgcctgtcaagaggaatttgtttttgttttcttcagtttcacttggtcaaagtgtcaggataggattttgcagtatcttcttcttcttcagtctagctagtgattttgtttcgtgggagttgtcaaatcttgtagcgtatatgtacatacactcactcggagtcgatcaaccaagagcttgcaatcaaaaaaaaaaaaaaaa

SEQ ID NO: 8862 - protein, 252 aa, Zea mays; identical to SEQ ID NO: 7190
  misc_feature: Ceres CLONE ID no. 1467851
  misc_feature: Ceres CDNA ID no. 40041431
  misc_feature: Homolog of GI Number: 66776103 NR Desc: LigA
  misc_feature: Homolog of GI Number: 66780099 NR Desc: PE
  misc_feature: Homolog of GI Number: 66776896 NR Desc: LigA
  misc_feature: Homolog of GI Number: 66776365 NR Desc: PE
  misc_feature: Homolog of GI Number: 66777776 NR Desc: similar to Methylase involved in ubiquinone/menaquinone biosynthesis
  misc_feature: Homolog of GI Number: 67986538 NR Desc: Glycoside hydrolase
  misc_feature: Homolog of GI Number: 67987371 NR Desc: Aldehyde dehydrogenase
  misc_feature: Homolog of GI Number: 68234007 NR Desc: Protein kinase:Protein phosphatase 2C
  misc_feature: Homolog of GI Number: 66776881 NR Desc: similar to ABC
  misc_feature: Homolog of GI Number: 66778264 NR Desc: LigA

SEQ ID NO: 8863 - DNA, 494 bp, Zea mays
  misc_feature: Ceres CLONE ID no. 1467866
  misc_feature: Ceres CDNA ID no. 25446133
  CDS (62)..(271): REFERENCED BY SEQ ID NO: 8864
aaaaggaagctttctaccctagcagagaaaaaaaagcagaggagaggaagcggaggcgacgatgtcggcgatgacggcggcggtgcccttctggcgcgcggcggggatgacctacatcggctactccaacgtctgcgcggcgctggtgcggagctgcctcaaggagcccttcaagaccgaggtctcctcccgcgagaaggtccacttctccctctccaagtgggccgacgagaagcagcagaagcccactgtgcgcacagatgatgaatgaagatcgggtgccatggtgattgatgttttgagaagttgttgagtcagggcttaagaacttgagaataaattcttgcggtgacaatggatctattccgatactatgttgttatatttactaattgctccttttctacttgatgaacctgaaccatgtgaaactcgtgtcttgtggtgctcgagtgagcgtgtttttatgcgttatatcaaaaaaaaaaaaaaaa

SEQ ID NO: 8864 - protein, 69 aa, Zea mays
  misc_feature: Ceres CLONE ID no. 1467866
  misc_feature: Ceres CDNA ID no. 25446133
  misc_feature (9)..(57): Pfam Name: ATP PFAM Desc: Mitochondrial ATP synthase epsilon chain
  misc_feature: Homolog of GI Number: 639793 NR Desc: mitochondrial F1F0 ATP synthase epsilon subunit
  misc_feature: Homolog of GI Number: 50942951 NR Desc: putative ATP synthase epsilon chain
  misc_feature: Homolog of GI Number: 21068676 NR Desc: putative epsilon subunit of mitochondrial F1
  misc_feature: Homolog of GI Number: 21386911 NR Desc: epsilon subunit of mitochondrial F1
  misc_feature: Homolog of GI Number: 25044815 NR Desc: ATP synthase epsilon subunit
  misc_feature: Homolog of GI Number: 303625 NR Desc: F1
  misc_feature: Homolog of GI Number: 31210015 NR Desc: ENSANGP00000010662
MSAMTAAVPFWRAAGMTYIGYSNVCAALVRSCLKEPFKTEVSSREKVHFSLSKWADEKQQKPTVRTDDE

SEQ ID NO: 8865 - DNA, 622 bp, Zea mays
  misc_feature: Ceres CLONE ID no. 1467933
  misc_feature: Ceres CDNA ID no. 40351941
  CDS (60)..(461): REFERENCED BY SEQ ID NO: 8866
ccccgccgcctcgcgcccccgctcgcttcacttctctaggtgcgcaccgatcagaagagatggcggtgccgctgctgacgaagaagatcgtgaagaagcgggtcaagcagttcaagaggccccacctcgaccgctacaagtgccttaagccaagctggcgcaggccaaagggtattgactcccgtgtcaggaggaagttcaagggatgcaccttgatgcccaacattggttatggttctgacaagtcgaccaggcactacctccccaacaagttcaagaagtttgtggtccacaacgtttctgagctggagttgctcatgatgcacaacaggacctactgcgctgaaattgctcacaacgtgtccactaagaagcgcaaggagatcgtggagcgtgctgcgcagctcgacattgtggtcacgaacaagcttgctaggctccgcagccaggaggacgagtagtctggtttcttgtcttaacgacgaactggatgttgccattcctttctgtaggaaactactttgcttgtgtcttgttagtactgaaaaccagagtcactcctacctttttgcaatcagtagctactaaaatgtggcagattccactaaaaaaaaaaaaaaaa

SEQ ID NO: 8866 - protein, 133 aa, Zea mays; identical to SEQ ID NO: 6698
  misc_feature: Ceres CLONE ID no. 1467933
  misc_feature: Ceres CDNA ID no. 40351941
  misc_feature (14)..(123): Pfam Name: Ribosomal_L32e PFAM Desc: Ribosomal protein L32

SEQ ID NO: 8867 - DNA, 999 bp, Glycine max
  misc_feature: Ceres CLONE ID no. 1467986
  misc_feature: Ceres CDNA ID no. 25446788
  CDS (180)..(698): REFERENCED BY SEQ ID NO: 8868
aaacgtggaaaaagtgaaaagcattcgatgctactgctagaaaccccgtttttttgtggaaaaaaagcattttgcaactgctcgcagcttaacgctgcaatttctttccaagttgatcgagcgacttcaggattgccttgcatacttttggtgtttgaagagctaatctgtctaccaaaatgaagggacgtgtaaggtgggatgaggctaatattggagaaattgaggcaaacaaacctgtgaggcagaaaattactgagcctaagactccatatcatcctatgattgatgatgacagttctctatctcctgtacgaggaagttttgatgcatgtattgataatgaaaatcgtgctgaagcaatatggagtgctctgaatgatgtagcctccagtagcagaagaggcactggacaatctggtggttggacatcatctgaggatgagccagaagcaatggagcaagatgatgatgataggaacttgagttttaaagagcacagaaaggcccactatgatgaatttcttaaagtcaaagagctgcaagagacgggttctcttgaggatgaaagtgacgaggatcataattctcaacccagtaaggcggagaaatgtgagtcgtcttcactgagtcatagtgtaaaagagatggtcattgagggtaagaagtcttcaacgcctccagctaatggttcttagacagtgatcaacaaataaaatccactgtcttttcattagtttcattttgtgtattgaagaaaactaaatgattcactgtattgtatcatctgtatgtaaatagtttctttcttcatcatgcttattatgatccgttcacactttggttgtattctggcaaattggtttatgttcggcatcttcgaggagtttgcttgtggcttttataagtaattaaggttggatgcttaaagggagcaaatatatcccaaactggaactatatttcatttcttatttccttgtgaaaaaaaaaaaaaaaa

SEQ ID NO: 8868 - protein, 172 aa, Glycine max
  misc_feature: Ceres CLONE ID no. 1467986
  misc_feature: Ceres CDNA ID no. 25446788
  misc_feature (2)..(133): Pfam Name: IPP PFAM Desc: Protein phosphatase inhibitor 2
MKGRVRWDEANIGEIEANKPVRQKITEPKTPYHPMIDDDSSLSPVRGSFDACIDNENRAEAIWSALNDVASSSRRGTGQSGGWTSSEDEPEAMEQDDDDRNLSFKEHRKAHYDEFLKVKELQETGSLEDESDEDHNSQPSKAEKCESSSLSHSVKEMVIEGKKSSTPPANGS

SEQ ID NO: 8869 - DNA, 703 bp, Zea mays
  misc_feature: Ceres CLONE ID no. 1468059
  misc_feature: Ceres CDNA ID no. 25446134
  CDS (94)..(444): REFERENCED BY SEQ ID NO: 8870
gttcctgttcccctcggcgacgccagtacggcagtacgccacgccagtgcccagttgcattgactcctccccggtccccacatcttgccgccaatggatgtcgacgggcccgcccccgccgacgcctctgccaggcccgccaccaacggcgaggccccctccggcgcccgcgaggtcgacgtcggcgaggaggacacgctcgccggcgtcctccgcagcttcgtcgacggcgtctggtacccggacgagcctctgctccggcggctccgggcggcgtcctgcgacgccgcgccgcgcctgaggggggcgtcccggaactccgcgcgggacctgcttgagtggaccaggcggggcagcggcctccgcgccatcctcgtcatctcggtgggcgcgcgcctccttgatccgtcacatgagcatgggttttcttgccctgtttactaaatctggctctatcttctttagtttattttctgtaggtgattgcgtagcggttaactgtgccatggtcactattgcaatgttggtttagatttgtgctttttagatctcaggggcaaggatgaaagtgggtatccgaattgttagacaaatttaatattttaaaatagataggtatggaattttatgttaatctttttttatgttatcaagcatattattacagataagaataaaattttgtataaaaaaaaaaaaaaaa

SEQ ID NO: 8870 - protein, 116 aa, Zea mays
  misc_feature: Ceres CLONE ID no. 1468059
  misc_feature: Ceres CDNA ID no. 25446134
  misc_feature: Homolog of GI Number: 30140331 NR Desc: putative arabinagalactan protein
MDVDGPAPADASARPATNGEAPSGAREVDVGEEDTLAGVLRSFVDGVWYPDEPLLRRLRAASCDAAPRLRGASRNSARDLLEWTRRGSGLRAILVISVGARLLDPSHEHGFSCPVY

SEQ ID NO: 8871 - DNA, 507 bp, Zea mays
  misc_feature: Ceres CLONE ID no. 1468098
  misc_feature: Ceres CDNA ID no. 36707125
  CDS (78)..(353): REFERENCED BY SEQ ID NO: 8872
atactatatattagacataccggtattattgttcttagacatcgcacaagactcttgtcaacaagaccaacaacaggatgaggactgccgtgcatgctgcgctttgcattgtgcttgtgataatgtcttcaacactgtcatcttgcgaggacgatgagaaggtatctatcgcatgtgacacaggatgcaatgccgcgatctcccgtctcaaatgcttcctgatggcctattctgaagggaaagtgttggtcagcagcaactgcgaaacgccgaccaggtgcggctgcgtgtttcgtcacaaacaagatgcagcccttatcgccggcgacgttggcaacaaaaagggatactgatggcagacgtgtacttcttggttgaataatactgctagaattaatatgggcaccaacgaaatatctataatgttattcttcagtgtaatgcttccagcatgttctgatttagtttaactaaatatctatctttccccccaaaaaaaaaaaaaaa

SEQ ID NO: 8872 - protein, 91 aa, Zea mays; identical to SEQ ID NO: 5620
  misc_feature: Ceres CLONE ID no. 1468098
  misc_feature: Ceres CDNA ID no. 36707125

SEQ ID NO: 8873 - DNA, 448 bp, Zea Mays
  misc_feature: Ceres CLONE ID no. 1468343
  CDS (54)..(210): REFERENCED BY SEQ ID NO: 8874
aacgcacctagggttttcgcgccgccgccgccgccgccgccgcagccgcaacaatgccgtcgcacaagaccttccggatcaagaagaagctggcgaagaagatgcgccagaaccgccccatcccctactggatccgcatgcgcactgacaataccatcaggtacaacgccaagcgcaggcactggcgccgcaccaagctcggcttctgagcgtcgggattggccggctgctgcgtcggaaggctagggtctaagagctatcttccttctgttttatcaatgtgtcagtttttctgtaagctagcaagtgttgctatgacgcttttattaagattctggtgagcggtgatgttaagagaaaattggcactactgtggtgtaccccaagattccttgcagcattgctatgctaagtaaagaaccctttatcttaaaaaaaaaaaaaaaaa

SEQ ID NO: 8874 - protein, 51 aa, Zea mays; identical to SEQ ID NO: 2406
  misc_feature: Ceres CLONE ID no. 1468343
  misc_feature (9)..(51): Pfam Name: Ribosomal_L39 PFAM Desc: Ribosomal L39 protein

SEQ ID NO: 8875 - DNA, 480 bp, Zea mays
  misc_feature: Ceres CLONE ID no. 1468352
  misc_feature: Ceres CDNA ID no. 36706979
  CDS (88)..(270): REFERENCED BY SEQ ID NO: 8876
agaaaccctagctcacttaacgccgccgcggagctgctccgcgcccccgacgccggtgattaggagcaggagcaagaggggttcggaatggccaagtctaagaaccacacggcgcataaccagtcgttcaaggcgcacaagaacggcatcaagaagcccaagcgccaccgccagacctccaccaaggggatggaccccaagtttctgaggaacttgaggtactcaagaaagggcaataagaagagttgtgaggctgagtcagaggagtgagatgatgcctgagtttgtggcgacaaatgcatctcttgtatcgttagggtcttagttgtgaacttaattttcacatctgtatgattaaaagagattcatcaattggtactgaagtgttgtttttttgtcttgttgcctatctggagtttatttaactaaaatcatcagttgtgtccttgagaatcgggcacttaaaaaaaaaaaaaaaaa

SEQ ID NO: 8876 - protein, 60 aa, Zea mays
  misc_feature: Ceres CLONE ID no. 1468352
  misc_feature: Ceres CDNA ID no. 36706979
  misc_feature (4)..(42): Pfam Name: Ribosomal_L29e PFAM Desc: Ribosomal L29e protein family
  misc_feature: Homolog of GI Number: 34905656 NR Desc: P0475H04.11
  misc_feature: Homolog of GI Number: 7959366 NR Desc: ribosomal protein L29
  misc_feature: Homolog of GI Number: 12231298 NR Desc: ripening regulated protein DDTFR19
  misc_feature: Homolog of GI Number: 7549643 NR Desc: ribosomal protein L29
  misc_feature: Homolog of GI Number: 30679956 NR Desc: 60S ribosomal protein L29
  misc_feature: Homolog of GI Number: 7549645 NR Desc: ribosomal protein L29
  misc_feature: Homolog of GI Number: 27764982 NR Desc: At3g06680
  misc_feature: Homolog of GI Number: 55622000 NR Desc:  similar to 60S ribosomal protein L29
  misc_feature: Homolog of GI Number: 72051829 NR Desc:  similar to 60S ribosomal protein L29
  misc_feature: Homolog of GI Number: 61654674 NR Desc: L29
MAKSKNHTAHNQSFKAHKNGIKKPKRHRQTSTKGMDPKFLRNLRYSRKGNKKSCEAESEE

SEQ ID NO: 8877 - DNA, 469 bp, Zea mays
  misc_feature: Ceres CLONE ID no. 1468361
  CDS (89)..(281): REFERENCED BY SEQ ID NO: 8878
aagtccatcaggcatccaagcttaaagcaagcagatctaagctccaggcagcgtcgcgacagagtgagtgagtagcacgacaacaacaatggcttccctgaaggccgcgaagcccagcggagttgcggcgcagggcaaggagccggcgcccaagctcagcgagacggcgacgaagccgtcagccgcgaagagcggcggcgttaagaaggctgagcagaagccccgggaaaccaaaaggaaggtgaagagcagcaaaccggcggcggcggccaaaaagtgacgtacagtacgtgtggagtgtaatggagcttccatgcatgcatgagtggatccatgccatgttatgaatctagtccttcctttcttgtatcttccatgtgacgcggcgtgtgcgtcccttcatgtgtgatgatgccagatgaatactacaaataagacgttgtgactgtgtcaaaaaaaaaaaaaaaaa

SEQ ID NO: 8878 - protein, 63 aa, Zea mays
  misc_feature: Ceres CLONE ID no. 1468361
  misc_feature: Homolog of GI Number: 34905656 NR Desc: P0475H04.11
  misc_feature: Homolog of GI Number: 7959366 NR Desc: ribosomal protein L29
  misc_feature: Homolog of GI Number: 12231298 NR Desc: ripening regulated protein DDTFR19
  misc_feature: Homolog of GI Number: 7549643 NR Desc: ribosomal protein L29
  misc_feature: Homolog of GI Number: 30679956 NR Desc: 60S ribosomal protein L29
  misc_feature: Homolog of GI Number: 7549645 NR Desc: ribosomal protein L29
  misc_feature: Homolog of GI Number: 27764982 NR Desc: At3g06680
  misc_feature: Homolog of GI Number: 55622000 NR Desc:  similar to 60S ribosomal protein L29
  misc_feature: Homolog of GI Number: 72051829 NR Desc:  similar to 60S ribosomal protein L29
  misc_feature: Homolog of GI Number: 61654674 NR Desc: L29
MASLKAAKPSGVAAQGKEPAPKLSETATKPSAAKSGGVKKAEQKPRETKRKVKSSKPAAAAKK

SEQ ID NO: 8879 - DNA, 582 bp, Zea mays
  misc_feature: Ceres CLONE ID no. 1468490
  misc_feature: Ceres CDNA ID no. 35383428
  CDS (60)..(356): REFERENCED BY SEQ ID NO: 8880
aaacaccaactcgatcggtctgctagtgttggagagaagagaatacactacagtactacatggcgaagcagcagcagcagggcatggcggcagtggcgctggtagtgctggtggtgctggcggcgacggcggccgagacggcgtcggcggcttcgtgcaacgccgggcagctggcggcgtgcgcgccggcgatcactgccggcgcgacgccctccgcgtcgtgctgctccaacctcaaggcgcagcaggggtgcttctgccagttcgtgaagaaccccacctacgggcgctacatcaacagccccaacgcgcgcaaggtcgtcgcctcctgcggcgtctccgtgccgcgctgctagtactagtacgtgtgctgtgcatgcatgtacgtgcgcacgtgggctgatcttcctgcttgtttcgtgtcttgccgcgcgccatcaggtgtttgtgtcacttttctgtttagtctctctacatgtgtactggcctcgtgtaccgctcctctatagtcgtgtcgtgtacgggctaattaatatatatacgacgaataaaggatgagttcggccaaaaaaaaaaaaaaaa

SEQ ID NO: 8880 - protein, 98 aa, Zea mays
  misc_feature: Ceres CLONE ID no. 1468490
  misc_feature: Ceres CDNA ID no. 35383428
  misc_feature (33)..(98): Pfam Name: Tryp_alpha_amyl PFAM Desc: Protease inhibitor/seed storage/LTP family
  misc_feature: Homolog of GI Number: 37535858 NR Desc: putative lipid transfer protein
  misc_feature: Homolog of GI Number: 1041815 NR Desc: lipid transfer protein
  misc_feature: Homolog of GI Number: 10803445 NR Desc: lipid transfer protein
  misc_feature: Homolog of GI Number: 24158821 NR Desc: Chain A
  misc_feature: Homolog of GI Number: 3372342 NR Desc: 7 kDa lipid transfer protein
  misc_feature: Homolog of GI Number: 18893 NR Desc: aleurone specific protein
  misc_feature: Homolog of GI Number: 56713103 NR Desc: type 2 non
  misc_feature: Homolog of GI Number: 37535838 NR Desc: putative lipid transfer protein
  misc_feature: Homolog of GI Number: 37535844 NR Desc: putative lipid transfer protein
  misc_feature: Homolog of GI Number: 37535842 NR Desc: putative lipid transfer protein
MAKQQQQGMAAVALVVLVVLAATAAETASAASCNAGQLAACAPAITAGATPSASCCSNLKAQQGCFCQFVKNPTYGRYINSPNARKVVASCGVSVPRC

SEQ ID NO: 8881 - DNA, 536 bp, Zea mays
  misc_feature: Ceres CLONE ID no. 1468493
  misc_feature: Ceres CDNA ID no. 36697924
  CDS (88)..(399): REFERENCED BY SEQ ID NO: 8882
aaagacacaccgacgcgtacgtagcacagtccattattgccgtctcccttttgcgtgagcaaagaaagagagcgagaagcagtcgccatgtctggcatcatccacaagatcgaggagaagctccacatggggggcgaccacaagaataaggaggaggagcaccacaagaaggccgaggagcaccacaagaaggaggagggggagcaccacaagaaggacggcggggagcacaaggaaggcatcgtggagaagatcaaggacaagatcaccggcgagcacggcgacaagtccggcgaccacaaggagaagaaggacaagaagaagaaggataagaagaagcacggcgagggccacgaccacgacggcggccacagtagcagcagcagcgacagcgactgagatctggtgtcgcagcacaggtgcaacacaagtatgcttgctggatggaggattcataccagctgatgctgatgtagtgtttcactggtgtcatgcatgcatgtatcgtgctattataatcaaaaaaaaaaaaaaaa

SEQ ID NO: 8882 - protein, 103 aa, Zea mays
  misc_feature: Ceres CLONE ID no. 1468493
  misc_feature: Ceres CDNA ID no. 36697924
  misc_feature (2)..(103): Pfam Name: Dehydrin PFAM Desc: Dehydrin
  misc_feature: Homolog of GI Number: 50582768 NR Desc: putative dehydrin
  misc_feature: Homolog of GI Number: 2913893 NR Desc: LIP5
  misc_feature: Homolog of GI Number: 50812722 NR Desc: dehydrin 13
  misc_feature: Homolog of GI Number: 2331141 NR Desc: water
  misc_feature: Homolog of GI Number: 60459395 NR Desc: cold
  misc_feature: Homolog of GI Number: 18478480 NR Desc: maturation
  misc_feature: Homolog of GI Number: 7446584 NR Desc: cold stress protein SRC1
  misc_feature: Homolog of GI Number: 1657853 NR Desc: cold acclimation protein WCOR825
  misc_feature: Homolog of GI Number: 45790792 NR Desc: water stress induced protein
  misc_feature: Homolog of GI Number: 23506601 NR Desc: dehydrin
MSGIIHKIEEKLHMGGDHKNKEEEHHKKAEEHHKKEEGEHHKKDGGEHKEGIVEKIKDKITGEHGDKSGDHKEKKDKKKKDKKKHGEGHDHDGGHSSSSSDSD

SEQ ID NO: 8883 - DNA, 962 bp, Zea mays
  misc_feature: Ceres CLONE ID no. 1468575
  misc_feature: Ceres CDNA ID no. 40351944
  CDS (105)..(749): REFERENCED BY SEQ ID NO: 8884
aaacttgcgtagagagttgggcgcagagaatccccaagcaaacaaacagggtagagggagaggagaggagaggagaggagaggagaggttgggtctgggacaccatggctccgatgaagctgtacggggcggtgatgtcgtggaacgtgacgaggtgcgcaacggcgctggaggaggctggctccgactacgagatcgtgcccatcaacttcgccaccgccgagcacaagagccccgagcacctcgtccgcaacccgtttggtcaggttccagctctgcaggatggtgacttgtacctcttcgaatcacgagcaatctgcaagtacgctgctcgcaaaaacaagccagagctgttgagggaaggaaacctcgaggaggcagcaatggtggatgtttggatcgaggtggaggctaaccagtacaccgctgcactgaaccccatcctcttccaggtcctcatcagtccgatgcttgggggaaccaccgaccagaaagttgtggatgagaaccttgagaagctgaagaaggtgctagaggtgtacgaggcacgcctgaccaagtgcaagtaccttgctggagacttcctcagcctcgccgacctgaaccatgtgtctgtcactctctgcctgtttgctacgccctacgcatctgtgctcgacgcctacccgcatgtgaaggcctggtggtctggtctgatggagaggccgtctgtccagaaggtcgctgccctgatgaagccatctgcttgaaacggttgccctgtcaatcggtgaatggaataagccaagtctgttctgggttgtttgcttgttcagtgatgtgtcttctatgacgaaagttgagtgcctatgtgtgagcatgcttgcttgtaacgagaccttgaattgttcggaaatgagcattcctgtgctcttctttaaaataaactttgccttaggttcctcgaaaaaaaaaaaaaaaaa

SEQ ID NO: 8884 - protein, 214 aa, Zea mays; identical to SEQ ID NO: 344
  misc_feature: Ceres CLONE ID no. 1468575
  misc_feature: Ceres CDNA ID no. 40351944
  misc_feature (4)..(77): Pfam Name: GST_N PFAM Desc: Glutathione S
  misc_feature (93)..(201): Pfam Name: GST_C PFAM Desc: Glutathione S

SEQ ID NO: 8885 - DNA, 518 bp, Zea mays
  misc_feature: Ceres CLONE ID no. 1468669
  misc_feature: Ceres CDNA ID no. 35383429
  CDS (129)..(320): REFERENCED BY SEQ ID NO: 8886
agagactcttctattcatataggcgggtaggcgtccgaggcctcgtttgttctcggcttctcgtctccaagggtgctactccgtccgcgcttggtctgctctcgtccttccggaggccgcggcgcaacatggcgaagatcaagccgaaggccttgctcgcgcaaagcaaggtgaagaaggtccccggccaaatcagcgtggccacgatcgtcacctacatgatcctcggcgtcctggtcgtgtcctccgtttacgctgcctacaggtactgctgggcaggcacaggagcagcggaggcagtgggcgcccaggggaactgatcccccgccgactgcgtggctgatctcgctgttgttgtatcatccggttggggtaaaatttttggttgttgctgtctagcaaatggggttcttgggacatggataggttgtatgttgatacggttacaccgtagccgatgatatgtatgttgaatttcttcccttttattatcctttgatgaaaaaaaaaaaaaaaaa

SEQ ID NO: 8886 - protein, 63 aa, Zea mays
  misc_feature: Ceres CLONE ID no. 1468669
  misc_feature: Ceres CDNA ID no. 35383429
  misc_feature: Homolog of GI Number: 50937101 NR Desc: peptidyl
MAKIKPKALLAQSKVKKVPGQISVATIVTYMILGVLVVSSVYAAYRYCWAGTGAAEAVGAQGN

SEQ ID NO: 8887 - DNA, 626 bp, Zea mays
  misc_feature: Ceres CLONE ID no. 1468853
  misc_feature: Ceres CDNA ID no. 25446093
  CDS (131)..(439): REFERENCED BY SEQ ID NO: 8888
aacatcacatctgaaacagaaacagctagaagacatattcaacagattcagagaaagaacatagatagagagagaggcaaaaaaagagcgagagagagctgcggattaattaccaacccggccagcttccatggagagagttgcatcaagctgctgcgtcagcctcctagcacaaagcaggagggcctacactgtggccgcggccatggctaagaagggagccgccgcacggagggtcgacgagaagaaggcggcggccgcgctcaccaagcgcgtgatgggcaagaaggaagtgaacacggctgccgctgcggcagctgaggagaaggcgtgggtgccggaccctgtcaccggctactatcgcccagcaggtagcgccaaggaggttgacgcggcggagctacgcgccaagctgctgacggaggctgcggccaactgattaatcaagcagtcactttgtcgagctacagcatgagttggctctgtccacctagcttctcctgctttaagatccgcgctagttgatccccgagctccttggcctagagccttttatatattcaatgacacatatatatataatatataatggagaacatatctagtgcgaaaaaaaaaaaaaaaaa

SEQ ID NO: 8888 - protein, 102 aa, Zea mays
  misc_feature: Ceres CLONE ID no. 1468853
  misc_feature: Ceres CDNA ID no. 25446093
  misc_feature (16)..(97): Pfam Name: LEA_3 PFAM Desc: Late embryogenesis abundant protein
  misc_feature: Homolog of GI Number: 34894580 NR Desc: zinc
  misc_feature: Homolog of GI Number: 13249144 NR Desc: zinc
  misc_feature: Homolog of GI Number: 25044821 NR Desc: late
  misc_feature: Homolog of GI Number: 7489029 NR Desc: late
  misc_feature: Homolog of GI Number: 1370589 NR Desc: protein induced upon tuberization
  misc_feature: Homolog of GI Number: 21592389 NR Desc: late embryogenis abundant protein
  misc_feature: Homolog of GI Number: 2981167 NR Desc: late embryogenis abundant protein 5
  misc_feature: Homolog of GI Number: 7268339 NR Desc: drought
MERVASSCCVSLLAQSRRAYTVAAAMAKKGAAARRVDEKKAAAALTKRVMGKKEVNTAAAAAAEEKAWVPDPVTGYYRPAGSAKEVDAAELRAKLLTEAAAN

SEQ ID NO: 8889 - DNA, 501 bp, Zea mays
  misc_feature: Ceres CLONE ID no. 1468916
  CDS (105)..(300): REFERENCED BY SEQ ID NO: 8890
aggctgacgccgcgaccgccccaacccaactgcccttttcggagatctcgccgcctccgccgtcgacttccgtcgcccccctatcccgcgtccgggcttacccgatggcacggctgcactggcttgaggccgtcctgccgctggggatcatcggcggcatgctctgcatcatgggcaacgcccagtatttcatccacaaggccgcgcacggcaggccgaagcacatcgggaacgatatgtgggacgtcgccatggagcgccgcgacaagaagctcgtggaacaatcctccggcaactagggtattgatcaacctcaaacttttctggatgttgacgaacctccttcaaaagcacagaagtactgctcttttgtttcctgtacaattggaaccaagacttgtttgttttgctttgaaatatcaacagttcggagaataatctgtatctgacatctgtttaattgaacaaagccaaatactttgtcaaaaaaaaaaaaaaaaa

SEQ ID NO: 8890 - protein, 64 aa, Zea mays
  misc_feature: Ceres CLONE ID no. 1468916
  misc_feature: Homolog of GI Number: 34894580 NR Desc: zinc
  misc_feature: Homolog of GI Number: 13249144 NR Desc: zinc
  misc_feature: Homolog of GI Number: 25044821 NR Desc: late
  misc_feature: Homolog of GI Number: 7489029 NR Desc: late
  misc_feature: Homolog of GI Number: 1370589 NR Desc: protein induced upon tuberization
  misc_feature: Homolog of GI Number: 21592389 NR Desc: late embryogenis abundant protein
  misc_feature: Homolog of GI Number: 2981167 NR Desc: late embryogenis abundant protein 5
  misc_feature: Homolog of GI Number: 7268339 NR Desc: drought
MARLHWLEAVLPLGIIGGMLCIMGNAQYFIHKAAHGRPKHIGNDMWDVAMERRDKKLVEQSSGN

SEQ ID NO: 8891 - DNA, 459 bp, Zea mays
  misc_feature: Ceres CLONE ID no. 1468918
  CDS (81)..(273): REFERENCED BY SEQ ID NO: 8892
aatccaagctcaaagcaagcagatctaagctccaggcagcgtcgcgacagagtgagctagtgagtagcacgacaacaacaatggcttccctgaaggccgcgaagcccagcggagttgcggcgcagggcaaggagccggcgcccaagctcagcgagacggcgacgaagccgtcagccgcgaagagcggcggcgttaagaaggctgagcagaagccccgggaaaccaaaaggaaggtgaagagcagcaaacaggcggcggcggccaaaaagtgacgtacagtacgtgtggagtgtaatggagcttccatgcatgagtgaatccatgccatgttatgaatctagtccttcctttcttgtatcttccatgtgacgcggcgtgtgcgtcccctcatgtgtgatgatgccagatgaatactacaaataagacgttgttgtgacaaaagaaaaaaaaaaaaaaaaa

SEQ ID NO: 8892 - protein, 63 aa, Zea mays
  misc_feature: Ceres CLONE ID no. 1468918
  misc_feature: Homolog of GI Number: 34894580 NR Desc: zinc
  misc_feature: Homolog of GI Number: 13249144 NR Desc: zinc
  misc_feature: Homolog of GI Number: 25044821 NR Desc: late
  misc_feature: Homolog of GI Number: 7489029 NR Desc: late
  misc_feature: Homolog of GI Number: 1370589 NR Desc: protein induced upon tuberization
  misc_feature: Homolog of GI Number: 21592389 NR Desc: late embryogenis abundant protein
  misc_feature: Homolog of GI Number: 2981167 NR Desc: late embryogenis abundant protein 5
  misc_feature: Homolog of GI Number: 7268339 NR Desc: drought
MASLKAAKPSGVAAQGKEPAPKLSETATKPSAAKSGGVKKAEQKPRETKRKVKSSKQAAAAKK

SEQ ID NO: 8893 - DNA, 2525 bp, Zea mays
  misc_feature: Ceres CLONE ID no. 1469062
  misc_feature: Ceres CDNA ID no. 29191586
  CDS (116)..(2233): REFERENCED BY SEQ ID NO: 8894
acctcacccacatactctcccctggttgggcctgtgctgtgtggccgctctccctccacccaacccaaccaagaaacagaggcccccgctcaagctccgagagacagagaactccatggccgccatggacctcctctccggcaagctcatacgctccctgcgtctccattcctcactcctcccctctgctccttcctcctcccgcgccgtccccacatcccgccgtctccggcgccgccgccatgcccccctgtactgccgccttaccaccacctcctcctcctcatctgcctccaccaccacaaccaccggggtggaggaagacgtcaaaagccaggacctttcctccctcctcacctcctccgacccttctgccgcgcccgccgtcgggaccaagaagaagcggtcgggcggcagcagcggcgcgtctagcatcccgtccggggtgcggctggagggaatctccaagtcctacaagggcgtgacggtgctcaaggacgtgtcctgggaggtgcagcgcggcgagaaggtggggctcgtcggcgtgaacggcgccggcaagacgacgcagctccgcatcatcgcggggctcgagaagcccgacggcggcgccgtcatcaaggccaaggagaacatgaagatcgccttcctcagccaggagttcgaggtctccgcctcccgcaccgtcagggaagagttcttcagcgccttcgaggaggagatggaggtcaagcggcggctcgagcaggtgcaggcggcgctcgagggcgccactgaagacatggacctcatgggccggctcctcgatgagctcgacctgctgcagcgccgctcccaggacgtggacctcgatatggtggacgtcaaggtgcagaagctcatgccagagctcgggttcatgcctgaggacgccgaccgcctcgtcgcctccttcagcggtgggtggaaaatgaggatgtctctaggcaagatacttcttcaggaccctgatttgcttttgcttgatgagcctacgaatcatgtcgatttggataccattgagtggctggagatgtatctcaagacgcaggatgtgccgatggtcattatatctcatgacagggcgttccttgatcagttgtgcacaaagatagtggaaactgaatttggtgtgtccaagacatacaagggtaactattcagagtacattctagcaaaggcggtagcagtggaggcacagtatgctgcgtgggagaagcaacagaaggaaattgaacagacaaaggagctgataaacagacttggtgctggagttaatgcagggcgtgcttccagcgagcagaagaaattggagaagcttgaaaaagaagggttgattgagaaacctttccaaaggaagcagctaaagatcagattccctgagcgtggaagaagtgggagaactgtgttgacgataaacaatcttcaattcggatttgagaataagactttgttcaacaatgctaatctgatagtagagagaggtgaaaagatagctattattgggcccaatggttgtgggaagagcacactgcttaaacttatgttggggatggagaagccacaaggtggtgaggtgcttcttggggagcataatgtgttgccgaactattttgagcagaatcaggcagaagctcttgatttagagaagaccgtgttagacactgtagcagaagctgcggaagattggatacttgatgatatcaaaggtctccttggccgttgcaacttcagggatgacatgctggatagaaaagttcagtttttaagtggtggagagaaggcaaggcttgcattttgcaagttcatggtgactccatctactctactcatcttggatgaaccgacaaaccatcttgatatcccatcaaaagaaatgcttgaggaggcaatatcagaatatactggcaccgtcataacagtttctcatgaccggtacttcataaaacaaattgtcaacagagtcatcgaagtgaaagatcagactatccaagactatcaaggagattacaattactaccttgagaggaaccttgaagcccgagaaagggaacttgcccgcgaggaagagctcgaggagagagcccccaaagtaaaagccaagtccaagatgtcgaaggcagagaaagccgtcaggaagaagcagaagatgcaggccttccagcagagcaagcagaaatccaagtcgcttaagaactcgaagcggtggaactgagattttttcgtcgttcgtagaggcggcgttggcgttcgtcacaatgcagaatgccatctgagacaccttgcaatgcagataccagtgtttgctactctgcctgctgtgccgtatgctataatagtcgccatatcagcagaagcactgcaaatacatcatcagaaagtagccctagtagcaatgaatgtagaagatcgtgaaaaaaaaaatactgtaactataagcaggaagcgttatgtgaccttgtacataatacatgcactttcggatggaggaaaaaaaaaaaaaaaaa

SEQ ID NO: 8894 - protein, 705 aa, Zea mays
  misc_feature: Ceres CLONE ID no. 1469062
  misc_feature: Ceres CDNA ID no. 29191586
  misc_feature (463)..(629): Pfam Name: ABC_tran PFAM Desc: ABC transporter
  misc_feature: Homolog of GI Number: 71834735 NR Desc: 80C09_14
  misc_feature: Homolog of GI Number: 16330402 NR Desc: ABC transporter
  misc_feature: Homolog of GI Number: 22326697 NR Desc: ABC transporter family protein
  misc_feature: Homolog of GI Number: 8843748 NR Desc: ABC transporter protein 1
  misc_feature: Homolog of GI Number: 9758971 NR Desc: ABC transporter
  misc_feature: Homolog of GI Number: 49073110 NR Desc: ABCF
  misc_feature: Homolog of GI Number: 17231675 NR Desc: ATP
  misc_feature: Homolog of GI Number: 23308219 NR Desc: At5g64840/MXK3_6
  misc_feature: Homolog of GI Number: 53765013 NR Desc: COG0488: ATPase components of ABC transporters with duplicated ATPase domains
  misc_feature: Homolog of GI Number: 23123983 NR Desc: COG0488: ATPase components of ABC transporters with duplicated ATPase domains
MAAMDLLSGKLIRSLRLHSSLLPSAPSSSRAVPTSRRLRRRRHAPLYCRLTTTSSSSSASTTTTTGVEEDVKSQDLSSLLTSSDPSAAPAVGTKKKRSGGSSGASSIPSGVRLEGISKSYKGVTVLKDVSWEVQRGEKVGLVGVNGAGKTTQLRIIAGLEKPDGGAVIKAKENMKIAFLSQEFEVSASRTVREEFFSAFEEEMEVKRRLEQVQAALEGATEDMDLMGRLLDELDLLQRRSQDVDLDMVDVKVQKLMPELGFMPEDADRLVASFSGGWKMRMSLGKILLQDPDLLLLDEPTNHVDLDTIEWLEMYLKTQDVPMVIISHDRAFLDQLCTKIVETEFGVSKTYKGNYSEYILAKAVAVEAQYAAWEKQQKEIEQTKELINRLGAGVNAGRASSEQKKLEKLEKEGLIEKPFQRKQLKIRFPERGRSGRTVLTINNLQFGFENKTLFNNANLIVERGEKIAIIGPNGCGKSTLLKLMLGMEKPQGGEVLLGEHNVLPNYFEQNQAEALDLEKTVLDTVAEAAEDWILDDIKGLLGRCNFRDDMLDRKVQFLSGGEKARLAFCKFMVTPSTLLILDEPTNHLDIPSKEMLEEAISEYTGTVITVSHDRYFIKQIVNRVIEVKDQTIQDYQGDYNYYLERNLEARERELAREEELEERAPKVKAKSKMSKAEKAVRKKQKMQAFQQSKQKSKSLKNSKRWN

SEQ ID NO: 8895 - DNA, 465 bp, Zea mays
  misc_feature: Ceres CLONE ID no. 1469097
  misc_feature: Ceres CDNA ID no. 35383430
  CDS (12)..(341): REFERENCED BY SEQ ID NO: 8896
aaacgccagccatggcggcggctcagtcctccaccgattcgatggctccgcacctccgccgccgccctcgccgcctcgtcttcgaccgccgctacggctggatctttgacgaatggacgcgccccgccgaccaagccctctccggcggacgcggaatgttctgtgcgctgacgatggcgcggtcgctggtgagcgctgcggcgtgctcgattaactatgctgccagttcaatcagcagagttctggaacgccccaaaagactccacaagaagcagcaagcctggttccgtgaacttgaatgctcgggagttgtagctgatcttaagttaatacagacttgaagccattctgaactagaatgcaccacaactggttgcatgtgttccgtaaagaagcatgatcatctgtaagcacggtatcagaaaattatgagacacttatccttagcaaaaaaaaaaaaaaaaa

SEQ ID NO: 8896 - protein, 109 aa, Zea mays
  misc_feature: Ceres CLONE ID no. 1469097
  misc_feature: Ceres CDNA ID no. 35383430
MAAAQSSTDSMAPHLRRRPRRLVFDRRYGWIFDEWTRPADQALSGGRGMFCALTMARSLVSAAACSINYAASSISRVLERPKRLHKKQQAWFRELECSGVVADLKLIQT

SEQ ID NO: 8897 - DNA, 462 bp, Zea mays
  misc_feature: Ceres CLONE ID no. 1469112
  CDS (88)..(280): REFERENCED BY SEQ ID NO: 8898
agtccatcaggcatccaagcttaaagcaagcagatctaagctccaggcagcgtcgcgacagagtgagtgagtagcacgacaacaacaatggcttccctgaaggccgcgaagcccagcggagttgcggcgcagggcaaggagccggcgcccaagctcagcgagacggcgacgaagccgtcagccgcgaagagcggcggcgttaagaaggctgagcagaagccccgggaaaccaaaaggaaggtgaagagcagcaaaccggcggcggcggccaaaaagtgacgtacagtacgtgtggagtgtaatggagcttccatgcatgcatgagtggatccatgccatgttatgaatctagtccttcctttcttgtatcttccatgtgacgcggcgtgtgcgtcccttcatgtgtgatgatgccagatgaatactacaaataagacgttgtgacaaaaaaaaaaaaaaaaa

SEQ ID NO: 8898 - protein, 63 aa, Zea mays; identical to SEQ ID NO: 8878
  misc_feature: Ceres CLONE ID no. 1469112

SEQ ID NO: 8899 - DNA, 465 bp, Zea mays
  misc_feature: Ceres CLONE ID no. 1469322
  misc_feature: Ceres CDNA ID no. 35383431
  CDS (91)..(246): REFERENCED BY SEQ ID NO: 8900
agtcttctcccctgcgacaaagacgacgcaagtccctactcctccaaaccctcgccgactcagatccagcttcctcgcaccgccgtcgccatgccgttcactccaggcccctactctggcgtcagcaccctcgcccttgtggcgagggcgtcggcctttggcgtcggtgtcgtctacgggagcatcaagctctcaatcctcaaggtaacaaaacctaaaaaggaggaagtgcatgatcattactaaggacgacaaggctgctacattttaattcccacatatggaaggatgttataaattggcagtgcaccccttctccatacgtacaatacaatttcgtttatgatttgtggacctgtctgtaacatacctgctatttttttttgtgttgtaataaattcttatacaatgacatgaaatcaggaagtggaaaagcaagtcgttcgacaaaaaaaaaaaaaaaaa

SEQ ID NO: 8900 - protein, 51 aa, Zea mays; identical to SEQ ID NO: 662
  misc_feature: Ceres CLONE ID no. 1469322
  misc_feature: Ceres CDNA ID no. 35383431
  misc_feature: Homolog of GI Number: 50921369 NR Desc: OSJNBb0050O03.8

SEQ ID NO: 8901 - DNA, 605 bp, Zea mays
  misc_feature: Ceres CLONE ID no. 1469421
  misc_feature: Ceres CDNA ID no. 25446618
  CDS (2)..(439): REFERENCED BY SEQ ID NO: 8902
aaacaccaacgcaaccacgttacgcaccatagaacatacccgtgagaagctaagacccggccgttgctcaccacagcatcatcgccgcgccgtgctagctcaaggatggagaacaacaggcagcagcagcaggcgccgccgccgccaggctacccgacggcggctgcaggcttggagcaggagcagggaggcaggaagggacgacgccgggagaagacgacctcgcgcggggataaaggcttcatcgaaggatgcatcgcggcgctctgctgctgctggatctgcgagatgtgctgcgactaggcacgcagctagcggtcagctagctctccgtctccggcggctatacatacgaaatacgatgagagagctagcctgccacagcttctgcttctgcttctgcaagagagatctgcttaaattattctatcgtccatagctgcagcaacacctgatatgtttgtttggggtgttattagtagggagagctagctcagctttattattgttaataataattctgtgctgtacgtagctatagcaagcatacgtatgtatacacgtatatgtatgtgttttaccgtgactgaaaaaaaaaaaaaaaa

SEQ ID NO: 8902 - protein, 65 aa, Zea mays
  misc_feature: Ceres CLONE ID no. 1469421
  misc_feature: Ceres CDNA ID no. 25446618
  misc_feature: Homolog of GI Number: 50904463 NR Desc: P0466H10.28
MENNRQQQQAPPPPGYPTAAAGLEQEQGGRKGRRREKTTSRGDKGFIEGCIAALCCCWICEMCCD

SEQ ID NO: 8903 - DNA, 867 bp, Zea mays
  misc_feature: Ceres CLONE ID no. 1469450
  misc_feature: Ceres CDNA ID no. 25446619
  CDS (49)..(756): REFERENCED BY SEQ ID NO: 8904
agagtgccgccccgcccgcccgcgctatccactcgtctctccgtccgcatggccacttatctgaacgcaccgccggcagccaccacgacgactgcaagctgccgccatgccttctccggtggcagccttcgtctactccggccgagccgaccgacgctgcacgtgacgtgccaagccgccgtctcctcctcctcctcctcccagccgccgtcgtccccgtccaggaggtcagcctgcctcctcggcatcgcgtgcgccgtcctgctccgcccacgtgccgcctccgcggccgaaactgacgaagagccggccaacaacggctggtggctgaccgagttccccttgcccgtgcccaagatcgtcaacaaggagatcaacaacgcggagacgggcacgcgctccttcctcaagaacggcatctacatggcggacatcgggcccagcttcgcggcgcacgcgtaccggctgcgcagcacggccttcgacctgctggcgctggaggacctgctgggcaaggacgcctccaactacgtcaacaagtacctccgcctcaagtccaccttcatgtactacgacttcgacaagctcatctccgccgccgaagacaagccgcccttcgtcgacctcgccaaccgcctcttcgacagcttcgagacgctccaggaggccgtcacagccaaggacgacgccaggatcggcgaccgctacgccgagacaaagctcatcctccaggagctcatggccaagatggcctagcagaaccacaatttttcattcatatatcatgatgtgtaaatgaatacttgaaactcacaaggggtattgcagaattcccagagcagggaaatacaaaaaaaaaaaaaaaaa

SEQ ID NO: 8904 - protein, 235 aa, Zea mays
  misc_feature: Ceres CLONE ID no. 1469450
  misc_feature: Ceres CDNA ID no. 25446619
  misc_feature (23)..(235): Pfam Name: PsbQ PFAM Desc: Oxygen evolving enhancer protein 3
  misc_feature: Homolog of GI Number: 50933693 NR Desc: PsbQ domain protein family
  misc_feature: Homolog of GI Number: 6322209 NR Desc: GPI
  misc_feature: Homolog of GI Number: 55239156 NR Desc: ENSANGP00000028192
  misc_feature: Homolog of GI Number: 45190779 NR Desc: AER176Wp
  misc_feature: Homolog of GI Number: 67987177 NR Desc: 4Fe
  misc_feature: Homolog of GI Number: 56283929 NR Desc: CG3047
  misc_feature: Homolog of GI Number: 1582641 NR Desc: mucin
  misc_feature: Homolog of GI Number: 69929938 NR Desc: OmpA/MotB
  misc_feature: Homolog of GI Number: 188864 NR Desc: mucin
  misc_feature: Useful for making bigger plants
MATYLNAPPAATTTTASCRHAFSGGSLRLLRPSRPTLHVTCQAAVSSSSSSQPPSSPSRRSACLLGIACAVLLRPRAASAAETDEEPANNGWWLTEFPLPVPKIVNKEINNAETGTRSFLKNGIYMADIGPSFAAHAYRLRSTAFDLLALEDLLGKDASNYVNKYLRLKSTFMYYDFDKLISAAEDKPPFVDLANRLFDSFETLQEAVTAKDDARIGDRYAETKLILQELMAKMA

SEQ ID NO: 8905 - DNA, 463 bp, Zea mays
  misc_feature: Ceres CLONE ID no. 1469533
  CDS (87)..(279): REFERENCED BY SEQ ID NO: 8906
aatcaggcatccaagaagctcaaagcaagcagatctaagctccaggcagcgtcgcgacagagtgagtgagtagcacgacaacaacaatggcttccctgaaggccgcgaagcccagcggagttgcggcgcagggcaaggagccggcgcccaagctcagcgagacggcgacgaagccgtcagccgcgaagagcggcggcgttaagaaggctgagcagaagccccgggaaaccaaaaggaaggtgaagagcagcaaacaggcggcggcggccaaaaagtgacgtacagtacgtgtggagtgtaatggagcttccatgcatgagtgaatccatgccatgttatgaatctagtccttcctttcttgtatcttccatgtgacgcggcgtgtgcgtcccctcatgtgtgatgatgccagatgaatactacaaataagacgttgttgtgactgtgtgccaaaaaaaaaaaa

SEQ ID NO: 8906 - protein, 63 aa, Zea mays; identical to SEQ ID NO: 8892
  misc_feature: Ceres CLONE ID no. 1469533
  misc_feature: Homolog of GI Number: 50933693 NR Desc: PsbQ domain protein family
  misc_feature: Homolog of GI Number: 6322209 NR Desc: GPI
  misc_feature: Homolog of GI Number: 55239156 NR Desc: ENSANGP00000028192
  misc_feature: Homolog of GI Number: 45190779 NR Desc: AER176Wp
  misc_feature: Homolog of GI Number: 67987177 NR Desc: 4Fe
  misc_feature: Homolog of GI Number: 56283929 NR Desc: CG3047
  misc_feature: Homolog of GI Number: 1582641 NR Desc: mucin
  misc_feature: Homolog of GI Number: 69929938 NR Desc: OmpA/MotB
  misc_feature: Homolog of GI Number: 188864 NR Desc: mucin
  misc_feature: Useful for making bigger plants

SEQ ID NO: 8907 - DNA, 1207 bp, Zea mays
  misc_feature: Ceres CLONE ID no. 1469587
  misc_feature: Ceres CDNA ID no. 35385348
  CDS (172)..(753): REFERENCED BY SEQ ID NO: 8908
aacagcacgcagggcacaaggagaagaagaggggaagaaatattcttcccgtcgaaagacggagagaggaaaagggacaagggcaaggcaagagagaggcgtcgtcgtttgatctgctgccggagtgcgaagaggaagaggaagaggaagaggagcgccggagttgtaaagatgttcctggtggactggttctatggggtgctggcatcgcttgggctgtggcagaaggaggctaagatcctcttccttggcctcgacaacgccggcaagaccaccctcctccacatgctgaaggacgagcggctcgtacagcaccagccaacgcagtaccccacgtcagaagagttgagcatcggcaggatcaagttcaaggcgttcgaccttgggggccaccagatcgcccgccgcgtctggaaggactactacgccaaggttgatgctgttgtgtacttggtggatgctgttgacaaggaacgttttgccgagtcgaagaaggagctcgatgcgcttcttgcagatgactcccttgcaaacgttcctttcctcatactgggcaacaagattgacatcccatacgcggcttcagaggaggagctgaggtactacctcggcctgagcaacttcacaaccgggaagggcaacgtgaacttggccgactccaacgtccgccccctggagatcttcatgtgcagtgtggtgcgcaagatgggctatggcgaaggcttcaaatggatgtctcagtacatcaagtgagtcgctgctgtcctcttttgtccatggcgctgctgctttcgcaggagggttgaaatcaagtctggtcgtgacatggcagctgcatggaaaggtttatggtagctagtgataggcaaagcttgtaagtcggtgttaatcctagatatgtgatgtggggtctactttctcttctgattgtttcttggggtggtctaaacggttcaaaaaaaaatgcgacttcttcgggtcagctagaagttatgtaatcacgttacatgaagcagcgcattgttcgccagctgctttggtgtggtggacttctgtcggtaatggtgagcttgcggtttctaaaagtatgcgtgtaggctgtggtaattgtgtatctacagattccaaaccttgcatttgctgttgactgaggtagcccggaaatgataaaacatgctggtgaaggttgcaaaaaaaaaaaaaaaaa

SEQ ID NO: 8908 - protein, 193 aa, Zea mays; identical to SEQ ID NO: 1108
  misc_feature: Ceres CLONE ID no. 1469587
  misc_feature: Ceres CDNA ID no. 35385348
  misc_feature: Homolog of GI Number: 46946656 NR Desc: putative ras
  misc_feature: Homolog of GI Number: 20465729 NR Desc: putative SAR1/GTP
  misc_feature: Homolog of GI Number: 77556132 NR Desc: ADP
  misc_feature: Homolog of GI Number: 3450893 NR Desc: ras
  misc_feature: Homolog of GI Number: 34894960 NR Desc: putative GTP
  misc_feature: Homolog of GI Number: 2108345 NR Desc: small GTP
  misc_feature: Homolog of GI Number: 21436475 NR Desc: putative Sar1 GTP binding protein
  misc_feature: Homolog of GI Number: 76573331 NR Desc: small GTP
  misc_feature: Homolog of GI Number: 6563322 NR Desc: small GTP
  misc_feature: Homolog of GI Number: 77416955 NR Desc: NtSar1 protein

SEQ ID NO: 8909 - DNA, 456 bp, Zea mays
  misc_feature: Ceres CLONE ID no. 1469709
  misc_feature: Ceres CDNA ID no. 36704626
  CDS (76)..(267): REFERENCED BY SEQ ID NO: 8910
aaagaagctcaaagcaagcagatctaagctccaggcagcgtcgcgacagagtgagtgagtagcacgacaacaacaatggcttccctgaaggccgcgaagcccagcggagttgcggcgcagggcaaggagccggcgcccaagctcagcgagacggcgacgaagccgtcagccgcgaagagcggcggcgttaagaaggctgagcagaagccccgggaaaccaaaaggaaggtgaagagcagcaaacaggcggcggcggccaaaaagtgacgtacagtacgtgtggagtgtaatggagcttccatgcatgagtgaatccatgccatgttatgaatctagtccttcctttcttgtatcttccatgtgacgcggcgtgtgcgtcccctcatgtgtgatgatgccagatgaatactacaaataagacgttgttgtgactgtgtgcaaaaaaaaaaaaaaaaa

SEQ ID NO: 8910 - protein, 63 aa, Zea mays; identical to SEQ ID NO: 8892
  misc_feature: Ceres CLONE ID no. 1469709
  misc_feature: Ceres CDNA ID no. 36704626
  misc_feature: Homolog of GI Number: 34911640 NR Desc: P0039G05.22

SEQ ID NO: 8911 - DNA, 863 bp, Zea mays
  misc_feature: Ceres CLONE ID no. 1469740
  misc_feature: Ceres CDNA ID no. 29191708
  CDS (101)..(571): REFERENCED BY SEQ ID NO: 8912
agtgctttcttagaggtgggttggcttctcctccccctccggttcgggttcgggttcgtgaggttctccggggttcggtttcgtgggtgagcggatcgagatggcggcgtcggatgttgagtaccgctgcttcgtcggcggcctcgcctgggccacggacgaccactccctccacaacgccttcagcacctacggcgaggtcctcgagtccaagatcatcctcgatcgggagacgcagaggtcccgcggcttcggcttcgtcaccttctccacggaggaggcgatgcggaacgccatcgagggcatgaacggcaaggagctggacggccgcaacatcaccgtcaacgaggcccagtcccgcggcggccgtggaggcggcggcggtgggtacggtggtggccgtggaggcggcggctacggcggtggcgggcgccgtgatggcggcggcggctacggcggtggcggcggcggctacggtggcggcggcggctacggtggtggtggcggcggctacggcggtggcaaccgtggcggcggctacggcaactccgacgggaactggaggaactgagcggtggggcccgcgcggccaagttatcctgttcgctaccgtgttgtttaccctagtccagagggtttatcttcgttcgtctcatgtttgttgttgcccatctgtgtttttgattgcaaggtcgctttgtgtcagttgttagtgctgtgttcatcctcggctccagcagacccatgcatcaaccagcatggactgcggatcgatggatgctgttacccccgtcaggctttatcctaagttaatcttcaaggaaaaaatggtgcttcttggtgctgaaaaaaaaaaaaaaaaa

SEQ ID NO: 8912 - protein, 156 aa, Zea mays
  misc_feature: Ceres CLONE ID no. 1469740
  misc_feature: Ceres CDNA ID no. 29191708
  misc_feature: The plant flowers significantly late compared to wild-type.
  misc_feature: Useful for making plants with modulated growth and phenotype characteristics
  misc_feature: null
  misc_feature: The sequence is a functional homolog of  SEQ ID NO 1016 in the  11/435,388 US patent application
  misc_feature: Useful for making plants with altered Lignin content
  misc_feature: Useful for making plants with altered alkaloid content
  misc_feature: Useful for making plants with modulated flowering time
  misc_feature: Useful for making plants with modulated nitrogen use efficiency
  misc_feature (48)..(151): Pfam Name: GRP PFAM Desc: Glycine rich protein family
  misc_feature: Homolog of GI Number: 22293 NR Desc: glycine
  misc_feature: Homolog of GI Number: 20257675 NR Desc: glycine
  misc_feature: Homolog of GI Number: 20257691 NR Desc: glycine
  misc_feature: Homolog of GI Number: 20257683 NR Desc: glycine
  misc_feature: Homolog of GI Number: 20257705 NR Desc: glycine
  misc_feature: Homolog of GI Number: 20257693 NR Desc: glycine
  misc_feature: Homolog of GI Number: 20257669 NR Desc: glycine
  misc_feature: Homolog of GI Number: 20257709 NR Desc: glycine
  misc_feature: Homolog of GI Number: 20257719 NR Desc: glycine
  misc_feature: Homolog of GI Number: 20257713 NR Desc: glycine
MAASDVEYRCFVGGLAWATDDHSLHNAFSTYGEVLESKIILDRETQRSRGFGFVTFSTEEAMRNAIEGMNGKELDGRNITVNEAQSRGGRGGGGGGYGGGRGGGGYGGGGRRDGGGGYGGGGGGYGGGGGYGGGGGGYGGGNRGGGYGNSDGNWRN

SEQ ID NO: 8913 - DNA, 1034 bp, Zea mays
  misc_feature: Ceres CLONE ID no. 1470084
  misc_feature: Ceres CDNA ID no. 35383432
  CDS (248)..(901): REFERENCED BY SEQ ID NO: 8914
aaaagctcttcttccgtccgtccgtccgtccgcttctctctctccggttctccctctctcccccaccccgcgagaccgccggcaaatttgttgcagtgcactgaagccaacagctgcaggacaggaggaggaggaggagctgtttcaacaattatcccccgcgcgcccaggccagccccgcccccgcccgcccactctcccgaggttctcaacacaacagacaacaccgctcaccgcatatatatagatgggttccgaggggccttctcccgtcaccgtccacgtcaccggattcaagaggttccatggagtcgccgagaacccgacggagaggatcgtgcgcggtctccagccattcatggagacgagagggttgcccaagggccttgttctcgggagctgcaccgtccttgaggccgccgggcagggcgcgcttggcccgctgtatgaactactggagtcgaccgtctccggccgggaacgtcaggagcgagtaattttgctccattttggcgccaacagtggttcacataggtttgctcttgagaatcaagctgttaatgaagctactttccgttgccctgatgagctaggatggaaaccacagaggacacctatcatatcatcagatggaagcatcttacacgcaagacagactacactgccagtgaaggagataagcaagtctctccaacagatgggatacgacgtggtgccttcagacgacgctggtcgatttgtgtgcaactacgtctactaccactcactcaagtttgcagagaagcatgggatcgggtctctgtttgtccatttccccctcttcctggcaatcgatgaggaagtccagatgcagtttgtcgcttcccttctagaggtcctcgcttccttgaacttccagtgaacctagtggtagatctaccacttcccggtggtgtattgttcccagattatttgggaaaggtttaagttgttcccaacttacctgtggtggagaataagatcgaggaatcattcgcgaaaaaaaaaaaaaaaaa

SEQ ID NO: 8914 - protein, 217 aa, Zea mays
  misc_feature: Ceres CLONE ID no. 1470084
  misc_feature: Ceres CDNA ID no. 35383432
  misc_feature (137)..(181): Pfam Name: Peptidase_C15 PFAM Desc: Pyroglutamyl peptidase
  misc_feature: Homolog of GI Number: 12039349 NR Desc: putative pyrrolidone carboxyl peptidase
  misc_feature: Homolog of GI Number: 50939513 NR Desc: pyrrolidone carboxyl peptidase
  misc_feature: Homolog of GI Number: 50252601 NR Desc: pyrrolidone carboxyl peptidase
  misc_feature: Homolog of GI Number: 21554239 NR Desc: putative pyrrolidone carboxyl peptidase
  misc_feature: Homolog of GI Number: 8778575 NR Desc: F28C11.8
  misc_feature: Homolog of GI Number: 9295697 NR Desc: F26F24.31
  misc_feature: Homolog of GI Number: 42571611 NR Desc: pyrrolidone
  misc_feature: Homolog of GI Number: 18977671 NR Desc: pyroglutamyl
  misc_feature: Useful for delaying flowering time
  misc_feature: Useful for making larger plants
  misc_feature: Useful for making shorter plants
  misc_feature: Useful for making stronger plants
MGSEGPSPVTVHVTGFKRFHGVAENPTERIVRGLQPFMETRGLPKGLVLGSCTVLEAAGQGALGPLYELLESTVSGRERQERVILLHFGANSGSHRFALENQAVNEATFRCPDELGWKPQRTPIISSDGSILHARQTTLPVKEISKSLQQMGYDVVPSDDAGRFVCNYVYYHSLKFAEKHGIGSLFVHFPLFLAIDEEVQMQFVASLLEVLASLNFQ

SEQ ID NO: 8915 - DNA, 449 bp, Zea mays
  misc_feature: Ceres CLONE ID no. 1470243
  misc_feature: Ceres CDNA ID no. 36704630
  CDS (71)..(280): REFERENCED BY SEQ ID NO: 8916
actcgctgttctcgtctccttccgttggattagggctcttcatctgttcgccgcacttcgtcagtcgcccatggcggatgaggaggtcactgatccaaaggcgctcctagaggatcgttcaaaagctaagtgtgtgtcgcagtggtatgattatcagaaatgtgttaaaaggattgaggacgatgagactgggcacaagcactgtaccggtcagtactttgattactggaaatgtgttgacaagaatgttgcagagaaactctttgagatgttaaaatgacaaattttccctccatttatccacttaaagttggtaataattgtatcacttgtgaggcctatagactattaaggcacttaatatttgtcagagaacttttgcctcttgggtaacacaaattttccactgccagtttgcatttcatttctgccaaaaaaaaaaaaaaaaa

SEQ ID NO: 8916 - protein, 69 aa, Zea mays; identical to SEQ ID NO: 1268
  misc_feature: Ceres CLONE ID no. 1470243
  misc_feature: Ceres CDNA ID no. 36704630
  misc_feature (7)..(69): Pfam Name: UCR_hinge PFAM Desc: Ubiquinol
  misc_feature: Homolog of GI Number: 50252217 NR Desc: putative ubiquinol
  misc_feature: Homolog of GI Number: 62732974 NR Desc: ubiquinol
  misc_feature: Homolog of GI Number: 488712 NR Desc: ubiquinol
  misc_feature: Homolog of GI Number: 21554004 NR Desc: putative ubiquinol
  misc_feature: Homolog of GI Number: 15218058 NR Desc: ubiquinol
  misc_feature: Homolog of GI Number: 5103810 NR Desc: Similar to gbX79273 cytochrome c reductase hinge protein subunit from Solanum tuberosum.
  misc_feature: Homolog of GI Number: 14532878 NR Desc: putative ubiquinol

SEQ ID NO: 8917 - DNA, 925 bp, Glycine max
  misc_feature: Ceres CLONE ID no. 1471067
  misc_feature: Ceres CDNA ID no. 40351949
  CDS (99)..(605): REFERENCED BY SEQ ID NO: 8918
ataatttgatttgacacaggaggcacgttgctatgagttgctctttctcaattttgcaattgcaagtgaagaagccctaattttttgcagatctggaaatggcgacggcaacataccctccaccgccaccttattacaggctttacaaagattacttgcaagaccctaattctgctcccgaccctccaccacctattgaaggcacttatctttgttttggagccaattacactactagtgatgttctacctaccttggaagaacaaggggtgcgccagctctattctaagggccctaatgttgatttcaagaaagagctgaggtcactcaacggagagttgcaactacatgttttggagcttgctgatattcttattgagaggccttcacagtatgcaagaagagtagaagaaatttcaactgtattcaaaaacttacatcaccttttaaattcattgcgtcctcatcaggcgagagcaacattgattcatattttggaacttcagatacagcgtcgtaaacaagcagtggaagacataaagaagaggagagaagaagcccgaaggctccttaacgagtccttggcaacacttgatggccattagagcattctctatcttgtattcacaacaagaatctaccgaggaaattaattttatttgaaaagtgaattttgtcctctagattttagcaaatgaaaagattaaaacaagaagttgtgcgacttccttgaaaatggtcacttgacataactgtctcatgttcttgatgaaggctgttttgcagcatgtgcaaagatattagaaatagaagaattgtgttaagagtgttgctactgttcttagaaatatttttagtagtgtataaagtctgaagtctgaactattaatggatggacctgtcagtctgcaaaaaaaaaaaaaaa

SEQ ID NO: 8918 - protein, 168 aa, Glycine max
  misc_feature: Ceres CLONE ID no. 1471067
  misc_feature: Ceres CDNA ID no. 40351949
  misc_feature (1)..(166): Pfam Name: MED7 PFAM Desc: MED7 protein
MATATYPPPPPYYRLYKDYLQDPNSAPDPPPPIEGTYLCFGANYTTSDVLPTLEEQGVRQLYSKGPNVDFKKELRSLNGELQLHVLELADILIERPSQYARRVEEISTVFKNLHHLLNSLRPHQARATLIHILELQIQRRKQAVEDIKKRREEARRLLNESLATLDGH

SEQ ID NO: 8919 - DNA, 460 bp, Zea mays
  misc_feature: Ceres CLONE ID no. 1471349
  misc_feature: Ceres CDNA ID no. 35383433
  CDS (91)..(246): REFERENCED BY SEQ ID NO: 8920
agtcttctcccctgcgacaaagacgacgcaagtccctactcctccaaaccctcgccgactcagatccagcttcctcgcaccgccgtcgccatgccgttcactccaggcccctactctggcgtcagcaccctcgcccttgtggcgagggcgtcggcctttggcgtcggtgtcgtctacgggagcatcaagctctcaatcctcaaggtaacaaaacctaaaaaggaggaagtgcatgatcattactaaggacgacaaggctgctacattttaattcccacatatggaaggatgttataaattggcagtgcaccccttctccatacgtacaatacaatttcgtttatgatttgtggacctgtctgtaacatacctgctatttttttttgtgttgtaataaattcttatacaatgacatgaaattaggaagtggaaaagcaagtcgttcggcaaaaaaaaaaaa

SEQ ID NO: 8920 - protein, 51 aa, Zea mays; identical to SEQ ID NO: 662
  misc_feature: Ceres CLONE ID no. 1471349
  misc_feature: Ceres CDNA ID no. 35383433
  misc_feature: Homolog of GI Number: 50921369 NR Desc: OSJNBb0050O03.8

SEQ ID NO: 8921 - DNA, 478 bp, Zea mays
  misc_feature: Ceres CLONE ID no. 1471408
  CDS (113)..(356): REFERENCED BY SEQ ID NO: 8922
agcctcctcggccgctatctgtttgttgtgttagggtttcgtctcgtgtataaggcgttcggagctcgcaaatcctttcctctctcgcgttcgaggctaggtagccgtcaccatgagccgctcggggcagcctccggatctcaagaagtacatggacaagaagcttcagattaagatgaatgcaaaccgtgttgttatcggcacacttcgtgggttcgaccagttcatgaatctggtggtggacaacactgtggaggtcaatggaaatgacaaaacagatattggaatggtggttatcaggggaaacagtgttgtaatgatcgaggcactggagccagttgcgaggtcacagtgaatcattgttctttagcactagcagcgtgaaaactgatgtaaaagatatcagtggaccctgttgtatttgactaatgcttttgcacagcaacataacttcggaggtggaaaaaaaaaaaaaaaa

SEQ ID NO: 8922 - protein, 80 aa, Zea mays
  misc_feature: Ceres CLONE ID no. 1471408
  misc_feature (8)..(72): Pfam Name: LSM PFAM Desc: LSM domain
  misc_feature: Homolog of GI Number: 50921369 NR Desc: OSJNBb0050O03.8
MSRSGQPPDLKKYMDKKLQIKMNANRVVIGTLRGFDQFMNLVVDNTVEVNGNDKTDIGMVVIRGNSVVMIEALEPVARSQ

SEQ ID NO: 8923 - DNA, 886 bp, Zea mays
  misc_feature: Ceres CLONE ID no. 1471634
  misc_feature: Ceres CDNA ID no. 40351951
  CDS (90)..(674): REFERENCED BY SEQ ID NO: 8924
actgccactccactcctaccccacacagaagcggcggcggcggagcaaacgcaggcgaaggcgagggtgtgagggaaggagcaccagccatggtgcacgtcaacttctaccgcaactatggtaagacgttcaagaaaccaaggcgtccttatgagaaggagcgtcttgatgctgaactgaagctggtcggtgagtatgggctgaggtgcaagcgtgagctttggagggtccagtatgcactgagcaggatccgtaatgctgcaaggcacttgctcacccttgacgagaagaacccccgtcgtatctttgagggtgaggcgcttcttcgccgcatgaaccgctatgggctgcttgctgagggtcagaacaagcttgattatgttcttgccctcaccgctgagaacttcctcgcaaggcggcttcaaacacttgtcttcaaggctggcatggccaagtccattcaccatgctcgtgtcttgatcaagcagcgtcacatcagggttggcaggcaaattgtcaacgtcccatcattcatggtgagggtggagtctgagaagcacattgacttttcactgtcaagcccattcggtggaggccccgcaggaagggtgaagagaaagaatcagaagaaggcaagcggtggcggcgatgctggcgatgaggatgaggagtgaggatggacaagtagcgttacccaatataataatattatctagttttcttgaacttgttcgaatgatgagtgcttagctgtgtgatctgacgcagagttccctgtgctgactctgtgtcatggatggtccattttatcttgtggtattatcagcctttacataactgctatgtttggatatgttcaattctgttgcaaaaaaaaaaaaaaaaa

SEQ ID NO: 8924 - protein, 194 aa, Zea mays
  misc_feature: Ceres CLONE ID no. 1471634
  misc_feature: Ceres CDNA ID no. 40351951
  misc_feature (109)..(156): Pfam Name: S4 PFAM Desc: S4 domain
  misc_feature (7)..(108): Pfam Name: Ribosomal_S4 PFAM Desc: Ribosomal protein S4/S9 N
MVHVNFYRNYGKTFKKPRRPYEKERLDAELKLVGEYGLRCKRELWRVQYALSRIRNAARHLLTLDEKNPRRIFEGEALLRRMNRYGLLAEGQNKLDYVLALTAENFLARRLQTLVFKAGMAKSIHHARVLIKQRHIRVGRQIVNVPSFMVRVESEKHIDFSLSSPFGGGPAGRVKRKNQKKASGGGDAGDEDEE

SEQ ID NO: 8925 - DNA, 1033 bp, Glycine max
  misc_feature: Ceres CLONE ID no. 1471734
  misc_feature: Ceres CDNA ID no. 40351952
  CDS (102)..(830): REFERENCED BY SEQ ID NO: 8926
accaaccattagcttcttccatcctcagagcttgccgtcaacaacgattcctttcggttttctgtttctctggattcattttcatttttacggctaccagaatgtccagctcatcggaatattcggcattttccggcccccgcccggccaagtcgccggccgagaagtccactttctctcagacttgtagtctattgagccaatacatcaaggaaaaaggtgccttcggagaccttaccctcgggatgactcgcacccccgatacttacggttcccctgaggcatcgtgtcactctgcaacaaccatggagttgtttcccaccatcatcaagcaacggaacccaactactgtggatttcctatctccccagagtgcttatcctcaccactcagaggttccaaccatggtcaaatcaagtgcatttaagtctatagagaaggagcctaaagctgctcagttgacaatcttttatgctgggcaagttgttgtgtttgatgattttcctgctgaaaaattggaggagataatgtcattagccggcaagggaatatcccaaagccaaaacacctctgcatgtgctcacactcataaccagcaagggaatcatccttcctttgttcctaatgtctcccctcaagcaccgtccagaccaattgtttgtgaactgccaattgctaggaaagtttcacttcatcggttcctttctaagagaaaagatagaattgcttccaaagcaccatatcaaataaacaatcccaactctgcttcaaataagccggctgaatccatgacatggctaggattaggtgctcaatcaacacaattctgagtgcatttgcagttttgagtagttttagcctctttttttttatatatatttgattttgtagttctttgtcgttttaacttctactctagactttgatagatattagtagtagttgaaggcttcaatttttatgattgcaaatatttcctgtaattagtatttcaaattcttgtattcattcttcgcaaaaaaaaaaaaaaaaa

SEQ ID NO: 8926 - protein, 242 aa, Glycine max
  misc_feature: Ceres CLONE ID no. 1471734
  misc_feature: Ceres CDNA ID no. 40351952
  misc_feature (113)..(148): Pfam Name: Zim PFAM Desc: ZIM motif
MSSSSEYSAFSGPRPAKSPAEKSTFSQTCSLLSQYIKEKGAFGDLTLGMTRTPDTYGSPEASCHSATTMELFPTIIKQRNPTTVDFLSPQSAYPHHSEVPTMVKSSAFKSIEKEPKAAQLTIFYAGQVVVFDDFPAEKLEEIMSLAGKGISQSQNTSACAHTHNQQGNHPSFVPNVSPQAPSRPIVCELPIARKVSLHRFLSKRKDRIASKAPYQINNPNSASNKPAESMTWLGLGAQSTQF

SEQ ID NO: 8927 - DNA, 880 bp, Glycine max
  misc_feature: Ceres CLONE ID no. 1472388
  misc_feature: Ceres CDNA ID no. 25446135
  CDS (122)..(664): REFERENCED BY SEQ ID NO: 8928
attcaccaacacaaccctcttcttcttcttcttctttttcttttcctctctctttctttctttctttctttctttctttctttctgcaactcaaaattgttagtcgttcaatcctcacaatatggctgccaataataatattcatgggaacactgaatctgctcaatccaacattgctcctcccgctaagcagcctctacatcctgctaaggctgttgattctcaatctgtactcaaaaggctgcaatctgaattgatggctttgatgatgagtggagattctgggatatctgcgtttcctgaggaggacaacatattcttctggaagggaacaataacaggaagcaaagatactgtgtttgaaggcacagagtataagctatcactctcctttcccaatgactaccctttcaagcctccaaaagtaaagtttgaaacaacctgcttccaccccaattttgatgtgcatggcaacatatgcttggacatactccaggataaatggtcatctgcttatgatgtcagaacaattcttctttccatccaaagtctgcttggagagccaaacattagttcaccactaaaccaacaagcagcacagctttggagcaatcaagaagaatacaggaagatggtggagaggttgtacaaatctgcaaattgatatcagtcttgcaggagagaagaagggtccattcctgtctgcttcggagaagagaaagggatgaagccattatttgtttttagggtgcccttttctgatgggcctgcttttatatattacaatttacgaattgttgcatgtttctctcttctttacaattgatagttaaaaaaaagatttcgtttttccataaaaaaaacaaaaaaaaaaaaaaaa

SEQ ID NO: 8928 - protein, 180 aa, Glycine max
  misc_feature: Ceres CLONE ID no. 1472388
  misc_feature: Ceres CDNA ID no. 25446135
  misc_feature (40)..(176): Pfam Name: UQ_con PFAM Desc: Ubiquitin
  misc_feature: Homolog of GI Number: 29028822 NR Desc: At1g50490
  misc_feature: Homolog of GI Number: 21618179 NR Desc: E2
  misc_feature: Homolog of GI Number: 9293960 NR Desc: ubiquitin conjugating protein
  misc_feature: Homolog of GI Number: 9454557 NR Desc: Putative ubiquitin carrier protein
  misc_feature: Homolog of GI Number: 1493838 NR Desc: cyclin
  misc_feature: Homolog of GI Number: 4388942 NR Desc: E2
  misc_feature: Homolog of GI Number: 49523106 NR Desc: MGC81948 protein
  misc_feature: Homolog of GI Number: 57104646 NR Desc:  similar to Ubiquitin
  misc_feature: Homolog of GI Number: 55641755 NR Desc:  similar to Ubiquitin
  misc_feature: Homolog of GI Number: 34932996 NR Desc: similar to ubiquitin
MAANNNIHGNTESAQSNIAPPAKQPLHPAKAVDSQSVLKRLQSELMALMMSGDSGISAFPEEDNIFFWKGTITGSKDTVFEGTEYKLSLSFPNDYPFKPPKVKFETTCFHPNFDVHGNICLDILQDKWSSAYDVRTILLSIQSLLGEPNISSPLNQQAAQLWSNQEEYRKMVERLYKSAN

SEQ ID NO: 8929 - DNA, 646 bp, Zea mays
  misc_feature: Ceres CLONE ID no. 1472658
  misc_feature: Ceres CDNA ID no. 40351953
  CDS (2)..(646): REFERENCED BY SEQ ID NO: 8930
aataacgcaagcaaagcctctgctgcgtgctctgctcctctctctcctccatttgctgccgcagctctccgagctcgccctcgccgccgccgcctcagcgcagcacagcacagattcggagagcctgcccttagcacgcagcgccagtgaagaaggccgagataatggaggtggagacgatgctggacgacgacgtgttcttcgccgagctcagcaagcggatatcgctgctcatcaccgacgacgacgagggcgcggacttcgccgccgcgcagttcatccccgccgccgccgccgccgccgcgcccctccaggggttcgcgtcgcgcgcccatgtgccgtcgcaggcgtcgctgctggcgccaccggcctacgcgctgtaccactaccaccacggcgccagctacggcggggacgacagcgccagggcggcgtggcagcagctgcagtgcggcagcaagggcaccggcgtgttcatcccacggtccacgcccgggtccgcgcaccccaagaagaagggcaagagccggggcgccgccgccaaggccgcgcggccggccggcgcgggcgcaccgcccaggaagcgcgtctgatctccgcttctctgcatcgtgatttaatggatcagcaaaaaaaaaaaaaaaaa

SEQ ID NO: 8930 - protein, 142 aa, Zea mays
  misc_feature: Ceres CLONE ID no. 1472658
  misc_feature: Ceres CDNA ID no. 40351953
MEVETMLDDDVFFAELSKRISLLITDDDEGADFAAAQFIPAAAAAAAPLQGFASRAHVPSQASLLAPPAYALYHYHHGASYGGDDSARAAWQQLQCGSKGTGVFIPRSTPGSAHPKKKGKSRGAAAKAARPAGAGAPPRKRV

SEQ ID NO: 8931 - DNA, 422 bp, Zea mays
  misc_feature: Ceres CLONE ID no. 1472694
  misc_feature: Ceres CDNA ID no. 25446136
  CDS (141)..(257): REFERENCED BY SEQ ID NO: 8932
aatttaagggttctaacttattgtgaagaaacatttaagccgtgacccattatcacccgtagcccatactccaaactctgagctcctggttactgtattatttctacttacattattatattcctgaacagctcgagggaatggggttcaaccgtgagcttgtgctagaagttttctttgcatgcaacaaggacgaagagcttacagccaactaccttctggatcacggccatgagtttgacgagcagcagcaatagacgtggggtggatggaggaaaccgaggcagttgcagaacagcgagtgtcgttcttatgctatgctgctgactatcttttatttccatatatatttgttcggaatgctttctaagtacatattaattcaatatcaagcgttacaccgtgcaaaaaaaaaaaaaaaa

SEQ ID NO: 8932 - protein, 38 aa, Zea mays
  misc_feature: Ceres CLONE ID no. 1472694
  misc_feature: Ceres CDNA ID no. 25446136
  misc_feature (1)..(29): Pfam Name: UBA PFAM Desc: UBA/TS
  misc_feature: Homolog of GI Number: 53793163 NR Desc: putative RAD23 protein
  misc_feature: Homolog of GI Number: 30409730 NR Desc: RAD23
  misc_feature: Homolog of GI Number: 21593157 NR Desc: DNA repair protein RAD23 homolog
  misc_feature: Homolog of GI Number: 6688552 NR Desc: Rad23 Protein
  misc_feature: Homolog of GI Number: 1914683 NR Desc: RAD23
  misc_feature: Homolog of GI Number: 30409726 NR Desc: RAD23
  misc_feature: Homolog of GI Number: 5640111 NR Desc: RAD23 protein
  misc_feature: Homolog of GI Number: 6957717 NR Desc: putative RAD23
  misc_feature: Homolog of GI Number: 77745475 NR Desc: RAD23
MGFNRELVLEVFFACNKDEELTANYLLDHGHEFDEQQQ

SEQ ID NO: 8933 - DNA, 1097 bp, Zea mays
  misc_feature: Ceres CLONE ID no. 1472709
  misc_feature: Ceres CDNA ID no. 40351954
  CDS (236)..(781): REFERENCED BY SEQ ID NO: 8934
aaccgcccccgatccaccattcctcctccggatttcgcagtcagcggtgagcctgcccctaacccatccctcccccaccctctcccagatctgagctccttgcgctgtcagatctctgctcccgatccatctccggcggccgcgcgcggtagatctccgttcggcagcgtgtgatctgctcgatctgtgcggttgggtctggatcgggtggtgaaggtagcgggcgcggaggaagatggggctcgcgttcgggaagctcttcagccggctcttcgccaagaaggagatgcggattcttatggtcggtctcgacgccgccggtaaaaccaccatcctctacaagctcaagctcggcgagatcgtcacaaccatccccaccatcggtttcaatgttgaaactgttgagtacaagaacattagcttcacggtctgggatgtcgggggtcaggacaagatcagacctctctggaggcattacttccagaacacacagggtcttatctttgttgtggatagcaatgaccgtgaccgtgttgttgaagccagagatgagctgcacaggatgctgaacgaggatgagctacgtgatgctgtgctgcttgtttttgccaacaagcaagatcttcctaatgccatgaatgctgctgagatcactgacaagcttggattacactccctgcgccagcgacactggtacatccagagcacttgtgccacaactggcgagggtctgtacgagggcctggactggctgtccagcaacattgcgagcaaggcttgaatatcaaatgcgaactgactaggagctccggatgtatcatggaaacttaggacagaatcgcctctgcaacctgttaggtgtcttctaccggcacaatatattttttgtttggaatatgtaatgatgttacggttcaacgtttattctaccctactatactgttggatgttctttgggcctgtttcattttgcacaaggattggagttccaatatcatgcatgctacattttaaattcgtacaccatcgcaaattttaggatgtataccaaattataggatattccaacattttttggagaaaaaaaaaaaaaaaaa

SEQ ID NO: 8934 - protein, 181 aa, Zea mays
  misc_feature: Ceres CLONE ID no. 1472709
  misc_feature: Ceres CDNA ID no. 40351954
  misc_feature: null
  misc_feature: Useful for making plants with altered Lignin content
  misc_feature: Useful for making plants with altered alkaloid content
MGLAFGKLFSRLFAKKEMRILMVGLDAAGKTTILYKLKLGEIVTTIPTIGFNVETVEYKNISFTVWDVGGQDKIRPLWRHYFQNTQGLIFVVDSNDRDRVVEARDELHRMLNEDELRDAVLLVFANKQDLPNAMNAAEITDKLGLHSLRQRHWYIQSTCATTGEGLYEGLDWLSSNIASKA

SEQ ID NO: 8935 - DNA, 424 bp, Zea mays
  misc_feature: Ceres CLONE ID no. 1472797
  CDS (70)..(370): REFERENCED BY SEQ ID NO: 8936
aaaccccaccacaacccagcgccggcagtcgccgtcatcgatcgatcgccggaaaactaacccctaacgatgtctggagccggcgaggaggacaagaagcccgcggagggcggcgcccacatcaaccttaaggtcaagggacaggatggcaatgaggtgttctttcgcataaagaggtccacccagctgaagaagctgatgaacgcttattgtgaccgccagtctgtggacatgaatgccattgcgttcctgtttgatggccgcaggcttcgcggcgagcagacccctgatgagctggagatggaggacggcgacgagatcgacgccatgcttcaccagaccggaggcagcgttcctagcaccacctaaaagcctcgttttgctctccgtcctgcgtagtagtaaacaaaaaaaaaaaaaaaaa

SEQ ID NO: 8936 - protein, 99 aa, Zea mays; identical to SEQ ID NO: 36
  misc_feature: Ceres CLONE ID no. 1472797
  misc_feature (16)..(91): Pfam Name: ubiquitin PFAM Desc: Ubiquitin family

SEQ ID NO: 8937 - DNA, 1265 bp, Zea mays
  misc_feature: Ceres CLONE ID no. 1472841
  misc_feature: Ceres CDNA ID no. 40351956
  CDS (277)..(1053): REFERENCED BY SEQ ID NO: 8938
gttcgtcccaccgaggcaccgagccaccgactcaatccccattctctccccagtcgagtggcctctggcttcccaaaacaagaccggttcctgttccctagatctctgcgtagaggcggcgaggcacccgaatccggcaaaaaagggttcgcggtttgccttggttgggaggagcgcaggagcccggcgtcaaaacccaatcttggcgcccgggctgccgtgcgccatcgtcttctcccccctgtggtgtttagggagaggagaaggccggtggagatggtgccgtgggaagggtacgtcagcgacgagacgatgggcaccttctcgcccatcgtgctctactggctgtacgccggcggctaccagctgatccttcaccgccggccgcttgagcggtacaggctccacacgcgggacgaggaggaggagaagaacctcgtcagcctctccaccgtcgtccgtggcgtactcctgcagcagctcgtgcaggccatcgtcgcgatgattttgttcatggtgacttctgatagctcaataactgttgttcagccacctatcgtcgtccagatcttccagtttctagttgcaatgttagtgatggactcatggcagtactttgtgcaccgctacatgcaccaaaacaagttcctgtatcggcacatccactcgcagcaccatcggctgattgtcccttacgctatcggggctctgtacaaccacccactggagggcctgcttctggacaccttaggaggcgccatctccttcttggtctccggcatgacgccgaggaccgccatgttcttcttctgcttcgcagtcctcaagacggtcgacgatcactgcgggctttggctaccgtataacatcttccagcacctgtttcagaacaacaccgcctatcacgacatccaccaccagctgcaaggaaccaaatacaactactcccagccattcttctcgatctgggacagaatgctaggaacccacatgccgtacgacttagtgagcaggaaagaaggtggatttgaagcaaggccgtcgcgagactagcttgaagtcatggaagtgtacaggctccggtgaatgagtcagacagaatatggttttttagctgtcatggttcattttttaaaaattttgtgcagggctgccatttacattgctgtgcagatagtgcatttgaaaatccacacttctgtatgtacccagttatttgtgtaattgattgaacctctggtcgtgatcaaaaaaaaaaaaaaaaa

SEQ ID NO: 8938 - protein, 258 aa, Zea mays
  misc_feature: Ceres CLONE ID no. 1472841
  misc_feature: Ceres CDNA ID no. 40351956
  misc_feature (11)..(217): Pfam Name: Sterol_desat PFAM Desc: Sterol desaturase
MVPWEGYVSDETMGTFSPIVLYWLYAGGYQLILHRRPLERYRLHTRDEEEEKNLVSLSTVVRGVLLQQLVQAIVAMILFMVTSDSSITVVQPPIVVQIFQFLVAMLVMDSWQYFVHRYMHQNKFLYRHIHSQHHRLIVPYAIGALYNHPLEGLLLDTLGGAISFLVSGMTPRTAMFFFCFAVLKTVDDHCGLWLPYNIFQHLFQNNTAYHDIHHQLQGTKYNYSQPFFSIWDRMLGTHMPYDLVSRKEGGFEARPSRD

SEQ ID NO: 8939 - DNA, 438 bp, Zea mays
  misc_feature: Ceres CLONE ID no. 1472926
  misc_feature: Ceres CDNA ID no. 25446137
  CDS (63)..(248): REFERENCED BY SEQ ID NO: 8940
atggaacacggtgcattggccttaggaagtctttaaaaatatgtcttccctctgcttgcaggatgaagatgatgacgagtgatggagctcctcgagacaatggaccgtgcttcatccaacaatggagcggctacacaaggccccgtggcgatcacaaaaaaggagcctatatccatgtactagaattattcagtttcactccacatcgtgatgttttatttttacttttgtcgtgctataacggatagcgctcctcgttggcgccactggcgggtggttctgcctctggtctggtgtgtttgtgtgtggtcacacttgccagccagcagaggcgcctgcttgtacctagattactgtttccattgtcgtcatcatcggctaacattgtcataatgtcagtttgggtaatgttagattaagcaaaaaaaaaaaaaaaaa

SEQ ID NO: 8940 - protein, 61 aa, Zea mays
  misc_feature: Ceres CLONE ID no. 1472926
  misc_feature: Ceres CDNA ID no. 25446137
  misc_feature: Useful for making stronger plants
  misc_feature: Useful for making taller plants and plants with longer flowers
  misc_feature: Useful for making taller plants and plants with longer inflorescences
  misc_feature: Useful for sterility
MKMMTSDGAPRDNGPCFIQQWSGYTRPRGDHKKGAYIHVLELFSFTPHRDVLFLLLSCYNG

SEQ ID NO: 8941 - DNA, 1339 bp, Glycine max; identical to SEQ ID NO: 7959
  misc_feature: Ceres CLONE ID no. 1473020
  misc_feature: Ceres CDNA ID no. 36707087
  CDS (58)..(1134): REFERENCED BY SEQ ID NO: 8942

SEQ ID NO: 8942 - protein, 358 aa, Glycine max; identical to SEQ ID NO: 7960
  misc_feature: Ceres CLONE ID no. 1473020
  misc_feature: Ceres CDNA ID no. 36707087
  misc_feature: null
  misc_feature: Useful for making plants with modulated phosphate use efficiency
  misc_feature (11)..(358): Pfam Name: Glycolytic PFAM Desc: Fructose
  misc_feature: Homolog of GI Number: 10645188 NR Desc: cytosolic aldolase
  misc_feature: Homolog of GI Number: 3021338 NR Desc: cytosolic fructose
  misc_feature: Homolog of GI Number: 21592946 NR Desc: fructose bisphosphate aldolase
  misc_feature: Homolog of GI Number: 927505 NR Desc: fructose
  misc_feature: Homolog of GI Number: 10800924 NR Desc: fructose
  misc_feature: Homolog of GI Number: 18414312 NR Desc: fructose
  misc_feature: Homolog of GI Number: 21553388 NR Desc: fructose
  misc_feature: Homolog of GI Number: 20260022 NR Desc: fructose
  misc_feature: Homolog of GI Number: 7340654 NR Desc: fructose
  misc_feature: Homolog of GI Number: 17104659 NR Desc: putative fructose bisphosphate aldolase

SEQ ID NO: 8943 - DNA, 528 bp, Zea mays
  misc_feature: Ceres CLONE ID no. 1473631
  misc_feature: Ceres CDNA ID no. 40351957
  CDS (98)..(292): REFERENCED BY SEQ ID NO: 8944
agcgcctcttccgtaaaccctagccgcctgtcttgctgaagctgaactgctgatccgtcttccaagctgtggtgtcatccctgcgttctgacccaagatgtatctccagtattacatcaacgagaagggtgacaaggtctacaccaccaagaaggagtcgcctcttggggtgccgacgcagtctgctcacccagctcgcttctcaccagatgacaagtactctcgccagcggtacctgttgaagaagagatttggacttctgccaacgcagaagccagcactgaagtactgaagcttcaactttccaaccatggatgtgcagtttgtgtcactgcttgatgcttgttggttggaatgtagaataggtatctgaggaaagatatcaaacactgctaggcactactactatgacatctcagcgcattcaggcactatatgtaatgctatgtgattgacaggtcttgttcttattatgtaaaaaaaaaaaaaaaaaaaaaaaaaaaaaaaaaagaaaaaaaaaaaaaaaaa

SEQ ID NO: 8944 - protein, 64 aa, Zea mays; identical to SEQ ID NO: 8604
  misc_feature: Ceres CLONE ID no. 1473631
  misc_feature: Ceres CDNA ID no. 40351957
  misc_feature (3)..(53): Pfam Name: Nop10p PFAM Desc: Nucleolar RNA

SEQ ID NO: 8945 - DNA, 1253 bp, Zea mays
  misc_feature: Ceres CLONE ID no. 1474061
  misc_feature: Ceres CDNA ID no. 40041432
  CDS (176)..(1081): REFERENCED BY SEQ ID NO: 8946
agcttcgacgtatttctctatctatctatacggttcaagggactgaagaaggtagagagagaaacttgaaggggagaggaatgagatacaggttcatgttcatttaggtgtcagttcatctgatttctcagaagcaaaatgttgtttggagctcagtgacaccatcttgtaatgcatgtgccttttacgggaaatggaggatcattctgtccatccaaagtctaagtctaaccatggttccttgtcaggaaatggttatgagatgaaaaatccaggccatgaagtttgtgatagggattcatcatcagagtctgatcgatctcacccagaagcatcagcagtgagtgaaagcagtctagatgaacacacatcaactcaatcagacaatgatgaagatcatgggaaggataatcaggacacattgaagccagtattgtccttggggaaggaagggtctgcctttttggccccaaaaatagattacaacccgtcttttccttatattccttatactgctgacgcttactatggtggcgttggggtcttgacaggatatgctccgcatgccattgtccatccccagcaaaatgatacaacaaatagtccggttatgttgcctgcggaacctgcagaagaagaaccaatatatgtcaatgcaaaacaataccatgcgatccttaggaggaggcagacacgtgctaaactggaggcgcagaacaagatggtgaaaggtcggaagccataccttcatgagtctcgacaccgtcatgccatgaagcgggcccgtggctcaggagggcggttcctcaacacaaagcagcagctccaggagcagaaccagcagtaccaggcgtcgagtggttcaatgtgctcaaagaccattggcgacagcgtaatctcccaaagtggccccatttgcacgccctcttctgacgctgcaggtgcttcagcagccagccaggaccgcggctgcttgccctcggttggcttccgccccacagccaacttcagtgagcaaggtggaggcggctcgaagctggtcgtgaacggcatgcagcagcgtgtttccaccataaggtgaagagaagtgggcacgacaccattcccaggcgcgcactgcctgtggcaactcatccttggcttttgaaactatgaatatgcaatggacatgtagctttgagttcctcagaataaccaaacgcgaagaatatgcaaagtccttttgagatttgctgtaaaaaaaaaaaaaaaaa

SEQ ID NO: 8946 - protein, 295 aa, Zea mays
  misc_feature: Ceres CLONE ID no. 1474061
  misc_feature: Ceres CDNA ID no. 40041432
  misc_feature (148)..(204): Pfam Name: CBFB_NFYA PFAM Desc: CCAAT
  misc_feature: Homolog of GI Number: 50939151 NR Desc: putative transcription factor
  misc_feature: Homolog of GI Number: 57222442 NR Desc: putative CCAAT
  misc_feature: Homolog of GI Number: 50916485 NR Desc: putative CCAAT
  misc_feature: Homolog of GI Number: 2826786 NR Desc: RAPB protein
  misc_feature: Homolog of GI Number: 45861201 NR Desc: CCAAT
  misc_feature: Homolog of GI Number: 45861203 NR Desc: CCAAT
  misc_feature: Homolog of GI Number: 45861205 NR Desc: CCAAT
  misc_feature: Homolog of GI Number: 45861211 NR Desc: CCAAT
  misc_feature: Homolog of GI Number: 45861207 NR Desc: CCAAT
  misc_feature: Homolog of GI Number: 38640734 NR Desc: CCAAT
MEDHSVHPKSKSNHGSLSGNGYEMKNPGHEVCDRDSSSESDRSHPEASAVSESSLDEHTSTQSDNDEDHGKDNQDTLKPVLSLGKEGSAFLAPKIDYNPSFPYIPYTADAYYGGVGVLTGYAPHAIVHPQQNDTTNSPVMLPAEPAEEEPIYVNAKQYHAILRRRQTRAKLEAQNKMVKGRKPYLHESRHRHAMKRARGSGGRFLNTKQQLQEQNQQYQASSGSMCSKTIGDSVISQSGPICTPSSDAAGASAASQDRGCLPSVGFRPTANFSEQGGGGSKLVVNGMQQRVSTIR

SEQ ID NO: 8947 - DNA, 436 bp, Zea mays
  misc_feature: Ceres CLONE ID no. 1474107
  misc_feature: Ceres CDNA ID no. 35383434
  CDS (68)..(223): REFERENCED BY SEQ ID NO: 8948
agacgcaagtccctactcctccaaaccctcgccgactcatatccagcttcctcgcaccgccgtcgccatgccgttcactccaggcccctactctggcgtcagcaccctcgcccttgtggcgagggcgtcggcctttggcgtcggtgtcgtctacgggagcatcaagctctcaatcctcaaggtaacaaaacctaaaaaggaggaagtgcatgatcattactaaggacgacaaggctgctacattttaattcccacatatggaaggatgttataaattggcagtgcaccccttctccatacgtacaatacaatttcgtttatgatttgtggacctgtctgtaacatacctgctatttttttttgtgttgtaataaattcttatacaatgacatgaaatcaggaagtggaaaagcaagtcgttcgacaaaaaaaaaaa

SEQ ID NO: 8948 - protein, 51 aa, Zea mays; identical to SEQ ID NO: 662
  misc_feature: Ceres CLONE ID no. 1474107
  misc_feature: Ceres CDNA ID no. 35383434
  misc_feature: Homolog of GI Number: 50921369 NR Desc: OSJNBb0050O03.8

SEQ ID NO: 8949 - DNA, 744 bp, Zea mays
  misc_feature: Ceres CLONE ID no. 1474203
  misc_feature: Ceres CDNA ID no. 25446789
  CDS (2)..(532): REFERENCED BY SEQ ID NO: 8950
acttctgaatccggcatcaccatgcagaacaccgtcgcgaacccttccactgcggccgccgccgctgcggcagaacctggcgcaggtgacgagctccatccagaagacgctgggcctgctccaccagctcaacctcaccgtctcctccttcaactctgcctcccagctccccctcctccagcgcctgaatgcgcttgtggcggagctcgacacgatgcagaaactcgccgaggggtgcaacatccaggtgcctatggaggtcgtcaatttgatcgacgatgggaagaaccccgacgagttcactagggacgtgctcaacagctgcatcgtcaaaaaccagatcaccaagggcaagactgacgctttcaagggcctacggaagcatcttcttgaggagcttgaacaagctttccctgaggacgtagaagcatacagggagatacgtgctacttctgctgctgaggcaaagcggttggctcagtcccagggtactttgcctaatggagatgtcaaagtgaaagctgagcattgagcgaatggtacgactacagagggcaagtttgttatctctgcttagttttggggatggctttgttaaccagaaacatgcatatctttctattgcacgtcccctgatcagtgaatgtgtacatactatcgtagcatgtgtggcccaatgtattcaacttaactaataacttcaaaaagatatccggagcatatcgaactcaaaaaaaaaaaaaa

SEQ ID NO: 8950 - protein, 105 aa, Zea mays
  misc_feature: Ceres CLONE ID no. 1474203
  misc_feature: Ceres CDNA ID no. 25446789
  misc_feature: Homolog of GI Number: 25403266 NR Desc: protein T24P13.4
  misc_feature: Homolog of GI Number: 72087005 NR Desc:  similar to CG5057
  misc_feature: Homolog of GI Number: 55930938 NR Desc: DNA segment
  misc_feature: Homolog of GI Number: 34873422 NR Desc: similar to DNA segment
  misc_feature: Homolog of GI Number: 49522360 NR Desc: MGC89063 protein
  misc_feature: Homolog of GI Number: 47937479 NR Desc: MGC78921 protein
  misc_feature: Homolog of GI Number: 50736031 NR Desc:  similar to DNA segment
  misc_feature: Homolog of GI Number: 74003101 NR Desc:  similar to CG5057
  misc_feature: Homolog of GI Number: 54641286 NR Desc: GA18625
MQKLAEGCNIQVPMEVVNLIDDGKNPDEFTRDVLNSCIVKNQITKGKTDAFKGLRKHLLEELEQAFPEDVEAYREIRATSAAEAKRLAQSQGTLPNGDVKVKAEH

SEQ ID NO: 8951 - DNA, 469 bp, Zea mays
  misc_feature: Ceres CLONE ID no. 1474255
  CDS (87)..(309): REFERENCED BY SEQ ID NO: 8952
aatatatccaacaaccagcagtgcaacaagcaagatttacctgcccatcgatcatatcgtcaactggtccggcagttcgcgacaccatgagctccacggagtgcggcggcggcggcggcggcgccaagacgtcgtggcctgaggtggtcgggctgagcgtggaggacgccaagaaggtgatcctcaaggacaagccggacgccgacatcgtggtgctgcccgtcggctccgtggtgaccgcggattatcgccctaaccgtgtccgcatcttcgtcgacatcgtcgcccagacgccccacatcggctgataatatataagctagccgctatttcctttccttgccccagaacttgaaataaatatatatacgatgaaataacgcgggcatgccgaataatggatgtgtgaattctcactaattaagtaatgcataaataaacgtattcaaatgtcaaaaaaaaaaaaaaa

SEQ ID NO: 8952 - protein, 73 aa, Zea mays
  misc_feature: Ceres CLONE ID no. 1474255
  misc_feature (14)..(73): Pfam Name: potato_inhibit PFAM Desc: Potato inhibitor I family
  misc_feature: Homolog of GI Number: 25403266 NR Desc: protein T24P13.4
  misc_feature: Homolog of GI Number: 72087005 NR Desc:  similar to CG5057
  misc_feature: Homolog of GI Number: 55930938 NR Desc: DNA segment
  misc_feature: Homolog of GI Number: 34873422 NR Desc: similar to DNA segment
  misc_feature: Homolog of GI Number: 49522360 NR Desc: MGC89063 protein
  misc_feature: Homolog of GI Number: 47937479 NR Desc: MGC78921 protein
  misc_feature: Homolog of GI Number: 50736031 NR Desc:  similar to DNA segment
  misc_feature: Homolog of GI Number: 74003101 NR Desc:  similar to CG5057
  misc_feature: Homolog of GI Number: 54641286 NR Desc: GA18625
MSSTECGGGGGGAKTSWPEVVGLSVEDAKKVILKDKPDADIVVLPVGSVVTADYRPNRVRIFVDIVAQTPHIG

SEQ ID NO: 8953 - DNA, 421 bp, Zea mays
  misc_feature: Ceres CLONE ID no. 1474262
  misc_feature: Ceres CDNA ID no. 36704631
  CDS (69)..(260): REFERENCED BY SEQ ID NO: 8954
agcctttcctgtctcctctcgctcgctctccccgtctcccgcacgcccatccgccgccgccgttcgccatgggcctcctcgactcgctctaccgcgtggtgatgcgccgcaacgccgtctatgttaccttcgtcgtcgccggtgcctttgcgggcgagcgggctgtagactacggagttcacaagatctgggagatgaacaacctcgggaaaaggtacgaagacataccagttttggggcagaggccagccgaagaatgatatactttggtcgccatttagctccggtttaaccgtttcattttcgcacaataataagctgtgtaaacttcttactctgctgctgagagctgcttcccattcattttactctgaacatgctgtgagggaatttcgtggtgcatggctgaaaaaaaaaaaaa

SEQ ID NO: 8954 - protein, 63 aa, Zea mays
  misc_feature: Ceres CLONE ID no. 1474262
  misc_feature: Ceres CDNA ID no. 36704631
  misc_feature (4)..(60): Pfam Name: UCR_UQCRX_QCR9 PFAM Desc: Ubiquinol
  misc_feature: Homolog of GI Number: 633685 NR Desc: ubiquinol
  misc_feature: Homolog of GI Number: 4775284 NR Desc: putative ubiquinone
MGLLDSLYRVVMRRNAVYVTFVVAGAFAGERAVDYGVHKIWEMNNLGKRYEDIPVLGQRPAEE

SEQ ID NO: 8955 - DNA, 471 bp, Glycine max
  misc_feature: Ceres CLONE ID no. 1475001
  CDS (110)..(353): REFERENCED BY SEQ ID NO: 8956
actagtactatttcggtgattcattcagttaatggtgttgggttgcttcattgataaataataaaattgtggtgttgcttgcagattgatcgagtgaataatattggaaatgatggatctgaatgtgaatgagaaaaagaaatgttgcgctgattgcaaaaccaccaagacaccactctggagaggaggaccagctggacccaagaccttatgcaacgcttgtggaattaggtataggaagagaagggcttgttcgaggaagcgagaggagcagaggtggaagatgttgggggaagaggaacaggccgcggtgtgcttgatggccttgtcctctggttttgttttcgcttgattgcaaagcattccttaatttagtaatccacgacaatcctttttgatgtcgcatacctaaccttgtaaaggtcaagcctctgtttataacatggtgttcttcgcaaaaaaaaaaaaaaa

SEQ ID NO: 8956 - protein, 80 aa, Glycine max
  misc_feature: Ceres CLONE ID no. 1475001
  misc_feature (13)..(48): Pfam Name: GATA PFAM Desc: GATA zinc finger
  misc_feature: Homolog of GI Number: 633685 NR Desc: ubiquinol
  misc_feature: Homolog of GI Number: 4775284 NR Desc: putative ubiquinone
MMDLNVNEKKKCCADCKTTKTPLWRGGPAGPKTLCNACGIRYRKRRACSRKREEQRWKMLGEEEQAAVCLMALSSGFVFA

SEQ ID NO: 8957 - DNA, 458 bp, Zea mays
  misc_feature: Ceres CLONE ID no. 1475319
  CDS (76)..(259): REFERENCED BY SEQ ID NO: 8958
aaaaaccctagccgccgccagaccattcgtttctcgcgagccatcgcttctgtaattctcaggcatccggaagaaatggccaagtcgaagaaccacacggcgcacaaccagtcgttcaaggcgcacaagaacggcattaagaaacccaagcgccaccgccagacctccaccaaggggatggaccccaagttcctgaggaacctgaggtattctaggaagggcaacaaaaagagtggtgaggctgaagctgaggaataggaaggaaagcatggctttgtttcctctgtttttagctcagttccacctttaggacctggggttttgctaaagatggaacttaagtggtgttactgtatgatggcaaggaccttttgctgccgaaggttatgttttgaagttcatgctaccttttaaagtacggattaccttgtgcctatgttcaaaaaaaaaaaaaaaaa

SEQ ID NO: 8958 - protein, 60 aa, Zea mays; identical to SEQ ID NO: 594
  misc_feature: Ceres CLONE ID no. 1475319
  misc_feature (4)..(42): Pfam Name: Ribosomal_L29e PFAM Desc: Ribosomal L29e protein family
  misc_feature: Homolog of GI Number: 633685 NR Desc: ubiquinol
  misc_feature: Homolog of GI Number: 4775284 NR Desc: putative ubiquinone

SEQ ID NO: 8959 - DNA, 1162 bp, Zea mays
  misc_feature: Ceres CLONE ID no. 1475393
  misc_feature: Ceres CDNA ID no. 40041433
  CDS (97)..(774): REFERENCED BY SEQ ID NO: 8960
agcgcccccaattcccgctccccacgcacccagagacacgccgagcgggagaggaagcgacagccagcagccgaggcggccagcgccagcgcaggcatgaccactcccactcccagtggcgacggctcgcccccgggctcctccgacctcgtgcccccttcctaccccgagatgatcgtcgccgcgatcaccgccctcgccgaggagaacggctccagccaggccgccatcgcgcgccgcatcgaggcgcaggcccgcggcgacctgccggcctcgcacccggcgctcgtcgccgcccacctctcgcgcatgtccgccgcaggggagctcgtcgccgtcgcgggggggaagtacgcgctgcccccgccgccggcgcagccggcgccggagtcaccggctgacgacggcgaagacgacgacgacgacgacgactgcgccgacgaggtggacgagggagaggaggcgccggagcctctgcccgtgcctgtgccgcagccgcccgccaagcgcgggcgtgggaggcccccgaagccgcggcccgcgggcttccccatcggcgtccccggagccgccgcgtcccccgccgccgcgccgcggcggcgcggccgccctcccaagccgcgtgacccgcacgcgccgcccaagatcccgcgcccgcgcggccggccgcgcaagaacccgctcccggaggggatggccccgcgcccgcgccccggcgtgccggcgtcggccaaggcagcgcgcccgcagttcgccgaggtcggattcgtgtgacgcgaggggctctcacccgccggccggccagggggccgcggcgagctggcgcaagctaacattctgcccctgtttcagctcttgtctgtctgatgtgggtctcgtctcagttcgtgtgttgctgtctaatccggggagggtaggggggcaggaatatgaatggaggcaacttaggcggtgctggtcgccggtgtgttgttgtctgtgtagtctctacgttagtattggtgggtggtggccggagtggtgtggctccggcggtgtatcccgtgtctcctcgccgcgctcgcgcaatccaatgcagttgtctgatcgtttcaaaaaaaaaaaaaaaaaaaaaaaaaaaaaaaaaaaaaaaaaaaaaaaaaaataaaaaaaaaaaaaaaaa

SEQ ID NO: 8960 - protein, 154 aa, Zea mays
  misc_feature: Ceres CLONE ID no. 1475393
  misc_feature: Ceres CDNA ID no. 40041433
  misc_feature (114)..(126): Pfam Name: AT_hook PFAM Desc: AT hook motif
  misc_feature: Homolog of GI Number: 50918237 NR Desc: putative DNA
  misc_feature: Homolog of GI Number: 871498 NR Desc: DNA binding protein
  misc_feature: Homolog of GI Number: 51091572 NR Desc: DNA binding protein PF1
  misc_feature: Homolog of GI Number: 20502966 NR Desc: HMG
  misc_feature: Homolog of GI Number: 15221913 NR Desc: histone H1/H5 family protein
  misc_feature: Homolog of GI Number: 66778899 NR Desc: UvrD/REP helicase
  misc_feature: Homolog of GI Number: 8778700 NR Desc: T1N15.25
  misc_feature: Homolog of GI Number: 66776365 NR Desc: PE
  misc_feature: Homolog of GI Number: 6523547 NR Desc: hydroxyproline
  misc_feature: Homolog of GI Number: 66776103 NR Desc: LigA
MSAAGELVAVAGGKYALPPPPAQPAPESPADDGEDDDDDDDCADEVDEGEEAPEPLPVPVPQPPAKRGRGRPPKPRPAGFPIGVPGAAASPAAAPRRRGRPPKPRDPHAPPKIPRPRGRPRKNPLPEGMAPRPRPGVPASAKAARPQFAEVGFV

SEQ ID NO: 8961 - DNA, 2456 bp, Zea mays
  misc_feature: Ceres CLONE ID no. 1475430
  misc_feature: Ceres CDNA ID no. 40041434
  CDS (208)..(2178): REFERENCED BY SEQ ID NO: 8962
aaccaagccaaccccgcttctattccgcgtggacatatcgacaagacagccagcggcgagaagtcgacgccggcagtctggtgcaacacagcgatccagtaggtaggtcaaaccgaggcggcgacgaagtacgaacagagggcaggacgcagtcagcgcggcgcgcccaggccccgaggccgagcgatctggtgacggcacggcagcatggccgaggcgacgggccacggcggccgcgtcgtcgacctctcgggggccgagatccgcggggacctcgaggatcgcaacccgcccatcttcctccctcgccagcccgccgcgtccccgctcctcgccctcgacatcggagggactctgatcaagctggtgtacacggcgagccgcggcggaggggccgacgggacggacctgcgcttcgccaagttcgagaggcgacgcctacaggagtgcttcaacttcatccgggcggaggggctcctcgccagcaatgctggcggagaaggcgtgaccctgaaggctacaggtggtggagcatataaatttgctgacgatttcctggagaaactaggtgtttgtcttgacaagcttgatgaaatggatagtgtcgtttctggagcaaactttttgttgcagagtattcctggcgcagccttcacacacatgaatggactgaggaatccagtagatgtttccccaaataatttgtttccttaccttcttgtcaatattggctcaggagttagtatactgaaggttactggaaacagaaagtttgaaagggtaactgggacgcacattggtggtggtaccatgtttggtttagcaaaacttttaacaggctgtaagagctatgatgaattcttgcaattaagccagaaaggggacaactttgttcttgatttaattgtcaaggatatatgtggagagcttgtctgccagaagcaagggctttcaacatcaactcttgcttctagctttgggaaagttattacttctaagaagaagctgacagactacaagcctgaagaccttgcatccacattgttgagcgcctttacctataacattgcacaaattgctttccttgttgcatcacttttgggcctccgaagggttttcttcggtggatcatatatacgtggtcacaaaagcacgatggaaaatatttcttatgcaattgatttctggtcacagagccaaatgcaagcagtatttttgcgacatgaagggtatttgggagcacttggtgccctgatgagttatggggatccaagtggtgaaaatcttaccctcgaggagaaggagcctcatcacgaatcagcaccagttgatgggacatcagcggatgaagagagtgatagcaacatatttccttaccttcttgtaaatattggatcaggtgtcagcatgatagaggtaattggtaagggaaagtttgaaagaattataggatcccatctaggcggcggtactatccttggtcttgctaggcttttgactggttgttcaagttacgaagaattcctggagttgagccagaggggcaataatctgtctgtcgatttgactgtgggggacatatatggggaagaaggttatccgaagattggccttccagcatccactactgcggctagctttggaaaagtgaactcaagcaaactttctgagtataaagtagaggatcttgctgcagccttactgaattctttcacatacaacattggacagatagcctactttgtggctaatctttcaggcctgaagagaattttcttccgaggtgcttatgtctgtggtcatgagaagactatggacaagatttctcgttccctaaaatattggtccaaaggtgaagttcagacgacatttctatgccatgaagggttcttgggaacactaggtgcattttggagttatgagaacatggggatcgacagtttggcggcacatgaagtcatcagggaagtcttgcttggtgcaccatacacagggcaattcccatctttacctgtcactcaacaacaggagaatggagaacatggtactctcgaaggggaagtagaaagcttacgacatgacaatgccttgctgaaggctgaggttgagcgattacaaaaggagaatgcgttgctaagagctaagttggtaagatcaggcgagacttcaacattgtgatttgtaacacaataaaaagggcgagccgcagcttgttgtaaattttatctgtttagaaaatggctcaaaatgtaactcatataggaaaactgaattctggaaaagaaatgccaattagcattgttcatctagtgagccttgttgtataattatttatatattctttatacaagagcctatgtatttgctccgttcatgtaatcttgttcctgtaaatgttgtataaatagttaccaaaatccagtaagtatccggctttgcaaaaaaaaaaaaaaaaa

SEQ ID NO: 8962 - protein, 656 aa, Zea mays
  misc_feature: Ceres CLONE ID no. 1475430
  misc_feature: Ceres CDNA ID no. 40041434
  misc_feature (40)..(353): Pfam Name: Fumble PFAM Desc: Fumble
  misc_feature: Homolog of GI Number: 51091158 NR Desc: pantothenate kinase 1
  misc_feature: Homolog of GI Number: 79326098 NR Desc: ATP binding / pantothenate kinase
  misc_feature: Homolog of GI Number: 30689295 NR Desc: eukaryotic pantothenate kinase family protein
  misc_feature: Homolog of GI Number: 38638694 NR Desc: At1g60440
  misc_feature: Homolog of GI Number: 62751101 NR Desc: partially similar to pantothenate kinase family protein
  misc_feature: Homolog of GI Number: 50725789 NR Desc: putative pantothenate kinase 4
  misc_feature: Homolog of GI Number: 60464054 NR Desc: pantothenate kinase
  misc_feature: Homolog of GI Number: 66852525 NR Desc: pantothenate kinase
  misc_feature: Homolog of GI Number: 19113210 NR Desc: putative pantothenate kinase
  misc_feature: Homolog of GI Number: 20043255 NR Desc: TPA: pantothenate kinase 4
MAEATGHGGRVVDLSGAEIRGDLEDRNPPIFLPRQPAASPLLALDIGGTLIKLVYTASRGGGADGTDLRFAKFERRRLQECFNFIRAEGLLASNAGGEGVTLKATGGGAYKFADDFLEKLGVCLDKLDEMDSVVSGANFLLQSIPGAAFTHMNGLRNPVDVSPNNLFPYLLVNIGSGVSILKVTGNRKFERVTGTHIGGGTMFGLAKLLTGCKSYDEFLQLSQKGDNFVLDLIVKDICGELVCQKQGLSTSTLASSFGKVITSKKKLTDYKPEDLASTLLSAFTYNIAQIAFLVASLLGLRRVFFGGSYIRGHKSTMENISYAIDFWSQSQMQAVFLRHEGYLGALGALMSYGDPSGENLTLEEKEPHHESAPVDGTSADEESDSNIFPYLLVNIGSGVSMIEVIGKGKFERIIGSHLGGGTILGLARLLTGCSSYEEFLELSQRGNNLSVDLTVGDIYGEEGYPKIGLPASTTAASFGKVNSSKLSEYKVEDLAAALLNSFTYNIGQIAYFVANLSGLKRIFFRGAYVCGHEKTMDKISRSLKYWSKGEVQTTFLCHEGFLGTLGAFWSYENMGIDSLAAHEVIREVLLGAPYTGQFPSLPVTQQQENGEHGTLEGEVESLRHDNALLKAEVERLQKENALLRAKLVRSGETSTL

SEQ ID NO: 8963 - DNA, 452 bp, Zea mays
  misc_feature: Ceres CLONE ID no. 1475456
  misc_feature: Ceres CDNA ID no. 36704632
  CDS (77)..(286): REFERENCED BY SEQ ID NO: 8964
aaaatttcccaaacgcaaaaccgcatcctctcatcagcttccttccacattcgtctcgagatctcgccccgtcgccatggacgcgatcgacagcgtggtggatcccctccgcgacttcgccaaggacagcgtccgcctcgtcaagcgctgccacaagcccgaccgcaaggagttcaccaaggtggcggcgcggacggcgatcgggttcgtcgtcatgggcttcgtcggcttcttcgttaagctcatcttcatccccatcaacaacatcatcgtcggttccggctaggcttacaggagtacagggcgactagcatgggagtagtgcaatacttttgggagcaatagataacgaggatcctggtctttcgaattgtattgttaatgaaatttttcgttcggttgtgtttctaatgtaatcgttgtactgagtagaccttccgaaaaaaaaaaaa

SEQ ID NO: 8964 - protein, 69 aa, Zea mays; identical to SEQ ID NO: 194
  misc_feature: Ceres CLONE ID no. 1475456
  misc_feature: Ceres CDNA ID no. 36704632
  misc_feature (10)..(66): Pfam Name: SecE PFAM Desc: SecE/Sec61
  misc_feature: Homolog of GI Number: 50252067 NR Desc: transport protein SEC61
  misc_feature: Homolog of GI Number: 51535598 NR Desc: putative transport protein SEC61
  misc_feature: Homolog of GI Number: 72076451 NR Desc:  similar to Protein transport protein SEC61 gamma subunit
  misc_feature: Homolog of GI Number: 38605207 NR Desc: Protein transport protein SEC61 gamma subunit
  misc_feature: Homolog of GI Number: 14701917 NR Desc: SEC61
  misc_feature: Homolog of GI Number: 74096057 NR Desc: sec61 protein
  misc_feature: Homolog of GI Number: 32441716 NR Desc: SEC61 gamma
  misc_feature: Homolog of GI Number: 37654254 NR Desc: LRRGT00019
  misc_feature: Homolog of GI Number: 62663916 NR Desc:  similar to RIKEN cDNA 2310047O13

SEQ ID NO: 8965 - DNA, 460 bp, Zea mays
  misc_feature: Ceres CLONE ID no. 1475497
  CDS (84)..(255): REFERENCED BY SEQ ID NO: 8966
aagatttcccaactttttgttcctcgcgccgccgccgccgccgccgtgacggaaggaagaggaggagcaaggagcacgacgcgatgggccactccaacgtgtggaactcgcaccctaagaactacggccctggctcccgcgtctgccgggtctgcgcgaaccctcacggtctgatcaggaagtacgggctcatgtgctgcaggcagtgcttccgcagcaacgccaaggacattggtttcatcaagtaccgttgaagaggccactgtgctgctgtggagaacttcctacatcaaagaaatgggtccttcattagaaggcctaatttatgcgctttagctttttgttcagaacttgagactcatgtgttaaactcgacttgttaaagttttgatggctactttgtgcttgttggaccagctataatcagaagattgaaattttctcaaaaaaaaaaaaaaaa

SEQ ID NO: 8966 - protein, 56 aa, Zea mays; identical to SEQ ID NO: 454
  misc_feature: Ceres CLONE ID no. 1475497
  misc_feature (3)..(56): Pfam Name: Ribosomal_S14 PFAM Desc: Ribosomal protein S14p/S29e
  misc_feature: Homolog of GI Number: 50252067 NR Desc: transport protein SEC61
  misc_feature: Homolog of GI Number: 51535598 NR Desc: putative transport protein SEC61
  misc_feature: Homolog of GI Number: 72076451 NR Desc:  similar to Protein transport protein SEC61 gamma subunit
  misc_feature: Homolog of GI Number: 38605207 NR Desc: Protein transport protein SEC61 gamma subunit
  misc_feature: Homolog of GI Number: 14701917 NR Desc: SEC61
  misc_feature: Homolog of GI Number: 74096057 NR Desc: sec61 protein
  misc_feature: Homolog of GI Number: 32441716 NR Desc: SEC61 gamma
  misc_feature: Homolog of GI Number: 37654254 NR Desc: LRRGT00019
  misc_feature: Homolog of GI Number: 62663916 NR Desc:  similar to RIKEN cDNA 2310047O13

SEQ ID NO: 8967 - DNA, 2099 bp, Zea mays
  misc_feature: Ceres CLONE ID no. 1475529
  misc_feature: Ceres CDNA ID no. 40351962
  CDS (243)..(1544): REFERENCED BY SEQ ID NO: 8968
agtacccggcttccctcgtcaccggctccggctccggcaccggctcaatacaatcccatcaccgatcattcattccctttgcctactactgctacctccccctccttccatcttcgatagacgaccaaataatggcggtattcgacgtctgaatcctcgtactgatcttatactgcatacagacagacagacccttcttcttccttagttccctatagctagctctagctaggagaccgatcatgagcatctcggtgaacgggcagtcggtggtgccgccggggttccgtttccacccgacggaggaggagctgctgacctactacctgaagaagaaggtggcgtcggagcgcatcgacctggacgtcatccgcgacgtcgacctgaacaagctggagccatgggacatccaagagaagtgccgcatcggttcgggcccccagaacgactggtacttcttcagccacaaggacaagaagtacccgacggggacgcgcaccaaccgcgccaccgccgccgggttctggaaggccaccggccgcgacaaggccatctacgcctcgccgggcgcccgccgcatcggcatgcgcaagacgctcgtcttctacaagggccgcgccccgcacgggcagaagtccgactggatcatgcacgagtaccgcctcgaggcgcccgtcgacgccggcgccggcgccgcgcaccacctgctgctccccgccgccgaacatcctccctactacacctcgccgccgcaggcgccttcttctactactaccgcaacgatccgtggcgcggcgggagaccaagcggcgcaggagcaggaggggtgggtgatctgcagggtgttcaagaagaagaacctcgtgcaccacggccagagcagcggcgtgaagcagcaggcagaaggagacgaccacgcggcgtcccatacggcggcggcggcagcgcacatggacgagagcagcccgagccagtgctcgtcggtgaccgtcatcagcgaccacgtgcacgccaacgttaacgacaagcagcagcaggcgcaggcgtcgttgctgatgatgcacacgcaccactccgccagcagcgacgacgacgcgctggaccacatcctgcagcagtacatgggcggcggcaggcaggcgcccgcgccggacaccaagccggcgctgctggagctggaccatcgtctgcaccaccaccaccttgccgcagcgcctactaatactagggccgccgccggcttctacgggaagttcatgaagctcccgcccctcgagcacgccggcctgccgccaagcccaccaccaggagcgcgcgagtacggcgccgccgccgccgccggctgggacgacgacgacgacgcgctggaccgcctcgccgcctacgaccacctcaacggcctctccaacgacgcgtccaagaacatggccgcgttcttcgacgtcgagcctagcgccgccgccgccgccgtggacggcgacctgtggagcctcgcacggtccgtgtcggcgctgcacgcggacttgaccatgaacaacgtctagctcccgagtcccgaccaacaacaacagggccccgaatccccgatacacatccatggcgtgtgcacgcatgcatgcatgcattgcatgccgcgcgcaccactaaccactcgaccagcatgcatgcatacgtgcgcaccccaccggcgcccgcggccgctagtgcgtcgtgctcccgtagtgcgtgcatgcatggccgccgcacgtacgtattgcacgctcgctcgcgcgtacgtacgtacgtgcgcgaataagctagctagccctaggatcggaaacatatgtatgcatccattgcatggccggatatacatcaggagctgctgccgctggtgtatgtccgccgccgtccaaactccaaagtgagctgagaatctgagatcgatcgatcgagctcgctcgctccaggtgtgtgcagtacgtacgcctgtgtatgtgtaagcagacagcgtggtagtagctagctagtagaacatacttacacacactatatactgcataccgtttgtacctatcatatagattactactgtattattgtaaaaaaaaaaaaaaaaa

SEQ ID NO: 8968 - protein, 433 aa, Zea mays
  misc_feature: Ceres CLONE ID no. 1475529
  misc_feature: Ceres CDNA ID no. 40351962
  misc_feature: Useful for making plants with modulated growth and phenotype characteristics
  misc_feature: The sequence is a functional homolog of  SEQ ID NO 1270 in the  10/374,780 US patent application
  misc_feature: The sequence is a functional homolog of  SEQ ID NO 1423 in the  10/412,699 US patent application
  misc_feature: The sequence is a functional homolog of  SEQ ID NO 898 in the  10/666,642 US patent application
  misc_feature (11)..(142): Pfam Name: NAM PFAM Desc: No apical meristem
MSISVNGQSVVPPGFRFHPTEEELLTYYLKKKVASERIDLDVIRDVDLNKLEPWDIQEKCRIGSGPQNDWYFFSHKDKKYPTGTRTNRATAAGFWKATGRDKAIYASPGARRIGMRKTLVFYKGRAPHGQKSDWIMHEYRLEAPVDAGAGAAHHLLLPAAEHPPYYTSPPQAPSSTTTATIRGAAGDQAAQEQEGWVICRVFKKKNLVHHGQSSGVKQQAEGDDHAASHTAAAAAHMDESSPSQCSSVTVISDHVHANVNDKQQQAQASLLMMHTHHSASSDDDALDHILQQYMGGGRQAPAPDTKPALLELDHRLHHHHLAAAPTNTRAAAGFYGKFMKLPPLEHAGLPPSPPPGAREYGAAAAAGWDDDDDALDRLAAYDHLNGLSNDASKNMAAFFDVEPSAAAAAVDGDLWSLARSVSALHADLTMNNV

SEQ ID NO: 8969 - DNA, 450 bp, Zea mays
  misc_feature: Ceres CLONE ID no. 1475542
  CDS (76)..(259): REFERENCED BY SEQ ID NO: 8970
aaaaaccctagccgccgccagaccattcgtttctcgcgagccatcgcttctgtaattctcaggcatccggaagaaatggccaagtcgaagaaccacacggcgcacaaccagtcgttcaaggcgcacaagaacggcattaagaaacccaagcgccaccgccagacctccaccaaggggatggaccccaagttcctgaggaacctgaggtattctaggaagggcaacaaaaagagtggtgaggctgaagctgaggagtaggaaggaaagcatggctttgtttcctctgtttttagctcagttccacctttaggacctggggttttgctaaagatggaacttaagtggtgttactgtatgatggcaaggaccttttgctgccgaaggttatgttttgaagttcatgctaccttttaaagtacggattaccttgtgcctaaaaaaaaaaaaaaa

SEQ ID NO: 8970 - protein, 60 aa, Zea mays; identical to SEQ ID NO: 594
  misc_feature: Ceres CLONE ID no. 1475542
  misc_feature (4)..(42): Pfam Name: Ribosomal_L29e PFAM Desc: Ribosomal L29e protein family

SEQ ID NO: 8971 - DNA, 497 bp, Zea mays
  misc_feature: Ceres CLONE ID no. 1475549
  CDS (121)..(427): REFERENCED BY SEQ ID NO: 8972
actccgcggtccgtggctccgtgccatcctctcctgggcagcgagcagtggtggccgcgggttcccccgcctcgtcctcccggatccggcgacgaagattaattgaataacttcgataagatgggtcgtggtattagcagtgggggtggtcagagttccttgggctatctctttggcagtgacgaagctccaaaatcatttgagaagcctgcaccagttcaaaagccaactcctccatcctctgcagagagactaaaagatatcgctgctggtattcaaagtagtaaatcaaacaattacaaaagatctgaaggccagaactgtggaaatttccttacggaccgtccgtcgaccaaggtgcaagcagctccaggtggcgactcttcactcggttatctttttagtggcagcaaagatggcaagtgatgtacacctgctgttagtgttcgccatgatcatgggagaaggtttctgcttaagaaaaaaaaaaaaaaaaa

SEQ ID NO: 8972 - protein, 101 aa, Zea mays
  misc_feature: Ceres CLONE ID no. 1475549
MGRGISSGGGQSSLGYLFGSDEAPKSFEKPAPVQKPTPPSSAERLKDIAAGIQSSKSNNYKRSEGQNCGNFLTDRPSTKVQAAPGGDSSLGYLFSGSKDGK

SEQ ID NO: 8973 - DNA, 443 bp, Zea mays
  misc_feature: Ceres CLONE ID no. 1475553
  CDS (59)..(215): REFERENCED BY SEQ ID NO: 8974
aaggcttctagggttttcgcgccgccgccgccgccgcttcgtcgtctccgccgcagcgatgccgtcgcacaagaccttccggatcaagaagaagctggcgaagaagatgcgccagaaccgccccatcccctactggatccgcatgcgcacggacaacaccatcaggtacaacgccaagcgcaggcactggcgccgcaccaagctcggcttctgagcgcgcggatcggccggctcctgcgtcggaattctagggtctctacctttcctttggttttatcgatgtctcttgtgtttctgtaagctagcaaacagttccagaaagcttttgttaagattttgatgacgctaagaggattgatgctactatgctgtactcaggattccatgctgcattgcgatgctaaattaaagaacctctgttaccttaaaaaaaaaaaaaaaaa

SEQ ID NO: 8974 - protein, 51 aa, Zea mays; identical to SEQ ID NO: 2406
  misc_feature: Ceres CLONE ID no. 1475553
  misc_feature (9)..(51): Pfam Name: Ribosomal_L39 PFAM Desc: Ribosomal L39 protein

SEQ ID NO: 8975 - DNA, 462 bp, Zea mays
  misc_feature: Ceres CLONE ID no. 1475581
  CDS (92)..(284): REFERENCED BY SEQ ID NO: 8976
aagtccatctggcatccaagaagctcaaagcaagcagatctaagctccaggcagcgtcgcgacagagtgagtgagtagcacgacaacaacaatggcttccctgaaggccgcgaagcccagcggagttgcggcgcagggcaaggagccggcgcccaagctcagcgagacggcgacgaagccgtcagccgcgaagagcggcggcgttaagaaggctgagcagaagccccgggaaaccaaaaggaaggtgaagagcagcaaacaggcggcggcggccaaaaagtgacgtacagtacgtgtggagtgtaatggagcttccatgcatgagtgaatccatgccatgttatgaatctagtccttcctttcttgtatcttccatgtgacgcggcgtgtgcgtcccctcatgtgtgatgatgccagatgaatactacaaataagacgttgttgtaaaaaaaaaaaaaaaaa

SEQ ID NO: 8976 - protein, 63 aa, Glycine max; identical to SEQ ID NO: 8892
  misc_feature: Ceres CLONE ID no. 1475581

SEQ ID NO: 8977 - DNA, 1150 bp, Glycine max
  misc_feature: Ceres CLONE ID no. 1475640
  misc_feature: Ceres CDNA ID no. 25446790
  CDS (170)..(979): REFERENCED BY SEQ ID NO: 8978
atatgttgtctctcttcttctgtcgtcttcttccctctcactctttcaactttcaagtaacaccacactcttcttttcttactcttactcttatgcttttcaccttcttcacttcactaccctctacccttttctgagacacaaacactcttcctgttccacgcttccaatggcttcatgtagtatagggaccccaaatattaaagcattgaacttgcactttggtggaaaaaaagttggcctttcacaacaatttggtacaagaagctggatcagtaagcagtcactgcagtacactagtttggttatgtcacgacagaaagttaggttttcaccgacagagatccaatttgttacaaggtcagaaggttctgaagaggttaaatcttcaggtttgacaagtgagcttattcctaatcttattgaggtggagttcctgctcacaaaattatgcgacacaagttcaattggggagttagatttaaaacttgctgggtttcacctgcatgtagtgagggatttgactgaaaaaactaaaactctacctcctccaattcctgcttctgaaagtataattaatgtcacagaaacacctaaaacaaatggatcagtttctacaacttcgttggctgtctcgaagccagtagacccaataccttcttctgggtccatccagagattcctaaacaaagctgctgatgaaggcttggtaataattcagtctccaaaggtgggtttctttaggagatcacggacgataaaggggaggcgtgctccaccatcatgtaaagagaaacaaaatgttgaggaggggcaagtgatttgttatattgaacagcttggtggtgagctgccaattgagtctgatgtgtcgggagaggtcatcaagatcctacaaaaggacggcgatcctgttggatatggtgacgcacttgttgcaatattgccatcatttcctggaataaagaagcttcaatagcctcgaatttttggaaaacagtcattcttgccagccatgctgtaattgagtcatacatatatttcattacttttgagttcatgtggtccatagcttatttgttttgcatatcaaagacaaagggtaaaatcaaactactttgttttcccaaaaaaaaaaaaaaaaaaaaaa

SEQ ID NO: 8978 - protein, 269 aa, Glycine max
  misc_feature: Ceres CLONE ID no. 1475640
  misc_feature: Ceres CDNA ID no. 25446790
  misc_feature (181)..(258): Pfam Name: Biotin_lipoyl PFAM Desc: Biotin
  misc_feature: Homolog of GI Number: 23306376 NR Desc: putative acetyl
  misc_feature: Homolog of GI Number: 30683724 NR Desc: biotin carboxyl carrier protein of acetyl
  misc_feature: Homolog of GI Number: 15215875 NR Desc: AT3g56130/F18O21_90
  misc_feature: Homolog of GI Number: 42572701 NR Desc: biotin/lipoyl attachment domain
  misc_feature: Homolog of GI Number: 79315297 NR Desc: binding
  misc_feature: Homolog of GI Number: 29169309 NR Desc: biotin carboxylase carrier protein
  misc_feature: Homolog of GI Number: 46199065 NR Desc: biotin carboxyl carrier protein of acetyl
  misc_feature: Homolog of GI Number: 44190488 NR Desc: biotin carboxyl carrier protein
  misc_feature: Homolog of GI Number: 12006187 NR Desc: biotin carboxyl carrier protein subunit
  misc_feature: Homolog of GI Number: 12006165 NR Desc: biotin carboxyl carrier protein subunit precursor
MASCSIGTPNIKALNLHFGGKKVGLSQQFGTRSWISKQSLQYTSLVMSRQKVRFSPTEIQFVTRSEGSEEVKSSGLTSELIPNLIEVEFLLTKLCDTSSIGELDLKLAGFHLHVVRDLTEKTKTLPPPIPASESIINVTETPKTNGSVSTTSLAVSKPVDPIPSSGSIQRFLNKAADEGLVIIQSPKVGFFRRSRTIKGRRAPPSCKEKQNVEEGQVICYIEQLGGELPIESDVSGEVIKILQKDGDPVGYGDALVAILPSFPGIKKLQ

SEQ ID NO: 8979 - DNA, 1047 bp, Zea mays
  misc_feature: Ceres CLONE ID no. 1475646
  misc_feature: Ceres CDNA ID no. 25402783
  CDS (71)..(868): REFERENCED BY SEQ ID NO: 8980
agtgccacctgctgctgcagaggctctctctctctttctctccagcttcgcgccgctgccgcgacctaccatggagctctgcctcgccgcgcgcgccgggacgacggcggccgcgtgccggaggagggcaccgacgactacaggcgtgccgaagaagaagaggcacggcggcggcaccgtgcgcgtacggtgcgcggcgacggcgcccatgggggagaagacggagtaccgggacggcccgctggagcgcgcgttcatggggctgttcgcgcgcaagatggagaagtacgcggcgaagaagccggcggcgcaggcgaaggaggagagggcggtgtgggagtgggactacgagagcttcgtggacgtgtcgcggcgggtgatgctggggcgcacgcgcgcgcagcagcagcaggcggtgcgcgaggtgctgctgtccatgctgccccccggcgcgccggcgcagttccggcggctgttcccgccgacgcggtgggcctgcgagttcaacgcggcgctgaccgtgcccttcttccgctggctcgtcggcccctcggaggtggtggaggtggaggtcggcggcgtccggcagcgcagcggggtgcgcatcgagaagtgccggtacctggagagcagcggctgcgtggggatgtgcgtcaacatgtgcaaggtccccacgcaggacttcttcaccaacgagttcgggctccccctcaccatgaacccaaatttcgaagacatgagctgcgagatgatatacggccaggtgccgcctccgttggaagaggacccggcgtcgaagcaagcttgctacccgagcctctgttccatgtcgacgccatctgccccggcctgtccgaagcttcagtaggtccatacatgcatgtgcagagtttgccggccggacttgggatggaaaaagtatcattagtatttttttatacagaaatgtagcttgtaaactattagtaaagttacatacaatttgttctgagccaggacagagcactctgtaataaagaatacttttctcaaaaaaaaaaaaaaaaa

SEQ ID NO: 8980 - protein, 265 aa, Zea mays
  misc_feature: Ceres CLONE ID no. 1475646
  misc_feature: Ceres CDNA ID no. 25402783
  misc_feature: Homolog of GI Number: 66780099 NR Desc: PE
  misc_feature: Homolog of GI Number: 66778052 NR Desc: Acetylglutamate kinase
  misc_feature: Homolog of GI Number: 66776896 NR Desc: LigA
  misc_feature: Homolog of GI Number: 7407131 NR Desc: SanE
  misc_feature: Homolog of GI Number: 66778277 NR Desc: Major facilitator superfamily
  misc_feature: Homolog of GI Number: 68125326 NR Desc: kinesin K39
  misc_feature: Homolog of GI Number: 66776103 NR Desc: LigA
  misc_feature: Homolog of GI Number: 66776365 NR Desc: PE
  misc_feature: Homolog of GI Number: 66778899 NR Desc: UvrD/REP helicase
  misc_feature: Homolog of GI Number: 5821145 NR Desc: RNA binding protein
MELCLAARAGTTAAACRRRAPTTTGVPKKKRHGGGTVRVRCAATAPMGEKTEYRDGPLERAFMGLFARKMEKYAAKKPAAQAKEERAVWEWDYESFVDVSRRVMLGRTRAQQQQAVREVLLSMLPPGAPAQFRRLFPPTRWACEFNAALTVPFFRWLVGPSEVVEVEVGGVRQRSGVRIEKCRYLESSGCVGMCVNMCKVPTQDFFTNEFGLPLTMNPNFEDMSCEMIYGQVPPPLEEDPASKQACYPSLCSMSTPSAPACPKLQ

SEQ ID NO: 8981 - DNA, 699 bp, Zea mays
  misc_feature: Ceres CLONE ID no. 1475674
  misc_feature: Ceres CDNA ID no. 25445755
  CDS (52)..(408): REFERENCED BY SEQ ID NO: 8982
agtccaatcgaatcaaagagagaaaaaaaatcctaaaccctagcatctcccatggacgacagcgatggcggactgagcttcgatttcgagggcggcctcgactctgccccagcttctgggggcgggggccccgtgccgtcctccaccgaccccggcgcgggtgtcgggggaggcggcgacgggctgggtatgcacgggcgcggccgaggtcgcgggagctaccgccaaacggtgtgccggcactggcttcgcggcctctgcatgaagggcgaggcctgcggattcctgcaccagttcgacaaggcccgcatgcccgtctgccgcttcttccgcgacttcggcgagtgccgcgagcccgactgcgcgtacaagcactcgtacgacgacgtcaaggagtgcaacatgtgagatctctgatgccacacgaaagtgttgatgtaaacgtctgggtgggaaagacggctttttataagcttggtggcggctgtggtcgaagaaatttgctaacttgtccgaaaaatttctaactaagatggcaaattcgtggtgattgattcgagtttgggtttgagattatagtgatcatagtctctggtcctctaggtcggtcttagttagccctcggttgctacatgtggtttgattcaatataataaacttggctacttcgataatttcaccgaaaaaaaaaaaaaaaaa

SEQ ID NO: 8982 - protein, 118 aa, Zea mays
  misc_feature: Ceres CLONE ID no. 1475674
  misc_feature: Ceres CDNA ID no. 25445755
  misc_feature (57)..(82): Pfam Name: zf PFAM Desc: Zinc finger C
  misc_feature: Homolog of GI Number: 52076911 NR Desc: zinc finger
  misc_feature: Homolog of GI Number: 24415582 NR Desc: putative cleavage and polyadenylation specificity factor 30 kDa subunit
  misc_feature: Homolog of GI Number: 79356321 NR Desc: nucleic acid binding
  misc_feature: Homolog of GI Number: 15220754 NR Desc: zinc finger
  misc_feature: Homolog of GI Number: 62857541 NR Desc: CPSF4
  misc_feature: Homolog of GI Number: 19075052 NR Desc: ZINC FINGER PROTEIN
  misc_feature: Homolog of GI Number: 13111867 NR Desc: CPSF4 protein
  misc_feature: Homolog of GI Number: 29792109 NR Desc: CPSF4 protein
  misc_feature: Homolog of GI Number: 34784575 NR Desc: Cpsf4 protein
  misc_feature: Homolog of GI Number: 51513396 NR Desc: Cpsf4
MDDSDGGLSFDFEGGLDSAPASGGGGPVPSSTDPGAGVGGGGDGLGMHGRGRGRGSYRQTVCRHWLRGLCMKGEACGFLHQFDKARMPVCRFFRDFGECREPDCAYKHSYDDVKECNM

SEQ ID NO: 8983 - DNA, 1142 bp, Glycine max
  misc_feature: Ceres CLONE ID no. 1476340
  misc_feature: Ceres CDNA ID no. 29191697
  CDS (108)..(974): REFERENCED BY SEQ ID NO: 8984
acacttctcaattctaaaaccctaagcttcgccgacggaatccgatcgtgatccttcctgaacctaacttcgtcgtcgatttagagcttagctaagctcttaaagaaatgagtttcaacaaagtgcccaacgtccctggatctcctgcgctctctgcgcttcttaaggtcagcgttattggtgggcttggcctctatgccattaccaatagcctctacaatgtcgagggtggacaccgtgctgtcatgttcaaccgtttaactggtatcaaggaaaaggtgtacccggaaggaacacattttatgttgccatggtttgagaggccaatcatctatgacgtccgtgcacgaccctaccttgttgagagcaccaccggtagtcatgaccttcagatggtgaaaattggactaagggttctcactcgtcccatgggtgaccgtttgcctcagatttaccgaaccctgggcgagaattacagtgaaagggttcttccttccatcatccatgagacccttaaggctgtggtggctcagtacaatgcaagccagctcatcactcagagagaagctgtgagcagagagatacgcaagattctaacggagagagcttctaacttcgacattgctcttgatgatgtctccatcacaaccctcacattcggcaaagagttcaccgctgcaatcgaggcaaaacaagtcgctgctcaggaagctgaacgtgctaagttcattgtggagaaggccgagcaagacaagagaagtgcagttatccgtgcggagggagaagctaaaagtgctcaacttatcggacaagctattgcaaacaatcaggcattcataactctgaggaagattgaagcggcgagagagattgctcagaccattgcacaatcagctaacaaggtgtacctaagctccaatgatctgttgcttaaccttcaagggatgaacttggagcctagccctaagaagtaaaagaaggacataataagttccattcctccaaaaacgtagtttgtgttttgaccagactattttacccattactatgctattcagattttatttggcaacgttgtctacctgttgagagttttttattggggagaaaaaataagattgagtgcaaaaaaaaaaaaaaaa

SEQ ID NO: 8984 - protein, 288 aa, Glycine max
  misc_feature: Ceres CLONE ID no. 1476340
  misc_feature: Ceres CDNA ID no. 29191697
  misc_feature (36)..(227): Pfam Name: Band_7 PFAM Desc: SPFH domain / Band 7 family
  misc_feature: Homolog of GI Number: 17104775 NR Desc: putative prohibitin 2 protein
  misc_feature: Homolog of GI Number: 12751303 NR Desc: prohibitin 1
  misc_feature: Homolog of GI Number: 21593626 NR Desc: prohibitin
  misc_feature: Homolog of GI Number: 23198006 NR Desc: prohibitin
  misc_feature: Homolog of GI Number: 71370259 NR Desc: PHB2
  misc_feature: Homolog of GI Number: 21593956 NR Desc: putative prohibitin
  misc_feature: Homolog of GI Number: 9759515 NR Desc: prohibitin
  misc_feature: Homolog of GI Number: 7716456 NR Desc: prohibitin
  misc_feature: Homolog of GI Number: 7716462 NR Desc: prohibitin
  misc_feature: Useful for delaying flowering time
  misc_feature: Useful for increasing chlorophyll and photosynthetic capacity
  misc_feature: Useful for making ornamental plants with modified flowers
  misc_feature: Useful for making ornamental plants with modified leaves
  misc_feature: Useful for making shorter plants
  misc_feature: Useful for making smaller plants
  misc_feature: Useful for sterility
MSFNKVPNVPGSPALSALLKVSVIGGLGLYAITNSLYNVEGGHRAVMFNRLTGIKEKVYPEGTHFMLPWFERPIIYDVRARPYLVESTTGSHDLQMVKIGLRVLTRPMGDRLPQIYRTLGENYSERVLPSIIHETLKAVVAQYNASQLITQREAVSREIRKILTERASNFDIALDDVSITTLTFGKEFTAAIEAKQVAAQEAERAKFIVEKAEQDKRSAVIRAEGEAKSAQLIGQAIANNQAFITLRKIEAAREIAQTIAQSANKVYLSSNDLLLNLQGMNLEPSPKK

SEQ ID NO: 8985 - DNA, 2109 bp, Zea mays
  misc_feature: Ceres CLONE ID no. 1476552
  misc_feature: Ceres CDNA ID no. 29191344
  CDS (276)..(1790): REFERENCED BY SEQ ID NO: 8986
agttttttcccgtctccgctttctttatcctgcgggcggagcgggtagggtggggcggtcgttgctctcggatcaagagaaagggaggaaaaaaaaacagcgctttctttctgtggccggcggttcgcccgtcgctcactggctgaagcggctgcacccgcgccctcttgctgtgtggccactggccaagcgggacacggaattcgagctccgtttggggattccggatcacttcgaggctaaagggattctgatcatcacttaagctcaagatcatgagttggttaaacaaaatttttaagggttcagtaaacagagtttcaaggggtcactatgatggagactggcatgaaggtcattcatctgatcacaccagagatacttacgatgacagtgataatgaagatatagatcgtgccattgcattatcgctagctgaggaagatcagaataagggaaagtcggtggctattgatactgactataatctggaggaagatgaacagcttgcacgggctctgcaggagagcctgaatgcagagtctcctcctcgacagaatgttcctattgaggatgtgccagtgcctcaatggaatattcctgttgagcaggtgcctcctcgacagtatgttccagcaaatgaaccaaccccacatgtttacccacggggtggatccaggatttgtgctggatgccaaaacccaattggccatggacgtttccttagttgtatggattcagtttggcatcctcaatgcttcagatgttttgcttgcaacaaacccatatcagagtatgagtttgctatgcatgatgatcagccataccacaaatcctgctacaaagagttttttcatccgaaatgcgatgtttgcaacaactttattccaacaaatagagatggcctcattgaataccgagcacatcctttctggatgcagaagtactgtccttcccatgaagatgatggcactcctcggtgctgcagttgtgaacgaatggagccaagggagatcaagtacataacattagatgatgggaggaaactctgcttggaatgtctcaattctgcagtaatggattctccagaatgtcaacatctttacatggatattcaggaattttttgaaggtttgaacatgaaagtagaacagcaaattccattacttttggttgagaggcaggctctgaatgaagccttggaagccgagaaaaatgggcaccacctaccggaaaccagaggtctatgcctttctgaggagcaagttgttagaacgatcttaaaaagaccacagattggaccaggaaacagaatcttagatatgattataggaccatacaagctgtctcggcggtgtgaagtgactgcaatccttatattatatggtctgccaagattacaaactggttccattcttgcccatgagatgatgcatgcatatcttcgtctcaaaggattccgaaaccttagtattgaggttgaagaaggcatctgccaagttctatcccacctgtggttagagtcggaaatcatcgctggttctagtagcaacgttgcatccagttcagaagcatcatcatcttcgtcatcctcagctcctacctcttcaaagaagggtgcgaagaccgaattcgagaagaagcttggggcattcatcaagcaccagatcgaaacggattcttccgaggcatacggaggtggttttagagctggctatccggctgttgagcgctatggcttgaaaagaacccttgatcatatgaagttgacagggtctttcccatattaaagcaacagaagtaaaggagggggctttcttccagttgtgaggatacactccacattggaggttttggtttgggttatacaatactgatatgcataccaaacgaggggaattgtctgtaaatcaggagaagaaccctctgctgcgcggaaacttattgcaaactgtctttttataggaaaacgatacatgcaagttttcagacagggaacttgagaggatcatatgtaactttttgggcacttgtttttgactcctctggttatcaaaaacaaggcaacataataagattgaaatttatcttcaaaaaaaaaaaaaaaaa

SEQ ID NO: 8986 - protein, 504 aa, Zea mays
  misc_feature: Ceres CLONE ID no. 1476552
  misc_feature: Ceres CDNA ID no. 29191344
  misc_feature (137)..(193): Pfam Name: LIM PFAM Desc: LIM domain
  misc_feature (39)..(56): Pfam Name: UIM PFAM Desc: Ubiquitin interaction motif
  misc_feature: Homolog of GI Number: 55771369 NR Desc: LIM domain containing protein
  misc_feature: Homolog of GI Number: 77556401 NR Desc: LIM domain
  misc_feature: Homolog of GI Number: 22329212 NR Desc: LIM domain
  misc_feature: Homolog of GI Number: 42573201 NR Desc: LIM domain
  misc_feature: Homolog of GI Number: 50901626 NR Desc: putative  LIM domain containing protein
  misc_feature: Homolog of GI Number: 57164483 NR Desc: putative  LIM domain containing protein
  misc_feature: Homolog of GI Number: 57164484 NR Desc: putative  LIM domain containing protein
  misc_feature: Homolog of GI Number: 15221983 NR Desc: ubiquitin interaction motif
  misc_feature: Homolog of GI Number: 42569780 NR Desc: LIM domain
  misc_feature: Homolog of GI Number: 22326876 NR Desc: LIM domain
MSWLNKIFKGSVNRVSRGHYDGDWHEGHSSDHTRDTYDDSDNEDIDRAIALSLAEEDQNKGKSVAIDTDYNLEEDEQLARALQESLNAESPPRQNVPIEDVPVPQWNIPVEQVPPRQYVPANEPTPHVYPRGGSRICAGCQNPIGHGRFLSCMDSVWHPQCFRCFACNKPISEYEFAMHDDQPYHKSCYKEFFHPKCDVCNNFIPTNRDGLIEYRAHPFWMQKYCPSHEDDGTPRCCSCERMEPREIKYITLDDGRKLCLECLNSAVMDSPECQHLYMDIQEFFEGLNMKVEQQIPLLLVERQALNEALEAEKNGHHLPETRGLCLSEEQVVRTILKRPQIGPGNRILDMIIGPYKLSRRCEVTAILILYGLPRLQTGSILAHEMMHAYLRLKGFRNLSIEVEEGICQVLSHLWLESEIIAGSSSNVASSSEASSSSSSSAPTSSKKGAKTEFEKKLGAFIKHQIETDSSEAYGGGFRAGYPAVERYGLKRTLDHMKLTGSFPY

SEQ ID NO: 8987 - DNA, 1169 bp, Zea mays
  misc_feature: Ceres CLONE ID no. 1476602
  misc_feature: Ceres CDNA ID no. 36592312
  CDS (315)..(986): REFERENCED BY SEQ ID NO: 8988
atacctgccactgccaggtctagtgcgtgcatcgccttcttgacctgaagctgcagagcaccaccaggtaggctgtagtccatggtgagcgtcgaggtcgaggctggcgtgtagtcgtggctctgttacccaggacaaacaagtaggacgaggccctttgtcaccggctgaaccggacccacctatcagtgaacaggcggacaagacaggagtaggagaagagcagcctcaaaaacaggctcacgcacccgcgacgccactgaccaaccagccaaaacacgcccgcgcgcctgtttgttcggccggaggacgccatggccatggaggagggatcaggagcggtggagaaagggccggccgtgggcacggtggctgacgcctccgccagcgtcatcggcgaaggcgccgtgaaggaggaggccgggggcagacggcagccgtcggccggctacgcggccgtcgtgattggcggcaccttcgaccgcctacaccagggccaccatctcttcctgaaggcggcagcggagctggcgagggagaggatcgtggtcggcgtctgcgacggcccgatgctcgccaagaaacagtacgccgacctgatacaaccgatcgagaagcggatgcagaacgccaaggattatattaagtccataaagcccgaccttgatgttcatgtggagcccatcgtcgaccctttcggcccatccatcgttgacccaggccttgaggccatcattgtcagcaaggagacgttgccgggagggcacgctgtcaacaggaagagagcagagagagggctcactcagctgcagatcgaggtgatagagctggtgccagaggagtcgacgggggacaagataagttccacggcattcagaaagatggaagccgagagggcgctgcagcaacagaataaacaagaagatacagcagtaggcactccggttggggtgcaaaacatagcggttcagtcacatggagcatagtacatgaaccgaagttctgttgcctgtacctttttttaaaaaagtacatgaaactttgaggtctctacttccatcacatacaaagggacaatgcttctttgcccaaacatggactgatcatcaatacagaaaagttccagtttcttacataatcaaaaaaaaaaaaaaaaaaaaaaaaaaaaa

SEQ ID NO: 8988 - protein, 223 aa, Zea mays
  misc_feature: Ceres CLONE ID no. 1476602
  misc_feature: Ceres CDNA ID no. 36592312
  misc_feature (50)..(190): Pfam Name: CTP_transf_2 PFAM Desc: Cytidylyltransferase
  misc_feature: Homolog of GI Number: 50934647 NR Desc: bifunctional phosphopantetheine adenylyl transferase dephospho CoA kinase
  misc_feature: Homolog of GI Number: 72040606 NR Desc:  similar to CoA synthase
  misc_feature: Homolog of GI Number: 47523266 NR Desc: bifunctional phosphopantetheine adenylyl transferase / dephospho CoA kinase
  misc_feature: Homolog of GI Number: 55238270 NR Desc: ENSANGP00000014315
  misc_feature: Homolog of GI Number: 27229125 NR Desc: CoA synthase
  misc_feature: Homolog of GI Number: 52219000 NR Desc: zgc:92337
  misc_feature: Homolog of GI Number: 54035300 NR Desc: Alpha
  misc_feature: Homolog of GI Number: 20465248 NR Desc: bifunctional phosphopantetheine adenylyl transferase / dephospho CoA kinase
  misc_feature: Homolog of GI Number: 46048207 NR Desc: bifunctional phosphopantetheine adenylyl transferase/dephospho CoA kinase
MAMEEGSGAVEKGPAVGTVADASASVIGEGAVKEEAGGRRQPSAGYAAVVIGGTFDRLHQGHHLFLKAAAELARERIVVGVCDGPMLAKKQYADLIQPIEKRMQNAKDYIKSIKPDLDVHVEPIVDPFGPSIVDPGLEAIIVSKETLPGGHAVNRKRAERGLTQLQIEVIELVPEESTGDKISSTAFRKMEAERALQQQNKQEDTAVGTPVGVQNIAVQSHGA

SEQ ID NO: 8989 - DNA, 465 bp, Zea mays
  misc_feature: Ceres CLONE ID no. 1476623
  CDS (76)..(286): REFERENCED BY SEQ ID NO: 8990
atttccatcctgtcgtgggatcccagccaccgccgctagaagaagagctcggcgattcccaggtcccgcgagaatatgccgaagcagatccatgagattaaggacttcctcctcaccgcgaggaggaaggatgcccgctcagtgaagatcaagaggagtaaggatgttgtcaagttcaaggtgcgctgctccaagtacttgtacacgctctgcgtcttcgatgctgagaaggcaaacaagttgaagcaatctcttcccccaggtttgaccgtcgaggaggtctgattggatacatggcaacgccgagttgaactacccaagcttctttatcagtagcagagcatgctactctatgtacttttggaacctaagctattagacctgtcagtgttggatgtctggatcttgcatttttggagaaataccaatttacctcgttcaaggatgcaaaaaaaaaaaaaaaaa

SEQ ID NO: 8990 - protein, 69 aa, Zea mays; identical to SEQ ID NO: 56
  misc_feature: Ceres CLONE ID no. 1476623
  misc_feature (2)..(69): Pfam Name: Ribosomal_L38e PFAM Desc: Ribosomal L38e protein family
  misc_feature: Homolog of GI Number: 50934647 NR Desc: bifunctional phosphopantetheine adenylyl transferase dephospho CoA kinase
  misc_feature: Homolog of GI Number: 72040606 NR Desc:  similar to CoA synthase
  misc_feature: Homolog of GI Number: 47523266 NR Desc: bifunctional phosphopantetheine adenylyl transferase / dephospho CoA kinase
  misc_feature: Homolog of GI Number: 55238270 NR Desc: ENSANGP00000014315
  misc_feature: Homolog of GI Number: 27229125 NR Desc: CoA synthase
  misc_feature: Homolog of GI Number: 52219000 NR Desc: zgc:92337
  misc_feature: Homolog of GI Number: 54035300 NR Desc: Alpha
  misc_feature: Homolog of GI Number: 20465248 NR Desc: bifunctional phosphopantetheine adenylyl transferase / dephospho CoA kinase
  misc_feature: Homolog of GI Number: 46048207 NR Desc: bifunctional phosphopantetheine adenylyl transferase/dephospho CoA kinase

SEQ ID NO: 8991 - DNA, 438 bp, Zea mays
  misc_feature: Ceres CLONE ID no. 1476648
  misc_feature: Ceres CDNA ID no. 25446138
  CDS (52)..(246): REFERENCED BY SEQ ID NO: 8992
aactttcgtttctgccactgactgtttgagaacgagcagtaccaggacaaaatgaggcagtcagatgaacggctcctggccctggtcaaggcggccatggacgtggtcgtggccgtcgggcttcttcagctggcgcccaagaaggtcactccgagagtgacaggagcctttgggttcgtcacctcgcttatctcctgctatcagcaacttccttcccgcgctcctgttgccaaagtcaaagtttgagaggtgtcgccgtcctagtaaaaaaaaaagaggcgacgctggaaatcgatctctgcttcaacaatggatcgtaatataattttattatgcgaatataaggcaggctagctatgtattttttttattaaaaaaatagtacaacaaaatagaacaccagtgattgcacgtaaaaaagaaaaaaaaaaaaaaaaa

SEQ ID NO: 8992 - protein, 64 aa, Zea mays
  misc_feature: Ceres CLONE ID no. 1476648
  misc_feature: Ceres CDNA ID no. 25446138
  misc_feature (1)..(53): Pfam Name: PEX11 PFAM Desc: Peroxisomal biogenesis factor 11
  misc_feature: Homolog of GI Number: 56368447 NR Desc: putative peroxisomal membrane protein PEX11
  misc_feature: Homolog of GI Number: 16323256 NR Desc: At2g45740/F4I18.28
  misc_feature: Homolog of GI Number: 55775296 NR Desc: peroxisomal biogenesis factor 11 protein
  misc_feature: Homolog of GI Number: 56368449 NR Desc: peroxisomal membrane protein PEX11
MRQSDERLLALVKAAMDVVVAVGLLQLAPKKVTPRVTGAFGFVTSLISCYQQLPSRAPVAKVKV

SEQ ID NO: 8993 - DNA, 422 bp, Zea mays
  misc_feature: Ceres CLONE ID no. 1476683
  CDS (95)..(245): REFERENCED BY SEQ ID NO: 8994
aatccatccagactgcgatcagagcagcgagagagagagagagagagagagcaactgagcaagcaagcaaggaagcaagcaagcaatcggagcgatggagcacgggtacccctgcaacggctgcggcaaggagaagcggccgccgctcaagaggggccagctcaagctgcagatcgccaggaccctgctcggcagcctcgcggcgccggtcgccaagaaccgggaccgtgccttcgggagataggccgcccgtgccgtggtagcaggagtagagtagtagctagctgaggacatgcgtcggtcgagtggcggcggactgtgccgtctgtacgaactgatgagcttttgttcttcctcctcttcttcttcttttaaaaaagagcgtgttggcgtcagcttttgctcaaaaaaaaaaaaaaaaa

SEQ ID NO: 8994 - protein, 49 aa, Zea mays
  misc_feature: Ceres CLONE ID no. 1476683
  misc_feature: Homolog of GI Number: 56368447 NR Desc: putative peroxisomal membrane protein PEX11
  misc_feature: Homolog of GI Number: 16323256 NR Desc: At2g45740/F4I18.28
  misc_feature: Homolog of GI Number: 55775296 NR Desc: peroxisomal biogenesis factor 11 protein
  misc_feature: Homolog of GI Number: 56368449 NR Desc: peroxisomal membrane protein PEX11
MEHGYPCNGCGKEKRPPLKRGQLKLQIARTLLGSLAAPVAKNRDRAFGR

SEQ ID NO: 8995 - DNA, 1352 bp, Zea mays
  misc_feature: Ceres CLONE ID no. 1476761
  misc_feature: Ceres CDNA ID no. 40041435
  CDS (167)..(868): REFERENCED BY SEQ ID NO: 8996
aagggaagggaagccaagaaaaccacgccaccgccaaaagcagctgcagataccactgctgctgcgcctgcctgcacagcccccagcaggagagagagagagagagaaagagggggaggcggcagcggcagccagcaaaggcggcggcttgcggcttgagctgttgatgatgcagggcgagtaccggtcttccatcgaggagtcggctgcggccgctgttgccgcagccgcagccatggctcctctggcggccgcggcggtgaagatggaggcggagcaggcggcgatggcggcgccgcagctgggggcggcgcaccagcagacgcagccgcggcggcagtaccgcggcgtgcgcatgcgcaagtggggcaagtgggtggcggagatccgggagccgcacaagcgcacgcgcatctggctggggtcctacgccacggccgtggcggcggcgcgcgcctacgacacggccgtgttctacctgcgcgggcggtcggcgcggctcaacttccccgaggagatcccctcgttcgggctggcggatggcgtggacgtgggggagcacgcgcgcgacccggccgccgccgccgccggcggcggcggcggctgcacgctgtccgcggcgtccatacggaagaaggccatcgaggtggggtcccgcgtggacgcgctccagaccggcatggtggtcccgccgccgcaccaccgcgagcgccataggcaccacaaccacctgccgcagctgcgggtgcacgcggaggagcagcaggaggaagaggagcagaagccgcagcggcctgcgtggagcgggcgcgtcaagaacccggatctgaaccgtgcgccgagccccgagagctccgacgccgagtgacaagcgagcgagagagctgagcagcaggcaccgcaaggcgaggttcaacgacgacgtccgttatcggttattcccaatcccacgacgcagcatgccgttgtcgtctccgtccgaccgtccccacgtacgtacgtacgtacacgacgatccagctgacccggccgcctgcctatcctatcctatccgtcctcgacgaccggatggtcggcgggcgggagggcggtgcggcgagggttttggccttttgggtacgttgtggataagcacgaaggcagcaggccagcagcagcaggggcggcgtggcgggcgggcaggcaggggcagggcaggcggagacggagggaggcggccacaagcggcggtctttccaaaatgtcaaaaaggacagctgtaacagcgataagaaaaacaagtcatcatcaccctctctcaaaaaaaaaaaaaaaaaaaaaaaaaaaaaaaaaaaagaaaaaaaaaaaaaaaa

SEQ ID NO: 8996 - protein, 232 aa, Zea mays
  misc_feature: Ceres CLONE ID no. 1476761
  misc_feature: Ceres CDNA ID no. 40041435
  misc_feature: Useful for making plants with modulated growth and phenotype characteristics
  misc_feature: The sequence is a functional homolog of  SEQ ID NO 198 in the  11/375,241 US patent application
  misc_feature: The sequence is a functional homolog of  SEQ ID NO 488 in the  10/374,780 US patent application
  misc_feature: The sequence is a functional homolog of  SEQ ID NO 490 in the  10/374,780 US patent application
  misc_feature: The sequence is a functional homolog of  SEQ ID NO 681 in the  10/666,642 US patent application
  misc_feature: The sequence is a functional homolog of  SEQ ID NO 683 in the  10/666,642 US patent application
  misc_feature: The sequence is a functional homolog of  SEQ ID NO 806 in the  11/435,388 US patent application
  misc_feature: The sequence is a functional homolog of  SEQ ID NO 988 in the  10/412,699 US patent application
  misc_feature: The sequence is a functional homolog of  SEQ ID NO 990 in the  10/412,699 US patent application
  misc_feature (56)..(119): Pfam Name: AP2 PFAM Desc: AP2 domain
  misc_feature: Homolog of GI Number: 50929183 NR Desc: OSJNBa0010D21.10
  misc_feature: Homolog of GI Number: 56381907 NR Desc: At4g36900
  misc_feature: Homolog of GI Number: 2632063 NR Desc: TINY
  misc_feature: Homolog of GI Number: 16323159 NR Desc: AT4g36900/C7A10_460
  misc_feature: Homolog of GI Number: 55741382 NR Desc: putative AP2 domain containing protein RAP2.1
  misc_feature: Homolog of GI Number: 31324058 NR Desc: dehydration responsive element binding protein
  misc_feature: Homolog of GI Number: 33324520 NR Desc: dehydration responsive element binding protein
  misc_feature: Homolog of GI Number: 78216278 NR Desc: dehydration
  misc_feature: Homolog of GI Number: 28372974 NR Desc: At2g23340
  misc_feature: Homolog of GI Number: 48479312 NR Desc: putative AP2/EREBP transcription factor
  misc_feature: Useful for making plants with altered leaf shape eg curled leaves
  misc_feature: Useful for making plants with altered leaf shape eg curled leaves
  misc_feature: Useful for making plants with increased biomass and foliage
MQGEYRSSIEESAAAAVAAAAAMAPLAAAAVKMEAEQAAMAAPQLGAAHQQTQPRRQYRGVRMRKWGKWVAEIREPHKRTRIWLGSYATAVAAARAYDTAVFYLRGRSARLNFPEEIPSFGLADGVDVGEHARDPAAAAAGGGGGCTLSAASIRKKAIEVGSRVDALQTGMVVPPPHHRERHRHHNHLPQLRVHAEEQQEEEEQKPQRPAWSGRVKNPDLNRAPSPESSDAE

SEQ ID NO: 8997 - DNA, 484 bp, Zea mays
  misc_feature: Ceres CLONE ID no. 1476826
  CDS (107)..(353): REFERENCED BY SEQ ID NO: 8998
aagcgctttcctgtccgactcccagccgtcgtctgctgcgtactccgcctccagtttggtctgtttcttgcaagttgctcttgcggtagttcccccaactgtcaccatgcagaacgaggagggtaagactgtggacctctatgttcccaggaagtgctcggccacaaacaggatcatcactgccaaggaccatgcctctgtccagatcaacattggccacttggatgcgaatggcctgtatgatggtcacttcacaacatttgctctctctgggtttgtccgtgctcagggcgatgcagacagctccttggacaggctgtggcagaagaagaaggctgatatcaagcagtagattttacatctagtttaccaagaattggacactgccttagctatgttttgaattcatgtcactatatgcaatgttgtgatttcagctggtaccttaaatctgaagatttagtaccaaaaaaaaaaaaaaaaa

SEQ ID NO: 8998 - protein, 81 aa, Zea mays; identical to SEQ ID NO: 6286
  misc_feature: Ceres CLONE ID no. 1476826
  misc_feature (1)..(81): Pfam Name: Ribosomal_S21e PFAM Desc: Ribosomal protein S21e
  misc_feature: Homolog of GI Number: 50929183 NR Desc: OSJNBa0010D21.10
  misc_feature: Homolog of GI Number: 56381907 NR Desc: At4g36900
  misc_feature: Homolog of GI Number: 2632063 NR Desc: TINY
  misc_feature: Homolog of GI Number: 16323159 NR Desc: AT4g36900/C7A10_460
  misc_feature: Homolog of GI Number: 55741382 NR Desc: putative AP2 domain containing protein RAP2.1
  misc_feature: Homolog of GI Number: 31324058 NR Desc: dehydration responsive element binding protein
  misc_feature: Homolog of GI Number: 33324520 NR Desc: dehydration responsive element binding protein
  misc_feature: Homolog of GI Number: 78216278 NR Desc: dehydration
  misc_feature: Homolog of GI Number: 28372974 NR Desc: At2g23340
  misc_feature: Homolog of GI Number: 48479312 NR Desc: putative AP2/EREBP transcription factor
  misc_feature: Useful for making plants with altered leaf shape eg curled leaves
  misc_feature: Useful for making plants with altered leaf shape eg curled leaves
  misc_feature: Useful for making plants with increased biomass and foliage

SEQ ID NO: 8999 - DNA, 427 bp, Zea mays
  misc_feature: Ceres CLONE ID no. 1476867
  misc_feature: Ceres CDNA ID no. 25446139
  CDS (87)..(251): REFERENCED BY SEQ ID NO: 9000
aaggcgcgcggtttccaggcggttcctcctccagagtccagactctagagaaagaaggcgcatcgtgagcgagagaaagagaggcaatggcgtcggcgacgttcctggaggtgctcctcgccatcttcctcccgccggtcggcgtcttccttcgctacggctgcggcgtggagttctggatcgacctcttgctgaccgtgctggggtacattccggggatcatctacgccgtgtacgtgctggtggcttaagttgtgcgaagacgaggacatgaagattctcgatctgtccagaagtacttagtgatgtgaggacttctcccagtcccagtgtgcatgtctgtctctgactatcggcggatgttgttaataaaacgtgtgtgggtgctgcaagcaaaaaaaaaaaagttttaaaaaaaaaaaaaaaa

SEQ ID NO: 9000 - protein, 54 aa, Zea mays
  misc_feature: Ceres CLONE ID no. 1476867
  misc_feature: Ceres CDNA ID no. 25446139
  misc_feature (4)..(54): Pfam Name: UPF0057 PFAM Desc: Uncharacterized protein family UPF0057
  misc_feature: Homolog of GI Number: 50920613 NR Desc: Putative low
  misc_feature: Homolog of GI Number: 13751169 NR Desc: putative membrane protein
  misc_feature: Homolog of GI Number: 13751167 NR Desc: putative membrane protein
  misc_feature: Homolog of GI Number: 6714401 NR Desc: low temperature and salt responsive protein LTI6A
  misc_feature: Homolog of GI Number: 40549120 NR Desc: small hydrophobic protein 2
  misc_feature: Homolog of GI Number: 6671968 NR Desc: low temperature and salt responsive protein
  misc_feature: Homolog of GI Number: 6714402 NR Desc: low temperature and salt responsive protein LTI6B
  misc_feature: Homolog of GI Number: 35186896 NR Desc: Clt1
  misc_feature: Homolog of GI Number: 50939439 NR Desc: putative low temperature and salt responsive protein
  misc_feature: Homolog of GI Number: 32414287 NR Desc: predicted protein
MASATFLEVLLAIFLPPVGVFLRYGCGVEFWIDLLLTVLGYIPGIIYAVYVLVA

SEQ ID NO: 9001 - DNA, 510 bp, Zea mays
  misc_feature: Ceres CLONE ID no. 1476890
  CDS (89)..(272): REFERENCED BY SEQ ID NO: 9002
acgaaaccctagctcacttaacgccgccgcggagctgctccgcgcccccgacgccggtgattaggagcaggagcaagaggggttcggaatggccaagtctaagaaccacacggcgcataaccagtcgttcaaggcgcacaagaacggcatcaagaagcccaagcgccaccgccagacctccaccaaggggatggaccccaagtttctgaggaacttgaggtactcaaggaagggcaataagaagagttgtgaggctgagtcagaggagtgagatgatgcctgagtttgtggcgacaaatgcatctcttgtatcgttagggtcttagttgtgaacttaattttcacatctgtatgattaaaagagattcatcaattggtactgaagtgttgtttttttgtcttgttgcctatctggagtttatttaactaaaatcatcagttgtgtccttgagaatcgggcacttaatgtatcattttcggttctctgaaaaacaaaaaaaaaaaaaaaaa

SEQ ID NO: 9002 - protein, 60 aa, Zea mays; identical to SEQ ID NO: 8876
  misc_feature: Ceres CLONE ID no. 1476890
  misc_feature (4)..(42): Pfam Name: Ribosomal_L29e PFAM Desc: Ribosomal L29e protein family
  misc_feature: Homolog of GI Number: 50920613 NR Desc: Putative low
  misc_feature: Homolog of GI Number: 13751169 NR Desc: putative membrane protein
  misc_feature: Homolog of GI Number: 13751167 NR Desc: putative membrane protein
  misc_feature: Homolog of GI Number: 6714401 NR Desc: low temperature and salt responsive protein LTI6A
  misc_feature: Homolog of GI Number: 40549120 NR Desc: small hydrophobic protein 2
  misc_feature: Homolog of GI Number: 6671968 NR Desc: low temperature and salt responsive protein
  misc_feature: Homolog of GI Number: 6714402 NR Desc: low temperature and salt responsive protein LTI6B
  misc_feature: Homolog of GI Number: 35186896 NR Desc: Clt1
  misc_feature: Homolog of GI Number: 50939439 NR Desc: putative low temperature and salt responsive protein
  misc_feature: Homolog of GI Number: 32414287 NR Desc: predicted protein

SEQ ID NO: 9003 - DNA, 484 bp, Zea mays
  misc_feature: Ceres CLONE ID no. 1476912
  CDS (96)..(342): REFERENCED BY SEQ ID NO: 9004
agtccgactcccagccgtcgtctgctgcggactccgcctccagtttggtctgtttcttgcaagttgatcttgtggtagttcccccaactgtcaccatgcagaacgaggagggtaagactgtggacctctatgtccccaggaagtgctcggccacaaacaggatcatcactgccaaggaccatgcctctgtccagatcaacattggccacttggatgcgaatggcctgtatgatggtcacttcacaacgtttgctctctctgggtttgtccgtgctcagggcgacgcagacagctccttggacaggctgtggcagaagaagaaggctgatatcaagcagtagattttacatctagtttaccaagaattggacactgccttagctatgttttgaattcatgtcactatatgcaatgttgtgatttcagctggtaccttaaatctgaagatttagtatctttgttgggctaaaaaaaaaaaaaaaaa

SEQ ID NO: 9004 - protein, 81 aa, Zea mays; identical to SEQ ID NO: 6286
  misc_feature: Ceres CLONE ID no. 1476912
  misc_feature (1)..(81): Pfam Name: Ribosomal_S21e PFAM Desc: Ribosomal protein S21e
  misc_feature: Homolog of GI Number: 50920613 NR Desc: Putative low
  misc_feature: Homolog of GI Number: 13751169 NR Desc: putative membrane protein
  misc_feature: Homolog of GI Number: 13751167 NR Desc: putative membrane protein
  misc_feature: Homolog of GI Number: 6714401 NR Desc: low temperature and salt responsive protein LTI6A
  misc_feature: Homolog of GI Number: 40549120 NR Desc: small hydrophobic protein 2
  misc_feature: Homolog of GI Number: 6671968 NR Desc: low temperature and salt responsive protein
  misc_feature: Homolog of GI Number: 6714402 NR Desc: low temperature and salt responsive protein LTI6B
  misc_feature: Homolog of GI Number: 35186896 NR Desc: Clt1
  misc_feature: Homolog of GI Number: 50939439 NR Desc: putative low temperature and salt responsive protein
  misc_feature: Homolog of GI Number: 32414287 NR Desc: predicted protein

SEQ ID NO: 9005 - DNA, 488 bp, Zea mays
  misc_feature: Ceres CLONE ID no. 1476916
  misc_feature: Ceres CDNA ID no. 40351972
  CDS (67)..(279): REFERENCED BY SEQ ID NO: 9006
aagttttcgtttaacgccatcttcgattgatttgcagtttcagttcgccatcggcagccgagcaccatgagctccacaggcggcgacgatggcgccaagaagtcttggccggaagtggtcgggctcagcctggaagaagccaagagggtgatcctgtgcgacaagcccgacgccgacatcgtcgtgctgcccgtcggcacgccggtgaccatggatttccgccccaaccgcgttcgcatcttcgtcgacaccgtcgcggaggcaccccacatcggctgagaatcaaatctataaaatgaataactcggacatgtcatgcgtgcatgtccgtcgccgaataatggatgtgtgtgcttcgttccaataaattgctagtaaaaataatggcatcgtcggtatgcatgaataaaatgtatcagaatgttcatcctttcacgattggatatatgaaaatgtgctcagttgtttggcaaaaaaaaaaaaaaaaa

SEQ ID NO: 9006 - protein, 70 aa, Zea mays; identical to SEQ ID NO: 8622
  misc_feature: Ceres CLONE ID no. 1476916
  misc_feature: Ceres CDNA ID no. 40351972
  misc_feature (11)..(70): Pfam Name: potato_inhibit PFAM Desc: Potato inhibitor I family

SEQ ID NO: 9007 - DNA, 445 bp, Zea mays
  misc_feature: Ceres CLONE ID no. 1476956
  CDS (61)..(217): REFERENCED BY SEQ ID NO: 9008
atcaggcttctagggttttcgcgccgccgccgccgccgcttcgtcgtctccgccgcagcgatgccgtcgcacaagaccttccggatcaagaagaagctggcgaagaagatgcgccagaaccgccccatcccctactggatccgcatgcgcacggacaacaccatcaggtacaacgccaagcgcaggcactggcgccgcaccaagctcggcttctgagcgcgcggatcggccggctcctgcgtcggaattctagggtctctacctttcctttggttttatcgatgtctcttgtgtttctgtaagctagcaaacagttccagaaagcttttgttaagattttgatgacgctaagaggattgatgctactatgctgtactcaggattccatgctgcattgcgatgctaaattaaagaacctctgttaccctaaaaaaaaaaaaaaaaa

SEQ ID NO: 9008 - protein, 51 aa, Zea mays; identical to SEQ ID NO: 2406
  misc_feature: Ceres CLONE ID no. 1476956
  misc_feature (9)..(51): Pfam Name: Ribosomal_L39 PFAM Desc: Ribosomal L39 protein

SEQ ID NO: 9009 - DNA, 652 bp, Zea mays
  misc_feature: Ceres CLONE ID no. 1477086
  misc_feature: Ceres CDNA ID no. 40351974
  CDS (46)..(363): REFERENCED BY SEQ ID NO: 9010
aaacccatgtgcgtttagcatcaattcatcagctagaagttcgaaatgggggtcaagtttttagtccttctcggtgttgtcctggcctctcttgtcttccaggacgtggcatttgctagagagctcactgaggccaataatgaggatgagggaaagaacatgaaacaaggaggaatgactgaattaaaggatgagaaatggggaggtggatataatggaggatatggatatggaggtgggtatggtggtggatatggaaaaccgggctatggtggtggatatggtggaggatacaggcccaaatatggcaggggctacaggtccggatatggatacggtggcgggcatggtggatggaattaagaagcattgctacataaagtttctctatgtccgataacaataaatggcgacgataaatttgaatgctacatgtagttccgtgatggaaatcttatgtattttgtataaaacatggtacatggactgttacgtatgttgcatgaaatactgtactagaataagatctttgtatgccatgtatggtattagtgtgcatgtgtctggcttttgaaaggtgtacctcgtcatttatggacttatatgtatgtatagataaaaataatatttttatcaaaaaaaaaaaaaaaaa

SEQ ID NO: 9010 - protein, 105 aa, Zea mays
  misc_feature: Ceres CLONE ID no. 1477086
  misc_feature: Ceres CDNA ID no. 40351974
  misc_feature (1)..(103): Pfam Name: GRP PFAM Desc: Glycine rich protein family
MGVKFLVLLGVVLASLVFQDVAFARELTEANNEDEGKNMKQGGMTELKDEKWGGGYNGGYGYGGGYGGGYGKPGYGGGYGGGYRPKYGRGYRSGYGYGGGHGGWN

SEQ ID NO: 9011 - DNA, 814 bp, Glycine max
  misc_feature: Ceres CLONE ID no. 1477405
  misc_feature: Ceres CDNA ID no. 25402455
  CDS (260)..(613): REFERENCED BY SEQ ID NO: 9012
ctgagattagctttattgagatcgtgttcagactaaaacatggatatcttcacctatttttattttgtgaacttttattcaagtttgttggtttaactagcaaaaaaaaaaaaaaaaaggggaatccaggaggtacaacaataaaccaagaggacgtcataatttgacaacgcagaagaagcaagagattaaggaagcctttgagttatttgatactgatggctcaggtactattgatgccaaggagctgaatgttgctatgagggcccttggatttgagatgacagaagagcaaatcaatcaaatgatagcagatgtggacaaggatggaagtggagcaattgattatgaagaatttgagtacatgatgacagccaaaataggagaaagggacactaaagaggagctcatgaaagctttccatattattgatcatgataaaaatggaaagatatccgcattagacatcaagcgcattgcaaaagagctaggtcaaaatttcactgacagagagattcaggagatggttgaggaagcagaccaagataatgatcgagaggttagtgcggaggagttcatcacgatgatgaacagaactcgcttccatcactagtcttatctatatgggggcagttgatatctttgtttggctgcactactagtataggaaaattaaaaataaaataaaaaactgaagctatgtactctttgctattgtaaaagttgtatgaatgattcctatctatgtttgggtattgcctatgaataaaattggtgtatgtccatattttggttcaaaaaaaaaaaaaaaaaa

SEQ ID NO: 9012 - protein, 117 aa, Glycine max
  misc_feature: Ceres CLONE ID no. 1477405
  misc_feature: Ceres CDNA ID no. 25402455
  misc_feature (49)..(77): Pfam Name: efhand PFAM Desc: EF hand
  misc_feature: Homolog of GI Number: 729051 NR Desc: Caltractin
  misc_feature: Homolog of GI Number: 6523047 NR Desc: centrin
  misc_feature: Homolog of GI Number: 50939299 NR Desc: putative caltractin
  misc_feature: Homolog of GI Number: 6358509 NR Desc: centrin
  misc_feature: Homolog of GI Number: 6358511 NR Desc: centrin
  misc_feature: Homolog of GI Number: 2464879 NR Desc: caltractin
  misc_feature: Homolog of GI Number: 79326379 NR Desc: calcium ion binding
  misc_feature: Homolog of GI Number: 21554823 NR Desc: caltractin
  misc_feature: Homolog of GI Number: 21209 NR Desc: caltractin
  misc_feature: Homolog of GI Number: 2920835 NR Desc: centrin
  misc_feature: Useful for increasing chlorophyll and photosynthetic capacity
MRALGFEMTEEQINQMIADVDKDGSGAIDYEEFEYMMTAKIGERDTKEELMKAFHIIDHDKNGKISALDIKRIAKELGQNFTDREIQEMVEEADQDNDREVSAEEFITMMNRTRFHH

SEQ ID NO: 9013 - DNA, 452 bp, Zea mays
  misc_feature: Ceres CLONE ID no. 1478014
  CDS (81)..(273): REFERENCED BY SEQ ID NO: 9014
aatccaagctcaaagcaagcagatctaagctccaggcagcgtcgcgacagagtgagctagtgagtagcacgacaacaacaatggcttccctgaaggccgcgaagcccagcggagttgcggcgcagggcaaggagccggcgcccaagctcagcgagacggcgacgaagccgtcagccgcgaagagcggcggcgttaagaaggctgagcagaagccccgggaaaccaaaaggaaggtgaagagcagcaaacaggcggcggcggccaaaaagtgacgtacagtacgtgtggagtgtaatggagcttccatgcatgagtgaatccatgccatgttatgaatctagtccttcctttcttgtatcttccatgtgacgcggcgtgtgcgtcccctcatgtgtgatgatgccagatgaatactacaaataagacgttgttgtgaaaaaaaaaaaaaaaaa

SEQ ID NO: 9014 - protein, 63 aa, Zea mays; identical to SEQ ID NO: 8892
  misc_feature: Ceres CLONE ID no. 1478014
  misc_feature: Homolog of GI Number: 729051 NR Desc: Caltractin
  misc_feature: Homolog of GI Number: 6523047 NR Desc: centrin
  misc_feature: Homolog of GI Number: 50939299 NR Desc: putative caltractin
  misc_feature: Homolog of GI Number: 6358509 NR Desc: centrin
  misc_feature: Homolog of GI Number: 6358511 NR Desc: centrin
  misc_feature: Homolog of GI Number: 2464879 NR Desc: caltractin
  misc_feature: Homolog of GI Number: 79326379 NR Desc: calcium ion binding
  misc_feature: Homolog of GI Number: 21554823 NR Desc: caltractin
  misc_feature: Homolog of GI Number: 21209 NR Desc: caltractin
  misc_feature: Homolog of GI Number: 2920835 NR Desc: centrin
  misc_feature: Useful for increasing chlorophyll and photosynthetic capacity

SEQ ID NO: 9015 - DNA, 465 bp, Zea mays
  misc_feature: Ceres CLONE ID no. 1478051
  CDS (68)..(320): REFERENCED BY SEQ ID NO: 9016
aagagcaaagcatagtcacctgcctatctatctagcgagagagagagaggaaagctagctagctagcatggagtgcggcagcaagaaggcagcaggcggtgtgttggcgctgctgcttctccagctggtgttagctccgacgacggcgacggcccgcctcctgcaggcggatacctccaccgtggttggcctggacatcatcgcgagggagtttggccatccagtgagaggcatcctctgtggtgaaacctgtgtcttcctaccatgctatacggcagccatgggttgccaatgcattggccaaatctgcatgatgtgatatctggactagcgctatttgtaatttgtgttgggagaaacacaaggacggtacggtggtgttcaacttattgcatgtgtatggtgatctaataagtaaagtataataaaaagggatatgttggatgtgtaaaaaaaaaaaaaaaa

SEQ ID NO: 9016 - protein, 83 aa, Zea mays
  misc_feature: Ceres CLONE ID no. 1478051
  misc_feature (55)..(83): Pfam Name: Cyclotide PFAM Desc: Cyclotide family
  misc_feature: Homolog of GI Number: 729051 NR Desc: Caltractin
  misc_feature: Homolog of GI Number: 6523047 NR Desc: centrin
  misc_feature: Homolog of GI Number: 50939299 NR Desc: putative caltractin
  misc_feature: Homolog of GI Number: 6358509 NR Desc: centrin
  misc_feature: Homolog of GI Number: 6358511 NR Desc: centrin
  misc_feature: Homolog of GI Number: 2464879 NR Desc: caltractin
  misc_feature: Homolog of GI Number: 79326379 NR Desc: calcium ion binding
  misc_feature: Homolog of GI Number: 21554823 NR Desc: caltractin
  misc_feature: Homolog of GI Number: 21209 NR Desc: caltractin
  misc_feature: Homolog of GI Number: 2920835 NR Desc: centrin
  misc_feature: Useful for increasing chlorophyll and photosynthetic capacity
MECGSKKAAGGVLALLLLQLVLAPTTATARLLQADTSTVVGLDIIAREFGHPVRGILCGETCVFLPCYTAAMGCQCIGQICMM

SEQ ID NO: 9017 - DNA, 460 bp, Zea mays
  misc_feature: Ceres CLONE ID no. 1478175
  CDS (87)..(279): REFERENCED BY SEQ ID NO: 9018
aatcaggcatccaagaagctcaaagcaagcagatctaagctccaggcagcgtcgcgacagagtgagtgagtagcacgacaacaacaatggcttccctgaaggccgcgaagcccagcggagttgcggcgcagggcaaggagccggcgcccaagctcagcgagacggcgacgaagccgtcagccgcgaagagcggcggcgttaagaaggctgagcagaagccccgggaaaccaaaaggaaggtgaagagcagcaaacaggcggcggcggccaaaaagtgacgtacagtacgtgtggagtgtaatggagcttccatgcatgagtgaatccatgccatgttatgaatctagtccttcctttcttgtatcttccatgtgacgcggcgtgtgcgtcccctcatgtgtgatgatgccagatgaatactacaaataagacgttgttgtgacaaaaaaaaaaaaaaaaa

SEQ ID NO: 9018 - protein, 63 aa, Zea mays; identical to SEQ ID NO: 8892
  misc_feature: Ceres CLONE ID no. 1478175
  misc_feature: Homolog of GI Number: 729051 NR Desc: Caltractin
  misc_feature: Homolog of GI Number: 6523047 NR Desc: centrin
  misc_feature: Homolog of GI Number: 50939299 NR Desc: putative caltractin
  misc_feature: Homolog of GI Number: 6358509 NR Desc: centrin
  misc_feature: Homolog of GI Number: 6358511 NR Desc: centrin
  misc_feature: Homolog of GI Number: 2464879 NR Desc: caltractin
  misc_feature: Homolog of GI Number: 79326379 NR Desc: calcium ion binding
  misc_feature: Homolog of GI Number: 21554823 NR Desc: caltractin
  misc_feature: Homolog of GI Number: 21209 NR Desc: caltractin
  misc_feature: Homolog of GI Number: 2920835 NR Desc: centrin
  misc_feature: Useful for increasing chlorophyll and photosynthetic capacity

SEQ ID NO: 9019 - DNA, 475 bp, Zea mays
  misc_feature: Ceres CLONE ID no. 1478241
  CDS (80)..(275): REFERENCED BY SEQ ID NO: 9020
acaacctcccttttcggagatctcgccgcctccgccgtcgacttccgtcgcccccctatcccgcgtccgggcttacccgatggcacggctgcactggcttgaggctgtcctgccgctggggatcatcggcggcatgctctgcatcatgggcaacgcccagtatttcatccacaaggccgcgcacggcaggccgaagcacatcgggaacgatatgtgggacgtcgccatggagcgccgcgacaagaagctcgtggaacaatcctccggcaactagggtattgatcaacctcaaacttttctggatgttgacgaacctcgttcaaaagcacagaagtactgctcttttgtttcctgtacaattggaaccaagacttgtttgttttgctttgaaatatcaacagttcggagaataatctgtatctgacatctgtttaattgaacaaagccaaatactttgtcaaaaaaaaaaaaaaaa

SEQ ID NO: 9020 - protein, 64 aa, Zea mays; identical to SEQ ID NO: 8890
  misc_feature: Ceres CLONE ID no. 1478241
  misc_feature: Homolog of GI Number: 729051 NR Desc: Caltractin
  misc_feature: Homolog of GI Number: 6523047 NR Desc: centrin
  misc_feature: Homolog of GI Number: 50939299 NR Desc: putative caltractin
  misc_feature: Homolog of GI Number: 6358509 NR Desc: centrin
  misc_feature: Homolog of GI Number: 6358511 NR Desc: centrin
  misc_feature: Homolog of GI Number: 2464879 NR Desc: caltractin
  misc_feature: Homolog of GI Number: 79326379 NR Desc: calcium ion binding
  misc_feature: Homolog of GI Number: 21554823 NR Desc: caltractin
  misc_feature: Homolog of GI Number: 21209 NR Desc: caltractin
  misc_feature: Homolog of GI Number: 2920835 NR Desc: centrin
  misc_feature: Useful for increasing chlorophyll and photosynthetic capacity

SEQ ID NO: 9021 - DNA, 471 bp, Glycine max; identical to SEQ ID NO: 8955
  misc_feature: Ceres CLONE ID no. 1479063
  misc_feature: Ceres CDNA ID no. 40351959
  CDS (110)..(352): REFERENCED BY SEQ ID NO: 9022

SEQ ID NO: 9022 - protein, 80 aa, Glycine max; identical to SEQ ID NO: 8956
  misc_feature: Ceres CLONE ID no. 1479063
  misc_feature: Ceres CDNA ID no. 40351959
  misc_feature (13)..(48): Pfam Name: GATA PFAM Desc: GATA zinc finger

SEQ ID NO: 9023 - DNA, 419 bp, Zea mays
  misc_feature: Ceres CLONE ID no. 1479389
  CDS (99)..(297): REFERENCED BY SEQ ID NO: 9024
aatccctaatcccagcgcagcacaaacaaacaccgcgccgccgccacagctttgccctacagaatccttttactccgaagattctcaagacgcccctgatggctccccgcgtcgcctccgctctgctcttcgtcgtggccgtcctcatggcctccgcggcggcgcaggagtccatggcgcccgcgtctgctccggcgccgggaccggtcgctggcgcggcctccgctccggcctccgctgtggccgtggtgtcgtccgcactgctgtccctccttatgacggccctgatgcagtagaagtatcatactagatttgagcgggaatttggttcagtgttgctattcctcattctttttgtatcatatatgtctgcgacatttatatatatgaataaagttggatgatctgctgcaaaaaaa

SEQ ID NO: 9024 - protein, 65 aa, Zea mays
  misc_feature: Ceres CLONE ID no. 1479389
MAPRVASALLFVVAVLMASAAAQESMAPASAPAPGPVAGAASAPASAVAVVSSALLSLLMTALMQ

SEQ ID NO: 9025 - DNA, 478 bp, Zea mays
  misc_feature: Ceres CLONE ID no. 1479394
  misc_feature: Ceres CDNA ID no. 36704634
  CDS (60)..(320): REFERENCED BY SEQ ID NO: 9026
agagagagagagagagagaccctaccgggcgggagagagccaggaagaggagggcgacgatggcgtccggctggggcatcaacgggaacaagggccgctgctacgacttctggctggagttcagcgagtgcatgagccgctgccgccagccctccgactgcggcctcctccgcgaggactacctcgagtgcctccaccactccaaggagttccagcgcaggaacaggatctacaaggaggagcaacgtcagatcagagctgctgctcgtaaggccaaggaggaagctgagggtgcccctgctgttgcagcacaccattagtctccctgtctatttttttgtgttgttgttttctgttaactcatctttggttcagttatgatgctaagggcaaggcaataatctccagctgttggactacacagattttttcccccatgacttaaatatcaagactcattttgtgctaaaaaaaaaaa

SEQ ID NO: 9026 - protein, 86 aa, Zea mays; identical to SEQ ID NO: 356
  misc_feature: Ceres CLONE ID no. 1479394
  misc_feature: Ceres CDNA ID no. 36704634
  misc_feature: Homolog of GI Number: 50948425 NR Desc: putative fiber protein Fb14
  misc_feature: Homolog of GI Number: 30841446 NR Desc: fiber protein Fb14

SEQ ID NO: 9027 - DNA, 434 bp, Zea mays
  misc_feature: Ceres CLONE ID no. 1479418
  CDS (82)..(238): REFERENCED BY SEQ ID NO: 9028
agagtttcgatctctcccatccgagtgtctcctcctccgccgccgccgccgccgcttccgtcgtctccgcccgccgaggccatgccgtcccacaagaccttccggatcaagaagaagctggccaagaagatgcgccagaaccgccccatcccctactggatccgcatgcgcaccgacaacaccatcaggtacaacgccaagcgcaggcactggcgtcgcaccaaactcggattctgagcggtggaagaaatgctggctaatgacgcttggggggtatagggctctgcaggctaggaagctcttgtttaaatttttttgcttgtgttatttgtcattgtagtaccatgttttgtctgatggttaaagaaccgcctttatgctatggtgaatttatttaaccttgcagcgccttaaaagaaaaaaaaaaaaaaaaa

SEQ ID NO: 9028 - protein, 51 aa, Zea mays; identical to SEQ ID NO: 2406
  misc_feature: Ceres CLONE ID no. 1479418
  misc_feature (9)..(51): Pfam Name: Ribosomal_L39 PFAM Desc: Ribosomal L39 protein
  misc_feature: Homolog of GI Number: 50948425 NR Desc: putative fiber protein Fb14
  misc_feature: Homolog of GI Number: 30841446 NR Desc: fiber protein Fb14

SEQ ID NO: 9029 - DNA, 482 bp, Zea mays
  misc_feature: Ceres CLONE ID no. 1479427
  CDS (85)..(199): REFERENCED BY SEQ ID NO: 9030
agtcgggtcttcaagccacaccaaaccacactgcgacacacagtaggcgaggcgaaggagaggcaaggcggcgcggcgggcaagatgtttgacgatcaagacctgggcttctttgccaatttcctgggcatcttcatctttgtcttggttattgcgtaccacttcgtgatggcagacccgaagtacgaaggaaactgatgtcctctagtgcaaagatcctattatctgcaggccgaaatagggctatactgttagctaatgctagtgagatcgcttgacactttgagtgcatatcatggaagctggacatgcagttcctggcattttggttttgcccatgttttaatctgctgaattagtaaatcctggagaattcaaaagcgttttcaagtactgcagttggtggttgtttctggtcctagtgtatgcatgccagaatcttatgaataatattctttgttttgttgcctaaaaaaaaaaaa

SEQ ID NO: 9030 - protein, 37 aa, Zea mays
  misc_feature: Ceres CLONE ID no. 1479427
  misc_feature: Homolog of GI Number: 50948425 NR Desc: putative fiber protein Fb14
  misc_feature: Homolog of GI Number: 30841446 NR Desc: fiber protein Fb14
MFDDQDLGFFANFLGIFIFVLVIAYHFVMADPKYEGN

SEQ ID NO: 9031 - DNA, 464 bp, Zea mays
  misc_feature: Ceres CLONE ID no. 1479511
  CDS (84)..(276): REFERENCED BY SEQ ID NO: 9032
aatcaggcatccaagcttaaagcaagcagatctaagctccaggcagcgtcgcgacagagtgagtgagtagcacgacaacaacaatggcttccctgaaggccgcgaagcccagcggagttgcggcgcagggcaaggagccggcgcccaagctcagcgagacggcgacgaagctgtcagccgcgaagagcggcggcgttaagaaggctgagcagaagccccgggaaaccaaaaggaaggtgaagagcagcaaaccggcggcggcggccaaaaagtgacgtacagtacgtgtggagtgtaatggagcttccatgcatgcatgagtggatccatgccatgttatgaatctagtccttcctttcttgtatcttccatgtgacgcggcgtgtgcgtcccttcatgtgtgatgatgccagatgaatactacaaataagacgttgtgactgtgtcaaaaaaaaaaaaaaaaa

SEQ ID NO: 9032 - protein, 63 aa, Zea mays
  misc_feature: Ceres CLONE ID no. 1479511
  misc_feature: Homolog of GI Number: 50948425 NR Desc: putative fiber protein Fb14
  misc_feature: Homolog of GI Number: 30841446 NR Desc: fiber protein Fb14
MASLKAAKPSGVAAQGKEPAPKLSETATKLSAAKSGGVKKAEQKPRETKRKVKSSKPAAAAKK

SEQ ID NO: 9033 - DNA, 513 bp, Zea mays
  misc_feature: Ceres CLONE ID no. 1479512
  CDS (55)..(280): REFERENCED BY SEQ ID NO: 9034
aataccaacctacaattgtcacttccattttctcaataccttaagcaaggaccaatgtctcaagcccagccccctcgttcccaagcccagtggaaacacgttaaatttcaggataaccaagctaatgccatgaaggaaccaggaaccggtgggtatggctatgggacgaaaaatgacaagaataaggatgtggatacaatagcttcggacttcatcaagctgaagcacaaggcttgggcactccagaagagcacaaccatgtaccaaccttctacctaaaggtgtcaatagttcaagaagttgatactatatacttatgcttgtctctgtatagtctataagtcctaattcaaataacaggtgctgcttgcagccttggatatttgcggatgcggagtgaagttaccatggcatccttgctaagaataagaaagtaatgtggttatgaggagatgtgtaattttgtggcgatattatttgcaacaatgatgtatataaaaaaaaaaaaaaaaa

SEQ ID NO: 9034 - protein, 74 aa, Zea mays; identical to SEQ ID NO: 52
  misc_feature: Ceres CLONE ID no. 1479512
  misc_feature: Homolog of GI Number: 50948425 NR Desc: putative fiber protein Fb14
  misc_feature: Homolog of GI Number: 30841446 NR Desc: fiber protein Fb14

SEQ ID NO: 9035 - DNA, 429 bp, Zea mays
  misc_feature: Ceres CLONE ID no. 1479647
  CDS (99)..(297): REFERENCED BY SEQ ID NO: 9036
aatccctaatcccagcgcagcacaaacaaacaccgcgccgccgccacagctttgccctacagaatccttttactccgaagattctcaagacgcccctgatggctccccgcgtcgcctccgctctgctcttcgtcgtggccgtcctcgtggcctccgcggcggcgcaggagtccatggcgcccgcgtctgctccggcgccgggaccggtcgctggcgcggcctccgctccggcctccgctgtggccgtggtgtcgtccgcactgctgtccctccttatgacggccctgatgcagtagaagtatcatactagatttgagcgggaatttggttcagtgttgctattcctcattctttttgtatcatatatgtctgcgacatttatatatatgaataaagttggatgatctgctgcaaaaaaaaaaaaaaaaa

SEQ ID NO: 9036 - protein, 65 aa, Zea mays; identical to SEQ ID NO: 7046
  misc_feature: Ceres CLONE ID no. 1479647
  misc_feature: Homolog of GI Number: 50948425 NR Desc: putative fiber protein Fb14
  misc_feature: Homolog of GI Number: 30841446 NR Desc: fiber protein Fb14

SEQ ID NO: 9037 - DNA, 428 bp, Zea mays
  misc_feature: Ceres CLONE ID no. 1479649
  CDS (67)..(367): REFERENCED BY SEQ ID NO: 9038
ccccaccacaacccagcgccggcagtcgccgtcatcgatcgatcgccggaaaactaacccctaacgatgtctggagccggcgaggaggacaagaagcccgcggagggcggcgcccacatcaaccttaaggtcaagggacaggatggcaatgaggtgttctttcgcataaagaggtccacccagctgaagaagctgatgaacgcttattgtgaccgccagtctgtggacatgaatgccattgcgttcctgtttgatggccgcaggcttcgcggcgagcagacccctgatgagctggagatggaggacggcgacgagatcgacgccatgcttcaccagaccggaggcagcgttcctagcaccacctaaaagcctcgttttgctctccgtcctgcgtagtagtaaacaaaagggaaaaaaaaaaaaaaaaa

SEQ ID NO: 9038 - protein, 99 aa, Zea mays; identical to SEQ ID NO: 36
  misc_feature: Ceres CLONE ID no. 1479649
  misc_feature (16)..(91): Pfam Name: ubiquitin PFAM Desc: Ubiquitin family
  misc_feature: Homolog of GI Number: 50948425 NR Desc: putative fiber protein Fb14
  misc_feature: Homolog of GI Number: 30841446 NR Desc: fiber protein Fb14

SEQ ID NO: 9039 - DNA, 607 bp, Zea mays
  misc_feature: Ceres CLONE ID no. 1479784
  misc_feature: Ceres CDNA ID no. 25447071
  CDS (143)..(439): REFERENCED BY SEQ ID NO: 9040
agcaagctagccatagtagggggctcactcatccgcacagaccggcacccagctcaagtcacccccgaaacgcaagctaagcgagctccggggcctgctggcgtcgctgggcctggacaagtcggaggccgaggcgcgcgacatgctggcgcgcgccgacgccgaccgcgacggccggctcagcgtcgaggagttcctggacgtgatgaacgccggggagctcgggctgggcgcgctcggggcggtgctgcagtcggcgctccccacgctggaggccgcgggaggcgcgctggtcggcgcggacgagctcgcccgggcgctcggcgccctcggcagcgctagcgccgaggactgcgcggctattgttgagtgcctggacggcgacggcgacggcgccatcaccattgaggagttcaggctcatggccgacctgctctaggtctagcttggagctagcctaggctgcgcacgtacgcacgcgtggaacaccatgccaaaggtttgctgtgtagatcgacaatctacccagatcgacaataatcaaacaggagctacacggtttgtgtgtgtaaaaaaaaaaaaaaaaaaaaaaaaaaaaaaaaaaaaa

SEQ ID NO: 9040 - protein, 98 aa, Zea mays
  misc_feature: Ceres CLONE ID no. 1479784
  misc_feature: Ceres CDNA ID no. 25447071
  misc_feature (1)..(25): Pfam Name: efhand PFAM Desc: EF hand
  misc_feature: Homolog of GI Number: 50904487 NR Desc: B1147A04.10
  misc_feature: Homolog of GI Number: 5391446 NR Desc: pollen allergen Jun o 4
  misc_feature: Homolog of GI Number: 50912473 NR Desc: putative calcium binding protein
  misc_feature: Homolog of GI Number: 71040671 NR Desc: calcium
  misc_feature: Homolog of GI Number: 19310789 NR Desc: putative calcium
  misc_feature: Homolog of GI Number: 6901652 NR Desc: calcium
  misc_feature: Homolog of GI Number: 51536206 NR Desc: calmodulin
  misc_feature: Homolog of GI Number: 66780099 NR Desc: PE
  misc_feature: Homolog of GI Number: 66776103 NR Desc: LigA
  misc_feature: Homolog of GI Number: 66778899 NR Desc: UvrD/REP helicase
MLARADADRDGRLSVEEFLDVMNAGELGLGALGAVLQSALPTLEAAGGALVGADELARALGALGSASAEDCAAIVECLDGDGDGAITIEEFRLMADLL

SEQ ID NO: 9041 - DNA, 854 bp, Zea mays
  misc_feature: Ceres CLONE ID no. 1479841
  misc_feature: Ceres CDNA ID no. 40351986
  CDS (95)..(526): REFERENCED BY SEQ ID NO: 9042
aacctcccgcagccgccacctcaacccaggaacagagcgaggcgacgccgcggcacctcttctccgttgatattgattatttaggcgaagggaaatggcaaccgttccaggggatctgatctggcaggttgtgaggaagaacaactccttccttgtgaagcagttcggcaacggcaatgccaaggtgcagttcaccaaggagccgaacaacctctacaacatccactccttcaaacactcgggtttggcgaacaagaagactgtgacgatccagccagctgcaaaggactcggctgtggtcctctctactaccaagaccaagaagcagaacgcacctgcgaagctcagccacaagtctgtgatgcgcaaggagttccgcaagatggccaaggctgtgaaaaaccaggttagtgacaactactacaggcctgatctgaccaagccagctcttgctaggctaagctcggtgtaccgcagcctccaggttgccaagtccggtgtcaagaagaagaacaggcagtcctaagcgctaagtttgtgttctgtcagggggcatgttggtgctcgtagtcccagcttatatttatctatgttccaacagttttgagacttgttagaactgagcaaaccatgttaagatgctgctgtgtgtcattccttaaaaaaattgccttgcactttgtgattactgtctcgttgctgtgtgtcattctatgacaaatcgtttgtcgcttgattgtgctttgtttgtaaacttgcttgtcgtgactagcacttgttatcgcatttttgattggttctgtaaacaatatccgataaacaagattagtatcctgtaaaaaaaaaaaaaaaaa

SEQ ID NO: 9042 - protein, 143 aa, Zea mays; identical to SEQ ID NO: 712
  misc_feature: Ceres CLONE ID no. 1479841
  misc_feature: Ceres CDNA ID no. 40351986
  misc_feature: null
  misc_feature: Useful for making plants with altered oil content
  misc_feature (5)..(136): Pfam Name: Ribosomal_L28e PFAM Desc: Ribosomal L28e protein family

SEQ ID NO: 9043 - DNA, 651 bp, Glycine max
  misc_feature: Ceres CLONE ID no. 1479960
  misc_feature: Ceres CDNA ID no. 35383435
  CDS (60)..(461): REFERENCED BY SEQ ID NO: 9044
attttaccctcgtcatctgatccgaattccttctgctcgttttgcccgacagatcaaagatggcggtgccgcttctgacgaggaagatcgtgaagaagagggtcaagcacttcaagagggcccatagcgaccgctacattggcctcaagcaaagctggcgcaggccaaagggtatcgattcccgtgtcaggagaaagttcaagggatgcaccttgatgcccaacattggctacggttctgacaagaagacgaggcattaccttcccaacaagttcaagaagtttgttgtccacaatgtctctgagctggagctgcttatgatgcacaacaggacctactgtgcggagatcgcccacaacgtctccaccaagaagcgcaaggacattgttgagcgtgctgctcagctcgacatcgtggttacgaacaagcttgccaggctccgcagccaggaggacgagtagactgtctgtcagaagtatgttttggtctggttcgtatgtaggaaagtattccgctgttcgttttgtgactgtcaggggtatctgttattccaacctttttgctaccagtgccgactgtaatgtgtcaaagatctactattgcctttataatctagatccgattgccaattgctgaaaaaaaaaaaaaaaa

SEQ ID NO: 9044 - protein, 133 aa, Glycine max
  misc_feature: Ceres CLONE ID no. 1479960
  misc_feature: Ceres CDNA ID no. 35383435
  misc_feature (14)..(123): Pfam Name: Ribosomal_L32e PFAM Desc: Ribosomal protein L32
  misc_feature: Homolog of GI Number: 76057835 NR Desc: ribosomal L32
  misc_feature: Homolog of GI Number: 50947773 NR Desc: putative ribosomal protein L32
  misc_feature: Homolog of GI Number: 13899057 NR Desc: ribosomal protein L32
  misc_feature: Homolog of GI Number: 40287540 NR Desc: ly200 protein
  misc_feature: Homolog of GI Number: 71534997 NR Desc: ribosomal protein L32
  misc_feature: Homolog of GI Number: 77745481 NR Desc: ly200
  misc_feature: Homolog of GI Number: 23198054 NR Desc: ribosomal protein L32
  misc_feature: Homolog of GI Number: 21555143 NR Desc: ribosomal protein L32
  misc_feature: Homolog of GI Number: 10177580 NR Desc: ribosomal protein L32
  misc_feature: Homolog of GI Number: 50754636 NR Desc:  similar to 60S ribosomal protein L32
MAVPLLTRKIVKKRVKHFKRAHSDRYIGLKQSWRRPKGIDSRVRRKFKGCTLMPNIGYGSDKKTRHYLPNKFKKFVVHNVSELELLMMHNRTYCAEIAHNVSTKKRKDIVERAAQLDIVVTNKLARLRSQEDE

SEQ ID NO: 9045 - DNA, 772 bp, Zea mays
  misc_feature: Ceres CLONE ID no. 1480361
  misc_feature: Ceres CDNA ID no. 40351987
  CDS (131)..(601): REFERENCED BY SEQ ID NO: 9046
agtgccgcagaacggaccaccaggttggcgttgctggaagagaaggagctgtcggcggtgcttaaaacctgtgctctacctactggcgtagccaggaagatagtacagcctgccgctgccaagtacagttatgcattccaagtccccagagaagcaatcacttctgggatcgaggagaaacccagcaaataatgggagtacggaggatgaaaagggagacggcgggatcccatggctgacatttctggggttcgtgttcctgaccttcaactcgggcatggcgatctaccgctcggaccgcgaccccgggtcaatagcgttcgtgtcgggctcgtacgtcgacctgctgctgctcttcctctgccttcgcctgttcgagcggacgccgcctgactcgccgcgccgggggtggatcaaggcctgcgtctgggggctgaccacgctgctcaccgtcatgttctcgcagaaggtggccgccatcatgccgccgctgctggcgctcgtcgtgtgggcgatggcgttcgccaccatcggcggtggcttctacgcgttcttcatccacaaggacaaggccgcccttgtggaggcggagaacccgtagatgtctctgccgctgccatgcgctcgtggctgtttcagactatctccagccccggtcctatgattttgaggcctctagtcgaactgatcatggtggaccctctagactataaaaaaaattctatattatacaatagagcatattaatacttcgtaaaaaaaaaaaaaaaaa

SEQ ID NO: 9046 - protein, 156 aa, Zea mays
  misc_feature: Ceres CLONE ID no. 1480361
  misc_feature: Ceres CDNA ID no. 40351987
MHSKSPEKQSLLGSRRNPANNGSTEDEKGDGGIPWLTFLGFVFLTFNSGMAIYRSDRDPGSIAFVSGSYVDLLLLFLCLRLFERTPPDSPRRGWIKACVWGLTTLLTVMFSQKVAAIMPPLLALVVWAMAFATIGGGFYAFFIHKDKAALVEAENP

SEQ ID NO: 9047 - DNA, 1108 bp, Glycine max
  misc_feature: Ceres CLONE ID no. 1481970
  misc_feature: Ceres CDNA ID no. 36582313
  CDS (83)..(844): REFERENCED BY SEQ ID NO: 9048
actcgcagttgtattgttgaacaagggtttctctgtctgcttcttcactttctctcgtttcaatcgaaaccaaaacaaaaacatgggcagaaaattcttcgtcggtggcaactggaaatgcaatgggaccactgaggaggtaaagaagattgttactactttgaatgaggctaaagtccctggagaagatgtcgtagaagttgttgtgagccctccttttgtgttccttcctgttgtaaaaagtttgctgcgccctgatttccatgtttcggcacaaaactgttgggttcgcaaaggtggtgcttataccggtgaggttagtgctgaaatgcttgttaatttgggaattccttgggttattattggtcactctgaacggaggcagcttttaaatgaatcaaacgagtttgtgggagataaagttgcctatgcacttcaacaaggtctaaaagttattgcatgcattggggagactctcgaacagcgtgaagctggtacaacaacggctgttgtttctgagcaaacaaaagcaattgcagctaaaatatcaaattgggacaatgttgttttggcctacgagccagtttgggccattggaacaggaaaggttgctactcctgctcaggctcaagaggtccatgctgatttgaggaaatgggttcatgacaatgtgagtgccgaagttgctgcatctgtaagaattatctatggaggttctgtaaatggaggaaactgcaaagaattggccgcacagcccgatgttgatggatttttggttggtggtgcctccctgaagccggagttcgtggacatcataaatgctgccactgtgaagaagaattgaaattcgtagttaggaactgatataatgctgcctttcaagctgcttcggaaattgctgtttttgagttttggatctgtgctttgtggccaatgttttgaactctgtttagtactgaataaacacgctttcctttgagatctcatccataggcgatcaattggattttgattaaatttctgaatgcaaaaatagtgtaactaccataacatttggtgggtaaataatgttgaacgcctagttgactgaaaaaaaaaaaaaaaaaaa

SEQ ID NO: 9048 - protein, 253 aa, Glycine max
  misc_feature: Ceres CLONE ID no. 1481970
  misc_feature: Ceres CDNA ID no. 36582313
  misc_feature (5)..(245): Pfam Name: TIM PFAM Desc: Triosephosphate isomerase
  misc_feature: Homolog of GI Number: 77540216 NR Desc: triosephosphate isomerase
  misc_feature: Homolog of GI Number: 48773765 NR Desc: triosephosphate isomerase
  misc_feature: Homolog of GI Number: 57283985 NR Desc: triose
  misc_feature: Homolog of GI Number: 76573375 NR Desc: triosphosphate isomerase
  misc_feature: Homolog of GI Number: 556171 NR Desc: triosephosphate isomerase
  misc_feature: Homolog of GI Number: 602590 NR Desc: triosephosphate isomerase
  misc_feature: Homolog of GI Number: 77745458 NR Desc: triose phosphate isomerase cytosolic isoform
  misc_feature: Homolog of GI Number: 168647 NR Desc: triosephosphate isomerase 1
  misc_feature: Homolog of GI Number: 38112662 NR Desc: triose phosphate isomerase cytosolic isoform
  misc_feature: Homolog of GI Number: 14030671 NR Desc: AT3g55440/T22E16_100
MGRKFFVGGNWKCNGTTEEVKKIVTTLNEAKVPGEDVVEVVVSPPFVFLPVVKSLLRPDFHVSAQNCWVRKGGAYTGEVSAEMLVNLGIPWVIIGHSERRQLLNESNEFVGDKVAYALQQGLKVIACIGETLEQREAGTTTAVVSEQTKAIAAKISNWDNVVLAYEPVWAIGTGKVATPAQAQEVHADLRKWVHDNVSAEVAASVRIIYGGSVNGGNCKELAAQPDVDGFLVGGASLKPEFVDIINAATVKKN

SEQ ID NO: 9049 - DNA, 839 bp, Zea mays
  misc_feature: Ceres CLONE ID no. 1482316
  misc_feature: Ceres CDNA ID no. 25892901
  CDS (94)..(654): REFERENCED BY SEQ ID NO: 9050
cgaaaaatccaccgctcgaactctccgaaaatttcacgcgcgctcagcacaagtagcagtttcagtttcagagctccgcttcagttagccacaatgcctgccctcgccaagcccgccgccgcggcaccgaagccgaagccctccgccgccaagccgaagaaggccgccgccggccccgcccacccggcctacttcgagatgatcaaggaggcgatcgcggcgctcaaggacaggaccgggtccagctcggtcgccatcgccaagtacatcgaggagaagcacggcaagtctctcccggccaacttcaagaagatgctctccgtccagctccgcgcctccgccgccaagggcaagctcgtcaaggtcaaggcctcctacaagctctccgacgccgccaagaaggacgcgcccaagcccaaggccaagcccgcagcccccaaggctgcggcgaagcccgcaaaggacggcgccaaggccaagaagaaggcgtccgcgaagcccaagaaggccgccgccggcacgaagcgcaaggcgccggagaagaagacgctggtcgccaaggccaagaagtcgcccgcggccaaggccaaggcaaagccgaagaccgtccgctccccggccgccaagaagggccgcaaggtcgccgccgcttgatctgttccgatggcatgatgggttttagttgcccttggtgtgtttgtgttcagggtatgtacaaaatggatgcctcatcctccctgatttaggtctcgattctgctaggcagtttctatgtatcgtgtgtggtgtttaagtttatgaaattgttaggtttccggagatgaaaaaaaaaaaaaaaa

SEQ ID NO: 9050 - protein, 186 aa, Zea mays
  misc_feature: Ceres CLONE ID no. 1482316
  misc_feature: Ceres CDNA ID no. 25892901
  misc_feature (29)..(99): Pfam Name: Linker_histone PFAM Desc: linker histone H1 and H5 family
  misc_feature: Homolog of GI Number: 22135471 NR Desc: histone H1
  misc_feature: Homolog of GI Number: 50921921 NR Desc: OSJNBb0018J12.6
  misc_feature: Homolog of GI Number: 5230785 NR Desc: histone H1 WH1B.1
  misc_feature: Homolog of GI Number: 13540397 NR Desc: histone H1
  misc_feature: Homolog of GI Number: 13540399 NR Desc: histone H1
  misc_feature: Homolog of GI Number: 4106696 NR Desc: ribosome
  misc_feature: Homolog of GI Number: 4996567 NR Desc: ribosome
  misc_feature: Homolog of GI Number: 21465097 NR Desc: histone H1
  misc_feature: Homolog of GI Number: 5230788 NR Desc: histone H1 WH1A.3
  misc_feature: Homolog of GI Number: 30420970 NR Desc: histone H1
MPALAKPAAAAPKPKPSAAKPKKAAAGPAHPAYFEMIKEAIAALKDRTGSSSVAIAKYIEEKHGKSLPANFKKMLSVQLRASAAKGKLVKVKASYKLSDAAKKDAPKPKAKPAAPKAAAKPAKDGAKAKKKASAKPKKAAAGTKRKAPEKKTLVAKAKKSPAAKAKAKPKTVRSPAAKKGRKVAAA

SEQ ID NO: 9051 - DNA, 950 bp, Zea mays
  misc_feature: Ceres CLONE ID no. 1482384
  misc_feature: Ceres CDNA ID no. 40351988
  CDS (413)..(736): REFERENCED BY SEQ ID NO: 9052
agagatagaatgtgaatgacagccgctcaaaggcagcaaaagtgaaccgccgtagcgtgttgccaaggccgcgggagtggaggtgcggcgtctcgcggagactgcagtaaaggcaatcgtggcttggcgacgaagcgatgaggtgcggacacaccggcggctcatgacagaggtagcggcggctcaaagcagtagctcggaggcggcgtatatcgaaggcggcccgcagcggctctcatcatcgtgtgaggtggtgagggctcaaggcacagcgcggcgcgcgacggcaacaacttcaaaaaacgaggcttcgtcggcggaggccgcggtcggcttggaacagaggtttggggcgactcggagtgaagacgaccggcgagggtgaaggccggccgacccgaagcggctcaacatgacgggcgaacacggtggtcagcccggggtcaaccacagcgggagtaggcagcgagccggcgagcagctggaggctctggcttgttgtcgtaatagatggcaattgctggcggccggcggccggcggcttgcaggccgtggctgtggaggcagcgcggggttggttttgacccggagacagcgcgacgaggccggctcaggtcggtttagcagcggtcggggcggcgcgcatgatgagggcagtccgggtggctcaaggatgctgaaggcgattcaaggcacggacgttgacctggtagcggtaggcggctcgcactgctgacggaggtgaggacgagacggagacaagtccgtggcttgatccacttcccctcgtggcctagacattgtatctgatgtatctttaggttggacgtactgtgtgcatgtacgcggttacgtagttttctcccaatctgctcataggtagctaattagaacttgagtttcttcattgcttgaataaatactccttggaactaaaaaaaaaaaaaaaa

SEQ ID NO: 9052 - protein, 107 aa, Zea mays
  misc_feature: Ceres CLONE ID no. 1482384
  misc_feature: Ceres CDNA ID no. 40351988
MTGEHGGQPGVNHSGSRQRAGEQLEALACCRNRWQLLAAGGRRLAGRGCGGSAGLVLTRRQRDEAGSGRFSSGRGGAHDEGSPGGSRMLKAIQGTDVDLVAVGGSHC

SEQ ID NO: 9053 - DNA, 639 bp, Zea mays
  misc_feature: Ceres CLONE ID no. 1482391
  misc_feature: Ceres CDNA ID no. 25446140
  CDS (2)..(430): REFERENCED BY SEQ ID NO: 9054
gaggagatcgagcagtcatatcgatctgatggggggagagcagcagctcgctccggcggcggcccgcgtcaccccgcgtcggccgatgatgtccttccgggtgccgcggagactggtggccagcagagcggcgggtggagcgtcgccgtcgccgccggtgccggcggggctaaagaaaaagaagaagaaggtggcggtggcgaggctcggtgggaagaggaggctcttcggcgcgatccggcggctccggatgcggtggctggccgtgctgtacaggcgcacgctgcggcggctgcgcgcctactacgccacggcgatcaacgacctcctcgagggcgccgccgccatcggctccctccgcgggccggccggtgccgccgactgcgccttcggcaccgcgttcgcgccggtcgtcgccgtcggcctctgatgagctcgcacgcccgccgtctgcatgcactccatacggcgagcccgtatggtggtctgcttgtatagaggataatctcgatcgctatcgttttctcgtccatatgcatcgtctgattgtctctaccgtatggcatcttttttatggatcgatctcaatcaagaatcagaaaagagtacacaaacatacaaagaaaaaaaaaaaaaaaa

SEQ ID NO: 9054 - protein, 133 aa, Zea mays
  misc_feature: Ceres CLONE ID no. 1482391
  misc_feature: Ceres CDNA ID no. 25446140
MGGEQQLAPAAARVTPRRPMMSFRVPRRLVASRAAGGASPSPPVPAGLKKKKKKVAVARLGGKRRLFGAIRRLRMRWLAVLYRRTLRRLRAYYATAINDLLEGAAAIGSLRGPAGAADCAFGTAFAPVVAVGL

SEQ ID NO: 9055 - DNA, 627 bp, Zea mays
  misc_feature: Ceres CLONE ID no. 1482415
  misc_feature: Ceres CDNA ID no. 25446141
  CDS (11)..(400): REFERENCED BY SEQ ID NO: 9056
aacaaacaaaatggatcgtggcccactggaccacggtcgtagacagcccggctgggcgtcgaagtctctccgctcaagacacgggcccacgtccacagatcggaggagagcactggcttgtatccctctctcgtctctccagcgacggcagcgggcgagggttacgcgaaggcgaagcggagtagtggaagcagaggcggcagccatggccgtgatggagaagctcaagatctttgtcgttaaggagcccgtagtcgcggcctcctgcctcatcgctggattcggtctctttcttccagcagttgtccggccaatcctggattcatggcagaccgcggaacaagttcctccacctcttctaaatgatgtggttgcaggtgtcaccggcaagaaaaagtagtgaacttgcattgttttctcatgccaatgttgccccacattttcttccccgtgttttttctggcgaccagattggaaggcttttcccaagagtcacggtcttgaactctagatggtatccgcggaataatcattgtacctgaatcatatactgcaatgtggcagttttgaaaatgtttcccctcctacaaaggttgatagaatgccataccaaaaaaaaaaaaaaaa

SEQ ID NO: 9056 - protein, 64 aa, Zea mays
  misc_feature: Ceres CLONE ID no. 1482415
  misc_feature: Ceres CDNA ID no. 25446141
  misc_feature: Homolog of GI Number: 55908883 NR Desc: putative fiber protein
  misc_feature: Homolog of GI Number: 25992541 NR Desc: fiber protein Fb11
  misc_feature: Homolog of GI Number: 34910368 NR Desc: P0684B02.18
MAVMEKLKIFVVKEPVVAASCLIAGFGLFLPAVVRPILDSWQTAEQVPPPLLNDVVAGVTGKKK

SEQ ID NO: 9057 - DNA, 798 bp, Zea mays
  misc_feature: Ceres CLONE ID no. 1482428
  misc_feature: Ceres CDNA ID no. 35383436
  CDS (27)..(317): REFERENCED BY SEQ ID NO: 9058
gacgcgagaaggcagggggagagaaaatggcgtatttgtcccgcacagccgccgccgtcgccgtcgccgtgaggtcggcggtccgctccgcacctctcactggccgcgtcctcggagcgccactgccttcccttgcctcgccttccgctgcccggtccgcccgaatcctccgcaggacggcggccgcggcgtcggcggggctggagactctaatgccgctgcacagcgcggtggcggccgcgcggcttaggtcctgcatcgccgtcgactcctcgtgctggagctcgctctcgcaaggtttaaacaagcgcatctgatcatggctaggagctgagcacagaagagaagtgaggacaacgagttagaacgaagtcatctcttttgcagatatttgtaacatgtactactttggttgttgctctatgtgtttgctcatgtcttcaatggagcatgcaaaatagttccttgtaacttgcttggctcttattttcagtttggtcatgagctatgctgaaggaaaaaacttgtacttgtaataaaaaaacacttcagttttttctttaggtgtgcaaaattactccatttgaaataatggcagcatatggtattacatcttgtatccatggcctgacttgctcttgtatttggtgatataggatatgctttgcctttatgagaggagaggtgcacctgaagaaaccaatgaacattaggaattacaaacaagggctgtaataatgtgattgttgtaaactaattttacctttgatgttcattgaatcaaaaaaaaaaaaaaaa

SEQ ID NO: 9058 - protein, 96 aa, Zea mays
  misc_feature: Ceres CLONE ID no. 1482428
  misc_feature: Ceres CDNA ID no. 35383436
  misc_feature: Homolog of GI Number: 34913910 NR Desc: OSJNBa0024F24.29
MAYLSRTAAAVAVAVRSAVRSAPLTGRVLGAPLPSLASPSAARSARILRRTAAAASAGLETLMPLHSAVAAARLRSCIAVDSSCWSSLSQGLNKRI

SEQ ID NO: 9059 - DNA, 592 bp, Zea mays
  misc_feature: Ceres CLONE ID no. 1482533
  misc_feature: Ceres CDNA ID no. 29191782
  CDS (65)..(481): REFERENCED BY SEQ ID NO: 9060
aatcacagacgcatctttccattaaacaatttaccctctcttcaccaaactcaatcaatcgataatggcacccaaggcggcagagaagaaaccggcggagaagaagccagccgagaaatcaccggcggagaagcgtccaaaggcggagaagaagatctcgaaggaaggaggaagcgacaagaagaagaagaaatcgaagaagagcgtggagacgtacaagatctacatcttcaaggtcctgaagcaggttcatcccgatatcggaatctcgggtaaagcgatggggatcatgaacagtttcatcaacgacatattcgagaaactggcgcaggaatcatcgaagctcgctaggtacaacaagaagccgacgattacgtcgagggagatccagacggcggttaggcttgtgttgcccggagagctcgcgaaacacgccgtctctgaggggactaaggcggttaccaaattcacaagcacttagggattgaaatgtttaggttttaattgttctttggttgatgaatcgattgtattcaattagtgagatcatttgaatgaacagctttctttttaatgaaaaaaaaaaaaaaaa

SEQ ID NO: 9060 - protein, 138 aa, Zea mays; identical to SEQ ID NO: 5068
  misc_feature: Ceres CLONE ID no. 1482533
  misc_feature: Ceres CDNA ID no. 29191782
  misc_feature: No seed is being produced by the plant
  misc_feature: The plant flowers significantly late compared to wild-type.
  misc_feature: Useful for biocontainment applications
  misc_feature: Useful for making plants with modulated flowering time
  misc_feature (45)..(117): Pfam Name: Histone PFAM Desc: Core histone H2A/H2B/H3/H4
  misc_feature: Homolog of GI Number: 6729516 NR Desc: histone H2B
  misc_feature: Homolog of GI Number: 21592734 NR Desc: putative histone H2B
  misc_feature: Homolog of GI Number: 7635498 NR Desc: histone H2B
  misc_feature: Homolog of GI Number: 30024116 NR Desc: putative histone H4
  misc_feature: Homolog of GI Number: 3021489 NR Desc: histone H2B
  misc_feature: Homolog of GI Number: 2558962 NR Desc: histone H2B1
  misc_feature: Homolog of GI Number: 21536602 NR Desc: histone H2B
  misc_feature: Homolog of GI Number: 3021483 NR Desc: histone H2B
  misc_feature: Homolog of GI Number: 82400146 NR Desc: histone H2B
  misc_feature: Homolog of GI Number: 2746719 NR Desc: histone H2B

SEQ ID NO: 9061 - DNA, 684 bp, Zea mays
  misc_feature: Ceres CLONE ID no. 1482731
  misc_feature: Ceres CDNA ID no. 40351989
  CDS (46)..(510): REFERENCED BY SEQ ID NO: 9062
aaaaattcattgatcgaaaaaaagaaaaaagaaagaaaagaaaagatgcagatcttcgtgaaaaccttgaccggcaaaaccataaccctagaggttgaaagcagcgacaccatcgacaatgtcaaatccaaaatccaggacaaagaggggataccacctgatcaacagaggctcatctttgctgggaaacaacttgaggatggtcgaacgctagctgactacaacattcagaaagagtccactcttcacttggttctgaggcttaggggtgggaccatgatcaaggtcaagactctcactggtaaagaaatcgaaattgatatcgaacctaccgatactattgaccggatcaaggaacgtgttgaggagaaagaaggcatccctcctgttcaacaaaggctcatctatgctgggaaacagctagctgatgacaaaacggcaaaggactacaacatagagggaggctctgttcttcatctggtccttgctctcaggggtggttctgactaaataactatttgctctagagttcctttcaatggctttggttggttgaatccatgagacaaagtgaatacaatttggatttcgtgctttggttactatgatgctatttcagctggtttggatcaatttaccaaaaaaaaaaaaaaaaaaaaaaaaaaaagaaaaaaaaaaaaaaaa

SEQ ID NO: 9062 - protein, 154 aa, Zea mays
  misc_feature: Ceres CLONE ID no. 1482731
  misc_feature: Ceres CDNA ID no. 40351989
  misc_feature: The plant flowers significantly late compared to wild-type.
  misc_feature: null
  misc_feature: Useful for making plants with modulated cold sensitivity
  misc_feature: Useful for making plants with modulated flowering time
  misc_feature (1)..(74): Pfam Name: ubiquitin PFAM Desc: Ubiquitin family
MQIFVKTLTGKTITLEVESSDTIDNVKSKIQDKEGIPPDQQRLIFAGKQLEDGRTLADYNIQKESTLHLVLRLRGGTMIKVKTLTGKEIEIDIEPTDTIDRIKERVEEKEGIPPVQQRLIYAGKQLADDKTAKDYNIEGGSVLHLVLALRGGSD

SEQ ID NO: 9063 - DNA, 805 bp, Zea mays
  misc_feature: Ceres CLONE ID no. 1482845
  misc_feature: Ceres CDNA ID no. 29191783
  CDS (121)..(639): REFERENCED BY SEQ ID NO: 9064
accgcaagaaacaaagctccaatcttttcctcctccgccgccgtcgccgcgtctcctccccaatccccaatccccgatccgtccgcccccgatcccacccccagcccggatccagcagcgatggcggccgcgggagacgccggcgagaagaagatggtgacgctcaagagctcggacggggaggagttcgaggtggaggaggcggtggccatggagtcgcagaccatccggcacatgatcgaggacgactgcgccgacaacggcatcccgctccccaacgtcacctccaagatcctctccaaggtcatcgagtactgcaacaagcacgtccaggccaaacccgccgacgccgccgccgccggggccgccgcgcccgacgccgccgcgccccccgccgaggacctcaagaactgggacgccgagttcgtcaaggtcgaccagaccaccctcttcgacctcatcctggccgcaaacttcctcaacatcaaggggctgctggacctgacctgccagacggttgcggacatgatcaagggcaagaccccggaggagatccgcaagaccttcaacatcaagaacgacttcacgcccgaggaggaggaggagatccgcagggagaaccagtgggcctttgagtagaggcctttgagtagagatcatgtaggcgatgccgtccgcgctggatgaacaatgcttagtattcgtcatgtctgcgtcttagcgccctttttcatgtcatcataatggtttcatcgaacagccgctcgtgtgaagccctgaccctttggtaaaaaaaaaaaaaaaa

SEQ ID NO: 9064 - protein, 172 aa, Zea mays
  misc_feature: Ceres CLONE ID no. 1482845
  misc_feature: Ceres CDNA ID no. 29191783
  misc_feature (11)..(71): Pfam Name: Skp1_POZ PFAM Desc: Skp1 family
  misc_feature (95)..(172): Pfam Name: Skp1 PFAM Desc: Skp1 family
  misc_feature: Homolog of GI Number: 40644754 NR Desc: putative SKP1 protein
  misc_feature: Homolog of GI Number: 32330695 NR Desc: SKP1/ASK1
  misc_feature: Homolog of GI Number: 7378764 NR Desc: putative kinetochore protein
  misc_feature: Homolog of GI Number: 47054182 NR Desc: skp1 protein
  misc_feature: Homolog of GI Number: 77550711 NR Desc: Skp1 family
  misc_feature: Homolog of GI Number: 28466911 NR Desc: At5g42190
  misc_feature: Homolog of GI Number: 3719211 NR Desc: UIP2
  misc_feature: Homolog of GI Number: 52076056 NR Desc: putative UIP2
  misc_feature: Homolog of GI Number: 18958257 NR Desc: kinetochore protein
  misc_feature: Homolog of GI Number: 21281127 NR Desc: putative SKP1/ASK1 protein At1
MAAAGDAGEKKMVTLKSSDGEEFEVEEAVAMESQTIRHMIEDDCADNGIPLPNVTSKILSKVIEYCNKHVQAKPADAAAAGAAAPDAAAPPAEDLKNWDAEFVKVDQTTLFDLILAANFLNIKGLLDLTCQTVADMIKGKTPEEIRKTFNIKNDFTPEEEEEIRRENQWAFE

SEQ ID NO: 9065 - DNA, 518 bp, Zea mays
  misc_feature: Ceres CLONE ID no. 1482907
  misc_feature: Ceres CDNA ID no. 36706883
  CDS (74)..(322): REFERENCED BY SEQ ID NO: 9066
attgattgatcggacggacgcgcgtctccggtcccgtccgtaataacactgatccgatccacgccggccggcgatggagctcatcaagtccagggcgaccgtgtgcgcgctcctcctggcgctgctcctgctctcacactacgacggcgggacgacgacgacgatggtggcggaggcccgggtgtgcatgggcaagagccagcaccactcgttcccctgcatctccgaccgcctctgcagcaacgagtgcgtcaaggaggacggcgggtggaccgccggctactgccacctccgctactgcaggtgccagaaggcgtgctaagcaaagctcttgaaacacccttggcttgccagaactgaactgtggtagtactaagtaacacccttggctagctgtgcacaacctacgtaccgtgcatgcatgtaatgtggtgtcatgtaacgtgacagcaataaatattaataacaataataacacggcatgtagcctttgcatgcttctaaaaaaaaaaaaaaaa

SEQ ID NO: 9066 - protein, 82 aa, Zea mays; identical to SEQ ID NO: 4784
  misc_feature: Ceres CLONE ID no. 1482907
  misc_feature: Ceres CDNA ID no. 36706883
  misc_feature (36)..(82): Pfam Name: Gamma PFAM Desc: Gamma
  misc_feature: Homolog of GI Number: 2130034 NR Desc: gamma
  misc_feature: Homolog of GI Number: 2501197 NR Desc: Gamma
  misc_feature: Homolog of GI Number: 1173436 NR Desc: Small protein inhibitor of insect alpha
  misc_feature: Homolog of GI Number: 7451437 NR Desc: gamma
  misc_feature: Homolog of GI Number: 7451438 NR Desc: omega
  misc_feature: Homolog of GI Number: 533692 NR Desc: protease inhibitor

SEQ ID NO: 9067 - DNA, 703 bp, Zea mays
  misc_feature: Ceres CLONE ID no. 1483044
  misc_feature: Ceres CDNA ID no. 25447464
  CDS (126)..(413): REFERENCED BY SEQ ID NO: 9068
tctcccgttccgatcgccaattcgtcttccaccgcctgcaacccttcttcccttctccgtcatcgtgacggcatcacgcgcgcgctctcctctcccacgagtccgtcagcctgctaagtcttaagatggcgtcaagcaatggtcagacagaagctccagcaccatctgtccccaaaaatcccgctatggcatcatgccggaagaagaaaacagatgatgctaccttccttgaagatctgaaagaccacatggatgagttcattcatgcctctatggatgagcacaagacctgctttaagaagacaattcagaagatgtttgggatgtcgaaggctgttgcagagagatccgcggaagcaaacaaagctgaagttgaaagtgctttgccacttcagaccagtgtctcgcagtagaatttcatgttggtagtttcttgctcgtgccaatagttttataagggtttttgttgctgtgttttctgaaacgcataagcgtgtcagtagcatgttttcataaccggattgtagtgcttcattatctatagttttctgtacgtgtaaaatagaccagcgtaacagcgtagtttgcttcattctccgaagtcttgtatggctgtacacccaggcatctgggcatcatgaacccaactgattggctaaatgaaataaatctcctccatccaacagcaaaaaaaaaaaaaaaa

SEQ ID NO: 9068 - protein, 95 aa, Zea mays
  misc_feature: Ceres CLONE ID no. 1483044
  misc_feature: Ceres CDNA ID no. 25447464
MASSNGQTEAPAPSVPKNPAMASCRKKKTDDATFLEDLKDHMDEFIHASMDEHKTCFKKTIQKMFGMSKAVAERSAEANKAEVESALPLQTSVSQ

SEQ ID NO: 9069 - DNA, 1706 bp, Zea mays
  misc_feature: Ceres CLONE ID no. 1483061
  misc_feature: Ceres CDNA ID no. 25446620
  CDS (119)..(1474): REFERENCED BY SEQ ID NO: 9070
gaaccgcagagacaggcgtcttcgtactcgcctatctccgcgacccaaagcgttcccccttctcccattcttctctcatttctcaccaccgccgccgctaccccctttcgacaacaccatgagggagtgcatctcgatccacatcggccaggccggtatccaggtcggaaacgcgtgctgggagctgtactgcctcgagcatggcattcaggctgatggtcagatgcccggtgacaagaccattgggggaggtgatgatgctttcaacaccttcttcagtgagactggcgctgggaagcacgtcccccgtgctgtttttgttgaccttgagcccactgtcatcgatgaggtgaggactggcacctatcgccagctcttccatcctgagcagctcatcagtggcaaggaggatgcagccaacaacttcgctcgtggtcactacaccattggcaaggagattgttgacctgtgccttgaccgcatcaggaagcttgcagataattgcactggtctccagggcttcctcgtcttcaacgctgttggtggaggaacgggctctgggcttggttctctcctcctggagcgcctgtctgttgactatggcaagaagtccaagctcggtttcaccgtgtacccatccccccaggtgtccacatccgtggttgagccatacaacagtgtcctgtccacccactctctcctcgagcacactgatgttgctgtcctgctcgacaatgaggccatctatgacatctgccgccgctcccttgacattgagcgcccaacctacaccaacctcaacaggcttgtctcccaggtcatctcatccctgacggcttccctgaggttcgatggtgctctgaacgttgatgtgaacgagttccagaccaacctggtgccctacccgaggatccacttcatgctttcgtcctacgctccagtcatttctgctgagaaggcctaccacgagcagctgtccgtggccgaaatcaccaacagcgccttcgagccatcctccatgatggccaagtgcgacccccgccatggcaagtacatggcatgctgcctcatgtaccgtggtgatgtggttcccaaggacgtgaacgctgctgtggccacaatcaagaccaagcgcaccatccagttcgtggactggtgcccgactggcttcaagtgcggaatcaactaccagcctcccagcgtcgtccccggcggtgacctggccaaggtgcagcgtgccgtgtgcatgatctccaactccaccagtgttgtggaggtcttctcccgcattgaccacaagttcgacctcatgtacgccaagcgcgccttcgtgcactggtacgtcggtgagggtatggaggagggcgagttctccgaggctcgtgaggatctggctgcgctcgagaaggactacgaggaggtcggtgctgagtttgacgagggtgaggacggcgacgagggtgacgagtactagacgctctactggcgcggcgtcgtcgggcttgtgtgccactgctatcctgtgatctgccctgagtggctcctatcgtgttatgtttctgtcggttcttatctatctgtcgttgtgtggtttacaacttacgttgtaagactttattcccccgctttgctactgggttattaagtttggcgttattgttttcttgatctctgagatgctttgctttaaaaaaaaaaaaaaaaaa

SEQ ID NO: 9070 - protein, 451 aa, Zea mays
  misc_feature: Ceres CLONE ID no. 1483061
  misc_feature: Ceres CDNA ID no. 25446620
  misc_feature: null
  misc_feature: Useful for making plants with altered cell wall content and/or composition
  misc_feature (248)..(393): Pfam Name: Tubulin_C PFAM Desc: Tubulin/FtsZ family
  misc_feature (49)..(246): Pfam Name: Tubulin PFAM Desc: Tubulin/FtsZ family
  misc_feature: Homolog of GI Number: 50761268 NR Desc:  similar to MGC53359 protein
  misc_feature: Homolog of GI Number: 61842963 NR Desc:  similar to Tubulin alpha
  misc_feature: Homolog of GI Number: 61873938 NR Desc:  similar to Tubulin alpha
  misc_feature: Homolog of GI Number: 57106090 NR Desc:  similar to Tubulin alpha
  misc_feature: Homolog of GI Number: 57111031 NR Desc:  similar to Tubulin alpha
  misc_feature: Homolog of GI Number: 61877037 NR Desc:  similar to alpha tubulin
  misc_feature: Homolog of GI Number: 57107137 NR Desc:  similar to alpha
  misc_feature: Homolog of GI Number: 55637949 NR Desc:  similar to tubulin alpha 6
  misc_feature: Homolog of GI Number: 50750584 NR Desc:  similar to tubulin alpha
  misc_feature: Homolog of GI Number: 57106372 NR Desc:  similar to tubulin
MRECISIHIGQAGIQVGNACWELYCLEHGIQADGQMPGDKTIGGGDDAFNTFFSETGAGKHVPRAVFVDLEPTVIDEVRTGTYRQLFHPEQLISGKEDAANNFARGHYTIGKEIVDLCLDRIRKLADNCTGLQGFLVFNAVGGGTGSGLGSLLLERLSVDYGKKSKLGFTVYPSPQVSTSVVEPYNSVLSTHSLLEHTDVAVLLDNEAIYDICRRSLDIERPTYTNLNRLVSQVISSLTASLRFDGALNVDVNEFQTNLVPYPRIHFMLSSYAPVISAEKAYHEQLSVAEITNSAFEPSSMMAKCDPRHGKYMACCLMYRGDVVPKDVNAAVATIKTKRTIQFVDWCPTGFKCGINYQPPSVVPGGDLAKVQRAVCMISNSTSVVEVFSRIDHKFDLMYAKRAFVHWYVGEGMEEGEFSEAREDLAALEKDYEEVGAEFDEGEDGDEGDEY

SEQ ID NO: 9071 - DNA, 1077 bp, Zea mays
  misc_feature: Ceres CLONE ID no. 1483300
  misc_feature: Ceres CDNA ID no. 29191879
  CDS (154)..(813): REFERENCED BY SEQ ID NO: 9072
gcaccctcacaagctgcgctgccagtgccagcgctcacacgaacgccgagacccgagaggagcaaacagccaaaaagaacggaaaggggagagcagttaccttgcgcgcgcgcgcgcgacagggtccaatactcgaaggggaatctccggaggatggaggtgggcaggactccgcggcgacgggcgtccccagcggcggctgtgccttcgctgcttctgttcgccttgctattcgtgtgccgggcggcggcagcgttgggcggcccggcgccggcgctatacaagcacgcgtcgttcttcgaccgcgacggcgacggcgtcgtctccttcgcggagacgtacggcgcgtttcgggccctcgggtttggactcggcctgtccagcgtcagcgccgccttcatcaatggcgcccttggcagcaagtgcagacctcaaaacgcgacgtcgtcgaagctggacatctacatagaggacatccggagagggaagcacgggagcgactccggctcgtacgacgcccaaggaaggttcgttcccgagaagttcgaggagatattcgccaggcacgcgaggacagtccccgacgccctgacctcggacgagatcgaccagctgctccaagcgaacagagagcccggggactacagcggctgggctggcgcggaagcggagtggaagatcctgtacagtctcggcaaggacggggacggcctcctccgcaaggacgtcgcgaggagcgtctacgacgggacactgttccaccggctcgcgcccagatggaaatctcccgacagcgacatggagagaagctgataagcgtggtccgggagaactgaaccgggtctggacatgctgtcaagcgacatgtactggcggtgtgaacgggtgtgaactcactttcgggtcagattattaacaagaagggtgtgaccgtgtgagtgtgaacagaatcggccgaggaggtccaccagaccagacgacgacgaatgcttcggttgcgtgcggtgcggtctgtctgtttgtatcccgtgagcgcgatggttgcaataatctctactcctaaaaaaaaaaaaaaaa

SEQ ID NO: 9072 - protein, 219 aa, Zea mays
  misc_feature: Ceres CLONE ID no. 1483300
  misc_feature: Ceres CDNA ID no. 29191879
  misc_feature (41)..(207): Pfam Name: Caleosin PFAM Desc: Caleosin related protein
  misc_feature: Homolog of GI Number: 50912501 NR Desc: putative calcium binding protein
  misc_feature: Homolog of GI Number: 50912497 NR Desc: putative caleosin
  misc_feature: Homolog of GI Number: 52077126 NR Desc: putative calcium binding protein
  misc_feature: Homolog of GI Number: 44894211 NR Desc: putative ABA
  misc_feature: Homolog of GI Number: 52077122 NR Desc: putative calcium binding protein
  misc_feature: Homolog of GI Number: 34902470 NR Desc: Putative abscisic acid
  misc_feature: Homolog of GI Number: 6478218 NR Desc: caleosin
  misc_feature: Useful for making plants with increased biomass and foliage
MEVGRTPRRRASPAAAVPSLLLFALLFVCRAAAALGGPAPALYKHASFFDRDGDGVVSFAETYGAFRALGFGLGLSSVSAAFINGALGSKCRPQNATSSKLDIYIEDIRRGKHGSDSGSYDAQGRFVPEKFEEIFARHARTVPDALTSDEIDQLLQANREPGDYSGWAGAEAEWKILYSLGKDGDGLLRKDVARSVYDGTLFHRLAPRWKSPDSDMERS

SEQ ID NO: 9073 - DNA, 746 bp, Zea mays
  misc_feature: Ceres CLONE ID no. 1483308
  misc_feature: Ceres CDNA ID no. 25446143
  CDS (3)..(443): REFERENCED BY SEQ ID NO: 9074
agaactgggaaggggagaagattccgatggggactaagaaacagggaggaggcggaggagaccagaaggtcctcctctggaggctgccggaggtcacctctaaggagctcggcaagataggccccgccctcggaatcggcatcggctgcggcgccggcgcaggcatcggattcttcggtggtgcagggttaggctatggatttcctggactcacattaggctttggagttggagctggatgtggtgtgggaattggctttggttatgggttgggcaaaggaattgcatatgatgaaaagaaaaaatactccaatgttggcaagatgttccaggaagctccacattttcctatggacactgtcggtgctttatttgacgagctggttataaacaccaagaagcttgtgacatcaacatcaaaaggaatcgaaaaatggcgttgagcggcagcactgcattgttgtctctataatcgccttgaattgtatcaacggagattgcgagcagcagttatcttgaacaggcaggacctggccctagaatgcagcctgttgcatgtcgtgactttctttctattgttcgtcagctagtagctttgtatttaggtaggatcctgagataatacatattatttctggtcgatatttattagttgcattgaactgtattctgggttgctcatcacttatatgttaaattggaggaaaattgatgctatgagcttcaggtgaaaaaaaaaaaaaaaa

SEQ ID NO: 9074 - protein, 138 aa, Zea mays
  misc_feature: Ceres CLONE ID no. 1483308
  misc_feature: Ceres CDNA ID no. 25446143
  misc_feature: Homolog of GI Number: 50509489 NR Desc: glycine
  misc_feature: Homolog of GI Number: 765323 NR Desc: silk fibroin heavy chain
  misc_feature: Homolog of GI Number: 58380709 NR Desc: ENSANGP00000007494
  misc_feature: Homolog of GI Number: 47007909 NR Desc: major ampullate spidroin 3
MGTKKQGGGGGDQKVLLWRLPEVTSKELGKIGPALGIGIGCGAGAGIGFFGGAGLGYGFPGLTLGFGVGAGCGVGIGFGYGLGKGIAYDEKKKYSNVGKMFQEAPHFPMDTVGALFDELVINTKKLVTSTSKGIEKWR

SEQ ID NO: 9075 - DNA, 800 bp, Zea mays
  misc_feature: Ceres CLONE ID no. 1483331
  misc_feature: Ceres CDNA ID no. 25401386
  CDS (144)..(533): REFERENCED BY SEQ ID NO: 9076
gatcgagttagagatccctcccaactgtctgaatccaacaaggtttctcctgtctttgtttagggttttgttctgtttctcttcctctattggttctcccgcacgggttctttaccgatctctaaatctactgattggagaagatgcttcctctttcgctactcaagactgctcaaggacatcccatgcttgtggagctcaagaatggagagacatacaatgggcatttagtaaattgcgatacgtggatgaacatccatctgcgtgaagttatctgcacatcaaaggatggagacaggttttggaggatgccggaatgttatatccgtggtaacactatcaagtaccttcgtgttccagatgaggtgattgataaagtacaggaggagaagacccgcacagataggaaaccaccaggggttggacgtggaagaggacgtggtatggatgatggaggggccagaggacgaggccgaggagctccaatggctaagatgagtggcaacagaggagcagggcgtgggcgtggttgatgattcaacaactttgaacgacaaaactctgtgttttctagctggctcctcttgctgctgctgctgttgttgcactagtttgattatattggaaggggataaaattgcttttacaatgtgatttgactgtttttttttcttcatgtatcgtttttcatgctatattccattcagtgattgttaaatctatccaaagagctgagttattatcatctctgtatatataaaattaatcataatatgcttagtacaaaaaaaaaaaaaaaa

SEQ ID NO: 9076 - protein, 129 aa, Zea mays
  misc_feature: Ceres CLONE ID no. 1483331
  misc_feature: Ceres CDNA ID no. 25401386
  misc_feature (5)..(71): Pfam Name: LSM PFAM Desc: LSM domain
  misc_feature: Homolog of GI Number: 21593495 NR Desc: glycine rich protein
  misc_feature: Homolog of GI Number: 15241028 NR Desc: small nuclear ribonucleoprotein
  misc_feature: Homolog of GI Number: 9711887 NR Desc: putative glycine rich protein
  misc_feature: Homolog of GI Number: 77745469 NR Desc: glycine rich protein
  misc_feature: Homolog of GI Number: 3927916 NR Desc: glycine
  misc_feature: Homolog of GI Number: 41152340 NR Desc: LSM4 homolog
  misc_feature: Homolog of GI Number: 7657317 NR Desc: LSM4 homolog
  misc_feature: Homolog of GI Number: 66532827 NR Desc:  similar to Lsm4 protein
  misc_feature: Homolog of GI Number: 45550963 NR Desc: CG31990
  misc_feature: Homolog of GI Number: 57101744 NR Desc:  similar to LSM4 homolog
  misc_feature: Useful for making ornamental plants with modified leaves
  misc_feature: Useful for sterility
MLPLSLLKTAQGHPMLVELKNGETYNGHLVNCDTWMNIHLREVICTSKDGDRFWRMPECYIRGNTIKYLRVPDEVIDKVQEEKTRTDRKPPGVGRGRGRGMDDGGARGRGRGAPMAKMSGNRGAGRGRG

SEQ ID NO: 9077 - DNA, 556 bp, Zea mays
  misc_feature: Ceres CLONE ID no. 1483422
  misc_feature: Ceres CDNA ID no. 40351990
  CDS (151)..(471): REFERENCED BY SEQ ID NO: 9078
accccttttcctctaacctttagctttcctccctccctcctctctttctctcctctaacaagaacttagtcccggcagttcagatcctaagttgctgaccttgctgctgattgttggagatagatttgctgcttctaagttggaaataccatgagtccaccgagtgtgatggggcagtttggggacacgacctacaccaaggtttttgttgggggactcgcgtgggaaacccagaaggagactatgaggaagtatttcgagcagtttggagagatcctggaggctgttgtcatcactgacaagaacactggcagatccaagggctacggatttgttaccttccgggactcggatgcggcaatgagagcttgcgttgatcctgcaccggtgattgatgggaggagggctaactgtaatcttgcttcccttggggttcaaagatctaggcctcctactccccagcatggttagatatttatcatctttcagaaatcagaactgtacaaggcagcacagaagaaataattagcttgcttgcttaaaaaaaaaaaaaaaa

SEQ ID NO: 9078 - protein, 106 aa, Zea mays
  misc_feature: Ceres CLONE ID no. 1483422
  misc_feature: Ceres CDNA ID no. 40351990
  misc_feature (18)..(73): Pfam Name: RRM_1 PFAM Desc: RNA recognition motif.
MSPPSVMGQFGDTTYTKVFVGGLAWETQKETMRKYFEQFGEILEAVVITDKNTGRSKGYGFVTFRDSDAAMRACVDPAPVIDGRRANCNLASLGVQRSRPPTPQHG

SEQ ID NO: 9079 - DNA, 1135 bp, Zea mays
  misc_feature: Ceres CLONE ID no. 1484571
  misc_feature: Ceres CDNA ID no. 40351991
  CDS (23)..(1039): REFERENCED BY SEQ ID NO: 9080
attaaataaattctatataaaaatggttactcaagttggtattaacggtttcggccgtattggtcgtattgttctccgtgcttctctctctaaccctgaagtccaagttgttgctatcaacgatcccttcatccccttggaatacatggtctacatgttcaagtacgattccgttcacggtcgtttccaaggtactgttgaggccaaggatggtaagctcgttgtcaacggtaaggagatctccgtcttctctgagcgtgaccctgctcaaatcccttggggttccgttgaagctgcctatgttgttgagtctactggtgtcttcacctctattgatgctgcttctgcccatcttcaaggtggtgccaagaaggttatcatctctgctccttctggtgatgctcccatgtttgtctgtggtgtcaacctcgagaagtacacctctgacctcaaggtcatctccaacgcctcttgtaccaccaactgtttggctccccttgccaaggttatcaatgacaactttggtatcgttgaaggtttgatgaccactgtccatgctactactgctacccaaaagactgtcgatggtccttccaacaaggactggcgtggcggtcgtggtgctggtgccaacatcatcccctcttccactggtgctgccaaggctgtcggtaaggtcattcctgaacttaacggtaagctcactggtatggctttccgtgtccctacccctgatgtctctgtcgttgatcttactgtcagattggagaagggtgctacctacgaagaaatcaaggctgttatcaagaaggcctctgagaacgagttgaagggtatcctcggttataccaacgaccaagttgtaagcaccgatttcgtgggtgatgctcaaagctccatcttcgatgctgctgctggtattgctcttaacgacaagttcgtcaagctcgtctcttggtacgataacgaattcggttactccaaccgtgtcatcgatcttttggcctatgctgccaaggttgatgctgctgctcaataaatgtattgacaatgcctatatcttgtttcatattaaaaatttctcaattgttttataaataaaatctctcgaacttacatacaaaaaaaaaaaaaa

SEQ ID NO: 9080 - protein, 338 aa, Zea mays
  misc_feature: Ceres CLONE ID no. 1484571
  misc_feature: Ceres CDNA ID no. 40351991
  misc_feature (156)..(313): Pfam Name: Gp_dh_C PFAM Desc: Glyceraldehyde 3
  misc_feature (3)..(31): Pfam Name: DapB_N PFAM Desc: Dihydrodipicolinate reductase
MVTQVGINGFGRIGRIVLRASLSNPEVQVVAINDPFIPLEYMVYMFKYDSVHGRFQGTVEAKDGKLVVNGKEISVFSERDPAQIPWGSVEAAYVVESTGVFTSIDAASAHLQGGAKKVIISAPSGDAPMFVCGVNLEKYTSDLKVISNASCTTNCLAPLAKVINDNFGIVEGLMTTVHATTATQKTVDGPSNKDWRGGRGAGANIIPSSTGAAKAVGKVIPELNGKLTGMAFRVPTPDVSVVDLTVRLEKGATYEEIKAVIKKASENELKGILGYTNDQVVSTDFVGDAQSSIFDAAAGIALNDKFVKLVSWYDNEFGYSNRVIDLLAYAAKVDAAAQ

SEQ ID NO: 9081 - DNA, 1374 bp, Glycine max
  misc_feature: Ceres CLONE ID no. 1485674
  misc_feature: Ceres CDNA ID no. 40351992
  CDS (3)..(1076): REFERENCED BY SEQ ID NO: 9082
agtcatttcaatccccccgaaaccctgaaccgccgctgccgccgccgccgccgcccccgcagccaagccgagcagccatggagggatccgccgccgcggcgccgctccgcacgcgcgtgtgcatcatcggcagcggcccggccgcgcacacggcggccatctacgcggcccgcgcggagctcaagcccgtgctcttcgagggctggatggccaacgacatcgccgcggggggccagctcaccaccaccaccgacgtcgagaacttcccgggcttccccaccggcatcatgggcatcgacctcatggacaactgccgcgcccagtccgcccgcttcggcaccaacatcctctccgagaccgtcaccgaggtcgacttctccgcccgccccttccgcgtcacctccgactccaccaccgtcctcgccgacaccgtcgtcgtcgccacgggcgccgtcgcgcgccgcctccacttccccgggtccgaaacctactggaaccgcggcatctccgcctgcgccgtctgcgacggcgccgcgcccatcttccggaacaagcccatcgccgtcatcggcggcggcgactctgccatggaggagggaaacttcctcaccaagtacggatcccaagtgtacatcatccaccggcgcaacaccttccgcgcctccaagattatgcaggccagggcgctctccaatcctaagatccaggttgtctgggactccgaggtcgtcgaggcctacggcggcgcaggcggtggcccattagctggcgtcaaggtcaagaacttggtgactggtgaggtctctgaccttaaggtgtccgggctcttcttcgccatcgggcatgagccggccaccaagtttctcaatgggcagcttgagctccatgccgatgggtatgtggccaccaagccgggctctacacataccagtgtggagggggtctttgctgctggagatgtgcaggataagaagtatcgtcaggccattactgccgctggatcagggtgcatggctgctttggacgcggagcactatctgcaggaggtgggtgcacaggagggcaagtctgattgactatctcttggtgaagcgacgaccatcagctcaccgaaagccgcactctgagcttgatgaagttggttgtccagtttcattatgctgcttagcagcaccgtattattattctccgtcattaggaggccctagatcaactttcattagtgtgctggaaatgattcatatttaccactggtggaactcaaactgattcctatgtatcattggcgaaatcacattattattctgagatatctatctgtattactccaccaggtatgtatgctattatatttttccaaaaaaaaaaaaaaaa

SEQ ID NO: 9082 - protein, 332 aa, Glycine max; identical to SEQ ID NO: 2852
  misc_feature: Ceres CLONE ID no. 1485674
  misc_feature: Ceres CDNA ID no. 40351992
  misc_feature (87)..(130): Pfam Name: DAO PFAM Desc: FAD dependent oxidoreductase

SEQ ID NO: 9083 - DNA, 914 bp, Glycine max
  misc_feature: Ceres CLONE ID no. 1485734
  misc_feature: Ceres CDNA ID no. 24766745
  CDS (84)..(692): REFERENCED BY SEQ ID NO: 9084
gagctcggagaaggcaacgcccaatcgcccacgcttccacctccccctccacgaggcaaggaaggaaaccctaggcaacgaccatggcgctgctcccgcgcacggcccggctggccctcctctccgcgtcgccgcggacctactccgccgccgccgcggcgggcgcctcgcccaccccaccggcgccgtacgcgggcgtgcctccgccggcggcggggtccaaggcggccgagttcgtcgtctccaaggtggacgacctcatgaactgggcgcgccggggctcgatctggcccatgaccttcgggctggcctgctgcgccgtcgagatgatgcacgccggcgcggcccgctacgacttcgaccgattcggcgtcatcttccgcccgtccccgcgccagtccgactgcatgattgtcgccggcacgctcaccaacaagatggcgcccgccctccgcaaggtttatgaccagatgcccgagcctcgatgggtcatatcgatgggcagctgtgccaacggtggtggatactaccactactcctactctgttgtgcgtggatgcgaccgcattgttccggtggatatctacgtccctggatgccccccaaccgctgaggccctactatacggtgttctccagctccagaagaagatcaacaggcgcaaggatttccttcactggtggaccaagtgaagcgccgtttgttactgttctggcttgttatatttgtttttgattctacactgaaataaggacgttgtgctcggacgtgcaaaatttgctgttgtttgtgcctggttggatgtatgcccgggctgtgctgatgagcatggactcgtgtacttggtgttgctgtaactgcttttgctctacatattgtaatacacctttatgacttcaaaaaaaaaaaaaaaa

SEQ ID NO: 9084 - protein, 202 aa, Glycine max
  misc_feature: Ceres CLONE ID no. 1485734
  misc_feature: Ceres CDNA ID no. 24766745
  misc_feature (80)..(187): Pfam Name: Oxidored_q6 PFAM Desc: NADH ubiquinone oxidoreductase
  misc_feature: Homolog of GI Number: 34910678 NR Desc: putative NADH dehydrogenase
  misc_feature: Homolog of GI Number: 50932455 NR Desc: putative NADH
  misc_feature: Homolog of GI Number: 6007781 NR Desc: NADH ubiquinone oxidoreductase PSST subunit
  misc_feature: Homolog of GI Number: 562282 NR Desc: PSST subunit of NADH: ubiquinone oxidoreductase
  misc_feature: Homolog of GI Number: 9652180 NR Desc: NADH
  misc_feature: Homolog of GI Number: 9652190 NR Desc: NADH
  misc_feature: Homolog of GI Number: 77745495 NR Desc: NADH
  misc_feature: Homolog of GI Number: 1235607 NR Desc: NADH
  misc_feature: Homolog of GI Number: 34328788 NR Desc: NADH:ubiquinone oxidoreductase subunit 10
  misc_feature: Homolog of GI Number: 1171865 NR Desc: NADH
MALLPRTARLALLSASPRTYSAAAAAGASPTPPAPYAGVPPPAAGSKAAEFVVSKVDDLMNWARRGSIWPMTFGLACCAVEMMHAGAARYDFDRFGVIFRPSPRQSDCMIVAGTLTNKMAPALRKVYDQMPEPRWVISMGSCANGGGYYHYSYSVVRGCDRIVPVDIYVPGCPPTAEALLYGVLQLQKKINRRKDFLHWWTK

SEQ ID NO: 9085 - DNA, 750 bp, Zea mays
  misc_feature: Ceres CLONE ID no. 1486085
  misc_feature: Ceres CDNA ID no. 40351993
  CDS (225)..(422): REFERENCED BY SEQ ID NO: 9086
tcctcttttttttttccccattccacgcccctcctcccagtcacagacccctgtccctttccctttccttcccctccggctccgcctcctcgaccactccgacaaccccaagcgcctccggcgagctccacctctccaccggctgcggcgagaagcggcgggggctaactaagtctgtaggcggcggcggaggtgatccgggagccggagccgagtctagggcgatggggcagcagtcgctgatctacgcgttcgtggcgcgtggcaccgtggtgctggctgagtacaccgagttcaccggcaacttcaccaccatcgccgcccagtgcctgcagaagctccccgccagcaacaacaagttcacctacaactgcgacggccacaccttcaactacctcgtcgaggacggattcagtgagtagttccgctccccgccgctccgatccgcgctgccccgcacggatccgcgccgccgcgggctcggatcgggcctcgcctcgcctcgcctcgcttggatctcgcctcgacccgcgcctgctgcggtctcaggttcggccgcctcgaggtggttaggtgggggtcagattcggcggctgcttccaggctaatctgagtgaagcgggctgttgttttacgctcttcagctgttttggactccaccttgagttgtgacatgagacgtggttttgggagggtcgggagttgctgcaataaatggctatttttagagggtgaaaaaaaaaaaaaaaa

SEQ ID NO: 9086 - protein, 65 aa, Zea mays
  misc_feature: Ceres CLONE ID no. 1486085
  misc_feature: Ceres CDNA ID no. 40351993
MGQQSLIYAFVARGTVVLAEYTEFTGNFTTIAAQCLQKLPASNNKFTYNCDGHTFNYLVEDGFSE

SEQ ID NO: 9087 - DNA, 940 bp, Zea mays
  misc_feature: Ceres CLONE ID no. 1486095
  misc_feature: Ceres CDNA ID no. 36707160
  CDS (134)..(718): REFERENCED BY SEQ ID NO: 9088
tcgctcgcacgcaacgcaagtcgtcatcgcacgagacgagacgagtcgaggtccaagtcgctcgagcgcgagcccgccgtctctctcgcgtccgcccctgctccgaccttccagaagcttccgggagccatccatggccaccgcgcccgcgccgaccgcagccgcccccgcgcccgccgccgccgccgcggccgccccgtccgcgtcggtgccgcgcgggcaggtggatctggtcgacttcatcgactggaccggcgtcgagtgcctcaaccaggaccccgcccatgccatcgccaacgccctcaagcagggttacagggaggatgaggggctgcacctcgccagcgactccgacgagcagctgctgatctacatccccttcatgcaggtcatcaagctgcattccgcgctcttcaaaggccctgaggaagaaggcccaaagacagttaaactcttctccaacagagagcatatgggtttcagcaatgtcaatgactttcctccaagtgacagtgttgacctatcatccagccatttactggaaggtaagcctgtgacgctgaagtatgtgaagttccagaatgttcgtagcctgactatgtttatcgaagacaatcaaagcggagctgacatcacaaaaattcagaagattgcgctttatggaaccactgtggacactacaaatatgaaggatctgaagaagatagaagaacattaagcagacccatctaagatggtgtgttccagtgggtgtaaacaggtaactgttgtgcttgatgctggcaactttgtgcccctattttacacatgaggtatttaagagcccagttagcctcctgtaggctgcaatttctgcgtgcgggcttgtttgacaaacgaaacgatgttccttgctgagaaaattcatatccctatccctttttcaaaaaaaaaaaaaaaa

SEQ ID NO: 9088 - protein, 194 aa, Zea mays
  misc_feature: Ceres CLONE ID no. 1486095
  misc_feature: Ceres CDNA ID no. 36707160
  misc_feature: Homolog of GI Number: 56554618 NR Desc: Chain A
  misc_feature: Homolog of GI Number: 49899917 NR Desc: Thioredoxin
  misc_feature: Homolog of GI Number: 60390943 NR Desc: Thioredoxin
  misc_feature: Homolog of GI Number: 66524108 NR Desc:  similar to GA18927
  misc_feature: Homolog of GI Number: 18266686 NR Desc: thioredoxin
  misc_feature: Homolog of GI Number: 61372783 NR Desc: thioredoxin
  misc_feature: Homolog of GI Number: 60655503 NR Desc: thioredoxin
  misc_feature: Homolog of GI Number: 62088106 NR Desc: thioredoxin
  misc_feature: Homolog of GI Number: 2970691 NR Desc: thioredoxin
MATAPAPTAAAPAPAAAAAAAPSASVPRGQVDLVDFIDWTGVECLNQDPAHAIANALKQGYREDEGLHLASDSDEQLLIYIPFMQVIKLHSALFKGPEEEGPKTVKLFSNREHMGFSNVNDFPPSDSVDLSSSHLLEGKPVTLKYVKFQNVRSLTMFIEDNQSGADITKIQKIALYGTTVDTTNMKDLKKIEEH

SEQ ID NO: 9089 - DNA, 999 bp, Zea mays
  misc_feature: Ceres CLONE ID no. 1486135
  misc_feature: Ceres CDNA ID no. 40351994
  CDS (74)..(823): REFERENCED BY SEQ ID NO: 9090
gagagaggacacggaggggtccggaggctagaaagagaagaaggctctcgagcggcggctgcgcgacgaggatatgagcggcgaggcggcggccggcggcggcggggaggcgaacggcgtccagccgaacgtgaccatctacatcaataacctcaacgagaagatcaaactcgaagcacttaagaagtccctcaatgccgttttctcccagtttgggaaaatcattgaggtgcttgctttcaagactttgaagcataaagggcaggcatgggttgtgttcgaagatgttgcatcagcaactgaggctttgaagaggatgcaagattttcccttctatgacaaacccatgaaaattcaatatgccaagaccaagtcagatgttgtagcaaaagctgatggcactttcgtacctcgagaaaaaaggaagaggaatgatgagaaacctgagaagaagcagaagcgtgagcagcaccatgatgttaaccaggctggcgtgggcatgcatgcctatcctggtgcttatggggctccgccgctctctcagctaccttttggtgcgggaccgaaggtcatgatgccagagattattgtaccaaacaacattctcttcgtccaagaactcccacacgacgcgaccgctttgatgctgcagatgttcttctgccagtaccccgggttcaaggaagtgcggatgatcgaagcgaagcccggtatcgctttcgtggagtatggagacgaggggcaggcaaccgcagccatgaaccttcttcagggtttcaaaatcaaagagaacccaatgcgcatcacatatgcgaagaagtaacttgatgagctgtattgacttgaattaatgttgtaggcctgtttttgcaccatctggtagattttcttcacatgtaaggtagactacatcatccagtaaattaatgcgtccatgcttggaagctattttcagtcatgtatttgggtttggcatcgttgtgaaaaaaaaaaaaaaaa

SEQ ID NO: 9090 - protein, 249 aa, Zea mays
  misc_feature: Ceres CLONE ID no. 1486135
  misc_feature: Ceres CDNA ID no. 40351994
  misc_feature: null
  misc_feature: Useful for making plants with modulated nitrogen use efficiency
  misc_feature (22)..(94): Pfam Name: RRM_1 PFAM Desc: RNA recognition motif.
MSGEAAAGGGGEANGVQPNVTIYINNLNEKIKLEALKKSLNAVFSQFGKIIEVLAFKTLKHKGQAWVVFEDVASATEALKRMQDFPFYDKPMKIQYAKTKSDVVAKADGTFVPREKRKRNDEKPEKKQKREQHHDVNQAGVGMHAYPGAYGAPPLSQLPFGAGPKVMMPEIIVPNNILFVQELPHDATALMLQMFFCQYPGFKEVRMIEAKPGIAFVEYGDEGQATAAMNLLQGFKIKENPMRITYAKK

SEQ ID NO: 9091 - DNA, 1086 bp, Zea mays
  misc_feature: Ceres CLONE ID no. 1486164
  misc_feature: Ceres CDNA ID no. 25401821
  CDS (71)..(787): REFERENCED BY SEQ ID NO: 9092
atccaccacttcccccaaagtctcctcctttcatcctcccttctcagccaagcaaacgccaaccgcgccgatgaagagggaggggttccagcacggcgccgtcagggtcaaccgcaacaagctgctgcgggtcgccggcgggaccggcggcgacgcggcggccgcggcgctcgacctcgccggcgtcgcctacgcccgggcgccgtccaagccgaccaacgcgtccagggacacgggccggtgccgccggccccggtgcgccggctgccacgtgcaccccgccgccaaggcccgggacaaggccaagggcgcccacaagctgcgcgcctccgacgtcgccctcaaccaccgcctcgtctcctggcgcctcgtcgacggggacgcctccgccgccgccgcccgcaccggcggcgtccccgactacaagggcgcctccgcgtccgccgtcctcgcctacctcgccggcggcaacagctggcacgccgaggacgaggacgaggacgatgaggaccaggacggcgccgatcttcaggcccccccaagggggatctctgacctgtacgacctcatcgtcggcctccaggccggcgcggcggcccctgcgccgggcggcccagaagacgacgccgatggcacggcagcagtaacacccagcgatgaaatcgaggagcaggatgctgaaatcactgacgatgtcgacgaggaggacgacgggttctgcatggtgcacggcatcaccatcgcgctcgagttctccgacggggaggaggactggatcgtggtctgatctcattcatttgcaaataataagacgtgcaacagaggtcagccgtccacatccctccgcctctgctgctgccgctgcgcaattcccttccatccgcatctgctctgttcctgttaattcatcgtgtccctgtgtgtgtatactgctctgttgctgttaattggtcctgtccctgtgtatatatctggtgactgtctgtctaatttgtcaaaaattcatggattatcatgacctgaatttaccaatcatgtgtgaataaaattaatgaagaagcgaaaaaaagaaaaaaaaaaaaaaaa

SEQ ID NO: 9092 - protein, 238 aa, Zea mays
  misc_feature: Ceres CLONE ID no. 1486164
  misc_feature: Ceres CDNA ID no. 25401821
  misc_feature: Homolog of GI Number: 2429362 NR Desc: proline rich protein
  misc_feature: Homolog of GI Number: 28574875 NR Desc: CG13731
  misc_feature: Homolog of GI Number: 188864 NR Desc: mucin
  misc_feature: Homolog of GI Number: 67988031 NR Desc: ROK
  misc_feature: Homolog of GI Number: 67987177 NR Desc: 4Fe
  misc_feature: Homolog of GI Number: 186396 NR Desc: mucin
  misc_feature: Homolog of GI Number: 67985322 NR Desc: Prolyl
  misc_feature: Homolog of GI Number: 55239156 NR Desc: ENSANGP00000028192
  misc_feature: Homolog of GI Number: 4505285 NR Desc: mucin 2
MKREGFQHGAVRVNRNKLLRVAGGTGGDAAAAALDLAGVAYARAPSKPTNASRDTGRCRRPRCAGCHVHPAAKARDKAKGAHKLRASDVALNHRLVSWRLVDGDASAAAARTGGVPDYKGASASAVLAYLAGGNSWHAEDEDEDDEDQDGADLQAPPRGISDLYDLIVGLQAGAAAPAPGGPEDDADGTAAVTPSDEIEEQDAEITDDVDEEDDGFCMVHGITIALEFSDGEEDWIVV

SEQ ID NO: 9093 - DNA, 696 bp, Zea mays
  misc_feature: Ceres CLONE ID no. 1486206
  misc_feature: Ceres CDNA ID no. 36707531
  CDS (71)..(631): REFERENCED BY SEQ ID NO: 9094
aatttcgggcaagcctaggggcccaagcggaaaaggtaagctgactccggcggcggcggcggcggcgatcatggccgcgcagagggagaagtccgcggacgtggcggtcgccccagcacacggcgctgcggtttcggggtctccttcttcctcatccggaggcccggcagtgtcggcgtcctcgtcgggagaccggtggagcgccgcgatcggtaaccttggggagctcggcgccaacgtggacgcgctgcagaagctgctcgggcggaaagccgtcttcgtagacgatgacatcttctccaaggcctccctcgccgccgaccaggcccgcaccattaaggttcttgaccagagggtgcagtctctggaacgtgaactcgatgccgccatttcagcagctgctcgagctcgtgcagagaaacgtcaggcggaagctgcacaacgagctgcagagttacgcacacgggaggtcacagaagaactggagaacactgctagggtgtttgagctgcacatggaggagttgcggctgaagcaagaggatattgcgaagaaagatagcgatatcaaggtgttagaagcgatcatacgaacccttagtagtaaagatgatgatggatccagcgaataattgccatgcacagggagcgaataaattgtttcgattgaaattcaaaaataaaaaaaaaaaaaaaa

SEQ ID NO: 9094 - protein, 186 aa, Zea mays
  misc_feature: Ceres CLONE ID no. 1486206
  misc_feature: Ceres CDNA ID no. 36707531
MAAQREKSADVAVAPAHGAAVSGSPSSSSGGPAVSASSSGDRWSAAIGNLGELGANVDALQKLLGRKAVFVDDDIFSKASLAADQARTIKVLDQRVQSLERELDAAISAAARARAEKRQAEAAQRAAELRTREVTEELENTARVFELHMEELRLKQEDIAKKDSDIKVLEAIIRTLSSKDDDGSSE

SEQ ID NO: 9095 - DNA, 787 bp, Zea mays
  misc_feature: Ceres CLONE ID no. 1486210
  misc_feature: Ceres CDNA ID no. 40351995
  CDS (3)..(278): REFERENCED BY SEQ ID NO: 9096
atcattcatcctactcgctccctctccaactcgaccgccccgccgccggccgccggccgccatctcccgccgccgaccacccccgacccaccggccgcgcccagccccaactcgcccccgttgctgtccttgtgtcgctgtccccgcccgcgttgcgcctggattgcactcagccttggccgcaatccatccgtgctttccggcgctacccaccacacatcgagttgtttgattttcgattgattcgcccgaagagggcaggccggccgacgaggtaagggtgcggtgcgaagcgttggtcagatgccccagtaccttgcggtcggcgtgctacacggagtgtgtgaactgtgaagccgccggcgcagctagctttggcatgagcacaaccgcacgaggcaagctcagctatctactgggcattatgaaaagcgagaaacaaaatgtgttttgataacattttgatcaaatcttcgattgatatcatttgtcatgctggcgctattattatttcttgggcaaggttgagcaaaaaagagccgcaagacttgctgcgggagggtgcgagattgctatttcgagctgctaatgctgggatggacaatcagctcataaactctattgcgggtgataaagattatgctccaccttaagaagactaatgatatgatgtcatggagttctttacaattcttgtttgtgtgggtgctgatatcgttagtgagttgtgtctcctattttggtaggatgtgcatgaacttgttatgttcgaaaaaaaaaaaaaaaa

SEQ ID NO: 9096 - protein, 69 aa, Zea mays
  misc_feature: Ceres CLONE ID no. 1486210
  misc_feature: Ceres CDNA ID no. 40351995
MCFDNILIKSSIDIICHAGAIIISWARLSKKEPQDLLREGARLLFRAANAGMDNQLINSIAGDKDYAPP

SEQ ID NO: 9097 - DNA, 1231 bp, Zea mays
  misc_feature: Ceres CLONE ID no. 1486490
  misc_feature: Ceres CDNA ID no. 25445556
  CDS (271)..(1050): REFERENCED BY SEQ ID NO: 9098
cagccgcccacctcacgcaagcggcaagcccacgggcgctctctctccccctgcgcctcgtcgcctctccaatccctctcgtcctctcgctttctctctccatctcgtttcccccgcctgcgcagccagcgcaaaccctagccaacaagcgccgttctgcgaggctctcggcagcggataacttaacctgtcgcgcaaggatcgggggagagaaaccagcggcaacttacgtggatcggggttgtttggtgctgctgcggcggcgcagggatggaccggaagcgcatcaaggacgcgctcgagaagcacctggagaggtcgtcgccgtctacttccaggggcgtcgtgtccaaggagagggagcgcctcgctgccgggaagctgccgtcatcgcttggcaaggcggaggtgtctgatggtgaggaatttgaaactgacagtgaagattctgatgtgagtggttccgagggagaggacacgtcctggatttcatggttctgtacattgcgaggcaatgaattcttttgtgagatcgatgatgactatatacaggatgattttaacctgtgtggtctgagtaatcaggtgccatattatgattatgcacttgatctcatcttagacattgagtcttctaatgatgacgggtttaccgaggagcaaaatgaattaatcgagtcatctgcagagatgctgtacggtttaattcatgcacgatacattttaaccagcaagggtctagctgcaatgttggagaagttcaagaactacgactttggtagatgccccagggtgtactgctgtggccagccctgccttccagcagggcaatcagatgttcctagatcgagcactgtgaagatatattgtccgaaatgcgaagaacttaactatccaagatccaagtaccaaggcaacatcgatggatcatactttgggacgacattccctcatcttttcctgatgacttactcgcacttgaagccgcagaagccgtcacagcaatacactccaagggttttcggcttcaaacttcacaagccgtcatgacagagttgtagcttccgccagaagcacccctgtcacctaggttttagggagagcatcgtggccttcaaatactgttgtattattgatgtacgaattcgcgagcctgggcctcgctgtaaactattgtgaaattgtatcttttttccgatattattactgttgtgcaaaaaaaaaaaaaaaa

SEQ ID NO: 9098 - protein, 259 aa, Zea mays
  misc_feature: Ceres CLONE ID no. 1486490
  misc_feature: Ceres CDNA ID no. 25445556
  misc_feature: null
  misc_feature: Useful for making plants with modulated flowering time
  misc_feature (72)..(246): Pfam Name: CK_II_beta PFAM Desc: Casein kinase II regulatory subunit
  misc_feature: Homolog of GI Number: 11527002 NR Desc: protein kinase CK2 regulatory subunit CK2B2
  misc_feature: Homolog of GI Number: 78709019 NR Desc: casein kinase II beta subunit
  misc_feature: Homolog of GI Number: 37536920 NR Desc: putative casein kinase II beta subunit
  misc_feature: Homolog of GI Number: 11527004 NR Desc: protein kinase CK2 regulatory subunit CK2B3
  misc_feature: Homolog of GI Number: 21261784 NR Desc: protein kinase Ck2 regulatory subunit 2
  misc_feature: Homolog of GI Number: 45238341 NR Desc: protein kinase 2 beta chain
  misc_feature: Homolog of GI Number: 21593654 NR Desc: putative casein kinase II beta subunit
  misc_feature: Homolog of GI Number: 29367573 NR Desc: possible protein kinase CK2 regulatory subunit
  misc_feature: Homolog of GI Number: 20259992 NR Desc: putative casein kinase II beta subunit
  misc_feature: Homolog of GI Number: 78709020 NR Desc: casein kinase II beta subunit
MDRKRIKDALEKHLERSSPSTSRGVVSKERERLAAGKLPSSLGKAEVSDGEEFETDSEDSDVSGSEGEDTSWISWFCTLRGNEFFCEIDDDYIQDDFNLCGLSNQVPYYDYALDLILDIESSNDDGFTEEQNELIESSAEMLYGLIHARYILTSKGLAAMLEKFKNYDFGRCPRVYCCGQPCLPAGQSDVPRSSTVKIYCPKCEELNYPRSKYQGNIDGSYFGTTFPHLFLMTYSHLKPQKPSQQYTPRVFGFKLHKPS

SEQ ID NO: 9099 - DNA, 1041 bp, Zea mays
  misc_feature: Ceres CLONE ID no. 1486513
  misc_feature: Ceres CDNA ID no. 40351996
  CDS (84)..(815): REFERENCED BY SEQ ID NO: 9100
atcaccaaactaatacgcatcagatactcattcagacgactcgagcaaccactgcctcttacacttgtcacgtcctactcgcaatggccgcagctgcagcaatagcaagttccacgaaagaagtgctcccgcctgcactgggcgccgtctccgagccccctcccctctttgatggcaccaccagactgtatatttgctacatctgcccgtttgctcaacgtgcctgggtgacccggaactgcaagggtctgcaggaggagatcaagctggtcgccatcaatctggaggacaaaccagcatggtacaaggagaaggtttacccacagggcacggtgccttccctggagcacgacggcagggtcaccggagagagcttggatttgatcaagtacatcgacaccaatttccaaggcccggcactgcttcctcaagatccggctaagaggcagttcgccgatgagctgattgcttacgctgacgcctttaccaaagcactctactcgcccttgatctcccaagtggccatgtcagacgaagctgttgctgctctagacaagatcgaagctgccctgtccaagttcagcgacggcccgttcttccttggccaatttagcttggtggacattgcgtacgtgacgatcttggagagggttcagatatactactctaacctgaggaactacgagatcgccaaagacaggcccaaccttgagagatacaccgaggagatgaacaagatcgaagcgtataagcaaaccaaaaatgtcccgctggccttgcttgatgctgccaagaggcatctcaagattgcttgaagaagcggtgctgtcgccaaggataacggtcgctgcctgccagggaacggcggcatttgagtaggcaagactgaactctcgtcactgggggctggggcttcttttgccaccattatcacaatgagttgtatgtgttttcttcccaataaatgacaccatgttgtaacctgtaagggctatgctttttatgaaacaataatgtactccatcaaaaaaaaaaaaaaaa

SEQ ID NO: 9100 - protein, 243 aa, Zea mays
  misc_feature: Ceres CLONE ID no. 1486513
  misc_feature: Ceres CDNA ID no. 40351996
MAAAAAIASSTKEVLPPALGAVSEPPPLFDGTTRLYICYICPFAQRAWVTRNCKGLQEEIKLVAINLEDKPAWYKEKVYPQGTVPSLEHDGRVTGESLDLIKYIDTNFQGPALLPQDPAKRQFADELIAYADAFTKALYSPLISQVAMSDEAVAALDKIEAALSKFSDGPFFLGQFSLVDIAYVTILERVQIYYSNLRNYEIAKDRPNLERYTEEMNKIEAYKQTKNVPLALLDAAKRHLKIA

SEQ ID NO: 9101 - DNA, 672 bp, Zea mays
  misc_feature: Ceres CLONE ID no. 1486525
  misc_feature: Ceres CDNA ID no. 25401967
  CDS (114)..(548): REFERENCED BY SEQ ID NO: 9102
ctagccaccaacagtccaacaccacaataatatcacctgcactccatttcagtgtcagtgaagttagccatcagtacgcggacacgctccatcagcgtcaggccacagccaccatggtgaagctggcgacggcgcgcgagtgccgcgcatacagcctcggcgccggcgcggggtccggcacggggttgcgcaaccggtgggagtacatcaacgccggggtgtacatcttcgcggcggtcctcctggtcggcgggttcctggcgcagctcctgccgtggggcgggcccagcagcccggggctcgtggtcgccgcgatcgggctcgccggcttgctggccgtcaacacgcacgacctcctcgcgcacgccgccggcgtcgattaccgcctcgggatggtggtcgggcttgacgcgcagatggggctcgtcgagctcggcgtccccgccgtgcagatcgttggcaccgcgctcatgctcgtcgctgtcgtcttctttgtgattcaggtcaggtgtcttcttcttccctggattgggactagggagtgctaagcgcagcctgtacaaaatccgttcaaattacgtgaagctgatcgtttgtttggttgcttattttgaatcatatacatggcttaaaatgaaattcaagttctgtttattaaaaaaaaaaaaaaaa

SEQ ID NO: 9102 - protein, 144 aa, Zea mays
  misc_feature: Ceres CLONE ID no. 1486525
  misc_feature: Ceres CDNA ID no. 25401967
MVKLATARECRAYSLGAGAGSGTGLRNRWEYINAGVYIFAAVLLVGGFLAQLLPWGGPSSPGLVVAAIGLAGLLAVNTHDLLAHAAGVDYRLGMVVGLDAQMGLVELGVPAVQIVGTALMLVAVVFFVIQVRCLLLPWIGTREC

SEQ ID NO: 9103 - DNA, 1155 bp, Zea mays
  misc_feature: Ceres CLONE ID no. 1486577
  misc_feature: Ceres CDNA ID no. 25446144
  CDS (218)..(964): REFERENCED BY SEQ ID NO: 9104
atcaattgctagtacgatttcttctctcctccaaaccggccaagccaccaaccagcgccccccaccgccgcctttttatttcatccacgctgctcgtgctcgctgcctgcttcttgcgcgatcgtctcggcctctcgggactctagagtggcggccggctctccgcctgttcttgtcgtcgctgctcctttccctgtgagcttaaaatatacacaggatgtcggaacgttctgagagtgcaactgaaaagattatgagcagcatcatggataccattgctgacaaccttcctaagcagaagtttgggaaatttgatccaggttcagtctctgacaaagtgaagaacaagctgtttggtcgtcagaagaccttgcatggagttctgggtggtggaaaacctgctgatgtgctgttatggaggaacaaaaaaatatcatcgagtgttctggctcttgcaacagctatttgggttttctttgagtggctcgactaccactttctgacaattgtttcatttgcccttgttcttggaatggttgtccagtttgtttggtccaacttctcaaacatgctaagcagcggatcccgttctcaggtgccccgagttgaattgcctgatgagttatttgtgaacattgccgttgcaatcggtgcccaagtaaacaagttcctgtgcttccttcaggatgtttcttgtgaaagaaacttgaagcattttgtagtggcgatcgcaggactgtgggctgctgcggtgattggaagttggtgcaatttcctgactgtcatatatgtcgggtttgtttgtgttcacacgcttccggtgctctatgagaagtacgaagaccaagtggacgatttcctctacagccttcttggtctgctgcgagatcaatatcagaagctcgaccacggcgtcttgagcaagattcccaaggggaacatgaaggctaagaagaacgagtagtttagcagatggtttctcgtgaatgagatcaatatcgttttgacttgtgtcgattattaatttattacctaaggcgtgtgtgccattctgaacctggctgctagttcatcgcccaccggggttttaaactactaagctgcaatgcacaagtaatgaagtgtgctagttcattgccaaaaaaaaaaaaaaaa

SEQ ID NO: 9104 - protein, 248 aa, Zea mays
  misc_feature: Ceres CLONE ID no. 1486577
  misc_feature: Ceres CDNA ID no. 25446144
  misc_feature (61)..(245): Pfam Name: Reticulon PFAM Desc: Reticulon
  misc_feature: Homolog of GI Number: 30681227 NR Desc: reticulon family protein
  misc_feature: Homolog of GI Number: 83284001 NR Desc: putative 24 kDa seed maturation protein
  misc_feature: Homolog of GI Number: 34909318 NR Desc: OSJNBb0021A09.5
  misc_feature: Homolog of GI Number: 34904202 NR Desc: P0492F05.25
  misc_feature: Homolog of GI Number: 56381963 NR Desc: At3g61560
  misc_feature: Homolog of GI Number: 52076447 NR Desc: putative 24 kDa seed maturation protein
  misc_feature: Homolog of GI Number: 38049088 NR Desc: TPA: RTN
  misc_feature: Useful for sterility
MSERSESATEKIMSSIMDTIADNLPKQKFGKFDPGSVSDKVKNKLFGRQKTLHGVLGGGKPADVLLWRNKKISSSVLALATAIWVFFEWLDYHFLTIVSFALVLGMVVQFVWSNFSNMLSSGSRSQVPRVELPDELFVNIAVAIGAQVNKFLCFLQDVSCERNLKHFVVAIAGLWAAAVIGSWCNFLTVIYVGFVCVHTLPVLYEKYEDQVDDFLYSLLGLLRDQYQKLDHGVLSKIPKGNMKAKKNE

SEQ ID NO: 9105 - DNA, 892 bp, Zea mays
  misc_feature: Ceres CLONE ID no. 1486801
  misc_feature: Ceres CDNA ID no. 36593848
  CDS (88)..(666): REFERENCED BY SEQ ID NO: 9106
ggactcctcccaaaccctagcgccggcgcctccacttctctgctccctcgtctcctcgcgcgcagggcccggcgaaagggaagcaagatgtacaccgccaggaagaagatccagaaggacaagggcgtcgagccctccgagttcgaggacaccgttgcgcaggctttctttgacctggagaatggcaaccaggagctcaagagcgacctcaaggacctgtacatcaacactgcaatccagatggatgttgttggcaacaggaaggccgtggtgatccatgtgccgtaccgtctgcgcaagcccttcaggaagatccatgtcaggctcgtcagggagctggagaagaagtttagcggcaaggatgttgtctttgttgcaacaagaaggattgtgaggccacccaagaagggttctgctgttcagcgccctcgcaccaggaccctgacagctgttcatgatggtatcttggaggatgtcgtgtacccagctgagattgtggggaagcgtgtcagataccgtttggatggtgccaaggtcatcaagatctacttggacccaaaggagcgcaacaacactgaatacaagctggagaccttctctgcagtctaccgcaggctttgtgggaaagacgttgtctttgagtaccctgtgactgaaaccgcctgaagatccatgccttatgtctccattttcatatctttctgatccgaatgttttggtcgaggtctcagttagttgtgctatcaatgtattccagaaacatagttttgttaacgatctggggttaggaagtttgatggagattggcaatgaacgtgaacaatgttaaagttttgagcatttaaattatgaacctctgctcggttatcttgttgccaaaaaaaaaaaaaaa

SEQ ID NO: 9106 - protein, 192 aa, Zea mays; identical to SEQ ID NO: 5114
  misc_feature: Ceres CLONE ID no. 1486801
  misc_feature: Ceres CDNA ID no. 36593848
  misc_feature: The plant is abnormally large.
  misc_feature: The plant is abnormally small.
  misc_feature: Useful for making plants with modulated biomass
  misc_feature (4)..(191): Pfam Name: Ribosomal_S7e PFAM Desc: Ribosomal protein S7e
  misc_feature: Homolog of GI Number: 57471724 NR Desc: ribosomal protein S7
  misc_feature: Homolog of GI Number: 14787424 NR Desc: Ribosomal protein S7
  misc_feature: Homolog of GI Number: 4588906 NR Desc: ribosomal protein S7
  misc_feature: Homolog of GI Number: 22671664 NR Desc: ribosomal protein S7
  misc_feature: Homolog of GI Number: 55167942 NR Desc: putative 40S ribosomal protein S7
  misc_feature: Homolog of GI Number: 77999315 NR Desc: ribosomal protein S7
  misc_feature: Homolog of GI Number: 5532505 NR Desc: 40S ribosomal protein S7 homolog
  misc_feature: Homolog of GI Number: 4128206 NR Desc: 40S ribosome protein S7
  misc_feature: Homolog of GI Number: 21555683 NR Desc: 40S ribosomal protein S7 homolog
  misc_feature: Homolog of GI Number: 6957719 NR Desc: putative 40S ribosomal protein

SEQ ID NO: 9107 - DNA, 638 bp, Zea mays
  misc_feature: Ceres CLONE ID no. 1486885
  misc_feature: Ceres CDNA ID no. 36593850
  CDS (167)..(379): REFERENCED BY SEQ ID NO: 9108
gattccggttccgggtaggggaggaaggtaagcgaagaagcatccggactctctcgctcgagggtagggcagggcagggcagggcaggcggcgatccgaatccaatcgccggagggaggaagccaccggtggccgcagtgagggcggcggaggtagaggcaaagggatgacgcgcgggaagcagaagatcgacgcgcagcggcgtaacgcggagcgaaaccagaaatccaaggggtctcagctcgaggcccgcgccgtcggcctcaagatcgtctgctccatctgcaaggtacaattggcaaatgaaaaacagctgaccgatcactatggatcaaagcatccaaaggagaaacctccgagcacatcgagcaccgaataaccatggctggtcgtgacgcagaaatatagatcctgcttggctggtttgaggatctttaagtccgtctgatccatgccttggacctcaacgtcagttatatactctctagtgtgttcatttcctcttgtttcaggtattgtgttgtcgtgctgccaatgtgtctccaaactgtatgtggtcaccatggcattgggatgatgcgaaaaaattatgagcgtatccaatgtttgtgtggcttacaagaaaaaaaaaaaaaaaa

SEQ ID NO: 9108 - protein, 70 aa, Zea mays; identical to SEQ ID NO: 896
  misc_feature: Ceres CLONE ID no. 1486885
  misc_feature: Ceres CDNA ID no. 36593850
  misc_feature: Homolog of GI Number: 49256088 NR Desc: MGC81992 protein
  misc_feature: Homolog of GI Number: 37681863 NR Desc: HSPC038 protein
  misc_feature: Homolog of GI Number: 62857829 NR Desc: LOC549498
  misc_feature: Homolog of GI Number: 73974291 NR Desc:  similar to HSPC038 protein
  misc_feature: Homolog of GI Number: 55250861 NR Desc: RIKEN cDNA 3110006P09

SEQ ID NO: 9109 - DNA, 595 bp, Zea mays
  misc_feature: Ceres CLONE ID no. 1487099
  misc_feature: Ceres CDNA ID no. 40041436
  CDS (258)..(410): REFERENCED BY SEQ ID NO: 9110
ttttaaaaagagagaaatgtttaaacaaagagatagagagagaagaaacctgtgattgaataaggcgccccgatgaaacaaaaaggtcacgtattgcaccgttgaccataagaggaggctcaccagggggcaacgatgaggacaaggctgagaaaaaaccatctccgacaacttccacgtccacaagattcccaggttgattcatctccaccttcggtaaagcaacgtacatgattcctgcgacgtgctggatctgaatgtttcctgcggaatcagcggcgttgcataaaatccatgagttggaccataaaggagtcgacatcatgaacgaagcctgtaactcgctcgtctcgaaccggcactcttccatggagacgtgttctgtatttttaaaatttactagcttttaaagagatttatgaaaatttctcatcttttcgtgcgtcttttctctgtctcttcgtggtgcttgtctttttgatgagtcgtcgtcttccttagtctcatttctttatgaatattaatttgataatattttctggtttttatatttaaaaaagttaataaaataatgattccaaaaaaaaaaaaaaaa

SEQ ID NO: 9110 - protein, 50 aa, Zea mays
  misc_feature: Ceres CLONE ID no. 1487099
  misc_feature: Ceres CDNA ID no. 40041436
MFPAESAALHKIHELDHKGVDIMNEACNSLVSNRHSSMETCSVFLKFTSF

SEQ ID NO: 9111 - DNA, 679 bp, Zea mays
  misc_feature: Ceres CLONE ID no. 1487100
  misc_feature: Ceres CDNA ID no. 29191785
  CDS (47)..(502): REFERENCED BY SEQ ID NO: 9112
agcgcagtcgcagccggacgaagaacagacagcaacaaacgtcggcatggggcgactccactccaaaggtaagggaatctcagcatctgctttgccgtacaagcgttcacccccgagctggctcaagacaacctccgaggatgttgatgaatccatttgcaagtttgcgaagaagggtttgactccgtctcagattggtgtgattcttcgtgactctcacggtatccctcaggtgaagagtgttaccgggaacaagattctgagaatcttgaaagctcatggtcttgctcctgagatccctgaggatctgtaccacctgatcaagaaagcagttgctatccgcaagcaccttgagaggaacaggaaggacaaggactccaagttcaggttgattcttgttgagagcagaatccaccgtcttgctcgttactacaagaagaccaagaagctccctcccgtctggaagtacgagtcaactaccgcaagcactcttgtggcttgagtaatcatagagcttgtcaaagtccttcatgaactacaatttgattgctgcatttgcaactctatttctatgacgatggattttgtatctgttttttttatggtttttgttgggtttacaacttaacaatgcgaattttgaattgaatgaatacttttgataaaaaaaaaaaaaaaa

SEQ ID NO: 9112 - protein, 151 aa, Zea mays
  misc_feature: Ceres CLONE ID no. 1487100
  misc_feature: Ceres CDNA ID no. 29191785
  misc_feature (1)..(60): Pfam Name: Ribosomal_S13_N PFAM Desc: Ribosomal S13/S15 N
  misc_feature (65)..(151): Pfam Name: Ribosomal_S15 PFAM Desc: Ribosomal protein S15
  misc_feature: Homolog of GI Number: 30102866 NR Desc: At4g00100
  misc_feature: Homolog of GI Number: 19699318 NR Desc: AT3g60770/T4C21_180
  misc_feature: Homolog of GI Number: 15450535 NR Desc: AT3g60770/T4C21_180
  misc_feature: Homolog of GI Number: 8131699 NR Desc: cytoplasmic ribosomal protein S13
  misc_feature: Homolog of GI Number: 7267097 NR Desc: putative ribosomal protein S13
  misc_feature: Homolog of GI Number: 7329687 NR Desc: ribosomal protein S13
  misc_feature: Homolog of GI Number: 48209913 NR Desc: cytoplasmic ribosomal protein S13
  misc_feature: Homolog of GI Number: 68449762 NR Desc: cytoplasmic ribosomal protein S13
  misc_feature: Homolog of GI Number: 44662862 NR Desc: ribosomal protein S13
  misc_feature: Homolog of GI Number: 396639 NR Desc: ribosomal protein S13
  misc_feature: Useful for making bigger plants
  misc_feature: Useful for making ornamental plants with modified flowers
  misc_feature: Useful for sterility
MGRLHSKGKGISASALPYKRSPPSWLKTTSEDVDESICKFAKKGLTPSQIGVILRDSHGIPQVKSVTGNKILRILKAHGLAPEIPEDLYHLIKKAVAIRKHLERNRKDKDSKFRLILVESRIHRLARYYKKTKKLPPVWKYESTTASTLVA

SEQ ID NO: 9113 - DNA, 734 bp, Zea mays
  misc_feature: Ceres CLONE ID no. 1487107
  misc_feature: Ceres CDNA ID no. 25446145
  CDS (3)..(533): REFERENCED BY SEQ ID NO: 9114
tcccatctccgccgccgccgccccttcctcctccagagtcgcgcctcttcctcctcctctccagtcgcgcggtcgcgccgtcccattgcgccccttcctcctcgcagtcacggccgcgcggcacgtgctccgcttcgccgtcgccgtcgccgttgccgttgccgtcgccgccgccaagtaaagagagactgggaagcgcagtcgacgggggcgtggtgaggagggagttactcggaggaaggaaggaaggaagggggactgcggccggcggcggactaccatgtcgtctctgggaacttccaaggggatcctggagatcgccaagttcggcgtctacgtctccgtgcccgtcgcactcacctacctcgtcgccaccgactccaagaccctcaagaagctcatgggcctccgcccttacgtggtttacccgcctgaaggcccacgccctccaccgccagaagaactgcgcgaaagggcacgggagattgcccggaagaggcagcggagctgaatgtatgctgtgggttctctaggtgcctgtgtgtgtggctgtgtctatggaacagcacggacgacgaatcttcccatctcacgagaacagccctggtctttagcatcctttcactgctgctgttgttacaataataataataatatactgagaagcgagaatcggctagatataatataatcccgtgtattttctccttgggagccgaaaaaaaaaaaaaaaa

SEQ ID NO: 9114 - protein, 76 aa, Zea mays
  misc_feature: Ceres CLONE ID no. 1487107
  misc_feature: Ceres CDNA ID no. 25446145
MSSLGTSKGILEIAKFGVYVSVPVALTYLVATDSKTLKKLMGLRPYVVYPPEGPRPPPPEELRERAREIARKRQRS
